United States Patent Application Publication US 2026/0327580 A1 - sequence listing, part 2

SEQ ID NO: 1479 - DNA, 2529 bp, synthetic construct
  misc_feature 1..2529: note = Variant of DNA polymerase I from Thermus sp. strain 2.9
  source 1..2529: mol_type = other DNA
atgcaccatcatcatcatcatggcggtagcggcatgttaccgttgttcgaacctaaaggtcgcgtgcttctggttgatggccatcatctcgcgtatcgtaacttctttgccctgaaaggattaaccaccagccgtggcgagccggtacagggtgtctacggctttgcaaagtcgctcctgaaagctctgaaagaagacggtgatgtggtgattgttgtctttgatgcgaaagcgccaagttttcgccacgaagcgtacgaagcttacaaagccgggcgtgctccaacgccggaagactttcctcgccaattggcgcttatgaaggaattagtggatttgcttggcctcgaacgcttggaagttcccggtttcgaggcagacgacgtattagcgactctcgcaaagaaagccgaacgtgagggctatgaagtccagatcttgacagcagatcgcgatcttttccagcttttatctccgcgcatctcggtgttacacccggaagggcatcgtatcaccccggaatggctctgggagaaatatggtttgcgtcccgaacaatgggtggattttcgcgccttagcaggcgatccgagcgacaatattccgggagttaaaggtatcggcgagaagacggcgctcaagctccttaaagaatgggggtcgttggagaacttgcttaagaatttagatcaggtcaaaccagagtcagtgcgtgagaagattcttgcacacctcgaagacctcaaattaagcctggaattgtcccgtgtacgcaccgatttgccgctcgaagttgatttccgtcgtcgccgcgaacctgactgggagggtcttaaagcgtttttagagcgtcttgaatttggttcgctcttgcatgaattcggccttttagaaagcccgttaccagccgaagaagcaccttggccaccgcccgaaggcgcgtttttaggttaccgtttgagtcgcccggaaccgatgtgggccgaattactggctcttgcagcgtctgcccaggagcgtgtgtatcgcgcggaagaccctcatggtgcgctcaagggcctcaaagaagtccgtggactccttgccaaagacttagctgttgttgcattgcgcgaaggtcttgatttacctccgactgatgatccaatgcttcttgcgtacctcttggacccgtcaaacacgacgcccgaaggcgtagcccgtcgttacggcggcgagtggaccgaagatgcagctgagcgcgcgttattggccgaacgtttgcacgccaatttattaggacgtttgcaaggcgaggaacgtctcctctggctttacgaagaagtggagaaaccattgagtcgcgtgctcgcgcatatggaagctaccggtgtcaaattagacgtggcgtatttggaggctctcagccttgaagttgctgccgaaatgcgccgcttggaggaagaagtattccgtttagcaggccactcctttaaccttaattctcgcgatcagttagaacgtgtgttgttcgatgagcttggtctccctcctatcggcaagacagagaagaccggtaaacgtagcacttcagcggcggttttagaagctcttcgcgaagtccatcccattgtggacaagatcttgcagtaccgcgaactcgcgaaattgaaaggcacctatattgaccctcttccggcattagtccacccgaaaacgggacgcctccatacccgcttcaaccaaacagccacggcgaccggtcgtttgtcctcctctgatccaaaccttcagaatattccagtacgtaccccattgggccagaagatccgccgcgcgtttgtagctgaggagggttggcgtttagtggccctcgattatagccaaattgaattacgtgtccttgcccatctttctggcgatgagaacctcatccgcgtgtttcaggaaggcaaagacattcacactcaaacggcaagctggatgtttggattatcagcagaagcgatcgatcctttgatgcgtcgtgcagcgaagaccattaatttcggtgttctctacggtatgagtgcccatcgtttgtcgcaggaattaggcattccctatgaagaagctgtcgcgttcattcagaagtactttcaaagctatcccaaagttaaagcatggatcgagaagactctcgaagaaggccgcacacgtggttacgtagagaccttatttggacgtcgccgctatgttcccgatttaaacgctcgcgtgaaatctgtccgtgaagccgccgaacgcatggcgttcaacatgcctgtacagggcacggcagctgacctcatgaaacttgcaatggtgcgcctttttccacaattgcgtgaagttggtgcccgcatgctcttgcaggtccacgatgaactcttgttagaagcgccaaaagagcgtgcggaagaggtggcagccctcgcgaaagaggttatggaaggcgtgtggcccttagcggtgcctcttgaagtcgaagttggtattggcgaggattggttggctgccaaaggataatga

SEQ ID NO: 1480 - protein, 841 aa, synthetic construct
  REGION 1..841: note = Variant of DNA polymerase I from Thermus sp. strain 2.9
MHHHHHHGGSGMLPLFEPKGRVLLVDGHHLAYRNFFALKGLTTSRGEPVQGVYGFAKSLLKALKEDGDVVIVVFDAKAPSFRHEAYEAYKAGRAPTPEDFPRQLALMKELVDLLGLERLEVPGFEADDVLATLAKKAEREGYEVQILTADRDLFQLLSPRISVLHPEGHRITPEWLWEKYGLRPEQWVDFRALAGDPSDNIPGVKGIGEKTALKLLKEWGSLENLLKNLDQVKPESVREKILAHLEDLKLSLELSRVRTDLPLEVDFRRRREPDWEGLKAFLERLEFGSLLHEFGLLESPLPAEEAPWPPPEGAFLGYRLSRPEPMWAELLALAASAQERVYRAEDPHGALKGLKEVRGLLAKDLAVVALREGLDLPPTDDPMLLAYLLDPSNTTPEGVARRYGGEWTEDAAERALLAERLHANLLGRLQGEERLLWLYEEVEKPLSRVLAHMEATGVKLDVAYLEALSLEVAAEMRRLEEEVFRLAGHSFNLNSRDQLERVLFDELGLPPIGKTEKTGKRSTSAAVLEALREVHPIVDKILQYRELAKLKGTYIDPLPALVHPKTGRLHTRFNQTATATGRLSSSDPNLQNIPVRTPLGQKIRRAFVAEEGWRLVALDYSQIELRVLAHLSGDENLIRVFQEGKDIHTQTASWMFGLSAEAIDPLMRRAAKTINFGVLYGMSAHRLSQELGIPYEEAVAFIQKYFQSYPKVKAWIEKTLEEGRTRGYVETLFGRRRYVPDLNARVKSVREAAERMAFNMPVQGTAADLMKLAMVRLFPQLREVGARMLLQVHDELLLEAPKERAEEVAALAKEVMEGVWPLAVPLEVEVGIGEDWLAAKG

SEQ ID NO: 1481 - DNA, 2529 bp, synthetic construct
  misc_feature 1..2529: note = Variant of DNA polymerase I from Thermus sp. strain 2.9
  source 1..2529: mol_type = other DNA
atgcaccatcatcatcatcatggcggtagcggcatgttaccgttgttcgaacctaaaggtcgcgtgcttctggttgatggccatcatctcgcgtatcgtaacttctttgccctgaaaggattaaccaccagccgtggcgagccggtacagggtgtctacggctttgcaaagtcgctcctgaaagctctgaaagaagacggtgatgtggtgattgttgtctttgatgcgaaagcgccaagttttcgccacgaagcgtacgaagcttacaaagccgggcgtgctccaacgccggaagactttcctcgccaattggcgcttatgaaggaattagtggatttgcttggcctcgaacgcttggaagttcccggtttcgaggcagacgacgtattagcgactctcgcaaagaaagccgaacgtgagggctatgaagtccagatcttgacagcagatcgcgatcttttccagcttttatctccgcgcatctcggtgttacacccggaagggcatcgtatcaccccggaatggctctgggagaaatatggtttgcgtcccgaacaatgggtggattttcgcgccttagcaggcgatccgagcgacaatattccgggagttaaaggtatcggcgagaagacggcgctcaagctccttaaagaatgggggtcgttggagaacttgcttaagaatttagatcaggtcaaaccagagtcagtgcgtgagaagattcttgcacacctcgaagacctcaaattaagccgcgaattgtcccgtgtacgcaccgatttgccgctcgaagttgatttccgtggccgccgcgaacctgactgggagggtcttaaagcgtttttagagcgtcttgaatttggttcgctcttgcatgaattcggccttttagaaagcccgttaccagccgaagaagcaccttggccaccgcccgaaggcgcgtttttaggttaccgtttgagtcgcccggaaccgatgtgggccgaattatcggctcttgcagcgtctgcccaggggcgtgtgtatcgcgcggaagaccctcatggtgcgctccgtggcctcaaagaagtccgtggactccttgccaaagacttagctgttgttgcattgcgcgaaggtcttgatttacctccgactgatgatccaatgcttcttgcgtacctcttggacccgtcaaacacgacgcccgaaggcgtagcccgtcgttacggcggcgagtggaccgaagatgcaggtgagcgcgcgttattggccgaacgtttgcacgccaatttattaggacgtttgcaaggcgaggaacgtctcctctggctttacgaagaagtggagaaaccattgagtcgcgtgctcgcgcatatggaagctaccggtgtcaaattagacgtggcgtatttggaggctctcagccttgaagttgctgccgaaatgcgccgcttggaggaagaagtattccgtttagcaggccactcctttaaccttaattctcgcgatcagttagaacgtgtgttgttcgataaccttggtctccctcctatcggcaagacagagaagaccggtaaacgtagcacttcagcggcggttttagaagctcttcgcgaagtccatcccattgtggacaagatcttgcagtaccgcgaactcgcgaaattgaaaggcacctatattgaccctcttccggcattagtccacccgaaaacgggacgcctccatacccgcttcaaccaaacagccacggcgaccggtcgtttgtcctcctctgatccaaaccttcagaatattccagtacgtaccccattgggccagaagatccgccgcgcgtttgtagctgaggagggttggcgtttagtggccctcgattatagccaaattgaattacgtgtccttgcccatctttctggcgatgagaacctcatccgcgtgtttcaggaaggcaaagacattcacactcaaacggcaagctggatgtttggattatcagcagaagcgatcgatcctttgatgcgtcgtgcagcgaagaccgttaatttcggtgttctctacggtatgagtgcccatcgtttgtcgcaggaattaggcattccctatgaagaagctgtcgcgttcattcagcgctactttcaaagctatcccaaagttaaagcatggatcgagaagactctcgaagaaggccgcacacgtggttacgtagagaccttatttggacgtcgccgctatgttcccgatttaaacgctcgcgtgaaatctgtccgtgaagccgccgaacgcatggcgttcaacatgcctgtacagggcacggcagctgacctcatgaaacttgcaatggtgcgcctttttccacaattgcgtgaagttggtgcccgcatgctcttgcaggtccacgatgaactcttgttagaagcgccaaaagagcgtgcggaagaggtggcagccctcgcgaaagaggttatggaaggcgtgtggcccttagcggtgcctcttgaagtcgaagttggtattggcgaggattggttggctgccaaaggataatga

SEQ ID NO: 1482 - protein, 841 aa, synthetic construct
  REGION 1..841: note = Variant of DNA polymerase I from Thermus sp. strain 2.9
MHHHHHHGGSGMLPLFEPKGRVLLVDGHHLAYRNFFALKGLTTSRGEPVQGVYGFAKSLLKALKEDGDVVIVVFDAKAPSFRHEAYEAYKAGRAPTPEDFPRQLALMKELVDLLGLERLEVPGFEADDVLATLAKKAEREGYEVQILTADRDLFQLLSPRISVLHPEGHRITPEWLWEKYGLRPEQWVDFRALAGDPSDNIPGVKGIGEKTALKLLKEWGSLENLLKNLDQVKPESVREKILAHLEDLKLSRELSRVRTDLPLEVDFRGRREPDWEGLKAFLERLEFGSLLHEFGLLESPLPAEEAPWPPPEGAFLGYRLSRPEPMWAELSALAASAQGRVYRAEDPHGALRGLKEVRGLLAKDLAVVALREGLDLPPTDDPMLLAYLLDPSNTTPEGVARRYGGEWTEDAGERALLAERLHANLLGRLQGEERLLWLYEEVEKPLSRVLAHMEATGVKLDVAYLEALSLEVAAEMRRLEEEVFRLAGHSFNLNSRDQLERVLFDNLGLPPIGKTEKTGKRSTSAAVLEALREVHPIVDKILQYRELAKLKGTYIDPLPALVHPKTGRLHTRFNQTATATGRLSSSDPNLQNIPVRTPLGQKIRRAFVAEEGWRLVALDYSQIELRVLAHLSGDENLIRVFQEGKDIHTQTASWMFGLSAEAIDPLMRRAAKTVNFGVLYGMSAHRLSQELGIPYEEAVAFIQRYFQSYPKVKAWIEKTLEEGRTRGYVETLFGRRRYVPDLNARVKSVREAAERMAFNMPVQGTAADLMKLAMVRLFPQLREVGARMLLQVHDELLLEAPKERAEEVAALAKEVMEGVWPLAVPLEVEVGIGEDWLAAKG

SEQ ID NO: 1483 - DNA, 2529 bp, synthetic construct
  misc_feature 1..2529: note = Variant of DNA polymerase I from Thermus sp. strain 2.9
  source 1..2529: mol_type = other DNA
atgcaccatcatcatcatcatggcggtagcggcatgttaccgttgttcgaacctaaaggtcgcgtgcttctggttgatggccatcatctcgcgtatcgtaacttctttgccctgaaaggattaaccaccagccgtggcgagccggtacagggtgtctacggctttgcaaagtcgctcctgaaagctctgaaagaagacggtgatgtggtgattgttgtctttgatgcgaaagcgccaagttttcgccacgaagcgtacgaagcttacaaagccgggcgtgctccaacgccggaagactttcctcgccaattggcgcttatgaaggaattagtggatttgcttggcctcgaacgcttggaagttcccggtttcgaggcagacgacgtattagcgactctcgcaaagaaagccgaacgtgagggctatgaagtccagatcttgacagcagatcgcgatcttttccagcttttatctccgcgcatctcggtgttacacccggaagggcatcgtatcaccccggaatggctctgggagaaatatggtttgcgtcccgaacaatgggtggattttcgcgccttagcaggcgatccgagcgacaatattccgggagttaaaggtatcggcgagaagacggcgctcaagctccttaaagaatgggggtcgttggagaacttgcttaagaatttagatcaggtcaaaccagagtcagtgcgtgagaagattcttgcacacctcgaagacctcaaattaagccgcgaattgtcccgtgtacgcaccgatttgccgctcgaagttgatttccgtggccgccgcgaacctgactgggagggtcttaaagcgtttttagagcgtcttgaatttggttcgctcttgcatgaattcggccttttagaaagcccgttaccagccgaagaagcaccttggccaccgcccgaaggcgcgtttttaggttaccgtttgagtcgcccggaaccgatgtgggccgaattattggctcttgcagcgtctgcccagggacgtgtgtatcgcgcggaagaccctcatggtgcgctccgcggcctcaaagaagtccgtggactccttgccaaagacttagctgttgttgcattgcgcgaaggtcttgatttacctccgactgatgatccaatgcttcttgcgtacctcttggacccgtcaaacacgacgcccgaaggcgtagcccgtcgttacggcggcgagtggaccgaagatgcaggcgagcgcgcgttattggccgaacgtttgcacgccaatttattaggacgtttgcaaggcgaggaacgtctcctctggctttacgaagaagtggagaaaccattgagtcgcgtgctcgcgcatatggaagctaccggtgtcaaattagacgtggcgtatttggaggcactcagccttgaagttgctgccgaaatgcgccgcttggaggaagaagtattcactttagcaggccactcctttaaccttaattctcgcgatcagttagaacgtgtgttgttcgatgaacttggtctccctcctatcggcaagacagagaagaccggtaaacgtagcacttcagcggcggttttagaagctcttcgcgaagtccatcccattgtggacaagatcttgcagtaccgcgaactcgcgaaattgaaaggcacctatattgaccctcttccggcattagtccacccgaaaacgggacgcctccatacccgcttcaaccaaacagccacggcgaccggtcgtttgtcctcctctgatccaaaccttcagaatattccagtacgtaccccattgggccagaagatccgccgcgcgtttgtagctgaggagggttggcgtttagtggccctcgattatagccaaattgaattacgtgtccttgcccatctttctggcgatgagaacctcatccgcgtgtttcaggaaggcaaagacattcacactcaaacggcaagctggatgtttggattatcagctgaagcgatcgatcctttgatgcgtcgtgcagcgaagaccatcaatttcggtgttctctacggtatgagtgcccatcgtttgtcgcaggaattaggcattccctatgaagaagctgcggcgttcattcagcgctactttcaaagctatcccaaagttaaagcatggatcgagaagactctcgaagaaggccgcacacgtggttacgtagagaccttatttggacgtcgccgctatgttcccgatttaaacgctcgcgtgaaatctgtccgtgaagccgccgaacgcatggcgttcaacatgcctgtacagggcacggcagctgacctcatgaaacttgcaatggtgcgcctttttccacaattgcgtgaagttggtgcccgcatgctcttgcaggtccacgatgaactcttgttagaagcgccaaaagagcgtgcggaagaggtggcagccctcgcgaaagaggttatggaaggcgtgtggcccttagcggtgcctcttgaagtcgaagttggtattggcgaggattggttggctgccaaaggataatga

SEQ ID NO: 1484 - protein, 841 aa, synthetic construct
  REGION 1..841: note = Variant of DNA polymerase I from Thermus sp. strain 2.9
MHHHHHHGGSGMLPLFEPKGRVLLVDGHHLAYRNFFALKGLTTSRGEPVQGVYGFAKSLLKALKEDGDVVIVVFDAKAPSFRHEAYEAYKAGRAPTPEDFPRQLALMKELVDLLGLERLEVPGFEADDVLATLAKKAEREGYEVQILTADRDLFQLLSPRISVLHPEGHRITPEWLWEKYGLRPEQWVDFRALAGDPSDNIPGVKGIGEKTALKLLKEWGSLENLLKNLDQVKPESVREKILAHLEDLKLSRELSRVRTDLPLEVDFRGRREPDWEGLKAFLERLEFGSLLHEFGLLESPLPAEEAPWPPPEGAFLGYRLSRPEPMWAELLALAASAQGRVYRAEDPHGALRGLKEVRGLLAKDLAVVALREGLDLPPTDDPMLLAYLLDPSNTTPEGVARRYGGEWTEDAGERALLAERLHANLLGRLQGEERLLWLYEEVEKPLSRVLAHMEATGVKLDVAYLEALSLEVAAEMRRLEEEVFTLAGHSFNLNSRDQLERVLFDELGLPPIGKTEKTGKRSTSAAVLEALREVHPIVDKILQYRELAKLKGTYIDPLPALVHPKTGRLHTRFNQTATATGRLSSSDPNLQNIPVRTPLGQKIRRAFVAEEGWRLVALDYSQIELRVLAHLSGDENLIRVFQEGKDIHTQTASWMFGLSAEAIDPLMRRAAKTINFGVLYGMSAHRLSQELGIPYEEAAAFIQRYFQSYPKVKAWIEKTLEEGRTRGYVETLFGRRRYVPDLNARVKSVREAAERMAFNMPVQGTAADLMKLAMVRLFPQLREVGARMLLQVHDELLLEAPKERAEEVAALAKEVMEGVWPLAVPLEVEVGIGEDWLAAKG

SEQ ID NO: 1485 - DNA, 2529 bp, synthetic construct
  misc_feature 1..2529: note = Variant of DNA polymerase I from Thermus sp. strain 2.9
  source 1..2529: mol_type = other DNA
atgcaccatcatcatcatcatggcggtagcggcatgttaccgttgttcgaacctgcgggtcgcgtgcttctggttgatggccatcatctcgcgtatcgtaacttctttgccctgaaaggattaaccaccagccgtggcgagccggtacagggtgtctacggctttgcaaagtcgctcctgaaagctctgaaagaagacggtgatgtggtgattgttgtctttgatgcgaaagcgccaagttttcgccacgaagcgtacgaagcttacaaagccgggcgtgctccaacgccggaagactttcctcgccaattggcgcttatgaaggaattagtggatttgcttggcctcgaacgcttggaagttcccggtttcgaggcagacgacgtattagcgactctcgcaaagaaagccgaacgtgagggctatgaagtccagatcttgacagcagatcgcgatcttttccagcttttatctccgcgcatctcggtgttacacccggaagggcatcgtatcaccccggaatggctctgggagaaatatggtttgcgtcccgaacaatgggtggattttcgcgccttagcaggcgatccgagcgacaatattccgggagttaaaggtatcggcgagaagacggcgctcaagctccttaaagaatgggggtcgttggagaacttgcttaagaatttagatcaggtcaaaccagagtcagtgcgtgagaagattcttgcacacctcgaagacctcaaattaagccgcgaattgtcccgtgtacgcaccgatttgccgctcgaagttgatttccgtggccgccgcgaacctgactgggagggtcttaaagcgtttttagagcgtcttgaatttggttcgctcttgcatgaattcggccttttagaaagcccgttaccagccgaagaagcaccttggccaccgcccgaaggcgcgtttttaggttaccgtttgagtcgcccggaaccgatgtgggccgaattattggctcttgcagcgtctgcccagggacgtgtgtatcgcgcggaagaccctcatggtgcgctccgcggcctcaaagaagtccgtggactccttgccaaagacttagctgttgttgcattgcgcgaaggtcttgatttacctccgactgatgatccaatgcttcttgcgtacctcttggacccgtcaaacacgacgcccgaaggcgtagcccgtcgttacggcggcgagtggaccgaagatgcaggcgagcgcgcgttattggccgaacgtttgcacgccaatttattaggacgtttgcaaggcgaggaacgtctcctctggctttacgaagaagtggagaaaccattgagtcgcgtgctcgcgcatatggaagctaccggtgtcaaattagacgtggcgtatttggaggcactcagccttgaagttgctgccgaaatgcgccgcttggaggaagaagtattccgtttagcaggccactcctttaaccttaattctcgcgatcagttagaacgtgtgttgttcgatgaacttggtctccctcctatcggcaagacagagaagaccggtaaacgtagcacttcagcggcggttttagaagctcttcgcgaagtccatcccattgtggacaagatcttgcagtaccgcgaactcgcgaaattgaaaggcacctatattgaccctcttccggcattagtccacccgaaaacgggacgcctccatacccgcttcaaccaaacagccacggcgaccggtcgtttgtcctcctctgatccaaaccttcagaatattccagtacgtaccccattgggccagaagatccgccgcgcgtttgtagctgaggagggttggcgtttagtggccctcgattatagccaaattgaattacgtgtccttgcccatctttctggcgatgagaacctcatccgcgtgtttcaggaaggcaaagacattcacactcaaacggcaagctggatgtttggattatcagctgaagcgatcgatcctttgatgcgtcgtgcagcgaagaccatcaatttcggtgttctctacggtatgagtgcccatcgtttgtcgcaggaattaggcattccctatgaagaagctgcggcgttcattcagcgctactttcaaagctatcccaaagttaaagcatggatcgagaagactctcgaagaaggccgcacacgtggttacgtagagaccttatttggacgtcgccgctatgttcccgatttaaacgctcgcgtgaaatctgtccgtgaagccgccgaacgcatggcgttcaacatgcctgtacagggcacggcagctgacctcatgaaacttgcaatggtgcgcctttttccacaattgcgtgaagttggtgcccgcatgctcttgcaggtccacgatgaactcttgttagaagcgccaaaagagcgtgcggaagaggtggcagccctcgcgaaagaggttatggaaggcgtgtggcccttagcggtgcctcttgaagtcgaagttggtattggcgaggattggttggctgccaaaggataatga

SEQ ID NO: 1486 - protein, 841 aa, synthetic construct
  REGION 1..841: note = Variant of DNA polymerase I from Thermus sp. strain 2.9
MHHHHHHGGSGMLPLFEPAGRVLLVDGHHLAYRNFFALKGLTTSRGEPVQGVYGFAKSLLKALKEDGDVVIVVFDAKAPSFRHEAYEAYKAGRAPTPEDFPRQLALMKELVDLLGLERLEVPGFEADDVLATLAKKAEREGYEVQILTADRDLFQLLSPRISVLHPEGHRITPEWLWEKYGLRPEQWVDFRALAGDPSDNIPGVKGIGEKTALKLLKEWGSLENLLKNLDQVKPESVREKILAHLEDLKLSRELSRVRTDLPLEVDFRGRREPDWEGLKAFLERLEFGSLLHEFGLLESPLPAEEAPWPPPEGAFLGYRLSRPEPMWAELLALAASAQGRVYRAEDPHGALRGLKEVRGLLAKDLAVVALREGLDLPPTDDPMLLAYLLDPSNTTPEGVARRYGGEWTEDAGERALLAERLHANLLGRLQGEERLLWLYEEVEKPLSRVLAHMEATGVKLDVAYLEALSLEVAAEMRRLEEEVFRLAGHSFNLNSRDQLERVLFDELGLPPIGKTEKTGKRSTSAAVLEALREVHPIVDKILQYRELAKLKGTYIDPLPALVHPKTGRLHTRFNQTATATGRLSSSDPNLQNIPVRTPLGQKIRRAFVAEEGWRLVALDYSQIELRVLAHLSGDENLIRVFQEGKDIHTQTASWMFGLSAEAIDPLMRRAAKTINFGVLYGMSAHRLSQELGIPYEEAAAFIQRYFQSYPKVKAWIEKTLEEGRTRGYVETLFGRRRYVPDLNARVKSVREAAERMAFNMPVQGTAADLMKLAMVRLFPQLREVGARMLLQVHDELLLEAPKERAEEVAALAKEVMEGVWPLAVPLEVEVGIGEDWLAAKG

SEQ ID NO: 1487 - DNA, 2529 bp, synthetic construct
  misc_feature 1..2529: note = Variant of DNA polymerase I from Thermus sp. strain 2.9
  source 1..2529: mol_type = other DNA
atgcaccatcatcatcatcatggcggtagcggcatgttaccgttgttcgaacctaaaggtcgcgtgcttctggttgatggccatcatctcgcgtatcgtaacttctttgccctgaaaggattaaccaccagccgtggcgagccggtacagggtgtctacggctttgcaaagtcgctcctgaaagctctgaaagaagacggtgatgtggtgattgttgtctttgatgcgaaagcgccaagttttcgccacgaagcgtacgaagcttacaaagccgggcgtgctccaacgccggaagactttcctcgccaattggcgcttatgaaggaattagtggatttgcttggcctcgaacgcttggaagttcccggtttcgaggcagacgacgtattagcgactctcgcaaagaaagccgaacgtgagggctatgaagtccagatcttgacagcagatcgcgatcttttccagcttttatctccgcgcatctcggtgttacacccggaagggcatcgtatcaccccggaatggctctgggagaaatatggtttgcgtcccgaacaatgggtggattttcgcgccttagcaggcgatccgagcgacaatattccgggagttaaaggtatcggcgagaagacggcgctcaagctccttaaagaatgggggtcgttggagaacttgcttaagaatttagatcaggtcaaaccagagtcagtgcgtgagaagattcttgcacacctcgaagacctcaaattaagcctggaattgtcccgtgtacgcaccgatttgccgctcgaagttgatttccgtggccgccgcgaacctgactgggagggtcttaaagcgtttttagagcgtcttgaatttggttcgctcttgcatgaattcggccttttagaaagcccgttaccagccgaagaagcaccttggccaccgcccgaaggcgcgtttttaggttaccgtttgagtcgcccggaaccgatgtgggccgaattattggctcttgcagcgtctgcccagggacgtgtgtatcgcgcggaagaccctcatggtgcgctccgcggcctcaaagaagtccgtggactccttgccaaagacttagctgttgttgcattgcgcgaaggtcttgatttacctccgactgatgatccaatgcttcttgcgtacctcttggacccgtcaaacacgacgcccgaaggcgtagcccgtcgttacggcggcgagtggaccgaagatgcagctaagcgcgcgttattggccgaacgtttgcacgccaatttattaggacgtttgcaaggcgaggaacgtctcctctggctttacgaagaagtggagaaaccattgagtcgcgtgctcgcgcatatggaagctaccggtgtcaaattagacgtggcgtatttggaggcactcagccttgaagttgctgccgaaatgcgccgcttggaggaagaagtattccgtttagcaggccactcctttaaccttaattctcgcgatcagttagaacgtgtgttgttcgatgaacttggtctccctcctatcggcaagacagagaagaccggtaaacgtagcacttcagcggcggttttagaagctcttcgcgaagtccatcccattgtggacaagatcttgcagtaccgcgaactcgcgaaattgaaaggcacctatattgaccctcttccggcattagtccacccgaaaacgggacgcctccatacccgcttcaaccaaacagccacggcgaccggtcgtttgtcctcctctgatccaaaccttcagaatattccagtacgtaccccattgggccagaagatccgccgcgcgtttgtagctgaggagggttggcgtttagtggccctcgattatagccaaattgaattacgtgtccttgcccatctttctggcgatgagaacctcatccgcgtgtttcaggaaggcaaagacattcacactcaaacggcaagctggatgtttggattatcagctgaagcgatcgatcctttgatgcgtcgtgcagcgaagaccatcaatttcggtgttctctacggtatgagtgcccatcgtttgtcgcaggaattaggcattccctatgaagaagctgcggcgttcattcagcgctactttcaaagctatcccaaagttaaagcatggatcgagaagactctcgaagaaggccgcacacgtggttacgtagagaccttatttggacgtcgccgctatgttcccgatttaaacgctcgcgtgaaatctgtccgtgaagccgccgaacgcatggcgttcaacatgcctgtacagggcacggcagctgacctcatgaaacttgcaatggtgcgcctttttccacaattgcgtgaagttggtgcccgcatgctcttgcaggtccacgatgaactcttgttagaagcgccaaaagagcgtgcggaagaggtggcagccctcgcgaaagaggttatggaaggcgtgtggcccttagcggtgcctcttgaagtcgaagttggtattggcgaggattggttggctgccaaaggataatga

SEQ ID NO: 1488 - protein, 841 aa, synthetic construct
  REGION 1..841: note = Variant of DNA polymerase I from Thermus sp. strain 2.9
MHHHHHHGGSGMLPLFEPKGRVLLVDGHHLAYRNFFALKGLTTSRGEPVQGVYGFAKSLLKALKEDGDVVIVVFDAKAPSFRHEAYEAYKAGRAPTPEDFPRQLALMKELVDLLGLERLEVPGFEADDVLATLAKKAEREGYEVQILTADRDLFQLLSPRISVLHPEGHRITPEWLWEKYGLRPEQWVDFRALAGDPSDNIPGVKGIGEKTALKLLKEWGSLENLLKNLDQVKPESVREKILAHLEDLKLSLELSRVRTDLPLEVDFRGRREPDWEGLKAFLERLEFGSLLHEFGLLESPLPAEEAPWPPPEGAFLGYRLSRPEPMWAELLALAASAQGRVYRAEDPHGALRGLKEVRGLLAKDLAVVALREGLDLPPTDDPMLLAYLLDPSNTTPEGVARRYGGEWTEDAAKRALLAERLHANLLGRLQGEERLLWLYEEVEKPLSRVLAHMEATGVKLDVAYLEALSLEVAAEMRRLEEEVFRLAGHSFNLNSRDQLERVLFDELGLPPIGKTEKTGKRSTSAAVLEALREVHPIVDKILQYRELAKLKGTYIDPLPALVHPKTGRLHTRFNQTATATGRLSSSDPNLQNIPVRTPLGQKIRRAFVAEEGWRLVALDYSQIELRVLAHLSGDENLIRVFQEGKDIHTQTASWMFGLSAEAIDPLMRRAAKTINFGVLYGMSAHRLSQELGIPYEEAAAFIQRYFQSYPKVKAWIEKTLEEGRTRGYVETLFGRRRYVPDLNARVKSVREAAERMAFNMPVQGTAADLMKLAMVRLFPQLREVGARMLLQVHDELLLEAPKERAEEVAALAKEVMEGVWPLAVPLEVEVGIGEDWLAAKG

SEQ ID NO: 1489 - DNA, 2529 bp, synthetic construct
  misc_feature 1..2529: note = Variant of DNA polymerase I from Thermus sp. strain 2.9
  source 1..2529: mol_type = other DNA
atgcaccatcatcatcatcatggcggtagcggcatgttaccgttgttcgaacctaaaggtcgcgtgcttctggttgatggccatcatctcgcgtatcgtaacttctttgccctgaaaggattaaccaccagccgtggcgagccggtacagggtgtctacggctttgcaaagtcgctcctgaaagctctgaaagaagacggtgatgtggtgattgttgtctttgatgcgaaagcgccaagttttcgccacgaagcgtacgaagcttacaaagccgggcgtgctccaacgccggaagactttcctcgccaattggcgcttatgaaggaattagtggatttgcttggcctcgaacgcttggaagttcccggtttcgaggcagacgacgtattagcgactctcgcaaagaaagccgaacgtgagggctatgaagtccagatcttgacagcagatcgcgatcttttccagcttttatctccgcgcatctcggtgttacacccggaagggcatcgtatcaccccggaatggctctgggagaaatatggtttgcgtcccgaacaatgggtggattttcgcgccttagcaggcgatccgagcgacaatattccgggagttaaaggtatcggcgagaagacggcgctcaagctccttaaagaatgggggtcgttggagaacttgcttaagaatttagatcaggtcaaaccagagtcagtgcgtgagaagattcttgcacacctcgaagacctcaaattaagccgcgaattgtcccgtgtacgcaccgatttgccgctcgaagttgatttccgtcgtcgccgcgaacctgactgggagggtcttaaagcgtttttagagcgtcttgaatttggttcgctcttgcatgaattcggccttttagaaagcccgttaccagccgaagaagcaccttggccaccgcccgaaggcgcgtttttaggttaccgtttgagtcgcccggaaccgatgtgggccgaattattggctcttgcagcgtctgcccaggggcgtgtgtatcgcgcggaagaccctcatggtgcgctccgcggcctcaaagaagtccgtggactccttgccaaagacttagctgttgttgcattgcgcgaaggtcttgatttacctccgactgatgatccaatgcttcttgcgtacctcttggacccgtcaaacacgacgcccgaaggcgtagcccgtcgttacggcggcgagtggaccgaagatgcaggcgagcgcgcgttattggccgaacgtttgcacgccaatttattaggacgtttgcaaggcgaggaacgtctcctctggctttacgaagaagtggagaaaccattgagtcgcgtgctcgcgcatatggaagctaccggtgtcaaattagacgtggcgtatttggaggcactcagccttgaagttgctgccgaaatgcgccgcttggaggaagaagtattccgtttagcaggccactcctttaaccttaattctcgcgatcagttagaacgtgtgttgttcgatgaacttggtctccctcctatcggcaagacagagaagaccggtaaacgtagcacttcagcggcggttttagaagctcttcgcgaagtccatcccattgtggacaagatcttgcagtaccgcgaactcgcgaaattgaaaggcacctatattgaccctcttccggcattagtccacccgaaaacgggacgcctccatacccgcttcaaccaaacagccacggcgaccggtcgtttgtcctcctctgatccaaaccttcagaatattccagtacgtaccccattgggccagaagatccgccgcgcgtttgtagctgaggagggttggcgtttagtggccctcgattatagccaaattgaattacgtgtccttgcccatctttctggcgatgagaacctcatccgcgtgtttcaggaaggcaaagacattcacactcaaacggcaagctggatgtttggattatcagcagaagcgatcgatcctttgatgcgtcgtgcagcgaagaccattaatttcggtgttctctacggtatgagtgcccatcgtttgtcgcaggaattaggcattccctatgaagaagctgccgcgttcattcagaagtactttcaaagctatcccaaagttaaagcatggatcgagaagactctcgaagaaggccgcacacgtggttacgtagagaccttatttggacgtcgccgctatgttcccgatttaaacgctcgcgtgaaatctgtccgtgaagccgccgaacgcatggcgttcaacatgcctgtacagggcacggcagctgacctcatgaaacttgcaatggtgcgcctttttccacaattgcgtgaagttggtgcccgcatgctcttgcaggtccacgatgaactcttgttagaagcgccaaaagagcgtgcggaagaggtggcagccctcgcgaaagaggttatggaaggcgtgtggcccttagcggtgcctcttgaagtcgaagttggtattggcgaggattggttggctgccaaaggataatga

SEQ ID NO: 1490 - protein, 841 aa, synthetic construct
  REGION 1..841: note = Variant of DNA polymerase I from Thermus sp. strain 2.9
MHHHHHHGGSGMLPLFEPKGRVLLVDGHHLAYRNFFALKGLTTSRGEPVQGVYGFAKSLLKALKEDGDVVIVVFDAKAPSFRHEAYEAYKAGRAPTPEDFPRQLALMKELVDLLGLERLEVPGFEADDVLATLAKKAEREGYEVQILTADRDLFQLLSPRISVLHPEGHRITPEWLWEKYGLRPEQWVDFRALAGDPSDNIPGVKGIGEKTALKLLKEWGSLENLLKNLDQVKPESVREKILAHLEDLKLSRELSRVRTDLPLEVDFRRRREPDWEGLKAFLERLEFGSLLHEFGLLESPLPAEEAPWPPPEGAFLGYRLSRPEPMWAELLALAASAQGRVYRAEDPHGALRGLKEVRGLLAKDLAVVALREGLDLPPTDDPMLLAYLLDPSNTTPEGVARRYGGEWTEDAGERALLAERLHANLLGRLQGEERLLWLYEEVEKPLSRVLAHMEATGVKLDVAYLEALSLEVAAEMRRLEEEVFRLAGHSFNLNSRDQLERVLFDELGLPPIGKTEKTGKRSTSAAVLEALREVHPIVDKILQYRELAKLKGTYIDPLPALVHPKTGRLHTRFNQTATATGRLSSSDPNLQNIPVRTPLGQKIRRAFVAEEGWRLVALDYSQIELRVLAHLSGDENLIRVFQEGKDIHTQTASWMFGLSAEAIDPLMRRAAKTINFGVLYGMSAHRLSQELGIPYEEAAAFIQKYFQSYPKVKAWIEKTLEEGRTRGYVETLFGRRRYVPDLNARVKSVREAAERMAFNMPVQGTAADLMKLAMVRLFPQLREVGARMLLQVHDELLLEAPKERAEEVAALAKEVMEGVWPLAVPLEVEVGIGEDWLAAKG

SEQ ID NO: 1491 - DNA, 2529 bp, synthetic construct
  misc_feature 1..2529: note = Variant of DNA polymerase I from Thermus sp. strain 2.9
  source 1..2529: mol_type = other DNA
atgcaccatcatcatcatcatggcggtagcggcatgttaccgttgttcgaacctaaaggtcgcgtgcttctggttgatggccatcatctcgcgtatcgtaacttctttgccctgaaaggattaaccaccagccgtggcgagccggtacagggtgtctacggctttgcaaagtcgctcctgaaagctctgaaagaagacggtgatgtggtgattgttgtctttgatgcgaaagcgccaagttttcgccacgaagcgtacgaagcttacaaagccgggcgtgctccaacgccggaagactttcctcgccaattggcgcttatgaaggaattagtggatttgcttggcctcgaacgcttggaagttcccggtttcgaggcagacgacgtattagcgactctcgcaaagaaagccgaacgtgagggctatgaagtccagatcttgacagcagatcgcgatcttttccagcttttatctccgcgcatctcggtgttacacccggaagggcatcgtatcaccccggaatggctctgggagaaatatggtttgcgtcccgaacaatgggtggattttcgcgccttagcaggcgatccgagcgacaatattccgggagttaaaggtatcggcgagaagacggcgctcaagctccttaaagaatgggggtcgttggagaacttgcttaagaatttagatcaggtcaaaccagagtcagtgcgtgagaagattcttgcacacctcgaagacctcaaattaagccgcgaattgtcccgtgtacgcaccgatttgccgctcgaagttgatttccgtggtcgccgcgaacctgactgggagggtcttaaagcgtttttagagcgtcttgaatttggttcgctcttgcatgaattcggccttttagaaagcccgttaccagccgaagaagcaccttggccaccgcccgaaggcgcgtttttaggttaccgtttgagtcgcccggaaccgatgtgggccgaattactggctcttgcagcgtctgcccaggggcgtgtgtatcgcgcggaagaccctcatggtgcgctccgcggcctcaaagaagtccgtggactccttgccaaagacttagctgttgttgcattgcgcgaaggtcttgatttacctccgactgatgatccaatgcttcttgcgtacctcttggacccgtcaaacacgacgcccgaaggcgtagcccgtcgttacggcggcgagtggaccgaagatgcaggcgagcgcgcgttattggccgaacgtttgcacgccaatttattaggacgtttgcaaggcgaggaacgtctcctctggctttacgaagaagtggagaaaccattgagtcgcgtgctcgcgcatatggaagctaccggtgtcaaattagacgtggcgtatttggaggcactcagccttgaagttgctgccgaaatgcgccgcttggaggaagaagtattccgtttagcaggccactcctttaaccttaattctcgcgatcagttagaacgtgtgttgttcgatgagcttggtctccctcctatcggcaagacagagaagaccggtaaacgtagcacttcagcggcggttttagaagctcttcgcgaagtccatcccattgtggacaagatcttgcagtaccgcgaactcgcgaaattgaaaggcacctatattgaccctcttccggcattagtccacccgaaaacgggacgcctccatacccgcttcaaccaaacagccacggcgaccggtcgtttgtcctcctctgatccaaaccttcagaatattccagtacgtaccccattgggccagaagatccgccgcgcgtttgtagctgaggagggttggcgtttagtggccctcgattatagccaaattgaattacgtgtccttgcccatctttctggcgatgagaacctcatccgcgtgtttcaggaaggcaaagacattcacactcaaacggcaagctggatgtttggattatcagcagaagcgatcgatcctttgatgcgtcgtgcagcgaagaccatcaatttcggtgttctctacggtatgagtgcccatcgtttgtcgcaggaattaggcattccctatgaagaagctgccgcgttcattcagaagtactttcaaagctatcccaaagttaaagcatggatcgagaagactctcgaagaaggccgcacacgtggttacgtagagaccttatttggacgtcgccgctatgttcccgatttaaacgctcgcgtgaaatctgtccgtgaagccgccgaacgcatggcgttcaacatgcctgtacagggcacggcagctgacctcatgaaacttgcaatggtgcgcctttttccacaattgcgtgaagttggtgcccgcatgctcttgcaggtccacgatgaactcttgttagaagcgccaaaagagcgtgcggaagaggtggcagccctcgcgaaagaggttatggaaggcgtgtggcccttagcggtgcctcttgaagtcgaagttggtattggcgaggattggttggctgccaaaggataatga

SEQ ID NO: 1492 - protein, 841 aa, synthetic construct
  REGION 1..841: note = Variant of DNA polymerase I from Thermus sp. strain 2.9
MHHHHHHGGSGMLPLFEPKGRVLLVDGHHLAYRNFFALKGLTTSRGEPVQGVYGFAKSLLKALKEDGDVVIVVFDAKAPSFRHEAYEAYKAGRAPTPEDFPRQLALMKELVDLLGLERLEVPGFEADDVLATLAKKAEREGYEVQILTADRDLFQLLSPRISVLHPEGHRITPEWLWEKYGLRPEQWVDFRALAGDPSDNIPGVKGIGEKTALKLLKEWGSLENLLKNLDQVKPESVREKILAHLEDLKLSRELSRVRTDLPLEVDFRGRREPDWEGLKAFLERLEFGSLLHEFGLLESPLPAEEAPWPPPEGAFLGYRLSRPEPMWAELLALAASAQGRVYRAEDPHGALRGLKEVRGLLAKDLAVVALREGLDLPPTDDPMLLAYLLDPSNTTPEGVARRYGGEWTEDAGERALLAERLHANLLGRLQGEERLLWLYEEVEKPLSRVLAHMEATGVKLDVAYLEALSLEVAAEMRRLEEEVFRLAGHSFNLNSRDQLERVLFDELGLPPIGKTEKTGKRSTSAAVLEALREVHPIVDKILQYRELAKLKGTYIDPLPALVHPKTGRLHTRFNQTATATGRLSSSDPNLQNIPVRTPLGQKIRRAFVAEEGWRLVALDYSQIELRVLAHLSGDENLIRVFQEGKDIHTQTASWMFGLSAEAIDPLMRRAAKTINFGVLYGMSAHRLSQELGIPYEEAAAFIQKYFQSYPKVKAWIEKTLEEGRTRGYVETLFGRRRYVPDLNARVKSVREAAERMAFNMPVQGTAADLMKLAMVRLFPQLREVGARMLLQVHDELLLEAPKERAEEVAALAKEVMEGVWPLAVPLEVEVGIGEDWLAAKG

SEQ ID NO: 1493 - DNA, 2529 bp, synthetic construct
  misc_feature 1..2529: note = Variant of DNA polymerase I from Thermus sp. strain 2.9
  source 1..2529: mol_type = other DNA
atgcaccatcatcatcatcatggcggtagcggcatgttaccgttgttcgaacctaaaggtcgcgtgcttctggttgatggccatcatctcgcgtatcgtaacttctttgccctgaaaggattaaccaccagccgtggcgagccggtacagggtgtctacggctttgcaaagtcgctcctgaaagctctgaaagaagacggtgatgtggtgattgttgtctttgatgcgaaagcgccaagttttcgccacgaagcgtacgaagcttacaaagccgggcgtgctccaacgccggaagactttcctcgccaattggcgcttatgaaggaattagtggatttgcttggcctcgaacgcttggaagttcccggtttcgaggcagacgacgtattagcgactctcgcaaagaaagccgaacgtgagggctatgaagtccagatcttgacagcagatcgcgatcttttccagcttttatctccgcgcatctcggtgttacacccggaagggcatcgtatcaccccggaatggctctgggagaaatatggtttgcgtcccgaacaatgggtggattttcgcgccttagcaggcgatccgagcgacaatattccgggagttaaaggtatcggcgagaagacggcgctcaagctccttaaagaatgggggtcgttggagaacttgcttaagaatttagatcaggtcaaaccagagtcagtgcgtgagaagattcttgcacacctcgaagacctcaaattaagccgcgaattgtcccgtgtacgcaccgatttgccgctcgaagttgatttccgtggtcgccgcgaacctgactgggagggtcttaaagcgtttttagagcgtcttgaatttggttcgctcttgcatgaattcggccttttagaaagcccgttaccagccgaagaagcaccttggccaccgcccgaaggcgcgtttttaggttaccgtttgagtcgcccggaaccgatgtgggccgaattactggctcttgcagcgtctgcccaggagcgtgtgtatcgcgcggaagaccctcatggtgcgctccgcggcctcaaagaagtccgtggactccttgccaaagacttagctgttgttgcattgcgcgaaggtcttgatttacctccgactgatgatccaatgcttcttgcgtacctcttggacccgtcaaacacgacgcccgaaggcgtagcccgtcgttacggcggcgagtggaccgaagatgcaggcgagcgcgcgttattggccgaacgtttgcacgccaatttattaggacgtttgcaaggcgaggaacgtctcctctggctttacgaagaagtggagaaaccattgagtcgcgtgctcgcgcatatggaagctaccggtgtcaaattagacgtggcgtatttggaggctctcagccttgaagttgctgccgaaatgcgccgcttggaggaagaagtattccgtttagcaggccactcctttaaccttaattctcgcgatcagttagaacgtgtgttgttcgataaccttggtctccctcctatcggcaagacagagaagaccggtaaacgtagcacttcagcggcggttttagaagctcttcgcgaagtccatcccattgtggacaagatcttgcagtaccgcgaactcgcgaaattgaaaggcacctatattgaccctcttccggcattagtccacccgaaaacgggacgcctccatacccgcttcaaccaaacagccacggcgaccggtcgtttgtcctcctctgatccaaaccttcagaatattccagtacgtaccccattgggccagaagatccgccgcgcgtttgtagctgaggagggttggcgtttagtggccctcgattatagccaaattgaattacgtgtccttgcccatctttctggcgatgagaacctcatccgcgtgtttcaggaaggcaaagacattcacactcaaacggcaagctggatgtttggattatcagcagaagcgatcgatcctttgatgcgtcgtgcagcgaagaccattaatttcggtgttctctacggtatgagtgcccatcgtttgtcgcaggaattaggcattccctatgaagaagctgccgcgttcattcagaagtactttcaaagctatcccaaagttaaagcatggatcgagaagactctcgaagaaggccgcacacgtggttacgtagagaccttatttggacgtcgccgctatgttcccgatttaaacgctcgcgtgaaatctgtccgtgaagccgccgaacgcatggcgttcaacatgcctgtacagggcacggcagctgacctcatgaaacttgcaatggtgcgcctttttccacaattgcgtgaagttggtgcccgcatgctcttgcaggtccacgatgaactcttgttagaagcgccaaaagagcgtgcggaagaggtggcagccctcgcgaaagaggttatggaaggcgtgtggcccttagcggtgcctcttgaagtcgaagttggtattggcgaggattggttggctgccaaaggataatga

SEQ ID NO: 1494 - protein, 841 aa, synthetic construct
  REGION 1..841: note = Variant of DNA polymerase I from Thermus sp. strain 2.9
MHHHHHHGGSGMLPLFEPKGRVLLVDGHHLAYRNFFALKGLTTSRGEPVQGVYGFAKSLLKALKEDGDVVIVVFDAKAPSFRHEAYEAYKAGRAPTPEDFPRQLALMKELVDLLGLERLEVPGFEADDVLATLAKKAEREGYEVQILTADRDLFQLLSPRISVLHPEGHRITPEWLWEKYGLRPEQWVDFRALAGDPSDNIPGVKGIGEKTALKLLKEWGSLENLLKNLDQVKPESVREKILAHLEDLKLSRELSRVRTDLPLEVDFRGRREPDWEGLKAFLERLEFGSLLHEFGLLESPLPAEEAPWPPPEGAFLGYRLSRPEPMWAELLALAASAQERVYRAEDPHGALRGLKEVRGLLAKDLAVVALREGLDLPPTDDPMLLAYLLDPSNTTPEGVARRYGGEWTEDAGERALLAERLHANLLGRLQGEERLLWLYEEVEKPLSRVLAHMEATGVKLDVAYLEALSLEVAAEMRRLEEEVFRLAGHSFNLNSRDQLERVLFDNLGLPPIGKTEKTGKRSTSAAVLEALREVHPIVDKILQYRELAKLKGTYIDPLPALVHPKTGRLHTRFNQTATATGRLSSSDPNLQNIPVRTPLGQKIRRAFVAEEGWRLVALDYSQIELRVLAHLSGDENLIRVFQEGKDIHTQTASWMFGLSAEAIDPLMRRAAKTINFGVLYGMSAHRLSQELGIPYEEAAAFIQKYFQSYPKVKAWIEKTLEEGRTRGYVETLFGRRRYVPDLNARVKSVREAAERMAFNMPVQGTAADLMKLAMVRLFPQLREVGARMLLQVHDELLLEAPKERAEEVAALAKEVMEGVWPLAVPLEVEVGIGEDWLAAKG

SEQ ID NO: 1495 - DNA, 2529 bp, synthetic construct
  misc_feature 1..2529: note = Variant of DNA polymerase I from Thermus sp. strain 2.9
  source 1..2529: mol_type = other DNA
atgcaccatcatcatcatcatggcggtagcggcatgttaccgttgttcgaacctaaaggtcgcgtgcttctggttgatggccatcatctcgcgtatcgtaacttctttgccctgaaaggattaaccaccagccgtggcgagccggtacagggtgtctacggctttgcaaagtcgctcctgaaagctctgaaagaagacggtgatgtggtgattgttgtctttgatgcgaaagcgccaagttttcgccacgaagcgtacgaagcttacaaagccgggcgtgctccaacgccggaagactttcctcgccaattggcgcttatgaaggaattagtggatttgcttggcctcgaacgcttggaagttcccggtttcgaggcagacgacgtattagcgactctcgcaaagaaagccgaacgtgagggctatgaagtccagatcttgacagcagatcgcgatcttttccagcttttatctccgcgcatctcggtgttacacccggaagggcatcgtatcaccccggaatggctctgggagaaatatggtttgcgtcccgaacaatgggtggattttcgcgccttagcaggcgatccgagcgacaatattccgggagttaaaggtatcggcgagaagacggcgctcaagctccttaaagaatgggggtcgttggagaacttgcttaagaatttagatcaggtcaaaccagagtcagtgcgtgagaagattcttgcacacctcgaagacctcaaattaagccgcgaattgtcccgtgtacgcaccgatttgccgctcgaagttgatttccgtggtcgccgcgaacctgactgggagggtcttaaagcgtttttagagcgtcttgaatttggttcgctcttgcatgaattcggccttttagaaagcccgttaccagccgaagaagcaccttggccaccgcccgaaggcgcgtttttaggttaccgtttgagtcgcccggaaccgatgtgggccgaattactggctcttgcagcgtctgcccaggggcgtgtgtatcgcgcggaagaccctcatggtgcgctccgcggcctcaaagaagtcaacggactccttgccaaagacttagctgttgttgcattgcgcgaaggtcttgatttacctccgactgatgatccaatgcttcttgcgtacctcttggacccgtcaaacacgacgcccgaaggcgtagcccgtcgttacggcggcgagtggaccgaagatgcaggtaagcgcgcgttattggccgaacgtttgcacgccaatttattaggacgtttgcaaggcgaggaacgtctcctctggctttacgaagaagtggagaaaccattgagtcgcgtgctcgcgcatatggaagctaccggtgtcaaattagacgtggcgtatttggaggctctcagccttgaagttgctgccgaaatgcgccgcttggaggaagaagtattccgtttagcaggccactcctttaaccttaattctcgcgatcagttagaacgtgtgttgttcgatgaacttggtctccctcctatcggcaagacagagaagaccggtaaacgtagcacttcagcggcggttttagaagctcttcgcgaagtccatcccattgtggacaagatcttgcagtaccgcgaactcgcgaaattgaaaggcacctatattgaccctcttccggcattagtccacccgaaaacgggacgcctccatacccgcttcaaccaaacagccacggcgaccggtcgtttgtcctcctctgatccaaaccttcagaatattccagtacgtaccccattgggccagaagatccgccgcgcgtttgtagctgaggagggttggcgtttagtggccctcgattatagccaaattgaattacgtgtccttgcccatctttctggcgatgagaacctcatccgcgtgtttcaggaaggcaaagacattcacactcaaacggcaagctggatgtttggattatcagcagaagcgatcgatcctttgatgcgtcgtgcagcgaagaccattaatttcggtgttctctacggtatgagtgcccatcgtttgtcgcaggaattaggcattccctatgaagaagctgcggcgttcattcagcgctactttcaaagctatcccaaagttaaagcatggatcgagaagactctcgaagaaggccgcacacgtggttacgtagagaccttatttggacgtcgccgctatgttcccgatttaaacgctcgcgtgaaatctgtccgtgaagccgccgaacgcatggcgttcaacatgcctgtacagggcacggcagctgacctcatgaaacttgcaatggtgcgcctttttccacaattgcgtgaagttggtgcccgcatgctcttgcaggtccacgatgaactcttgttagaagcgccaaaagagcgtgcggaagaggtggcagccctcgcgaaagaggttatggaaggcgtgtggcccttagcggtgcctcttgaagtcgaagttggtattggcgaggattggttggctgccaaaggataatga

SEQ ID NO: 1496 - protein, 841 aa, synthetic construct
  REGION 1..841: note = Variant of DNA polymerase I from Thermus sp. strain 2.9
MHHHHHHGGSGMLPLFEPKGRVLLVDGHHLAYRNFFALKGLTTSRGEPVQGVYGFAKSLLKALKEDGDVVIVVFDAKAPSFRHEAYEAYKAGRAPTPEDFPRQLALMKELVDLLGLERLEVPGFEADDVLATLAKKAEREGYEVQILTADRDLFQLLSPRISVLHPEGHRITPEWLWEKYGLRPEQWVDFRALAGDPSDNIPGVKGIGEKTALKLLKEWGSLENLLKNLDQVKPESVREKILAHLEDLKLSRELSRVRTDLPLEVDFRGRREPDWEGLKAFLERLEFGSLLHEFGLLESPLPAEEAPWPPPEGAFLGYRLSRPEPMWAELLALAASAQGRVYRAEDPHGALRGLKEVNGLLAKDLAVVALREGLDLPPTDDPMLLAYLLDPSNTTPEGVARRYGGEWTEDAGKRALLAERLHANLLGRLQGEERLLWLYEEVEKPLSRVLAHMEATGVKLDVAYLEALSLEVAAEMRRLEEEVFRLAGHSFNLNSRDQLERVLFDELGLPPIGKTEKTGKRSTSAAVLEALREVHPIVDKILQYRELAKLKGTYIDPLPALVHPKTGRLHTRFNQTATATGRLSSSDPNLQNIPVRTPLGQKIRRAFVAEEGWRLVALDYSQIELRVLAHLSGDENLIRVFQEGKDIHTQTASWMFGLSAEAIDPLMRRAAKTINFGVLYGMSAHRLSQELGIPYEEAAAFIQRYFQSYPKVKAWIEKTLEEGRTRGYVETLFGRRRYVPDLNARVKSVREAAERMAFNMPVQGTAADLMKLAMVRLFPQLREVGARMLLQVHDELLLEAPKERAEEVAALAKEVMEGVWPLAVPLEVEVGIGEDWLAAKG

SEQ ID NO: 1497 - DNA, 2529 bp, synthetic construct
  misc_feature 1..2529: note = Variant of DNA polymerase I from Thermus sp. strain 2.9
  source 1..2529: mol_type = other DNA
atgcaccatcatcatcatcatggcggtagcggcatgttaccgttgttcgaacctaaaggtcgcgtgcttctggttgatggccatcatctcgcgtatcgtaacttctttgccctgaaaggattaaccaccagccgtggcgagccggtacagggtgtctacggctttgcaaagtcgctcctgaaagctctgaaagaagacggtgatgtggtgattgttgtctttgatgcgaaagcgccaagttttcgccacgaagcgtacgaagcttacaaagccgggcgtgctccaacgccggaagactttcctcgccaattggcgcttatgaaggaattagtggatttgcttggcctcgaacgcttggaagttcccggtttcgaggcagacgacgtattagcgactctcgcaaagaaagccgaacgtgagggctatgaagtccagatcttgacagcagatcgcgatcttttccagcttttatctccgcgcatctcggtgttacacccggaagggcatcgtatcaccccggaatggctctgggagaaatatggtttgcgtcccgaacaatgggtggattttcgcgccttagcaggcgatccgagcgacaatattccgggagttaaaggtatcggcgagaagacggcgctcaagctccttaaagaatgggggtcgttggagaacttgcttaagaatttagatcaggtcaaaccagagtcagtgcgtgagaagattcttgcacacctcgaagacctcaaattaagccgcgaattgtcccgtgtacgcaccgatttgccgctcgaagttgatttccgtggtcgccgctcacctgactgggagggtcttaaagcgtttttagagcgtcttgaatttggttcgctcttgcatgaattcggccttttagaaagcccgttaccagccgaagaagcaccttggccaccgcccgaaggcgcgtttttaggttaccgtttgagtcgcccggaaccgatgtgggccgaattactggctcttgcagcgtctgcccaggggcgtgtgtatcgcgcggaagaccctcatggtgcgctcaagggcctcaaagaagtccgtggactccttgccaaagacttagctgttgttgcattgcgcgaaggtcttgatttacctccgactgatgatccaatgcttcttgcgtacctcttggacccgtcaaacacgacgcccgaaggcgtagcccgtcgttacggcggcgagtggaccgaagatgcaggcgagcgcgcgttattggccgaacgtttgcacgccaatttattaggacgtttgcaaggcgaggaacgtctcctctggctttacgaagaagtggagaaaccattgagtcgcgtgctcgcgcatatggaagctaccggtgtcaaattagacgtggcgtatttggaggcactcagccttgaagttgctgccgaaatgcgccgcttggaggaagaagtattccgtttagcaggccactcctttaaccttaattctcgcgatcagttagaacgtgtgttgttcgataaccttggtctccctcctatcggcaagacagagaagaccggtaaacgtagcacttcagcggcggttttagaagctcttcgcgaagtccatcccattgtggacaagatcttgcagtaccgcgaactcgcgaaattgaaaggcacctatattgaccctcttccggcattagtccacccgaaaacgggacgcctccatacccgcttcaaccaaacagccacggcgaccggtcgtttgtcctcctctgatccaaaccttcagaatattccagtacgtaccccattgggccagaagatccgccgcgcgtttgtagctgaggagggttggcgtttagtggccctcgattatagccaaattgaattacgtgtccttgcccatctttctggcgatgagaacctcatccgcgtgtttcaggaaggcaaagacattcacactcaaacggcaagctggatgtttggattatcagctgaagcgatcgatcctttgatgcgtcgtgcagcgaagaccattaatttcggtgttctctacggtatgagtgcccatcgtttgtcgcaggaattaggcattccctatgaagaagctgcggcgttcattcagcgctactttcaaagctatcccaaagttaaagcatggatcgagaagactctcgaagaaggccgcacacgtggttacgtagagaccttatttggacgtcgccgctatgttcccgatttaaacgctcgcgtgaaatctgtccgtgaagccgccgaacgcatggcgttcaacatgcctgtacagggcacggcagctgacctcatgaaacttgcaatggtgcgcctttttccacaattgcgtgaagttggtgcccgcatgctcttgcaggtccacgatgaactcttgttagaagcgccaaaagagcgtgcggaagaggtggcagccctcgcgaaagaggttatggaaggcgtgtggcccttagcggtgcctcttgaagtcgaagttggtattggcgaggattggttggctgccaaaggataatga

SEQ ID NO: 1498 - protein, 841 aa, synthetic construct
  REGION 1..841: note = Variant of DNA polymerase I from Thermus sp. strain 2.9
MHHHHHHGGSGMLPLFEPKGRVLLVDGHHLAYRNFFALKGLTTSRGEPVQGVYGFAKSLLKALKEDGDVVIVVFDAKAPSFRHEAYEAYKAGRAPTPEDFPRQLALMKELVDLLGLERLEVPGFEADDVLATLAKKAEREGYEVQILTADRDLFQLLSPRISVLHPEGHRITPEWLWEKYGLRPEQWVDFRALAGDPSDNIPGVKGIGEKTALKLLKEWGSLENLLKNLDQVKPESVREKILAHLEDLKLSRELSRVRTDLPLEVDFRGRRSPDWEGLKAFLERLEFGSLLHEFGLLESPLPAEEAPWPPPEGAFLGYRLSRPEPMWAELLALAASAQGRVYRAEDPHGALKGLKEVRGLLAKDLAVVALREGLDLPPTDDPMLLAYLLDPSNTTPEGVARRYGGEWTEDAGERALLAERLHANLLGRLQGEERLLWLYEEVEKPLSRVLAHMEATGVKLDVAYLEALSLEVAAEMRRLEEEVFRLAGHSFNLNSRDQLERVLFDNLGLPPIGKTEKTGKRSTSAAVLEALREVHPIVDKILQYRELAKLKGTYIDPLPALVHPKTGRLHTRFNQTATATGRLSSSDPNLQNIPVRTPLGQKIRRAFVAEEGWRLVALDYSQIELRVLAHLSGDENLIRVFQEGKDIHTQTASWMFGLSAEAIDPLMRRAAKTINFGVLYGMSAHRLSQELGIPYEEAAAFIQRYFQSYPKVKAWIEKTLEEGRTRGYVETLFGRRRYVPDLNARVKSVREAAERMAFNMPVQGTAADLMKLAMVRLFPQLREVGARMLLQVHDELLLEAPKERAEEVAALAKEVMEGVWPLAVPLEVEVGIGEDWLAAKG

SEQ ID NO: 1499 - DNA, 2529 bp, synthetic construct
  misc_feature 1..2529: note = Variant of DNA polymerase I from Thermus sp. strain 2.9
  source 1..2529: mol_type = other DNA
atgcaccatcatcatcatcatggcggtagcggcatgttaccgttgttcgaacctaaaggtcgcgtgcttctggttgatggccatcatctcgcgtatcgtaacttctttgccctgaaaggattaaccaccagccgtggcgagccggtacagggtgtctacggctttgcaaagtcgctcctgaaagctctgaaagaagacggtgatgtggtgattgttgtctttgatgcgaaagcgccaagttttcgccacgaagcgtacgaagcttacaaagccgggcgtgctccaacgccggaagactttcctcgccaattggcgcttatgaaggaattagtggatttgcttggcctcgaacgcttggaagttcccggtttcgaggcagacgacgtattagcgactctcgcaaagaaagccgaacgtgagggctatgaagtccagatcttgacagcagatcgcgatcttttccagcttttatctccgcgcatctcggtgttacacccggaagggcatcgtatcaccccggaatggctctgggagaaatatggtttgcgtcccgaacaatgggtggattttcgcgccttagcaggcgatccgagcgacaatattccgggagttaaaggtatcggcgagaagacggcgctcaagctccttaaagaatgggggtcgttggagaacttgcttaagaatttagatcaggtcaaaccagagtcagtgcgtgagaagattcttgcacacctcgaagacctcaaattaagccgcgaattgtcccgtgtacgcaccgatttgccgctcgaagttgatttccgtggccgccgcgaacctgactgggagggtcttaaagcgtttttagagcgtcttgaatttggttcgctcttgcatgaattcggccttttagaaagcccgttaccagccgaagaagcaccttggccaccgcccgaaggcgcgtttttaggttaccgtttgagtcgcccggaaccgatgtgggccgaattattggctcttgcagcgtctgcccagggacgtgtgtatcgcgcggaagaccctcatggtgcgctcggtggcctcaaagaagtccgtggactccttgccaaagacttagctgttgttgcattgcgcgaaggtcttgatttacctccgactgatgatccaatgcttcttgcgtacctcttggacccgtcaaacacgacgcccgaaggcgtagcccgtcgttacggcggcgagtggaccgaagatgcaggcgagcgcgcgttattggccgaacgtttgcacgccaatttattaggacgtttgcaaggcgaggaacgtctcctctggctttacgaagaagtggagaaaccattgagtcgcgtgctcgcgcatatggaagctaccggtgtcaaattagacgtggcgtatttggaggcactcagccttgaagttgctgccgaaatgcgccgcttggaggaagaagtattccgtttagcaggccactcctttaaccttaattctcgcgatcagttagaacgtgtgttgttcgatgaacttggtctccctcctatcggcaagacagagaagaccggtaaacgtagcacttcagcggcggttttagaagctcttcgcgaagtccatcccattgtggacaagatcttgcagtaccgcgaactcgcgaaattgaaaggcacctatattgaccctcttccggcattagtccacccgaaaacgggacgcctccatacccgcttcaaccaaacagccacggcgaccggtcgtttgtcctcctctgatccaaaccttcagaatattccagtacgtaccccattgggccagaagatccgccgcgcgtttgtagctgaggagggttggcgtttagtggccctcgattatagccaaattgaattacgtgtccttgcccatctttctggcgatgagaacctcatccgcgtgtttcaggaaggcaaagacattcacactcaaacggcaagctggatgtttggattatcagctgaagcgatcgatcctttgatgcgtcgtgcagcgaagaccatcaatttcggtgttctctacggtatgagtgcccatcgtttgtcgcaggaattaggcattccctatgaagaagctgcggcgttcattcagcgctactttcaaagctatcccaaagttaaagcatggatcgagaagactctcgaagaaggccgcacacgtggttacgtagagaccttatttggacgtcgccgctatgttcccgatttaaacgctcgcgtgaaatctgtccgtgaagccgccgaacgcatggcgttcaacatgcctgtacagggcacggcagctgacctcatgaaacttgcaatggtgcgcctttttccacaattgcgtgaagttggtgcccgcatgctcttgcaggtccacgatgaactcttgttagaagcgccaaaagagcgtgcggaagaggtggcagccctcgcgaaagaggttatggaaggcgtgtggcccttagcggtgcctcttgaagtcgaagttggtattggcgaggattggttggctgccaaaggataatga

SEQ ID NO: 1500 - protein, 841 aa, synthetic construct
  REGION 1..841: note = Variant of DNA polymerase I from Thermus sp. strain 2.9
MHHHHHHGGSGMLPLFEPKGRVLLVDGHHLAYRNFFALKGLTTSRGEPVQGVYGFAKSLLKALKEDGDVVIVVFDAKAPSFRHEAYEAYKAGRAPTPEDFPRQLALMKELVDLLGLERLEVPGFEADDVLATLAKKAEREGYEVQILTADRDLFQLLSPRISVLHPEGHRITPEWLWEKYGLRPEQWVDFRALAGDPSDNIPGVKGIGEKTALKLLKEWGSLENLLKNLDQVKPESVREKILAHLEDLKLSRELSRVRTDLPLEVDFRGRREPDWEGLKAFLERLEFGSLLHEFGLLESPLPAEEAPWPPPEGAFLGYRLSRPEPMWAELLALAASAQGRVYRAEDPHGALGGLKEVRGLLAKDLAVVALREGLDLPPTDDPMLLAYLLDPSNTTPEGVARRYGGEWTEDAGERALLAERLHANLLGRLQGEERLLWLYEEVEKPLSRVLAHMEATGVKLDVAYLEALSLEVAAEMRRLEEEVFRLAGHSFNLNSRDQLERVLFDELGLPPIGKTEKTGKRSTSAAVLEALREVHPIVDKILQYRELAKLKGTYIDPLPALVHPKTGRLHTRFNQTATATGRLSSSDPNLQNIPVRTPLGQKIRRAFVAEEGWRLVALDYSQIELRVLAHLSGDENLIRVFQEGKDIHTQTASWMFGLSAEAIDPLMRRAAKTINFGVLYGMSAHRLSQELGIPYEEAAAFIQRYFQSYPKVKAWIEKTLEEGRTRGYVETLFGRRRYVPDLNARVKSVREAAERMAFNMPVQGTAADLMKLAMVRLFPQLREVGARMLLQVHDELLLEAPKERAEEVAALAKEVMEGVWPLAVPLEVEVGIGEDWLAAKG

SEQ ID NO: 1501 - DNA, 2529 bp, synthetic construct
  misc_feature 1..2529: note = Variant of DNA polymerase I from Thermus sp. strain 2.9
  source 1..2529: mol_type = other DNA
atgcaccatcatcatcatcatggcggtagcggcatgttaccgttgttcgaacctaaaggtcgcgtgcttctggttgatggccatcatctcgcgtatcgtaacttctttgccctgaaaggattaaccaccagccgtggcgagccggtacagggtgtctacggctttgcaaagtcgctcctgaaagctctgaaagaagacggtgatgtggtgattgttgtctttgatgcgaaagcgccaagttttcgccacgaagcgtacgaagcttacaaagccgggcgtgctccaacgccggaagactttcctcgccaattggcgcttatgaaggaattagtggatttgcttggcctcgaacgcttggaagttcccggtttcgaggcagacgacgtattagcgactctcgcaaagaaagccgaacgtgagggctatgaagtccagatcttgacagcagatcgcgatcttttccagcttttatctccgcgcatctcggtgttacacccggaagggcatcgtatcaccccggaatggctctgggagaaatatggtttgcgtcccgaacaatgggtggattttcgcgccttagcaggcgatccgagcgacaatattccgggagttaaaggtatcggcgagaagacggcgctcaagctccttaaagaatgggggtcgttggagaacttgcttaagaatttagatcaggtcaaaccagagtcagtgcgtgagaagattcttgcacacctcgaagacctcaaattaagccgcgaattgtcccgtgtacgcaccgatttgccgctcgaagttgatttccgtggccgccgcgaacctgactgggagggtcttaaagcgtttttagagcgtcttgaatttggttcgctcttgcatgaattcggccttttagaaagcccgttaccagccgaagaagcaccttggccaccgcccgaaggcgcgtttttaggttaccgtttgagtcgcccggaaccgatgtgggccgaattattggctcttgcagcgtctgcccagggacgtgtgtatcgcgcggaagaccctcatggtgcgctcaagggcctcaaagaagtcaacggactccttgccaaagacttagctgttgttgcattgcgcgaaggtcttgatttacctccgactgatgatccaatgcttcttgcgtacctcttggacccgtcaaacacgacgcccgaaggcgtagcccgtcgttacggcggcgagtggaccgaagatgcaggcgagcgcgcgttattggccgaacgtttgcacgccaatttattaggacgtttgcaaggcgaggaacgtctcctctggctttacgaagaagtggagaaaccattgagtcgcgtgctcgcgcatatggaagctaccggtgtcaaattagacgtggcgtatttggaggcactcagccttgaagttgctgccgaaatgcgccgcttggaggaagaagtattccgtttagcaggccactcctttaaccttaattctcgcgatcagttagaacgtgtgttgttcgatgagcttggtctccctcctatcggcaagacagagaagaccggtaaacgtagcacttcagcggcggttttagaagctcttcgcgaagtccatcccattgtggacaagatcttgcagtaccgcgaactcgcgaaattgaaaggcacctatattgaccctcttccggcattagtccacccgaaaacgggacgcctccatacccgcttcaaccaaacagccacggcgaccggtcgtttgtcctcctctgatccaaaccttcagaatattccagtacgtaccccattgggccagaagatccgccgcgcgtttgtagctgaggagggttggcgtttagtggccctcgattatagccaaattgaattacgtgtccttgcccatctttctggcgatgagaacctcatccgcgtgtttcaggaaggcaaagacattcacactcaaacggcaagctggatgtttggattatcagctgaagcgatcgatcctttgatgcgtcgtgcagcgaagaccatcaatttcggtgttctctacggtatgagtgcccatcgtttgtcgcaggaattaggcattccctatgaagaagctgcggcgttcattcagcgctactttcaaagctatcccaaagttaaagcatggatcgagaagactctcgaagaaggccgcacacgtggttacgtagagaccttatttggacgtcgccgctatgttcccgatttaaacgctcgcgtgaaatctgtccgtgaagccgccgaacgcatggcgttcaacatgcctgtacagggcacggcagctgacctcatgaaacttgcaatggtgcgcctttttccacaattgcgtgaagttggtgcccgcatgctcttgcaggtccacgatgaactcttgttagaagcgccaaaagagcgtgcggaagaggtggcagccctcgcgaaagaggttatggaaggcgtgtggcccttagcggtgcctcttgaagtcgaagttggtattggcgaggattggttggctgccaaaggataatga

SEQ ID NO: 1502 - protein, 841 aa, synthetic construct
  REGION 1..841: note = Variant of DNA polymerase I from Thermus sp. strain 2.9
MHHHHHHGGSGMLPLFEPKGRVLLVDGHHLAYRNFFALKGLTTSRGEPVQGVYGFAKSLLKALKEDGDVVIVVFDAKAPSFRHEAYEAYKAGRAPTPEDFPRQLALMKELVDLLGLERLEVPGFEADDVLATLAKKAEREGYEVQILTADRDLFQLLSPRISVLHPEGHRITPEWLWEKYGLRPEQWVDFRALAGDPSDNIPGVKGIGEKTALKLLKEWGSLENLLKNLDQVKPESVREKILAHLEDLKLSRELSRVRTDLPLEVDFRGRREPDWEGLKAFLERLEFGSLLHEFGLLESPLPAEEAPWPPPEGAFLGYRLSRPEPMWAELLALAASAQGRVYRAEDPHGALKGLKEVNGLLAKDLAVVALREGLDLPPTDDPMLLAYLLDPSNTTPEGVARRYGGEWTEDAGERALLAERLHANLLGRLQGEERLLWLYEEVEKPLSRVLAHMEATGVKLDVAYLEALSLEVAAEMRRLEEEVFRLAGHSFNLNSRDQLERVLFDELGLPPIGKTEKTGKRSTSAAVLEALREVHPIVDKILQYRELAKLKGTYIDPLPALVHPKTGRLHTRFNQTATATGRLSSSDPNLQNIPVRTPLGQKIRRAFVAEEGWRLVALDYSQIELRVLAHLSGDENLIRVFQEGKDIHTQTASWMFGLSAEAIDPLMRRAAKTINFGVLYGMSAHRLSQELGIPYEEAAAFIQRYFQSYPKVKAWIEKTLEEGRTRGYVETLFGRRRYVPDLNARVKSVREAAERMAFNMPVQGTAADLMKLAMVRLFPQLREVGARMLLQVHDELLLEAPKERAEEVAALAKEVMEGVWPLAVPLEVEVGIGEDWLAAKG

SEQ ID NO: 1503 - DNA, 2529 bp, synthetic construct
  misc_feature 1..2529: note = Variant of DNA polymerase I from Thermus sp. strain 2.9
  source 1..2529: mol_type = other DNA
atgcaccatcatcatcatcatggcggtagcggcatgttaccgttgttcgaacctaaaggtcgcgtgcttctggttgatggccatcatctcgcgtatcgtaacttctttgccctgaaaggattaaccaccagccgtggcgagccggtacagggtgtctacggctttgcaaagtcgctcctgaaagctctgaaagaagacggtgatgtggtgattgttgtctttgatgcgaaagcgccaagttttcgccacgaagcgtacgaagcttacaaagccgggcgtgctccaacgccggaagactttcctcgccaattggcgcttatgaaggaattagtggatttgcttggcctcgaacgcttggaagttcccggtttcgaggcagacgacgtattagcgactctcgcaaagaaagccgaacgtgagggctatgaagtccagatcttgacagcagatcgcgatcttttccagcttttatctccgcgcatctcggtgttacacccggaagggcatctgatcaccccggaatggctctgggagaaatatggtttgcgtcccgaacaatgggtggattttcgcgccttagtcggcgatccgagcgacaatattccgggagttaaaggtatcggcgagaagacggcgctcaagctccttaaagaatgggggtcgttggagaacttgcttaagaatttagatcaggtcaaaccagagtcagtgcgtgagaagattcttgcacacctcgaagacctcaaattaagccgcgaattgtcccgtgtacgcaccgatttgccgctcgaagttgatttccgtggccgccgcgaacctgactgggagggtcttaaagcgtttttagagcgtcttgaatttggttcgctcttgcatgaattcggccttttagaaagcccgttaccagccgaagaagcaccttggccaccgcccgaaggcgcgtttttaggttaccgtttgagtcgcccggaaccgatgtgggccgaattattggctcttgcagcgtctgcccagggacgtgtgtatcgcgcggaagaccctcatggtgcgctccgcggcctcaaagaagtccgtggactccttgccaaagacttagctgttgttgcattgcgcgaaggtcttgatttacctccgactgatgatccaatgcttcttgcgtacctcttggacccgtcaaacacgacgcccgaaggcgtagcccgtcgttacggcggcgagtggaccgaagatgcaggcgagcgcgcgttattggccgaacgtttgcaccagaatttattaggacgtttgcaaggcgaggaacgtctcctctggctttacgaagaagtggagaaaccattgagtcgcgtgctccaccatatggaagctaccggtgtcaaattagacgtggcgtatttggaggcactcagccttgaagttgctgccgaaatgcgccgcttggaggaagaagtattccgtttagcaggccactcctttaaccttaattctcgcgatcagttagaacgtgtgttgttcgatgaacttggtctccctcctatcggcaagacagagaagaccggtaaacgtagcacttcagcggcggttttagaagctcttcgcgaagtccatcccattgtggacaagatcttgcagtaccgcgaactcgcgaaattgaaaggcacctatattgaccgtcttccggcattagtccacccgaaaacgggacgcctccatacccgcttcaaccaaacagccacggcgaccggtcgtttgtcctcctctgatccaaaccttcagaatattccagtacgtaccccattgggccagaagatccgccgcgcgtttgtagctgaggagggttggcgtttagtggccctcgattatagccaaattgaattacgtgtccttgcccatctttctggcgatgagaacctcatccgcgtgtttcaggaaggcaaagacattcacactcaaacggcaagctggatgtttggagtgtcgtcggaagcgatcgatcctttgatgcgtcgtgcagcgaagaccatcaatttcggtgttctctacggtatgagtgcccatcgtttgtcgcaggaattaggcattccctatgaagaagctgcggcgttcattcagcgctactttcaaagctatcccaaagttaaagcatggatcgagaagactctcgaagaaggccgcacacgtggttacgtagagaccttatttggacgtcgccgctatgttcccgatttaaccgctcgcgtgaaatctgtccgtgaagccgccgaacgcatggcgttcaacatgcctgtacagggcacggcagctgacctcatgaaacttgcaatggtgcgcctttttccacaattgcgtgaagttggtgcccgcatgctcttgcaggtccacgatgaactcttgttagaagcgccaaaagagcgtgcggaagaggtggcagccctcgcgaaagaggttatggaaggcgtgtggcccttagcggtgcctcttgaagtcgaagttggtattggcgaggattggttggctgccaaaggataatga

SEQ ID NO: 1504 - protein, 841 aa, synthetic construct
  REGION 1..841: note = Variant of DNA polymerase I from Thermus sp. strain 2.9
MHHHHHHGGSGMLPLFEPKGRVLLVDGHHLAYRNFFALKGLTTSRGEPVQGVYGFAKSLLKALKEDGDVVIVVFDAKAPSFRHEAYEAYKAGRAPTPEDFPRQLALMKELVDLLGLERLEVPGFEADDVLATLAKKAEREGYEVQILTADRDLFQLLSPRISVLHPEGHLITPEWLWEKYGLRPEQWVDFRALVGDPSDNIPGVKGIGEKTALKLLKEWGSLENLLKNLDQVKPESVREKILAHLEDLKLSRELSRVRTDLPLEVDFRGRREPDWEGLKAFLERLEFGSLLHEFGLLESPLPAEEAPWPPPEGAFLGYRLSRPEPMWAELLALAASAQGRVYRAEDPHGALRGLKEVRGLLAKDLAVVALREGLDLPPTDDPMLLAYLLDPSNTTPEGVARRYGGEWTEDAGERALLAERLHQNLLGRLQGEERLLWLYEEVEKPLSRVLHHMEATGVKLDVAYLEALSLEVAAEMRRLEEEVFRLAGHSFNLNSRDQLERVLFDELGLPPIGKTEKTGKRSTSAAVLEALREVHPIVDKILQYRELAKLKGTYIDRLPALVHPKTGRLHTRFNQTATATGRLSSSDPNLQNIPVRTPLGQKIRRAFVAEEGWRLVALDYSQIELRVLAHLSGDENLIRVFQEGKDIHTQTASWMFGVSSEAIDPLMRRAAKTINFGVLYGMSAHRLSQELGIPYEEAAAFIQRYFQSYPKVKAWIEKTLEEGRTRGYVETLFGRRRYVPDLTARVKSVREAAERMAFNMPVQGTAADLMKLAMVRLFPQLREVGARMLLQVHDELLLEAPKERAEEVAALAKEVMEGVWPLAVPLEVEVGIGEDWLAAKG

SEQ ID NO: 1505 - DNA, 2529 bp, synthetic construct
  misc_feature 1..2529: note = Variant of DNA polymerase I from Thermus sp. strain 2.9
  source 1..2529: mol_type = other DNA
atgcaccatcatcatcatcatggcggtagcggcatgttaccgttgttcgaacctaaaggtcgcgtgcttctggttgatggccatcatctcgcgtatcgtaacttctttgccctgaaaggattaaccaccagccgtggcgagccggtacagggtgtctacggctttgcaaagtcgctcctgaaagctctgaaagaagacggtgatgtggtgattgttgtctttgatgcgaaagcgccaagttttcgccacgaagcgtacgaagcttacaaagccgggcgtgctccaacgccggaagactttcctcgccaattggcgcttatgaaggaattagtggatttgcttggcctcgaacgcttggaagttcccggtttcgaggcagacgacgtattagcgactctcgcaaagaaagccgaacgtgagggctatgaagtccagatcttgacagcagatcgcgatcttttccagcttttatctccgcgcatctcggtgttacacccggaagggcatcgtatcaccccggaatggctctgggagaaatatggtttgcgtcccgaacaatgggtggattttcgcgccttagcaggcgatccgagcgacaatattccgggagttaaaggtatcggcgagaagacggcgctcaagctccttaaagaatgggggtcgttggagaacttgcttaagaatttagatcaggtcaaaccagagtcagtgcgtgagaagattcttgcacacctcgaagacctcaaattaagccgcgaattgtcccgtgtacgcaccgatttgccgctcgaagttgatttccgtggccgccgcgaacctgactgggagggtcttaaagcgtttttagagcgtcttgaatttggttcgctcttgcatgaattcggccttttagaaagcccgatgccagccgaagaagcaccttggccaccgcccgaaggcgcgtttttaggttaccgtttgagtcgcccggaaccgatgtgggccgaattattggctcttgcagcgtctgcccagggacgtgtgtatcgcgcggaagaccctcatggtgcgctccgcggcctcaaagaagtccgtggactccttgccaaagacttagctgttgttgcattgcgcgaaggtcttgatttacctccgactgatgatccaatgcttcttgcgtacctcttggacccgtcaaacacgacgcccgaaggcgtagcccgtcgttacggcggcgagtggaccgaagatgcaggcgagcgcgcgttattggccgaacgtttgcacgccaatttattaggacgtttgcaaggcgaggaacgtctcctctggctttacgaagaagtggagaaaccattgagtcgcgtgctcgcgcatatggaagctaccggtgtcaaattagacgtggcgtatttggaggcactcagccttgaagttgctgccgaaatgcgccgcttggaggaagaagtattccgtttagcaggccactcctttaaccttaattctcgcgatcagttagaacgtgtgttgttcgatgaacttggtctccctcctatcggcaagacagagaagaccggtaaacgtagcacttcagcggcggttttagaagctcttcgcgaagtccatcccattgtggacaagatcttgcagtaccgcgaactcgcgaaattgaaaggcacctatattgaccctcttccggcattagtccacccgaaaacgggacgcctccatacccgcttcaaccaaacagccacggcgaccggtcgtttgtcctcctctgatccaaaccttcagaatattccagtacgtaccccattgggccagaagatccgccgcgcgtttgtagctgaggagggttggcgtttagtggccctcgattatagccaaattgaattacgtgtccttgcccatctttctggcgatgagaacctcatccgcgtgtttcaggaaggcaaagacattcacactcaaacggcaagctggatgtttggattatcagctgaagcgatcgatcctttgatgcgtcgtgcagcgaagaccatcaatttcggtgttctctacggtatgagtgcccatcgtttgtcgcaggaattaggcattccctatgaagaagctgcggcgttcattcagcgctactttcaaagctatcccaaagttaaagcatggatcgagaagactctcgaagaaggccgcacacgtggttacgtagagaccttatttggacgtcgccgctatgttcccgatttaaacgctcgcgtgaaatctgtccgtgaagccgccgaacgcatggcgttcaacatgcctgtacagggcacggcagctgacctcatgaaacttgcaatggtgcgcctttttccacaattgcgtgaagttggtgcccgcatgctcttgcaggtccacgatgaactcttgttagaagcgccaaaagagcgtgcggaagaggtggcagccctcgcgaaagaggttatggaaggcgtgtggcccttagcggtgcctcttgaagtcgaagttggtattggcgaggattggttggctgccaaaggataatga

SEQ ID NO: 1506 - protein, 841 aa, synthetic construct
  REGION 1..841: note = Variant of DNA polymerase I from Thermus sp. strain 2.9
MHHHHHHGGSGMLPLFEPKGRVLLVDGHHLAYRNFFALKGLTTSRGEPVQGVYGFAKSLLKALKEDGDVVIVVFDAKAPSFRHEAYEAYKAGRAPTPEDFPRQLALMKELVDLLGLERLEVPGFEADDVLATLAKKAEREGYEVQILTADRDLFQLLSPRISVLHPEGHRITPEWLWEKYGLRPEQWVDFRALAGDPSDNIPGVKGIGEKTALKLLKEWGSLENLLKNLDQVKPESVREKILAHLEDLKLSRELSRVRTDLPLEVDFRGRREPDWEGLKAFLERLEFGSLLHEFGLLESPMPAEEAPWPPPEGAFLGYRLSRPEPMWAELLALAASAQGRVYRAEDPHGALRGLKEVRGLLAKDLAVVALREGLDLPPTDDPMLLAYLLDPSNTTPEGVARRYGGEWTEDAGERALLAERLHANLLGRLQGEERLLWLYEEVEKPLSRVLAHMEATGVKLDVAYLEALSLEVAAEMRRLEEEVFRLAGHSFNLNSRDQLERVLFDELGLPPIGKTEKTGKRSTSAAVLEALREVHPIVDKILQYRELAKLKGTYIDPLPALVHPKTGRLHTRFNQTATATGRLSSSDPNLQNIPVRTPLGQKIRRAFVAEEGWRLVALDYSQIELRVLAHLSGDENLIRVFQEGKDIHTQTASWMFGLSAEAIDPLMRRAAKTINFGVLYGMSAHRLSQELGIPYEEAAAFIQRYFQSYPKVKAWIEKTLEEGRTRGYVETLFGRRRYVPDLNARVKSVREAAERMAFNMPVQGTAADLMKLAMVRLFPQLREVGARMLLQVHDELLLEAPKERAEEVAALAKEVMEGVWPLAVPLEVEVGIGEDWLAAKG

SEQ ID NO: 1507 - DNA, 2529 bp, synthetic construct
  misc_feature 1..2529: note = Variant of DNA polymerase I from Thermus sp. strain 2.9
  source 1..2529: mol_type = other DNA
atgcaccatcatcatcatcatggcggtagcggcatgttaccgttgttcgaacctaaaggtcgcgtgcttctggttgatggccatcatctcgcgtatcgtaacttctttgccctgaaaggattaaccaccagccgtggcgagccggtacagggtgtctacggctttgcaaagtcgctcctgaaagctctgaaagaagacggtgatgtggtgattgttgtctttgatgcgaaagcgccaagttttcgccacgaagcgtacgaagcttacaaagccgggcgtgctccaacgccggaagactttcctcgccaattggcgcttatgaaggaattagtggatttgcttggcctcgaacgcttggaagttcccggtttcgaggcagacgacgtattagcgactctcgcaaagaaagccgaacgtgagggctatgaagtccagatcttgacagcagatcgcgatcttttccagcttttatctccgcgcatctcggtgttacacccggaagggcatctgatcaccccggaatggctctgggagaaatatggtttgcgtcccgaacaatgggtggattttcgcgccttagccggcgatccgagcgacaatattccgggagttaaaggtatcggcgagaagacggcgctcaagctccttaaagaatgggggtcgttggagaacttgcttaagaatttagatcaggtcaaaccagagtcagtgcgtgagaagattcttgcacacctcgaagacctcaaattaagccgcgaattgtcccgtgtacgcaccgatttgccgctcgaagttgatttccgtggccgccgcgaacctgactgggagggtcttaaagcgtttttagagcgtcttgaatttggttcgctcttgcatgaattcggccttttagaaagcccgttaccagccgaagaagcaccttggccaccgcccgaaggcgcgtttttaggttaccgtttgagtcgcccggaaccgatgtgggccgaattattggctcttgcagcgtctgcccagggacgtgtgtatcgcgcggaagaccctcatggtgcgctccgcggcctcaaagaagtccgtggactccttgccaaagacttagctgttgttgcattgcgcgaaggtcttgatttacctccgactgatgatccaatgcttcttgcgtacctcttggacccgtcaaacacgacgcccgaaggcgtagcccgtcgttacggcggcgagtggaccgaagatgcaggcgagcgcgcgttattggccgaacgtttgcacgcaaatttattaggacgtttgcaaggcgaggaacgtctcctctggctttacgaagaagtggagaaaccattgagtcgcgtgctccaccatatggaagctaccggtgtcaaattagacgtggcgtatttggaggcactcagccttgaagttgctgccgaaatgcgccgcttggaggaagaagtattccgtttagcaggccactcctttaaccttaattctcgcgatcagttagaacgtgtgttgttcgatgaacttggtctccctcctatcggcaagacagagaagaccggtaaacgtagcacttcagcggcggttttagaagctcttcgcgaagtccatcccattgtggacaagatcttgcagtaccgcgaactcgcgaaattgaaaggcacctatattgaccgtcttccggcattagtccacccgaaaacgggacgcctccatacccgcttcaaccaaacagccacggcgaccggtcgtttgtcctcctctgatccaaaccttcagaatattccagtacgtaccccattgggccagaagatccgccgcgcgtttgtagctgaggagggttggcgtttagtggccctcgattatagccaaattgaattacgtgtccttgcccatctttctggcgatgagaacctcatccgcgtgtttcaggaaggcaaagacattcacactcaaacggcaagctggatgtttggattatcagctgaagcgatcgatcctttgatgcgtcgtgcagcgaagaccatcaatttcggtgttctctacggtatgagtgcccatcgtttgtcgcaggaattaggcattccctatgaagaagctgcggcgttcattcagcgctactttcaaagctatcccaaagttaaagcatggatcgagaagactctcgaagaaggccgcacacgtggttacgtagagaccttatttggacgtcgccgctatgttcccgatttaaacgctcgcgtgaaatctgtccgtgaagccgccgaacgcatggcgttcaacatgcctgtacagggcacggcagctgacctcatgaaacttgcaatggtgcgcctttttccacaattgcgtgaagttggtgcccgcatgctcttgcaggtccacgatgaactcttgttagaagcgccaaaagagcgtgcggaagaggtggcagccctcgcgaaagaggttatggaaggcgtgtggcccttagcggtgcctcttgaagtcgaagttggtattggcgaggattggttggctgccaaaggataatga

SEQ ID NO: 1508 - protein, 841 aa, synthetic construct
  REGION 1..841: note = Variant of DNA polymerase I from Thermus sp. strain 2.9
MHHHHHHGGSGMLPLFEPKGRVLLVDGHHLAYRNFFALKGLTTSRGEPVQGVYGFAKSLLKALKEDGDVVIVVFDAKAPSFRHEAYEAYKAGRAPTPEDFPRQLALMKELVDLLGLERLEVPGFEADDVLATLAKKAEREGYEVQILTADRDLFQLLSPRISVLHPEGHLITPEWLWEKYGLRPEQWVDFRALAGDPSDNIPGVKGIGEKTALKLLKEWGSLENLLKNLDQVKPESVREKILAHLEDLKLSRELSRVRTDLPLEVDFRGRREPDWEGLKAFLERLEFGSLLHEFGLLESPLPAEEAPWPPPEGAFLGYRLSRPEPMWAELLALAASAQGRVYRAEDPHGALRGLKEVRGLLAKDLAVVALREGLDLPPTDDPMLLAYLLDPSNTTPEGVARRYGGEWTEDAGERALLAERLHANLLGRLQGEERLLWLYEEVEKPLSRVLHHMEATGVKLDVAYLEALSLEVAAEMRRLEEEVFRLAGHSFNLNSRDQLERVLFDELGLPPIGKTEKTGKRSTSAAVLEALREVHPIVDKILQYRELAKLKGTYIDRLPALVHPKTGRLHTRFNQTATATGRLSSSDPNLQNIPVRTPLGQKIRRAFVAEEGWRLVALDYSQIELRVLAHLSGDENLIRVFQEGKDIHTQTASWMFGLSAEAIDPLMRRAAKTINFGVLYGMSAHRLSQELGIPYEEAAAFIQRYFQSYPKVKAWIEKTLEEGRTRGYVETLFGRRRYVPDLNARVKSVREAAERMAFNMPVQGTAADLMKLAMVRLFPQLREVGARMLLQVHDELLLEAPKERAEEVAALAKEVMEGVWPLAVPLEVEVGIGEDWLAAKG

SEQ ID NO: 1509 - DNA, 2529 bp, synthetic construct
  misc_feature 1..2529: note = Variant of DNA polymerase I from Thermus sp. strain 2.9
  source 1..2529: mol_type = other DNA
atgcaccatcatcatcatcatggcggtagcggcatgttaccgttgttcgaacctaaaggtcgcgtgcttctggttgatggccatcatctcgcgtatcgtaacttctttgccctgaaaggattaaccaccagccgtggcgagccggtacagggtgtctacggctttgcaaagtcgctcctgaaagctctgaaagaagacggtgatgtggtgattgttgtctttgatgcgaaagcgccaagttttcgccacgaagcgtacgaagcttacaaagccgggcgtgctccaacgccggaagactttcctcgccaattggcgcttatgaaggaattagtggatttgcttggcctcgaacgcttggaagttcccggtttcgaggcagacgacgtattagcgactctcgcaaagaaagccgaacgtgagggctatgaagtccagatcttgacagcagatcgcgatcttttccagcttttatctccgcgcatctcggtgttacacccggaagggcatcgtatcaccccggaatggctctgggagaaatatggtttgcgtcccgaacaatgggtggattttcgcgccttagcaggcgatccgagcgacaatattccgggagttaaaggtatcggcgagaagacggcgctcaagctccttaaagaatgggggtcgttggagaacttgcttaagaatttagatcaggtcaaaccagagtcagtgcgtgagaagattcttgcacacctcgaagacctcaaattaagccgcgaattgtcccgtgtacgcaccgatttgccgctcgaagttgatttccgtggtcgccgcgaacctgactgggagggtcttaaagcgtttttagagcgtcttgaatttggttcgctcttgcatgaattcggccttttagaaagcccgttaccagccgaagaagcaccttggccaccgcccgaaggcgcgtttttaggttaccgtttgagtcgcccggaaccgatgtgggccgaattattggctcttgcagcgtctgcccaggagcgtgtgtatcgcgcggaagaccctcatggtgcgctcaagggcctcaaagaagtccgtggactccttgccaaagacttagctgttgttgcattgcgcgaaggtcttgatttacctccgactgatgatccaatgcttcttgcgtacctcttggacccgtcaaacacgacgcccgaaggcgtagcccgtcgttacggcggcgagtggaccgaagatgcagctgagcgcgcgttattggccaaacgtttgcacgccaatttattaggacgtttgcaaggcgaggaacgtctcctctggctttacgaagaagtggagaaaccattgagtcgcgtgctcgcgcatatggaagctaccggtgtcaaattagacgtggcgtatttggagaacctcagccttgaagttgctgccgaaatgcgccgcttggaggaagaagtattccgtttagcaggccactcctttaaccttaattctcgcgatcagttagaacgtgtgttgttcgataaccttggtctccctcctatcggcaagacagagaagaccggtaaacgtagcacttcagcggcggttttagaagctcttcgcgaagtccatcccattgtggacaagatcttgcagtaccgcgaactcgcgaaattgaaaggcacctatattgaccctcttccggcattagtccacccgaaaacgggacgcctccatacccgcttcaaccaaacagccacggcgaccggtcgtttgtcctcctctgatccaaaccttcagaatattccagtacgtaccccattgggccagaagatccgccgcgcgtttgtagctgaggagggttggcgtttagtggccctcgattatagccaaattgaattacgtgtccttgcccatctttctggcgatgagaacctcatccgcgtgtttcaggaaggcaaagacattcacactcaaacggcaagctggatgtttggattatcaccagaagcgatcgatcctttgatgcgtcgtgcagcgaagaccgttaatttcggtgttctctacggtatgagtgcccatcgtttgtcgcaggaattaggcattccctatgaagaagctgtcgcgttcattcagcgctactttcaaagctatcccaaagttaaagcatggatcgagaagactctcgaagaaggccgcacacgtggttacgtagagaccttatttggacgtcgccgctatgttcccgatttaaacgctcgcgtgaaatctgtccgtgaagccgccgaacgcatggcgttcaacatgcctgtacagggcacggcagctgacctcatgaaacttgcaatggtgcgcctttttccacaattgcgtgaagttggtgcccgcatgctcttgcaggtccacgatgaactcttgttagaagcgccaaaagagcgtgcggaagaggtggcagccctcgcgaaagaggttatggaaggcgtgtggcccttagcggtgcctcttgaagtcgaagttggtattggcgaggattggttggctgccaaaggataatga

SEQ ID NO: 1510 - protein, 841 aa, synthetic construct
  REGION 1..841: note = Variant of DNA polymerase I from Thermus sp. strain 2.9
MHHHHHHGGSGMLPLFEPKGRVLLVDGHHLAYRNFFALKGLTTSRGEPVQGVYGFAKSLLKALKEDGDVVIVVFDAKAPSFRHEAYEAYKAGRAPTPEDFPRQLALMKELVDLLGLERLEVPGFEADDVLATLAKKAEREGYEVQILTADRDLFQLLSPRISVLHPEGHRITPEWLWEKYGLRPEQWVDFRALAGDPSDNIPGVKGIGEKTALKLLKEWGSLENLLKNLDQVKPESVREKILAHLEDLKLSRELSRVRTDLPLEVDFRGRREPDWEGLKAFLERLEFGSLLHEFGLLESPLPAEEAPWPPPEGAFLGYRLSRPEPMWAELLALAASAQERVYRAEDPHGALKGLKEVRGLLAKDLAVVALREGLDLPPTDDPMLLAYLLDPSNTTPEGVARRYGGEWTEDAAERALLAKRLHANLLGRLQGEERLLWLYEEVEKPLSRVLAHMEATGVKLDVAYLENLSLEVAAEMRRLEEEVFRLAGHSFNLNSRDQLERVLFDNLGLPPIGKTEKTGKRSTSAAVLEALREVHPIVDKILQYRELAKLKGTYIDPLPALVHPKTGRLHTRFNQTATATGRLSSSDPNLQNIPVRTPLGQKIRRAFVAEEGWRLVALDYSQIELRVLAHLSGDENLIRVFQEGKDIHTQTASWMFGLSPEAIDPLMRRAAKTVNFGVLYGMSAHRLSQELGIPYEEAVAFIQRYFQSYPKVKAWIEKTLEEGRTRGYVETLFGRRRYVPDLNARVKSVREAAERMAFNMPVQGTAADLMKLAMVRLFPQLREVGARMLLQVHDELLLEAPKERAEEVAALAKEVMEGVWPLAVPLEVEVGIGEDWLAAKG

SEQ ID NO: 1511 - DNA, 2529 bp, synthetic construct
  misc_feature 1..2529: note = Variant of DNA polymerase I from Thermus sp. strain 2.9
  source 1..2529: mol_type = other DNA
atgcaccatcatcatcatcatggcggtagcggcatgttaccgttgttcgaacctaaaggtcgcgtgcttctggttgatggccatcatctcgcgtatcgtaacttctttgccctgaaaggattaaccaccagccgtggcgagccggtacagggtgtctacggctttgcaaagtcgctcctgaaagctctgaaagaagacggtgatgtggtgattgttgtctttgatgcgaaagcgccaagttttcgccacgaagcgtacgaagcttacaaagccgggcgtgctccaacgccggaagactttcctcgccaattggcgcttatgaaggaattagtggatttgcttggcctcgaacgcttggaagttcccggtttcgaggcagacgacgtattagcgactctcgcaaagaaagccgaacgtgagggctatgaagtccagatcttgacagcagatcgcgatcttttccagcttttatctccgcgcatctcggtgttacacccggaagggcatcgtatcaccccggaatggctctgggagaaatatggtttgcgtcccgaacaatgggtggattttcgcgccttagcaggcgatccgagcgacaatattccgggagttaaaggtatcggctcgaagacggcgctcaagctccttaaagaatgggggtcgttggagaacttgcttaagaatttagatcaggtcaaaccagagtcagtgcgtgagaagattcttgcacacctcgaagacctcaaattaagccgcgaattgtcccgtgtacgcaccgatttgccgctcgaagttgatttccgtggccgccgcgaacctgactgggagggtcttaaagcgtttttagagcgtcttgaatttggttcgctcttgcatgaattcggccttttagaaagcccgttaccagccgaagaagcaccttggccaccgcccgaaggcgcgtttttaggttaccgtttgagtcgcccggaaccgatgtgggccgaattattggctcttgcagcgtctgcccagggacgtgtgtatcgcgcggaagaccctcatggtgcgctccgcggcctcaaagaagtccgtggactccttgccaaagacttagctgttgttgcattgcgcgaaggtcttgatttacctccgactgatgatccaatgcttcttgcgtacctcttggacccgtcaaacacgacgcccgaaggcgtagcccgtcgttacggcggcgagtggaccgaagatgcaggcgagcgcgcgttattggccgaacgtttgcacgccaatttattaggacgtttgcaaggcgaggaacgtctcctctggctttacgaagaagtggagaaaccattgagtcgcgtgctcgcgcatatggaagctaccggtgtcaaattagacgtggcgtatttggaggcactcagccttgaagttgctgccgaaatgcgccgcttggaggaagaagtattccgtttagcaggccactcctttaaccttaattctcgcgatcagttagaacgtgtgttgttcgatgaacttggtctccctcctatcggcaagacagagaagaccggtaaacgtagcacttcagcggcggttttagaagctcttcgcgaagtccatcccattgtggacaagatcttgcagtaccgcgaactcgcgaaattgaaaggcacctatattgaccctcttccggcattagtccacccgaaaacgggacgcctccatacccgcttcaaccaaacagccacggcgaccggtcgtttgtcctcctctgatccaaaccttcagaatattccagtacgtaccccattgggccagaagatccgccgcgcgtttgtagctgaggagggttggcgtttagtggccctcgattatagccaaattgaattacgtgtccttgcccatctttctggcgatgagaacctcatccgcgtgtttcaggaaggcaaagacattcacactcaaacggcaagctggatgtttggattatcagctgaagcgatcgatcctttgatgcgtcgtgcagcgaagaccatcaatttcggtgttctctacggtatgagtgcccatcgtttgtcgcaggaattaggcattccctatgaagaagctgcggcgttcattcagcgctactttcaaagctatcccaaagttaaagcatggatcgagaagactctcgaagaaggccgcacacgtggttacgtagagaccttatttggacgtcgccgctatgttcccgatttaaacgctcgcgtgaaatctgtccgtgaagccgccgaacgcatggcgttcaacatgcctgtacagggcacggcagctgacctcatgaaacttgcaatggtgcgcctttttccacaattgcgtgaagttggtgcccgcatgctcttgcaggtccacgatgaactcttgttagaagcgccaaaagagcgtgcggaagaggtggcagccctcgcgaaagaggttatggaaggcgtgtggcccttagcggtgcctcttgaagtcgaagttggtattggcgaggattggttggctgccaaaggataatga

SEQ ID NO: 1512 - protein, 841 aa, synthetic construct
  REGION 1..841: note = Variant of DNA polymerase I from Thermus sp. strain 2.9
MHHHHHHGGSGMLPLFEPKGRVLLVDGHHLAYRNFFALKGLTTSRGEPVQGVYGFAKSLLKALKEDGDVVIVVFDAKAPSFRHEAYEAYKAGRAPTPEDFPRQLALMKELVDLLGLERLEVPGFEADDVLATLAKKAEREGYEVQILTADRDLFQLLSPRISVLHPEGHRITPEWLWEKYGLRPEQWVDFRALAGDPSDNIPGVKGIGSKTALKLLKEWGSLENLLKNLDQVKPESVREKILAHLEDLKLSRELSRVRTDLPLEVDFRGRREPDWEGLKAFLERLEFGSLLHEFGLLESPLPAEEAPWPPPEGAFLGYRLSRPEPMWAELLALAASAQGRVYRAEDPHGALRGLKEVRGLLAKDLAVVALREGLDLPPTDDPMLLAYLLDPSNTTPEGVARRYGGEWTEDAGERALLAERLHANLLGRLQGEERLLWLYEEVEKPLSRVLAHMEATGVKLDVAYLEALSLEVAAEMRRLEEEVFRLAGHSFNLNSRDQLERVLFDELGLPPIGKTEKTGKRSTSAAVLEALREVHPIVDKILQYRELAKLKGTYIDPLPALVHPKTGRLHTRFNQTATATGRLSSSDPNLQNIPVRTPLGQKIRRAFVAEEGWRLVALDYSQIELRVLAHLSGDENLIRVFQEGKDIHTQTASWMFGLSAEAIDPLMRRAAKTINFGVLYGMSAHRLSQELGIPYEEAAAFIQRYFQSYPKVKAWIEKTLEEGRTRGYVETLFGRRRYVPDLNARVKSVREAAERMAFNMPVQGTAADLMKLAMVRLFPQLREVGARMLLQVHDELLLEAPKERAEEVAALAKEVMEGVWPLAVPLEVEVGIGEDWLAAKG

SEQ ID NO: 1513 - DNA, 2529 bp, synthetic construct
  misc_feature 1..2529: note = Variant of DNA polymerase I from Thermus sp. strain 2.9
  source 1..2529: mol_type = other DNA
atgcaccatcatcatcatcatggcggtagcggcatgttaccgttgttcgaacctaaaggtcgcgtgcttctggttgatggccatcatctcgcgtatcgtaacttctttgccctgaaaggattaaccaccagccgtggcgagccggtacagggtgtctacggctttgcaaagtcgctcctgaaagctctgaaagaagacggtgatgtggtgattgttgtctttgatgcgaaagcgccaagttttcgccacgaagcgtacgaagcttacaaagccgggcgtgctccaacgccggaagactttcctcgccaattggcgcttatgaaggaattagtggatttgcttggcctcgaacgcttggaagttcccggtttcgaggcagacgacgtattagcgactctcgcaaagaaagccgaacgtgagggctatgaagtccagatcttgacagcagatcgcgatcttttccagcttttatctccgcgcatctcggtgttacacccggaagggcatcgtatcaccccggaatggctctgggagaaatatggtttgcgtcccgaacaatgggtggattttcgcgccttagcaggcgatccgagcgacaatattccgggagttaaaggtatcggcgagaagacggcgctcaagctccttaaagaatgggggtcgttggagaacttgcttaagaatttagatcaggtcaaaccagagtcagtgcgtgagaagattcttgcacacctcgaagacctcaaattaagcctggaattgtcccgtgtacgcaccgatttgccgctcgaagttgatttccgtggccgccgcgaacctgactgggagggtcttaaagcgtttttagagcgtcttgaatttggttcgctcttgcatgaattcggccttttagaaagcccgttaccagccgaagaagcaccttggccaccgcccgaaggcgcgtttttaggttaccgtttgagtcgcccggaaccgatgtgggccgaattatcggctcttgcagcgtctgcccagggacgtgtgtatcgcgcggaagaccctcatggtgcgctccgcggcctcaaagaagtcaacggactccttgccaaagacttagctgttgttgcattgcgcgaaggtcttgatttacctccgactgatgatccaatgcttcttgcgtacctcttggacccgtcaaacacgacgcccgaaggcgtagcccgtcgttacggcggcgagtggaccgaagatgcaggcgagcgcgcgttattggccgaacgtttgcacgccaatttattaggacgtttgcaaggcgaggaacgtctcctctggctttacgaagaagtggagaaaccattgagtcgcgtgctcgcgcatatggaagctaccggtgtcaaattagacgtggcgtatttggaggctctcagccttgaagttgctgccgaaatgcgccgcttggaggaagaagtattccgtttagcaggccactcctttaaccttaattctcgcgatcagttagaacgtgtgttgttcgataaccttggtctccctcctatcggcaagacagagaagaccggtaaacgtagcacttcagcggcggttttagaagctcttcgcgaagtccatcccattgtggacaagatcttgcagtaccgcgaactcgcgaaattgaaaggcacctatattgaccctcttccggcattagtccacccgaaaacgggacgcctccatacccgcttcaaccaaacagccacggcgaccggtcgtttgtcctcctctgatccaaaccttcagaatattccagtacgtaccccattgggccagaagatccgccgcgcgtttgtagctgaggagggttggcgtttagtggccctcgattatagccaaattgaattacgtgtccttgcccatctttctggcgatgagaacctcatccgcgtgtttcaggaaggcaaagacattcacactcaaacggcaagctggatgtttggattatcagctgaagcgatcgatcctttgatgcgtcgtgcagcgaagaccatcaatttcggtgttctctacggtatgagtgcccatcgtttgtcgcaggaattaggcattccctatgaagaagctgcggcgttcattcagcgctactttcaaagctatcccaaagttaaagcatggatcgagaagactctcgaagaaggccgcacacgtggttacgtagagaccttatttggacgtcgccgctatgttcccgatttaaacgctcgcgtgaaatctgtccgtgaagccgccgaacgcatggcgttcaacatgcctgtacagggcacggcagctgacctcatgaaacttgcaatggtgcgcctttttccacaattgcgtgaagttggtgcccgcatgctcttgcaggtccacgatgaactcttgttagaagcgccaaaagagcgtgcggaagaggtggcagccctcgcgaaagaggttatggaaggcgtgtggcccttagcggtgcctcttgaagtcgaagttggtattggcgaggattggttggctgccaaaggataatga

SEQ ID NO: 1514 - protein, 841 aa, synthetic construct
  REGION 1..841: note = Variant of DNA polymerase I from Thermus sp. strain 2.9
MHHHHHHGGSGMLPLFEPKGRVLLVDGHHLAYRNFFALKGLTTSRGEPVQGVYGFAKSLLKALKEDGDVVIVVFDAKAPSFRHEAYEAYKAGRAPTPEDFPRQLALMKELVDLLGLERLEVPGFEADDVLATLAKKAEREGYEVQILTADRDLFQLLSPRISVLHPEGHRITPEWLWEKYGLRPEQWVDFRALAGDPSDNIPGVKGIGEKTALKLLKEWGSLENLLKNLDQVKPESVREKILAHLEDLKLSLELSRVRTDLPLEVDFRGRREPDWEGLKAFLERLEFGSLLHEFGLLESPLPAEEAPWPPPEGAFLGYRLSRPEPMWAELSALAASAQGRVYRAEDPHGALRGLKEVNGLLAKDLAVVALREGLDLPPTDDPMLLAYLLDPSNTTPEGVARRYGGEWTEDAGERALLAERLHANLLGRLQGEERLLWLYEEVEKPLSRVLAHMEATGVKLDVAYLEALSLEVAAEMRRLEEEVFRLAGHSFNLNSRDQLERVLFDNLGLPPIGKTEKTGKRSTSAAVLEALREVHPIVDKILQYRELAKLKGTYIDPLPALVHPKTGRLHTRFNQTATATGRLSSSDPNLQNIPVRTPLGQKIRRAFVAEEGWRLVALDYSQIELRVLAHLSGDENLIRVFQEGKDIHTQTASWMFGLSAEAIDPLMRRAAKTINFGVLYGMSAHRLSQELGIPYEEAAAFIQRYFQSYPKVKAWIEKTLEEGRTRGYVETLFGRRRYVPDLNARVKSVREAAERMAFNMPVQGTAADLMKLAMVRLFPQLREVGARMLLQVHDELLLEAPKERAEEVAALAKEVMEGVWPLAVPLEVEVGIGEDWLAAKG

SEQ ID NO: 1515 - DNA, 2529 bp, synthetic construct
  misc_feature 1..2529: note = Variant of DNA polymerase I from Thermus sp. strain 2.9
  source 1..2529: mol_type = other DNA
atgcaccatcatcatcatcatggcggtagcggcatgttaccgttgttcgaacctaaaggtcgcgtgcttctggttgatggccatcatctcgcgtatcgtaacttctttgccctgaaaggattaaccaccagccgtggcgagccggtacagggtgtctacggctttgcaaagtcgctcctgaaagctctgaaagaagacggtgatgtggtgattgttgtctttgatgcgaaagcgccaagttttcgccacgaagcgtacgaagcttacaaagccgggcgtgctccaacgccggaagactttcctcgccaattggcgcttatgaaggaattagtggatttgcttggcctcgaacgcttggaagttcccggtttcgaggcagacgacgtattagcgactctcgcaaagaaagccgaacgtgagggctatgaagtccagatcttgacagcagatcgcgatcttttccagcttttatctccgcgcatctcggtgttacacccggaagggcatcgtatcaccccggaatggctctgggagaaatatggtttgcgtcccgaacaatgggtggattttcgcgccttagcaggcgatccgagcgacaatattccgggagttaaaggtatcggcgagaagacggcgctcaagctccttaaagaatgggggtcgttggagaacttgcttaagaatttagatcaggtcaaaccagagtcagtgcgtgagaagattcttgcacacctcgaagacctcaaattaagccgcgaattgtcccgtgtacgcaccgatttgccgctcgaagttgatttccgtggccgccgcgaacctgactgggagggtcttaaagcgtttttagagcgtcttgaatttggttcgctcttgcatgaattcggccttttagaaagcccgttaccagccgaagaagcaccttggccaccgcccgaaggcgcgtttttaggttaccgtttgagtcgcccggaaccgatgtgggccgaattattggctcttgcagcgtctgcccagggacgtgtgtatcgcgcggaagaccctcatggtgcgctccgcggcctcaaagaagtccgtggactccttgccaaagacttagctgttgttgcattgcgcgaaggtcttgatttacctccgactgatgatccaatgcttcttgcgtacctcttggacccgtcaaacacgacgcccgaaggcgtagcccgtcgttacggcggcgagtggaccgaagatgcaggcgagcgcgcgttattggccgaacgtttgcacgccaatttattaggacgtttgcaaggcgaggaacgtctcctctggctttacgaagaagtggagaaaccattgagtcgcgtgctcgcgcatatggaagctaccggtgtcaaattagacgtggcgtatttggaggcactcagccttgaagttgctgccgaaatgcgccgcttggaggaagaagtattccgtttagcaggccactcctttaaccttaattctcgcgatcagttagaacgtgtgttgttcgatgaacttggtctccctcctatcggcaagacagagaagaccggtaaacgtagcacttcagcggcggttttagaagctcttcgcgaagtccatcccattgtggacaagatcttgcagtaccgcgaactcgcgaaattgaaaggcacctatattgaccctcttccggcattagtccacccgaaaacgggacgcctccatacccgcttcaaccaaacagccacggcgaccggtcgtttgtcctcctctgatccaaaccttcagaatattccagtacgtaccccattgggccagaagatccgccgcgcgtttgtagctgaggagggttggcgtttagtggccctcgattatagccaaattgaattacgtgtccttgcccatctttctggcgatgagaacctcatccgcgtgtttcaggaaggcaaagacattcacactcaaacggcaagctggatgtttggattatcagctgaagcgatcgatcctttgatgcgtcgtgcagcgaagaccatcaatttcggtgttctctacggtatgagtgcccatcgtttgtcgcaggaattaggcattccctatgaagaagctgcggcgttcattcagcgctacttttctagctatcccaaagttaaagcatggatcgagaagactctcgaagaaggccgcacacgtggttacgtagagaccttatttggacgtcgccgctatgttcccgatttaaacgctcgcgtgaaatctgtccgtgaagccgccgaacgcatggcgttcaacatgcctgtacagggcacggcagctgacctcatgaaacttgcaatggtgcgcctttttccacaattgcgtgaagttggtgcccgcatgctcttgcaggtccacgatgaactcttgttagaagcgccaaaagagcgtgcggaagaggtggcagccctcgcgaaagaggttatggaaggcgtgtggcccttagcggtgcctcttgaagtcgaagttggtattggcgaggattggttggctgccaaaggataatga

SEQ ID NO: 1516 - protein, 841 aa, synthetic construct
  REGION 1..841: note = Variant of DNA polymerase I from Thermus sp. strain 2.9
MHHHHHHGGSGMLPLFEPKGRVLLVDGHHLAYRNFFALKGLTTSRGEPVQGVYGFAKSLLKALKEDGDVVIVVFDAKAPSFRHEAYEAYKAGRAPTPEDFPRQLALMKELVDLLGLERLEVPGFEADDVLATLAKKAEREGYEVQILTADRDLFQLLSPRISVLHPEGHRITPEWLWEKYGLRPEQWVDFRALAGDPSDNIPGVKGIGEKTALKLLKEWGSLENLLKNLDQVKPESVREKILAHLEDLKLSRELSRVRTDLPLEVDFRGRREPDWEGLKAFLERLEFGSLLHEFGLLESPLPAEEAPWPPPEGAFLGYRLSRPEPMWAELLALAASAQGRVYRAEDPHGALRGLKEVRGLLAKDLAVVALREGLDLPPTDDPMLLAYLLDPSNTTPEGVARRYGGEWTEDAGERALLAERLHANLLGRLQGEERLLWLYEEVEKPLSRVLAHMEATGVKLDVAYLEALSLEVAAEMRRLEEEVFRLAGHSFNLNSRDQLERVLFDELGLPPIGKTEKTGKRSTSAAVLEALREVHPIVDKILQYRELAKLKGTYIDPLPALVHPKTGRLHTRFNQTATATGRLSSSDPNLQNIPVRTPLGQKIRRAFVAEEGWRLVALDYSQIELRVLAHLSGDENLIRVFQEGKDIHTQTASWMFGLSAEAIDPLMRRAAKTINFGVLYGMSAHRLSQELGIPYEEAAAFIQRYFSSYPKVKAWIEKTLEEGRTRGYVETLFGRRRYVPDLNARVKSVREAAERMAFNMPVQGTAADLMKLAMVRLFPQLREVGARMLLQVHDELLLEAPKERAEEVAALAKEVMEGVWPLAVPLEVEVGIGEDWLAAKG

SEQ ID NO: 1517 - DNA, 2529 bp, synthetic construct
  misc_feature 1..2529: note = Variant of DNA polymerase I from Thermus sp. strain 2.9
  source 1..2529: mol_type = other DNA
atgcaccatcatcatcatcatggcggtagcggcatgttaccgttgttcgaacctaaaggtcgcgtgcttctggttgatggccatcatctcgcgtatcgtaacttctttgccctgaaaggattaaccaccagccgtggcgagccggtacagggtgtctacggctttgcaaagtcgctcctgaaagctctgaaagaagacggtgatgtggtgattgttgtctttgatgcgaaagcgccaagttttcgccacgaagcgtacagggcttacaaagccgggcgtgctccaacgccggaagactttcctcgccaattggcgcttatgaaggaattagtggatttgcttggcctcgaacgcttggaagttcccggtttcgaggcagacgacgtattagcgactctcgcaaagaaagccgaacgtgagggctatgaagtccagatcttgacagcagatcgcgatcttttccagcttttatctccgcgcatctcggtgttacacccggaagggcatcgtatcaccccggaatggctctgggagaaatatggtttgcgtcccgaacaatgggtggattttcgcgccttagcaggcgatccgagcgacaatattccgggagttaaaggtatcggcgagaagacggcgctcaagctccttaaagaatgggggtcgttggagaacttgcttaagaatttagatcaggtcaaaccagagtcagtgcgtgagaagattcttgcacacctcgaagacctcaaattaagccgcgaattgtcccgtgtacgcaccgatttgccgctcgaagttgatttccgtggccgccgcgaacctgactgggagggtcttaaagcgtttttagagcgtcttgaatttggttcgctcttgcatgaattcggccttttagaaagcccgttaccagccgaagaagcaccttggccaccgcccgaaggcgcgtttttaggttaccgtttgagtcgcccggaaccgatgtgggccgaattattggctcttgcagcgtctgcccagggacgtgtgtatcgcgcggaagaccctcatggtgcgctccgcggcctcaaagaagtccgtggactccttgccaaagacttagctgttgttgcattgcgcgaaggtcttgatttacctccgactgatgatccaatgcttcttgcgtacctcttggacccgtcaaacacgacgcccgaaggcgtagcccgtcgttacggcggcgagtggaccgaagatgcaggcgagcgcgcgttattggccgaacgtttgcacgccaatttattaggacgtttgcaaggcgaggaacgtctcctctggctttacgaagaagtggagaaaccattgagtcgcgtgctcgcgcatatggaagctaccggtgtcaaattagacgtggcgtatttggaggcactcagccttgaagttgctgccgaaatgcgccgcttggaggaagaagtattccgtttagcaggccactcctttaaccttaattctcgcgatcagttagaacgtgtgttgttcgatgaacttggtctccctcctatcggcaagacagagaagaccggtaaacgtagcacttcagcggcggttttagaagctcttcgcgaagtccatcccattgtggacaagatcttgcagtaccgcgaactcgcgaaattgaaaggcacctatattgaccctcttccggcattagtccacccgaaaacgggacgcctccatacccgcttcaaccaaacagccacggcgaccggtcgtttgtcctcctctgatccaaaccttcagaatattccagtacgtaccccattgggccagaagatccgccgcgcgtttgtagctgaggagggttggcgtttagtggccctcgattatagccaaattgaattacgtgtccttgcccatctttctggcgatgagaacctcatccgcgtgtttcaggaaggcaaagacattcacactcaaacggcaagctggatgtttggattatcagctgaagcgatcgatcctttgatgcgtcgtgcagcgaagaccatcaatttcggtgttctctacggtatgagtgcccatcgtttgtcgcaggaattaggcattccctatgaagaagctgcggcgttcattcagcgctactttcaaagctatcccaaagttaaagcatggatcgagaagactctcgaagaaggccgcacacgtggttacgtagagaccttatttggacgtcgccgctatgttcccgatttaaacgctcgcgtgaaatctgtccgtgaagccgccgaacgcatggcgttcaacatgcctgtacagggcacggcagctgacctcatgaaacttgcaatggtgcgcctttttccacaattgcgtgaagttggtgcccgcatgctcttgcaggtccacgatgaactcttgttagaagcgccaaaagagcgtgcggaagaggtggcagccctcgcgaaagaggttatggaaggcgtgtggcccttagcggtgcctcttgaagtcgaagttggtattggcgaggattggttggctgccaaaggataatga

SEQ ID NO: 1518 - protein, 841 aa, synthetic construct
  REGION 1..841: note = Variant of DNA polymerase I from Thermus sp. strain 2.9
MHHHHHHGGSGMLPLFEPKGRVLLVDGHHLAYRNFFALKGLTTSRGEPVQGVYGFAKSLLKALKEDGDVVIVVFDAKAPSFRHEAYRAYKAGRAPTPEDFPRQLALMKELVDLLGLERLEVPGFEADDVLATLAKKAEREGYEVQILTADRDLFQLLSPRISVLHPEGHRITPEWLWEKYGLRPEQWVDFRALAGDPSDNIPGVKGIGEKTALKLLKEWGSLENLLKNLDQVKPESVREKILAHLEDLKLSRELSRVRTDLPLEVDFRGRREPDWEGLKAFLERLEFGSLLHEFGLLESPLPAEEAPWPPPEGAFLGYRLSRPEPMWAELLALAASAQGRVYRAEDPHGALRGLKEVRGLLAKDLAVVALREGLDLPPTDDPMLLAYLLDPSNTTPEGVARRYGGEWTEDAGERALLAERLHANLLGRLQGEERLLWLYEEVEKPLSRVLAHMEATGVKLDVAYLEALSLEVAAEMRRLEEEVFRLAGHSFNLNSRDQLERVLFDELGLPPIGKTEKTGKRSTSAAVLEALREVHPIVDKILQYRELAKLKGTYIDPLPALVHPKTGRLHTRFNQTATATGRLSSSDPNLQNIPVRTPLGQKIRRAFVAEEGWRLVALDYSQIELRVLAHLSGDENLIRVFQEGKDIHTQTASWMFGLSAEAIDPLMRRAAKTINFGVLYGMSAHRLSQELGIPYEEAAAFIQRYFQSYPKVKAWIEKTLEEGRTRGYVETLFGRRRYVPDLNARVKSVREAAERMAFNMPVQGTAADLMKLAMVRLFPQLREVGARMLLQVHDELLLEAPKERAEEVAALAKEVMEGVWPLAVPLEVEVGIGEDWLAAKG

SEQ ID NO: 1519 - DNA, 2529 bp, synthetic construct
  misc_feature 1..2529: note = Variant of DNA polymerase I from Thermus sp. strain 2.9
  source 1..2529: mol_type = other DNA
atgcaccatcatcatcatcatggcggtagcggcatgttaccgttgttcgaacctaaaggtcgcgtgcttctggttgatggccatcatctcgcgtatcgtaacttctttgccctgaaaggattaaccaccagccgtggcgagccggtacagggtgtctacggctttgcaaagtcgctcctgaaagctctgaaagaagacggtgatgtggtgattgttgtctttgatgcgaaagcgccaagttttcgccacgaagcgtacgaagcttacaaagccgggcgtgctccaacgccggaagactttcctcgccaattggcgcttatgaaggaattagtggatttgcttggcctcgaacgcttggaagttcccggtttcgaggcagacgacgtattagcgactctcgcaaagaaagccgaacgtgagggctatgaagtccagatcttgacagcagatcgcgatcttttccagcttttatctccgcgcatctcggtgttacacccggaagggcatcgtatcaccccggaatggctctgggagaaatatggtttgcgtcccgaacaatgggtggattttcgcgccttagcaggcgatccgagcgacaatattccgggagttaaaggtatcggcgagaagacggcgctcaagctccttaaagaatgggggtcgttggagaacttgcttaagaatttagatcaggtcaaaccagagtcagtgcgtgagaagattcttgcacacctcgaagacctcaaattaagccgcgaattgtcccgtgtacgcaccgatttgccgctcgaagttgatttccgtggtcgccgcgaacctgactgggagggtcttaaagcgtttttagagcgtcttgaatttggttcgctcttgcatgaattcggccttttagaaagcccgttaccagccgaagaagcaccttggccaccgcccgaaggcgcgtttttaggttaccgtttgagtcgcccggaaccgatgtgggccgaattatcggctcttgcagcgtctgcccagggacgtgtgtatcgcgcggaagaccctcatggtgcgctccgcggcctcaaagaagtccgtggactccttgccaaagacttagctgttgttgcattgcgcgaaggtcttgatttacctccgactgatgatccaatgcttcttgcgtacctcttggacccgtcaaacacgacgcccgaaggcgtagcccgtcgttacggcggcgagtggaccgaagatgcaggcgagcgcgcgttattggccgaacgtttgcacgccaatttattaggacgtttgcaaggcgaggaacgtctcctctggctttacgaagaagtggagaaaccattgagtcgcgtgctcgcgcatatggaagctaccggtgtcaaattagacgtggcgtatttggaggctctcagccttgaagttgctgccgaaatgcgccgcttggaggaagaagtattccgtttagcaggccactcctttaaccttaattctcgcgatcagttagaacgtgtgttgttcgatgaacttggtctccctcctatcggcaagacagagaagaccggtaaacgtagcacttcagcggcggttttagaagctcttcgcgaagtccatcccattgtggacaagatcttgcagtaccgcgaactcgcgaaattgaaaggcacctatattgaccctcttccggcattagtccacccgaaaacgggacgcctccatacccgcttcaaccaaacagccacggcgaccggtcgtttgtcctcctctgatccaaaccttcagaatattccagtacgtaccccattgggccagaagatccgccgcgcgtttgtagctgaggagggttggcgtttagtggccctcgattatagccaaattgaattacgtgtccttgcccatctttctggcgatgagaacctcatccgcgtgtttcaggaaggcaaagacattcacactcaaacggcaagctggatgtttggattatcagctgaagcgatcgatcctttgatgcgtcgtgcagcgaagaccattaatttcggtgttctctacggtatgagtgcccatcgtttgtcgcaggaattaggcattccctatgaagaagctgtcgcgttcattcagcgctactttcaaagctatcccaaagttaaagcatggatcgagaagactctcgaagaaggccgcacacgtggttacgtagagaccttatttggacgtcgccgctatgttcccgatttaaacgctcgcgtgaaatctgtccgtgaagccgccgaacgcatggcgttcaacatgcctgtacagggcacggcagctgacctcatgaaacttgcaatggtgcgcctttttccacaattgcgtgaagttggtgcccgcatgctcttgcaggtccacgatgaactcttgttagaagcgccaaaagagcgtgcggaagaggtggcagccctcgcgaaagaggttatggaaggcgtgtggcccttagcggtgcctcttgaagtcgaagttggtattggcgaggattggttggctgccaaaggataatga

SEQ ID NO: 1520 - protein, 841 aa, synthetic construct
  REGION 1..841: note = Variant of DNA polymerase I from Thermus sp. strain 2.9
MHHHHHHGGSGMLPLFEPKGRVLLVDGHHLAYRNFFALKGLTTSRGEPVQGVYGFAKSLLKALKEDGDVVIVVFDAKAPSFRHEAYEAYKAGRAPTPEDFPRQLALMKELVDLLGLERLEVPGFEADDVLATLAKKAEREGYEVQILTADRDLFQLLSPRISVLHPEGHRITPEWLWEKYGLRPEQWVDFRALAGDPSDNIPGVKGIGEKTALKLLKEWGSLENLLKNLDQVKPESVREKILAHLEDLKLSRELSRVRTDLPLEVDFRGRREPDWEGLKAFLERLEFGSLLHEFGLLESPLPAEEAPWPPPEGAFLGYRLSRPEPMWAELSALAASAQGRVYRAEDPHGALRGLKEVRGLLAKDLAVVALREGLDLPPTDDPMLLAYLLDPSNTTPEGVARRYGGEWTEDAGERALLAERLHANLLGRLQGEERLLWLYEEVEKPLSRVLAHMEATGVKLDVAYLEALSLEVAAEMRRLEEEVFRLAGHSFNLNSRDQLERVLFDELGLPPIGKTEKTGKRSTSAAVLEALREVHPIVDKILQYRELAKLKGTYIDPLPALVHPKTGRLHTRFNQTATATGRLSSSDPNLQNIPVRTPLGQKIRRAFVAEEGWRLVALDYSQIELRVLAHLSGDENLIRVFQEGKDIHTQTASWMFGLSAEAIDPLMRRAAKTINFGVLYGMSAHRLSQELGIPYEEAVAFIQRYFQSYPKVKAWIEKTLEEGRTRGYVETLFGRRRYVPDLNARVKSVREAAERMAFNMPVQGTAADLMKLAMVRLFPQLREVGARMLLQVHDELLLEAPKERAEEVAALAKEVMEGVWPLAVPLEVEVGIGEDWLAAKG

SEQ ID NO: 1521 - DNA, 2529 bp, synthetic construct
  misc_feature 1..2529: note = Variant of DNA polymerase I from Thermus sp. strain 2.9
  source 1..2529: mol_type = other DNA
atgcaccatcatcatcatcatggcggtagcggcatgttaccgttgttcgaacctaaaggtcgcgtgcttctggttgatggccatcatctcgcgtatcgtaacttctttgccctgaaaggattaaccaccagccgtggcgagccggtacagggtgtctacggctttgcaaagtcgctcctgaaagctctgaaagaagacggtgatgtggtgattgttgtctttgatgcgaaagcgccaagttttcgccacgaagcgtacgaagcttacaaagccgggcgtgctccaacgccggaagactttcctcgccaattggcgcttatgaaggaattagtggatttgcttggcctcgaacgcttggaagttcccggtttcgaggcagacgacgtattagcgactctcgcaaagaaagccgaacgtgagggctatgaagtccagatcttgacagcagatcgcgatcttttccagcttttatctccgcgcatctcggtgttacacccggaagggcatcgtatcaccccggaatggctctgggagaaatatggtttgcgtcccgaacaatgggtggattttcgcgccttagcaggcgatccgagcgacaatattccgggagttaaaggtatcggcgagaagacggcgctcaagctccttaaagaatgggggtcgttggagaacttgcttaagaatttagatcaggtcaaaccagagtcagtgcgtgagaagattcttgcacacctcgaagacctcaaattaagccgcgaattgtcccgtgtacgcaccgatttgccgctcgaagttgatttccgtggccgccgcgaacctgactgggagggtcttaaagcgtttttagagcgtcttgaatttggttcgctcttgcatgaattcggccttttagaaagcccgttaccagccgaagaagcaccttggccaccgcccgaaggcgcgtttttaggttaccgtttgagtcgcccggaaccgatgtgggccgaattattggctcttgcagcgtctgcccagggacgtgtgtatcgcgcggaagaccctcatggtgcgctccgcggcctcaaagaagtccgtggactccttgccaaagacttagctgttgttgcattgcgcgaaggtcttgatttacctccgactgatgatccaatgcttcttgcgtacctcttggacccgtcaaacacgacgcccgaaggcgtagcccgtcgttacggcggcgagtggaccgaagatgcaggcgagcgcgcgttattggccgaacgtttgcacgccaatttattaggacgtttgcaaggcgaggaacgtctcctctggctttacgaagaagtggagaaaccattgagtcgcgtgctcgcgcatatggaagctaccggtgtcaaattagacgtggcgtatttggaggcactcagcggggaagttgctgccgaaatgcgccgcttggaggaagaagtattccgtttagcaggccactcctttaaccttaattctcgcgatcagttagaacgtgtgttgttcgatgaacttggtctccctcctatcggcaagacagagaagaccggtaaacgtagcacttcagcggcggttttagaagctcttcgcgaagtccatcccattgtggacaagatcttgcagtaccgcgaactcgcgaaattgaaaggcacctatattgaccctcttccggcattagtccacccgaaaacgggacgcctccatacccgcttcaaccaaacagccacggcgaccggtcgtttgtcctcctctgatccaaaccttcagaatattccagtacgtaccccattgggccagaagatccgccgcgcgtttgtagctgaggagggttggcgtttagtggccctcgattatagccaaattgaattacgtgtccttgcccatctttctggcgatgagaacctcatccgcgtgtttcaggaaggcaaagacattcacactcaaacggcaagctggatgtttggattatcagctgaagcgatcgatcctttgatgcgtcgtgcagcgaagaccatcaatttcggtgttctctacggtatgagtgcccatcgtttgtcgcaggaattaggcattccctatgaagaagctgcggcgttcattcagcgctactttcaaagctatcccaaagttaaagcatggatcgagaagactctcgaagaaggccgcacacgtggttacgtagagaccttatttggacgtcgccgctatgttcccgatttaaacgctcgcgtgaaatctgtccgtgaagccgccgaacgcatggcgttcaacatgcctgtacagggcacggcagctgacctcatgaaacttgcaatggtgcgcctttttccacaattgcgtgaagttggtgcccgcatgctcttgcaggtccacgatgaactcttgttagaagcgccaaaagagcgtgcggaagaggtggcagccctcgcgaaagaggttatggaaggcgtgtggcccttagcggtgcctcttgaagtcgaagttggtattggcgaggattggttggctgccaaaggataatga

SEQ ID NO: 1522 - protein, 841 aa, synthetic construct
  REGION 1..841: note = Variant of DNA polymerase I from Thermus sp. strain 2.9
MHHHHHHGGSGMLPLFEPKGRVLLVDGHHLAYRNFFALKGLTTSRGEPVQGVYGFAKSLLKALKEDGDVVIVVFDAKAPSFRHEAYEAYKAGRAPTPEDFPRQLALMKELVDLLGLERLEVPGFEADDVLATLAKKAEREGYEVQILTADRDLFQLLSPRISVLHPEGHRITPEWLWEKYGLRPEQWVDFRALAGDPSDNIPGVKGIGEKTALKLLKEWGSLENLLKNLDQVKPESVREKILAHLEDLKLSRELSRVRTDLPLEVDFRGRREPDWEGLKAFLERLEFGSLLHEFGLLESPLPAEEAPWPPPEGAFLGYRLSRPEPMWAELLALAASAQGRVYRAEDPHGALRGLKEVRGLLAKDLAVVALREGLDLPPTDDPMLLAYLLDPSNTTPEGVARRYGGEWTEDAGERALLAERLHANLLGRLQGEERLLWLYEEVEKPLSRVLAHMEATGVKLDVAYLEALSGEVAAEMRRLEEEVFRLAGHSFNLNSRDQLERVLFDELGLPPIGKTEKTGKRSTSAAVLEALREVHPIVDKILQYRELAKLKGTYIDPLPALVHPKTGRLHTRFNQTATATGRLSSSDPNLQNIPVRTPLGQKIRRAFVAEEGWRLVALDYSQIELRVLAHLSGDENLIRVFQEGKDIHTQTASWMFGLSAEAIDPLMRRAAKTINFGVLYGMSAHRLSQELGIPYEEAAAFIQRYFQSYPKVKAWIEKTLEEGRTRGYVETLFGRRRYVPDLNARVKSVREAAERMAFNMPVQGTAADLMKLAMVRLFPQLREVGARMLLQVHDELLLEAPKERAEEVAALAKEVMEGVWPLAVPLEVEVGIGEDWLAAKG

SEQ ID NO: 1523 - DNA, 2529 bp, synthetic construct
  misc_feature 1..2529: note = Variant of DNA polymerase I from Thermus sp. strain 2.9
  source 1..2529: mol_type = other DNA
atgcaccatcatcatcatcatggcggtagcggcatgttaccgttgttcgaacctaaaggtcgcgtgcttctggttgatggccatcatctcgcgtatcgtaacttctttgccctgaaaggattaaccaccagccgtggcgagccggtacagggtgtctacggctttgcaaagtcgctcctgaaagctctgaaagaagacggtgatgtggtgattgttgtctttgatgcgaaagcgccaagttttcgccacgaagcgtacgaagcttacaaagccgggcgtgctccaacgccggaagactttcctcgccaattggcgcttatgaaggaattagtggatttgcttggcctcgaacgcttggaagttcccggtttcgaggcagacgacgtattagcgactctcgcaaagaaagccgaacgtgagggctatgaagtccagatcttgacagcagatcgcgatcttttccagcttttatctccgcgcatctcggtgttacacccggaagggcatcgtatcaccccggaatggctctgggagaaatatggtttgcgtcccgaacaatgggtggattttcgcgccttagcaggcgatccgagcgacaatattccgggagttaaaggtatcggcgagaagacggcgctcaagctccttaaagaatgggggtcgttggagaacttgcttaagaatttagatcaggtcaaaccagagtcagtgcgtgagaagattcttgcacacctcgaagacctcaaattaagcctggaattgtcccgtgtacgcaccgatttgccgctcgaagttgatttccgtggccgccgcgaacctgactgggagggtcttaaagcgtttttagagcgtcttgaatttggttcgctcttgcatgaattcggccttttagaaagcccgttaccagccgaagaagcaccttggccaccgcccgaaggcgcgtttttaggttaccgtttgagtcgcccggaaccgatgtgggccgaattatcggctcttgcagcgtctgcccaggggcgtgtgtatcgcgcggaagaccctcatggtgcgctccgcggcctcaaagaagtccgtggactccttgccaaagacttagctgttgttgcattgcgcgaaggtcttgatttacctccgactgatgatccaatgcttcttgcgtacctcttggacccgtcaaacacgacgcccgaaggcgtagcccgtcgttacggcggcgagtggaccgaagatgcagctgagcgcgcgttattggccgaacgtttgcacgccaatttattaggacgtttgcaaggcgaggaacgtctcctctggctttacgaagaagtggagaaaccattgagtcgcgtgctcgcgcatatggaagctaccggtgtcaaattagacgtggcgtatttggaggctctcagccttgaagttgctgccgaaatgcgccgcttggaggaagaagtattccgtttagcaggccactcctttaaccttaattctcgcgatcagttagaacgtgtgttgttcgataaccttggtctccctcctatcggcaagacagagaagaccggtaaacgtagcacttcagcggcggttttagaagctcttcgcgaagtccatcccattgtggacaagatcttgcagtaccgcgaactcgcgaaattgaaaggcacctatattgaccctcttccggcattagtccacccgaaaacgggacgcctccatacccgcttcaaccaaacagccacggcgaccggtcgtttgtcctcctctgatccaaaccttcagaatattccagtacgtaccccattgggccagaagatccgccgcgcgtttgtagctgaggagggttggcgtttagtggccctcgattatagccaaattgaattacgtgtccttgcccatctttctggcgatgagaacctcatccgcgtgtttcaggaaggcaaagacattcacactcaaacggcaagctggatgtttggattatcagcagaagcgatcgatcctttgatgcgtcgtgcagcgaagaccattaatttcggtgttctctacggtatgagtgcccatcgtttgtcgcaggaattaggcattccctatgaagaagctgccgcgttcattcagaagtactttcaaagctatcccaaagttaaagcatggatcgagaagactctcgaagaaggccgcacacgtggttacgtagagaccttatttggacgtcgccgctatgttcccgatttaaacgctcgcgtgaaatctgtccgtgaagccgccgaacgcatggcgttcaacatgcctgtacagggcacggcagctgacctcatgaaacttgcaatggtgcgcctttttccacaattgcgtgaagttggtgcccgcatgctcttgcaggtccacgatgaactcttgttagaagcgccaaaagagcgtgcggaagaggtggcagccctcgcgaaagaggttatggaaggcgtgtggcccttagcggtgcctcttgaagtcgaagttggtattggcgaggattggttggctgccaaaggataatga

SEQ ID NO: 1524 - protein, 841 aa, synthetic construct
  REGION 1..841: note = Variant of DNA polymerase I from Thermus sp. strain 2.9
MHHHHHHGGSGMLPLFEPKGRVLLVDGHHLAYRNFFALKGLTTSRGEPVQGVYGFAKSLLKALKEDGDVVIVVFDAKAPSFRHEAYEAYKAGRAPTPEDFPRQLALMKELVDLLGLERLEVPGFEADDVLATLAKKAEREGYEVQILTADRDLFQLLSPRISVLHPEGHRITPEWLWEKYGLRPEQWVDFRALAGDPSDNIPGVKGIGEKTALKLLKEWGSLENLLKNLDQVKPESVREKILAHLEDLKLSLELSRVRTDLPLEVDFRGRREPDWEGLKAFLERLEFGSLLHEFGLLESPLPAEEAPWPPPEGAFLGYRLSRPEPMWAELSALAASAQGRVYRAEDPHGALRGLKEVRGLLAKDLAVVALREGLDLPPTDDPMLLAYLLDPSNTTPEGVARRYGGEWTEDAAERALLAERLHANLLGRLQGEERLLWLYEEVEKPLSRVLAHMEATGVKLDVAYLEALSLEVAAEMRRLEEEVFRLAGHSFNLNSRDQLERVLFDNLGLPPIGKTEKTGKRSTSAAVLEALREVHPIVDKILQYRELAKLKGTYIDPLPALVHPKTGRLHTRFNQTATATGRLSSSDPNLQNIPVRTPLGQKIRRAFVAEEGWRLVALDYSQIELRVLAHLSGDENLIRVFQEGKDIHTQTASWMFGLSAEAIDPLMRRAAKTINFGVLYGMSAHRLSQELGIPYEEAAAFIQKYFQSYPKVKAWIEKTLEEGRTRGYVETLFGRRRYVPDLNARVKSVREAAERMAFNMPVQGTAADLMKLAMVRLFPQLREVGARMLLQVHDELLLEAPKERAEEVAALAKEVMEGVWPLAVPLEVEVGIGEDWLAAKG

SEQ ID NO: 1525 - DNA, 2529 bp, synthetic construct
  misc_feature 1..2529: note = Variant of DNA polymerase I from Thermus sp. strain 2.9
  source 1..2529: mol_type = other DNA
atgcaccatcatcatcatcatggcggtagcggcatgttaccgttgttcgaacctaaaggtcgcgtgcttctggttgatggccatcatctcgcgtatcgtaacttctttgccctgaaaggattaaccaccagccgtggcgagccggtacagggtgtctacggctttgcaaagtcgctcctgaaagctctgaaagaagacggtgatgtggtgattgttgtctttgatgcgaaagcgccaagttttcgccacgaagcgtacgaagcttacaaagccgggcgtgctccaacgccggaagactttcctcgccaattggcgcttatgaaggaattagtggatttgcttggcctcgaacgcttggaagttcccggtttcgaggcagacgacgtattagcgactctcgcaaagaaagccgaacgtgagggctatgaagtccagatcttgacagcagatcgcgatcttttccagcttttatctccgcgcatctcggtgttacacccggaagggcatcgtatcaccccggaatggctctgggagaaatatggtttgcgtcccgaacaatgggtggattttcgcgccttagcaggcgatccgagcgacaatattccgggagttaaaggtatcggcgagaagacggcgctcaagctccttaaagaatgggggtcgttggagaacttgcttaagaatttagatcaggtcaaaccagagtcagtgcgtgagaagattcttgcacacctcgaagacctcaaattaagccgcgaattgtcccgtgtacgcaccgatttgccgctcgaagttgatttccgtggccgccgcgaacctgactgggagggtcttaaagcgtttttagagcgtcttgaatttggttcgctcttgcatgaattcggccttttagaaagcccgttaccagccgaagaagcaccttggccaccgcccgaaggcgcgtttttaggttaccgtttgagtcgcccggaaccgatgtgggccgaattattggctcttgcagcgtctgcccagggacgtgtgtatcgcgcggaagaccctcatggtgcgctccgcggcctcaaagaagtccgtggactccttgccaaagacttagctgttgttgcattgcgcgaaggtcttgatttacctccgactgatgatccaatgcttcttgcgtacctcttggacccgtcaaacacgacgcccgaaggcgtagcccgtcgttacggcggcgagtggaccgaagatgcaggcgagcgcgcgttattggccgaacgtttgcacgccaatttattaggacgtttgcaaggcgaggaacgtctcctctggctttacgaagaagtggagaaaccattgagtcgcgtgctcgcgcatatggaagctaccggtgtcaaattagacgtggcgtatttggaggcactcagccttgaagttgctgccgaaatgcgccgcttggaggaagaagtattccgtttagcaggccactcctttaaccttaattctcgcgatcagttagaacgtgtgttgttcgatgaacttggtctccctcctatcggcaagacagagaagaccggtaaacgtagcacttcagcggcggttttagaagctcttcgcgaagtccatcccattgtggacaagatcttgcagtaccgcgaactcgcgaaattgaaaggcacctatattgaccctcttccggcattagtccacccgaaaacgggacgcctccatacccgcttcaaccaaacagccacggcgaccggtcgtttgtcctcctctgatccaaaccttcagaatattccagtacgtacccatttgggccagaagatccgccgcgcgtttgtagctgaggagggttggcgtttagtggccctcgattatagccaaattgaattacgtgtccttgcccatctttctggcgatgagaacctcatccgcgtgtttcaggaaggcaaagacattcacactcaaacggcaagctggatgtttggattatcagctgaagcgatcgatcctttgatgcgtcgtgcagcgaagaccatcaatttcggtgttctctacggtatgagtgcccatcgtttgtcgcaggaattaggcattccctatgaagaagctgcggcgttcattcagcgctactttcaaagctatcccaaagttaaagcatggatcgagaagactctcgaagaaggccgcacacgtggttacgtagagaccttatttggacgtcgccgctatgttcccgatttaaacgctcgcgtgaaatctgtccgtgaagccgccgaacgcatggcgttcaacatgcctgtacagggcacggcagctgacctcatgaaacttgcaatggtgcgcctttttccacaattgcgtgaagttggtgcccgcatgctcttgcaggtccacgatgaactcttgttagaagcgccaaaagagcgtgcggaagaggtggcagccctcgcgaaagaggttatggaaggcgtgtggcccttagcggtgcctcttgaagtcgaagttggtattggcgaggattggttggctgccaaaggataatga

SEQ ID NO: 1526 - protein, 841 aa, synthetic construct
  REGION 1..841: note = Variant of DNA polymerase I from Thermus sp. strain 2.9
MHHHHHHGGSGMLPLFEPKGRVLLVDGHHLAYRNFFALKGLTTSRGEPVQGVYGFAKSLLKALKEDGDVVIVVFDAKAPSFRHEAYEAYKAGRAPTPEDFPRQLALMKELVDLLGLERLEVPGFEADDVLATLAKKAEREGYEVQILTADRDLFQLLSPRISVLHPEGHRITPEWLWEKYGLRPEQWVDFRALAGDPSDNIPGVKGIGEKTALKLLKEWGSLENLLKNLDQVKPESVREKILAHLEDLKLSRELSRVRTDLPLEVDFRGRREPDWEGLKAFLERLEFGSLLHEFGLLESPLPAEEAPWPPPEGAFLGYRLSRPEPMWAELLALAASAQGRVYRAEDPHGALRGLKEVRGLLAKDLAVVALREGLDLPPTDDPMLLAYLLDPSNTTPEGVARRYGGEWTEDAGERALLAERLHANLLGRLQGEERLLWLYEEVEKPLSRVLAHMEATGVKLDVAYLEALSLEVAAEMRRLEEEVFRLAGHSFNLNSRDQLERVLFDELGLPPIGKTEKTGKRSTSAAVLEALREVHPIVDKILQYRELAKLKGTYIDPLPALVHPKTGRLHTRFNQTATATGRLSSSDPNLQNIPVRTHLGQKIRRAFVAEEGWRLVALDYSQIELRVLAHLSGDENLIRVFQEGKDIHTQTASWMFGLSAEAIDPLMRRAAKTINFGVLYGMSAHRLSQELGIPYEEAAAFIQRYFQSYPKVKAWIEKTLEEGRTRGYVETLFGRRRYVPDLNARVKSVREAAERMAFNMPVQGTAADLMKLAMVRLFPQLREVGARMLLQVHDELLLEAPKERAEEVAALAKEVMEGVWPLAVPLEVEVGIGEDWLAAKG

SEQ ID NO: 1527 - DNA, 2529 bp, synthetic construct
  misc_feature 1..2529: note = Variant of DNA polymerase I from Thermus sp. strain 2.9
  source 1..2529: mol_type = other DNA
atgcaccatcatcatcatcatggcggtagcggcatgttaccgttgttcgaacctaaaggtcgcgtgcttctggttgatggccatcatctcgcgtatcgtaacttctttgccctgaaaggattaaccaccagccgtggcgagccggtacagggtgtctacggctttgcaaagtcgctcctgaaagctctgaaagaagacggtgatgtggtgattgttgtctttgatgcgaaagcgccaagttttcgccacgaagcgtacgaagcttacaaagccgggcgtgctccaacgccggaagactttcctcgccaattggcgcttatgaaggaattagtggatttgcttggcctcgaacgcttggaagttcccggtttcgaggcagacgacgtattagcgactctcgcaaagaaagccgaacgtgagggctatgaagtccagatcttgacagcagatcgcgatcttttccagcttttatctccgcgcatctcggtgttacacccggaagggcatctgatcaccccggaatggctctgggagaaatatggtttgcgtcccgaacaatgggtggattttcgcgccttagtcggcgatccgagcgacaatattccgggagttaaaggtatcggcgagaagacggcgctcaagctccttaaagaatgggggtcgttggagaacttgcttaagaatttagatcaggtcaaaccagagtcagtgcgtgagaagattcttgcacacctcgaagacctcaaattaagccgcgaattgtcccgtgtacgcaccgatttgccgctcgaagttgatttccgtggccgccgcgaacctgactgggagggtcttaaagcgtttttagagcgtcttgaatttggttcgctcttgcatgaattcggccttttagaaagcccgttaccagccgaagaagcaccttggccaccgcccgaaggcgcgtttttaggttaccgtttgagtcgcccggaaccgatgtgggccgaattattggctcttgcagcgtctgcccagggacgtgtgtatcgcgcggaagaccctcatggtgcgctccgcggcctcaaagaagtccgtggactccttgccaaagacttagctgttgttgcattgcgcgaaggtcttgatttacctccgactgatgatccaatgcttcttgcgtacctcttggacccgtcaaacacgacgcccgaaggcgtagcccgtcgttacggcggcgagtggaccgaagatgcaggcgagcgcgcgttattggccgaacgtttgcaccagaatttattaggacgtttgcaaggcgaggaacgtctcctctggctttacgaagaagtggagaaaccattgagtcgcgtgctcgctcatatggaagctaccggtgtcaaattagacgtggcgtatttggaggcactcagccttgaagttgctgccgaactgcgccgcttggaggaagaagtattccgtttagcaggccactcctttaaccttaattctcgcgatcagttagaacgtgtgttgttcgatgaacttggtctccctcctatcggcaagacagagaagaccggtaaacgtagcacttcagcggcggttttagaagctcttcgcgaagtccatcccattgtggacaagatcttgcagtaccgcgaactcgcgaaattgaaaggcacctatattgaccctcttccggcattagtccacccgaaaacgggacgcctccatacccgcttcaaccaaacagccacggcgaccggtcgtttgtcctcctctgatccaaaccttcagaatattccagtacgtaccccattgggccagaagatccgccgcgcgtttgtagctgaggagggttggcgtttagtggccctcgattatagccaaattgaattacgtgtccttgcccatctttctggcgatgagaacctcatccgcgtgtttcaggaaggcaaagacattcacactcaaacggcaagctggatgtttggattatcagctgaagcgatcgatcctttgatgcgtcgtgcagcgaagaccatcaatttcggtgttctctacggtatgagtgcccaccgtttgtcgcaggaattaggcattccctatgaagaagctgcggcgttcattcagcgctactttcaaagctatcccaaagttaaagcatggatcgagaagactctcgaagaaggccgcacacgtggttacgtagagaccttatttggacgtcgccgctatgttcccgatttaaccgctcgcgtgaaatctgtccgtgaagccgccgaacgcatggcgttcaacatgcctgtacagggcacggcagctgacctcatgaaacttgcaatggtgcgcctttttccacaattgcgtgaagttggtgcccgcatgctcttgcaggtccacgatgaactcttgttagaagcgccaaaagagcgtgcggaagaggtggcagccctcgcgaaagaggttatggaaggcgtgtggcccttagcggtgcctcttgaagtcgaagttggtattggcgaggattggttggctgccaaaggataatga

SEQ ID NO: 1528 - protein, 841 aa, synthetic construct
  REGION 1..841: note = Variant of DNA polymerase I from Thermus sp. strain 2.9
MHHHHHHGGSGMLPLFEPKGRVLLVDGHHLAYRNFFALKGLTTSRGEPVQGVYGFAKSLLKALKEDGDVVIVVFDAKAPSFRHEAYEAYKAGRAPTPEDFPRQLALMKELVDLLGLERLEVPGFEADDVLATLAKKAEREGYEVQILTADRDLFQLLSPRISVLHPEGHLITPEWLWEKYGLRPEQWVDFRALVGDPSDNIPGVKGIGEKTALKLLKEWGSLENLLKNLDQVKPESVREKILAHLEDLKLSRELSRVRTDLPLEVDFRGRREPDWEGLKAFLERLEFGSLLHEFGLLESPLPAEEAPWPPPEGAFLGYRLSRPEPMWAELLALAASAQGRVYRAEDPHGALRGLKEVRGLLAKDLAVVALREGLDLPPTDDPMLLAYLLDPSNTTPEGVARRYGGEWTEDAGERALLAERLHQNLLGRLQGEERLLWLYEEVEKPLSRVLAHMEATGVKLDVAYLEALSLEVAAELRRLEEEVFRLAGHSFNLNSRDQLERVLFDELGLPPIGKTEKTGKRSTSAAVLEALREVHPIVDKILQYRELAKLKGTYIDPLPALVHPKTGRLHTRFNQTATATGRLSSSDPNLQNIPVRTPLGQKIRRAFVAEEGWRLVALDYSQIELRVLAHLSGDENLIRVFQEGKDIHTQTASWMFGLSAEAIDPLMRRAAKTINFGVLYGMSAHRLSQELGIPYEEAAAFIQRYFQSYPKVKAWIEKTLEEGRTRGYVETLFGRRRYVPDLTARVKSVREAAERMAFNMPVQGTAADLMKLAMVRLFPQLREVGARMLLQVHDELLLEAPKERAEEVAALAKEVMEGVWPLAVPLEVEVGIGEDWLAAKG

SEQ ID NO: 1529 - DNA, 2529 bp, synthetic construct
  misc_feature 1..2529: note = Variant of DNA polymerase I from Thermus sp. strain 2.9
  source 1..2529: mol_type = other DNA
atgcaccatcatcatcatcatggcggtagcggcatgttaccgttgttcgaacctaaaggtcgcgtgcttctggttgatggccatcatctcgcgtatcgtaacttctttgccctgaaaggattaaccaccagccgtggcgagccggtacagggtgtctacggctttgcaaagtcgctcctgaaagctctgaaagaagacggtgatgtggtgattgttgtctttgatgcgaaagcgccaagttttcgccacgaagcgtacgaagcttacaaagccgggcgtgctccaacgccggaagactttcctcgccaattggcgcttatgaaggaattagtggatttgcttggcctcgaacgcttggaagttcccggtttcgaggcagacgacgtattagcgactctcgcaaagaaagccgaacgtgagggctatgaagtccagatcttgacagcagatcgcgatcttttccagcttttatctccgcgcatctcggtgttacacccggaagggcatcgtatcaccccggaatggctctgggagaaatatggtttgcgtcccgaacaatgggtggattttcgcgccttagcaggcgatccgagcgacaatattccgggagttaaaggtatcggcgagaagacggcgctcaagctccttaaagaatgggggtcgttggagaacttgcttaagaatttagatcaggtcaaaccagagtcagtgcgtgagaagattcttgcacacctcgaagacctcaaattaagcctggaattgtcccgtgtacgcaccgatttgccgctcgaagttgatttccgtggccgccgcgaacctgactgggagggtcttaaagcgtttttagagcgtcttgaatttggttcgctcttgcatgaattcggccttttagaaagcccgttaccagccgaagaagcaccttggccaccgcccgaaggcgcgtttttaggttaccgtttgagtcgcccggaaccgatgtgggccgaattactggctcttgcagcgtctgcccaggagcgtgtgtatcgcgcggaagaccctcatggtgcgctcaagggcctcaaagaagtccgtggactccttgccaaagacttagctgttgttgcattgcgcgaaggtcttgatttacctccgactgatgatccaatgcttcttgcgtacctcttggacccgtcaaacacgacgcccgaaggcgtagcccgtcgttacggcggcgagtggaccgaagatgcaggcgagcgcgcgttattggccgaacgtttgcacgccaatttattaggacgtttgcaaggcgaggaacgtctcctctggctttacgaagaagtggagaaaccattgagtcgcgtgctcgcgcatatggaagctaccggtgtcaaattagacgtggcgtatttggagaacctcagccttgaagttgctgccgaaatgcgccgcttggaggaagaagtattccgtttagcaggccactcctttaaccttaattctcgcgatcagttagaacgtgtgttgttcgatgaacttggtctccctcctatcggcaagacagagaagaccggtaaacgtagcacttcagcggcggttttagaagctcttcgcgaagtccatcccattgtggacaagatcttgcagtaccgcgaactcgcgaaattgaaaggcacctatattgaccctcttccggcattagtccacccgaaaacgggacgcctccatacccgcttcaaccaaacagccacggcgaccggtcgtttgtcctcctctgatccaaaccttcagaatattccagtacgtaccccattgggccagaagatccgccgcgcgtttgtagctgaggagggttggcgtttagtggccctcgattatagccaaattgaattacgtgtccttgcccatctttctggcgatgagaacctcatccgcgtgtttcaggaaggcaaagacattcacactcaaacggcaagctggatgtttggattatcagctgaagcgatcgatcctttgatgcgtcgtgcagcgaagaccgttaatttcggtgttctctacggtatgagtgcccatcgtttgtcgcaggaattaggcattccctatgaagaagctgtcgcgttcattcagcgctactttcaaagctatcccaaagttaaagcatggatcgagaagactctcgaagaaggccgcacacgtggttacgtagagaccttatttggacgtcgccgctatgttcccgatttaaacgctcgcgtgaaatctgtccgtgaagccgccgaacgcatggcgttcaacatgcctgtacagggcacggcagctgacctcatgaaacttgcaatggtgcgcctttttccacaattgcgtgaagttggtgcccgcatgctcttgcaggtccacgatgaactcttgttagaagcgccaaaagagcgtgcggaagaggtggcagccctcgcgaaagaggttatggaaggcgtgtggcccttagcggtgcctcttgaagtcgaagttggtattggcgaggattggttggctgccaaaggataatga

SEQ ID NO: 1530 - protein, 841 aa, synthetic construct
  REGION 1..841: note = Variant of DNA polymerase I from Thermus sp. strain 2.9
MHHHHHHGGSGMLPLFEPKGRVLLVDGHHLAYRNFFALKGLTTSRGEPVQGVYGFAKSLLKALKEDGDVVIVVFDAKAPSFRHEAYEAYKAGRAPTPEDFPRQLALMKELVDLLGLERLEVPGFEADDVLATLAKKAEREGYEVQILTADRDLFQLLSPRISVLHPEGHRITPEWLWEKYGLRPEQWVDFRALAGDPSDNIPGVKGIGEKTALKLLKEWGSLENLLKNLDQVKPESVREKILAHLEDLKLSLELSRVRTDLPLEVDFRGRREPDWEGLKAFLERLEFGSLLHEFGLLESPLPAEEAPWPPPEGAFLGYRLSRPEPMWAELLALAASAQERVYRAEDPHGALKGLKEVRGLLAKDLAVVALREGLDLPPTDDPMLLAYLLDPSNTTPEGVARRYGGEWTEDAGERALLAERLHANLLGRLQGEERLLWLYEEVEKPLSRVLAHMEATGVKLDVAYLENLSLEVAAEMRRLEEEVFRLAGHSFNLNSRDQLERVLFDELGLPPIGKTEKTGKRSTSAAVLEALREVHPIVDKILQYRELAKLKGTYIDPLPALVHPKTGRLHTRFNQTATATGRLSSSDPNLQNIPVRTPLGQKIRRAFVAEEGWRLVALDYSQIELRVLAHLSGDENLIRVFQEGKDIHTQTASWMFGLSAEAIDPLMRRAAKTVNFGVLYGMSAHRLSQELGIPYEEAVAFIQRYFQSYPKVKAWIEKTLEEGRTRGYVETLFGRRRYVPDLNARVKSVREAAERMAFNMPVQGTAADLMKLAMVRLFPQLREVGARMLLQVHDELLLEAPKERAEEVAALAKEVMEGVWPLAVPLEVEVGIGEDWLAAKG

SEQ ID NO: 1531 - DNA, 2529 bp, synthetic construct
  misc_feature 1..2529: note = Variant of DNA polymerase I from Thermus sp. strain 2.9
  source 1..2529: mol_type = other DNA
atgcaccatcatcatcatcatggcggtagcggcatgttaccgttgttcgaacctaaaggtcgcgtgcttctggttgatggccatcatctcgcgtatcgtaacttctttgccctgaaaggattaaccaccagccgtggcgagccggtacagggtgtctacggctttgcaaagtcgctcctgaaagctctgaaagaagacggtgatgtggtgattgttgtctttgatgcgaaagcgccaagttttcgccacgaagcgtacgaagcttacaaagccgggcgtgctccaacgccggaagactttcctcgccaattggcgcttatgaaggaattagtggatttgcttggcctcgaacgcttggaagttcccggtttcgaggcagacgacgtattagcgactctcgcaaagaaagccgaacgtgagggctatgaagtccagatcttgacagcagatcgcgatcttttccagcttttatctccgcgcatctcggtgttacacccggaagggcatcgtatcaccccggaatggctctgggagaaatatggtttgcgtcccgaacaatgggtggattttcgcgccttagcaggcgatccgagcgacaatattccgggagttaaaggtatcggcgagaagacggcgctcaagctccttaaagaatgggggtcgttggagaacttgcttaagaatttagatcaggtcaaaccagagtcagtgcgtgagaagattcttgcacacctcgaagacctcaaattaagccgcgaattgtcccgtgtacgcaccgatttgccgctcgaagttgatttccgtcgtcgccgcgaacctgactgggagggtcttaaagcgtttttagagcgtcttgaatttggttcgctcttgcatgaattcggccttttagaaagcccgttaccagccgaagaagcaccttggccaccgcccgaaggcgcgtttttaggttaccgtttgagtcgcccggaaccgatgtgggccgaattactggctcttgcagcgtctgcccagggacgtgtgtatcgcgcggaagaccctcatggtgcgctccgcggcctcaaagaagtcaacggactccttgccaaagacttagctgttgttgcattgcgcgaaggtcttgatttacctccgactgatgatccaatgcttcttgcgtacctcttggacccgtcaaacacgacgcccgaaggcgtagcccgtcgttacggcggcgagtggaccgaagatgcaggcgagcgcgcgttattggccgaacgtttgcacgccaatttattaggacgtttgcaaggcgaggaacgtctcctctggctttacgaagaagtggagaaaccattgagtcgcgtgctcgcgcatatggaagctaccggtgtcaaattagacgtggcgtatttggaggcactcagccttgaagttgctgccgaaatgcgccgcttggaggaagaagtattccgtttagcaggccactcctttaaccttaattctcgcgatcagttagaacgtgtgttgttcgatgaacttggtctccctcctatcggcaagacagagaagaccggtaaacgtagcacttcagcggcggttttagaagctcttcgcgaagtccatcccattgtggacaagatcttgcagtaccgcgaactcgcgaaattgaaaggcacctatattgaccctcttccggcattagtccacccgaaaacgggacgcctccatacccgcttcaaccaaacagccacggcgaccggtcgtttgtcctcctctgatccaaaccttcagaatattccagtacgtaccccattgggccagaagatccgccgcgcgtttgtagctgaggagggttggcgtttagtggccctcgattatagccaaattgaattacgtgtccttgcccatctttctggcgatgagaacctcatccgcgtgtttcaggaaggcaaagacattcacactcaaacggcaagctggatgtttggattatcagctgaagcgatcgatcctttgatgcgtcgtgcagcgaagaccattaatttcggtgttctctacggtatgagtgcccatcgtttgtcgcaggaattaggcattccctatgaagaagctgcggcgttcattcagcgctactttcaaagctatcccaaagttaaagcatggatcgagaagactctcgaagaaggccgcacacgtggttacgtagagaccttatttggacgtcgccgctatgttcccgatttaaacgctcgcgtgaaatctgtccgtgaagccgccgaacgcatggcgttcaacatgcctgtacagggcacggcagctgacctcatgaaacttgcaatggtgcgcctttttccacaattgcgtgaagttggtgcccgcatgctcttgcaggtccacgatgaactcttgttagaagcgccaaaagagcgtgcggaagaggtggcagccctcgcgaaagaggttatggaaggcgtgtggcccttagcggtgcctcttgaagtcgaagttggtattggcgaggattggttggctgccaaaggataatga

SEQ ID NO: 1532 - protein, 841 aa, synthetic construct
  REGION 1..841: note = Variant of DNA polymerase I from Thermus sp. strain 2.9
MHHHHHHGGSGMLPLFEPKGRVLLVDGHHLAYRNFFALKGLTTSRGEPVQGVYGFAKSLLKALKEDGDVVIVVFDAKAPSFRHEAYEAYKAGRAPTPEDFPRQLALMKELVDLLGLERLEVPGFEADDVLATLAKKAEREGYEVQILTADRDLFQLLSPRISVLHPEGHRITPEWLWEKYGLRPEQWVDFRALAGDPSDNIPGVKGIGEKTALKLLKEWGSLENLLKNLDQVKPESVREKILAHLEDLKLSRELSRVRTDLPLEVDFRRRREPDWEGLKAFLERLEFGSLLHEFGLLESPLPAEEAPWPPPEGAFLGYRLSRPEPMWAELLALAASAQGRVYRAEDPHGALRGLKEVNGLLAKDLAVVALREGLDLPPTDDPMLLAYLLDPSNTTPEGVARRYGGEWTEDAGERALLAERLHANLLGRLQGEERLLWLYEEVEKPLSRVLAHMEATGVKLDVAYLEALSLEVAAEMRRLEEEVFRLAGHSFNLNSRDQLERVLFDELGLPPIGKTEKTGKRSTSAAVLEALREVHPIVDKILQYRELAKLKGTYIDPLPALVHPKTGRLHTRFNQTATATGRLSSSDPNLQNIPVRTPLGQKIRRAFVAEEGWRLVALDYSQIELRVLAHLSGDENLIRVFQEGKDIHTQTASWMFGLSAEAIDPLMRRAAKTINFGVLYGMSAHRLSQELGIPYEEAAAFIQRYFQSYPKVKAWIEKTLEEGRTRGYVETLFGRRRYVPDLNARVKSVREAAERMAFNMPVQGTAADLMKLAMVRLFPQLREVGARMLLQVHDELLLEAPKERAEEVAALAKEVMEGVWPLAVPLEVEVGIGEDWLAAKG

SEQ ID NO: 1533 - DNA, 2529 bp, synthetic construct
  misc_feature 1..2529: note = Variant of DNA polymerase I from Thermus sp. strain 2.9
  source 1..2529: mol_type = other DNA
atgcaccatcatcatcatcatggcggtagcggcatgttaccgttgttcgaacctaaaggtcgcgtgcttctggttgatggccatcatctcgcgtatcgtaacttctttgccctgaaaggattaaccaccagccgtggcgagccggtacagggtgtctacggctttgcaaagtcgctcctgaaagctctgaaagaagacggtgatgtggtgattgttgtctttgatgcgaaagcgccaagttttcgccacgaagcgtacgaagcttacaaagccgggcgtgctccaacgccggaagactttcctcgccaattggcgcttatgaaggaattagtggatttgcttggcctcgaacgcttggaagttcccggtttcgaggcagacgacgtattagcgactctcgcaaagaaagccgaacgtgagggctatgaagtccagatcttgacagcagatcgcgatcttttccagcttttatctccgcgcatctcggtgttacacccggaagggcatcgtatcaccccggaatggctctgggagaaatatggtttgcgtcccgaacaatgggtggattttcgcgccttagcaggcgatccgagcgacaatattccgggagttaaaggtatcggcgagaagacggcgctcaagctccttaaagaatgggggtcgttggagaacttgcttaagaatttagatcaggtcaaaccagagtcagtgcgtgagaagattcttgcacacctcgaagacctcaaattaagccgcgaattgtcccgtgtacgcaccgatttgccgctcgaagttgatttccgtggccgccgcgaacctgactgggagggtcttaaagcgtttttagagcgtcttgaatttggttcgctcttgcatgaattcggccttttagaaagcccgttaccagccgaagaagcaccttggccaccgcccgaaggcgcgtttttaggttaccgtttgagtcgcccggaaccgatgtgggccgaattattggctcttgcagcgtctgcccagggacgtgtgtatcgcgcggaagaccctcatggtgcgctccgcggcctcaaagaagtccgtggactccttgccaaagacttagctgttgttgcattgcgcgaaggtcttgatttacctccgactgatgatccaatgcttcttgcgtacctcttggacccgtcaaacacgacgcccgaaggcgtagcccgtcgttacggcggcgagtggaccgaagatgcaggcgagcgcgcgttattggccgaacgtttgcacgccaatttattaggacgtttgcaaggcgaggaacgtctcctctggctttacgaagaagtggagaaaccattgagtcgcgtgctcgcgcatatggaagctaccggtgtcaaattagacgtggcgtatttggaggcactcagccttgaagttgctgccgaaatgcgccgcttggaggaagaagtattccgtttagcaggccactcctttaaccttaattctcgcgatcagttagaacgtgtgttgttcgatgaacttggtctccctcctatcggcaagacagagcttaccggtaaacgtagcacttcagcggcggttttagaagctcttcgcgaagtccatcccattgtggacaagatcttgcagtaccgcgaactcgcgaaattgaaaggcacctatattgaccctcttccggcattagtccacccgaaaacgggacgcctccatacccgcttcaaccaaacagccacggcgaccggtcgtttgtcctcctctgatccaaaccttcagaatattccagtacgtaccccattgggccagaagatccgccgcgcgtttgtagctgaggagggttggcgtttagtggccctcgattatagccaaattgaattacgtgtccttgcccatctttctggcgatgagaacctcatccgcgtgtttcaggaaggcaaagacattcacactcaaacggcaagctggatgtttggattatcagctgaagcgatcgatcctttgatgcgtcgtgcagcgaagaccatcaatttcggtgttctctacggtatgagtgcccatcgtttgtcgcaggaattaggcattccctatgaagaagctgcggcgttcattcagcgctactttcaaagctatcccaaagttaaagcatggatcgagaagactctcgaagaaggccgcacacgtggttacgtagagaccttatttggacgtcgccgctatgttcccgatttaaacgctcgcgtgaaatctgtccgtgaagccgccgaacgcatggcgttcaacatgcctgtacagggcacggcagctgacctcatgaaacttgcaatggtgcgcctttttccacaattgcgtgaagttggtgcccgcatgctcttgcaggtccacgatgaactcttgttagaagcgccaaaagagcgtgcggaagaggtggcagccctcgcgaaagaggttatggaaggcgtgtggcccttagcggtgcctcttgaagtcgaagttggtattggcgaggattggttggctgccaaaggataatga

SEQ ID NO: 1534 - protein, 841 aa, synthetic construct
  REGION 1..841: note = Variant of DNA polymerase I from Thermus sp. strain 2.9
MHHHHHHGGSGMLPLFEPKGRVLLVDGHHLAYRNFFALKGLTTSRGEPVQGVYGFAKSLLKALKEDGDVVIVVFDAKAPSFRHEAYEAYKAGRAPTPEDFPRQLALMKELVDLLGLERLEVPGFEADDVLATLAKKAEREGYEVQILTADRDLFQLLSPRISVLHPEGHRITPEWLWEKYGLRPEQWVDFRALAGDPSDNIPGVKGIGEKTALKLLKEWGSLENLLKNLDQVKPESVREKILAHLEDLKLSRELSRVRTDLPLEVDFRGRREPDWEGLKAFLERLEFGSLLHEFGLLESPLPAEEAPWPPPEGAFLGYRLSRPEPMWAELLALAASAQGRVYRAEDPHGALRGLKEVRGLLAKDLAVVALREGLDLPPTDDPMLLAYLLDPSNTTPEGVARRYGGEWTEDAGERALLAERLHANLLGRLQGEERLLWLYEEVEKPLSRVLAHMEATGVKLDVAYLEALSLEVAAEMRRLEEEVFRLAGHSFNLNSRDQLERVLFDELGLPPIGKTELTGKRSTSAAVLEALREVHPIVDKILQYRELAKLKGTYIDPLPALVHPKTGRLHTRFNQTATATGRLSSSDPNLQNIPVRTPLGQKIRRAFVAEEGWRLVALDYSQIELRVLAHLSGDENLIRVFQEGKDIHTQTASWMFGLSAEAIDPLMRRAAKTINFGVLYGMSAHRLSQELGIPYEEAAAFIQRYFQSYPKVKAWIEKTLEEGRTRGYVETLFGRRRYVPDLNARVKSVREAAERMAFNMPVQGTAADLMKLAMVRLFPQLREVGARMLLQVHDELLLEAPKERAEEVAALAKEVMEGVWPLAVPLEVEVGIGEDWLAAKG

SEQ ID NO: 1535 - DNA, 2529 bp, synthetic construct
  misc_feature 1..2529: note = Variant of DNA polymerase I from Thermus sp. strain 2.9
  source 1..2529: mol_type = other DNA
atgcaccatcatcatcatcatggcggtagcggcatgttaccgttgttcgaacctaaaggtcgcgtgcttctggttgatggccatcatctcgcgtatcgtaacttctttgccctgaaaggattaaccaccagccgtggcgagccggtacagggtgtctacggctttgcaaagtcgctcctgaaagctctgaaagaagacggtgatgtggtgattgttgtctttgatgcgaaagcgccaagttttcgccacgaagcgtacgaagcttacaaagccgggcgtgctccaacgccggaagactttcctcgccaattggcgcttatgaaggaattagtggatttgcttggcctcgaacgcttggaagttcccggtttcgaggcagacgacgtattagcgactctcgcaaagaaagccgaacgtgagggctatgaagtccagatcttgacagcagatcgcgatcttttccagcttttatctccgcgcatctcggtgttacacccggaagggcatcgtatcaccccggaatggctctgggagaaatatggtttgcgtcccgaacaatgggtggattttcgcgccttagcaggcgatccgagcgacaatattccgggagttaaaggtatcggcgagaagacggcgctcaagctccttaaagaatgggggtcgttggagaacttgcttaagaatttagatcaggtcaaaccagagtcagtgcgtgagaagattcttgcacacctcgaagacctcaaattaagccgcgaattgtcccgtgtacgcaccgatttgccgctcgaagttgatttccgtggccgccgcgaacctgactgggagggtcttaaagcgtttttagagcgtcttgaatttggttcgctcttgcatgaattcggccttttagaaagcccgttaccagccgaagaagcaccttggccaccgcccgaaggcgcgtttttaggttaccgtttgagtcgcccggaaccgatgtgggccgaattactggctcttgcagcgtctgcccaggggcgtgcgtatcgcgcggaagaccctcatggtgcgctccgtggcctcaaagaagtccgtggactccttgccaaagacttagctgttgttgcattgcgcgaaggtcttgatttacctccgactgatgatccaatgcttcttgcgtacctcttggacccgtcaaacacgacgcccgaaggcgtagcccgtcgttacggcggcgagtggaccgaagatgcaggtgagcgcgcgttattggccgaacgtttgcacgccaatttattaggacgtttgcaaggcgaggaacgtctcctctggctttacgaagaagtggagaaaccattgagtcgcgtgctcgcgcatatggaagctaccggtgtcaaattagacgtggcgtatttggagaacctcagccttgaagttgctgccgaaatgcgccgcttggaggaagaagtattccgtttagcaggccactcctttaaccttaattctcgcgatcagttagaacgtgtgttgttcgatgagcttggtctccctcctatcggcaagacagagaagaccggtaaacgtagcacttcagcggcggttttagaagctcttcgcgaagtccatcccattgtggacaagatcttgcagtaccgcgaactcgcgaaattgaaaggcacctatattgaccctcttccggcattagtccacccgaaaacgggacgcctccatacccgcttcaaccaaacagccacggcgaccggtcgtttgtcctcctctgatccaaaccttcagaatattccagtacgtaccccattgggccagaagatccgccgcgcgtttgtagctgaggagggttggcgtttagtggccctcgattatagccaaattgaattacgtgtccttgcccatctttctggcgatgagaacctcatccgcgtgtttcaggaaggcaaagacattcacactcaaacggcaagctggatgtttggattatcagcagaagcgatcgatcctttgatgcgtcgtgcagcgaagaccgttaatttcggtgttctctacggtatgagtgcccatcgtttgtcgcaggaattaggcattccctatgaagaagctgcggcgttcattcagcgctactttcaaagctatcccaaagttaaagcatggatcgagaagactctcgaagaaggccgcacacgtggttacgtagagaccttatttggacgtcgccgctatgttcccgatttaaacgctcgcgtgaaatctgtccgtgaagccgccgaacgcatggcgttcaacatgcctgtacagggcacggcagctgacctcatgaaacttgcaatggtgcgcctttttccacaattgcgtgaagttggtgcccgcatgctcttgcaggtccacgatgaactcttgttagaagcgccaaaagagcgtgcggaagaggtggcagccctcgcgaaagaggttatggaaggcgtgtggcccttagcggtgcctcttgaagtcgaagttggtattggcgaggattggttggctgccaaaggataatga

SEQ ID NO: 1536 - protein, 841 aa, synthetic construct
  REGION 1..841: note = Variant of DNA polymerase I from Thermus sp. strain 2.9
MHHHHHHGGSGMLPLFEPKGRVLLVDGHHLAYRNFFALKGLTTSRGEPVQGVYGFAKSLLKALKEDGDVVIVVFDAKAPSFRHEAYEAYKAGRAPTPEDFPRQLALMKELVDLLGLERLEVPGFEADDVLATLAKKAEREGYEVQILTADRDLFQLLSPRISVLHPEGHRITPEWLWEKYGLRPEQWVDFRALAGDPSDNIPGVKGIGEKTALKLLKEWGSLENLLKNLDQVKPESVREKILAHLEDLKLSRELSRVRTDLPLEVDFRGRREPDWEGLKAFLERLEFGSLLHEFGLLESPLPAEEAPWPPPEGAFLGYRLSRPEPMWAELLALAASAQGRAYRAEDPHGALRGLKEVRGLLAKDLAVVALREGLDLPPTDDPMLLAYLLDPSNTTPEGVARRYGGEWTEDAGERALLAERLHANLLGRLQGEERLLWLYEEVEKPLSRVLAHMEATGVKLDVAYLENLSLEVAAEMRRLEEEVFRLAGHSFNLNSRDQLERVLFDELGLPPIGKTEKTGKRSTSAAVLEALREVHPIVDKILQYRELAKLKGTYIDPLPALVHPKTGRLHTRFNQTATATGRLSSSDPNLQNIPVRTPLGQKIRRAFVAEEGWRLVALDYSQIELRVLAHLSGDENLIRVFQEGKDIHTQTASWMFGLSAEAIDPLMRRAAKTVNFGVLYGMSAHRLSQELGIPYEEAAAFIQRYFQSYPKVKAWIEKTLEEGRTRGYVETLFGRRRYVPDLNARVKSVREAAERMAFNMPVQGTAADLMKLAMVRLFPQLREVGARMLLQVHDELLLEAPKERAEEVAALAKEVMEGVWPLAVPLEVEVGIGEDWLAAKG

SEQ ID NO: 1537 - DNA, 2529 bp, synthetic construct
  misc_feature 1..2529: note = Variant of DNA polymerase I from Thermus sp. strain 2.9
  source 1..2529: mol_type = other DNA
atgcaccatcatcatcatcatggcggtagcggcatgttaccgttgttcgaacctaaaggtcgcgtgcttctggttgatggccatcatctcgcgtatcgtaacttctttgccctgaaaggattaaccaccagccgtggcgagccggtacagggtgtctacggctttgcaaagtcgctcctgaaagctctgaaagaagacggtgatgtggtgattgttgtctttgatgcgaaagcgccaagttttcgccacgaagcgtacgaagcttacaaagccgggcgtgctccaacgccggaagactttcctcgccaattggcgcttatgaaggaattagtggatttgcttggcctcgaacgcttggaagttcccggtttcgaggcagacgacgtattagcgactctcgcaaagaaagccgaacgtgagggctatgaagtccagatcttgacagcagatcgcgatcttttccagcttttatctccgcgcatctcggtgttacacccggaagggcatcgtatcaccccggaatggctctgggagaaatatggtttgcgtcccgaacaatgggtggattttcgcgccttagcaggcgatccgagcgacaatattccgggagttaaaggtatcggcgagaagacggcgctcaagctccttaaagaatgggggtcgttggagaacttgcttaagaatttagatcaggtcaaaccagagtcagtgcgtgagaagattcttgcacacctcgaagacctcaaattaagccgcgaattgtcccgtgtacgcaccgatttgccgctcgaagttgatttccgtggccgccgcgaacctgactgggagggtcttaaagcgtttttagagcgtcttgaatttggttcgctcttgcatgaattcggccttttagaaagcccgttaccagccgaagaagcaccttggccaccgcccgaaggcgcgtttttaggttaccgtttgagtcgcccggaaccgatgtgggccgaattattggctcttgcagcgtctgcccagggacgtgtgtatcgcgcggaagaccctcatggtgcgctccgcggcctcaaagaagtccgtggactccttgccaaagacttagctgttgttgcattgcgcgaaggtcttgatttacctccgactgatgatccaatgcttcttgcgtacctcttggacccgtcaaacacgacgcccgaaggcgtagcccgtcgttacggcggcgagtggaccgaagatgcaggcgagcgcgcgttattggccgaacgtttgcacgccaatttattaggacgtttgcaaggcgaggaacgtctcctctggctttacgaagaagtggagaaaccattgagtcgcgtgctcgcgcatatggaagctaccggtgtcaaattagacgtggcgtatttggaggcactcagccatgaagttgctgccgaaatgcgccgcttggaggaagaagtattccgtttagcaggccactcctttaaccttaattctcgcgatcagttagaacgtgtgttgttcgatgaacttggtctccctcctatcggcaagacagagaagaccggtaaacgtagcacttcagcggcggttttagaagctcttcgcgaagtccatcccattgtggacaagatcttgcagtaccgcgaactcgcgaaattgaaaggcacctatattgaccctcttccggcattagtccacccgaaaacgggacgcctccatacccgcttcaaccaaacagccacggcgaccggtcgtttgtcctcctctgatccaaaccttcagaatattccagtacgtaccccattgggccagaagatccgccgcgcgtttgtagctgaggagggttggcgtttagtggccctcgattatagccaaattgaattacgtgtccttgcccatctttctggcgatgagaacctcatccgcgtgtttcaggaaggcaaagacattcacactcaaacggcaagctggatgtttggattatcagctgaagcgatcgatcctttgatgcgtcgtgcagcgaagaccatcaatttcggtgttctctacggtatgagtgcccatcgtttgtcgcaggaattaggcattccctatgaagaagctgcggcgttcattcagcgctactttcaaagctatcccaaagttaaagcatggatcgagaagactctcgaagaaggccgcacacgtggttacgtagagaccttatttggacgtcgccgctatgttcccgatttaaacgctcgcgtgaaatctgtccgtgaagccgccgaacgcatggcgttcaacatgcctgtacagggcacggcagctgacctcatgaaacttgcaatggtgcgcctttttccacaattgcgtgaagttggtgcccgcatgctcttgcaggtccacgatgaactcttgttagaagcgccaaaagagcgtgcggaagaggtggcagccctcgcgaaagaggttatggaaggcgtgtggcccttagcggtgcctcttgaagtcgaagttggtattggcgaggattggttggctgccaaaggataatga

SEQ ID NO: 1538 - protein, 841 aa, synthetic construct
  REGION 1..841: note = Variant of DNA polymerase I from Thermus sp. strain 2.9
MHHHHHHGGSGMLPLFEPKGRVLLVDGHHLAYRNFFALKGLTTSRGEPVQGVYGFAKSLLKALKEDGDVVIVVFDAKAPSFRHEAYEAYKAGRAPTPEDFPRQLALMKELVDLLGLERLEVPGFEADDVLATLAKKAEREGYEVQILTADRDLFQLLSPRISVLHPEGHRITPEWLWEKYGLRPEQWVDFRALAGDPSDNIPGVKGIGEKTALKLLKEWGSLENLLKNLDQVKPESVREKILAHLEDLKLSRELSRVRTDLPLEVDFRGRREPDWEGLKAFLERLEFGSLLHEFGLLESPLPAEEAPWPPPEGAFLGYRLSRPEPMWAELLALAASAQGRVYRAEDPHGALRGLKEVRGLLAKDLAVVALREGLDLPPTDDPMLLAYLLDPSNTTPEGVARRYGGEWTEDAGERALLAERLHANLLGRLQGEERLLWLYEEVEKPLSRVLAHMEATGVKLDVAYLEALSHEVAAEMRRLEEEVFRLAGHSFNLNSRDQLERVLFDELGLPPIGKTEKTGKRSTSAAVLEALREVHPIVDKILQYRELAKLKGTYIDPLPALVHPKTGRLHTRFNQTATATGRLSSSDPNLQNIPVRTPLGQKIRRAFVAEEGWRLVALDYSQIELRVLAHLSGDENLIRVFQEGKDIHTQTASWMFGLSAEAIDPLMRRAAKTINFGVLYGMSAHRLSQELGIPYEEAAAFIQRYFQSYPKVKAWIEKTLEEGRTRGYVETLFGRRRYVPDLNARVKSVREAAERMAFNMPVQGTAADLMKLAMVRLFPQLREVGARMLLQVHDELLLEAPKERAEEVAALAKEVMEGVWPLAVPLEVEVGIGEDWLAAKG

SEQ ID NO: 1539 - DNA, 2529 bp, synthetic construct
  misc_feature 1..2529: note = Variant of DNA polymerase I from Thermus sp. strain 2.9
  source 1..2529: mol_type = other DNA
atgcaccatcatcatcatcatggcggtagcggcatgttaccgttgttcgaacctaaaggtcgcgtgcttctggttgatggccatcatctcgcgtatcgtaacttctttgccctgaaaggattaaccaccagccgtggcgagccggtacagggtgtctacggctttgcaaagtcgctcctgaaagctctgaaagaagacggtgatgtggtgattgttgtctttgatgcgaaagcgccaagttttcgccacgaagcgtacgaagcttacaaagccgggcgtgctccaacgccggaagactttcctcgccaattggcgcttatgaaggaattagtggatttgcttggcctcgaacgcttggaagttcccggtttcgaggcagacgacgtattagcgactctcgcaaagaaagccgaacgtgagggctatgaagtccagatcttgacagcagatcgcgatcttttccagcttttatctccgcgcatctcggtgttacacccggaagggcatcgtatcaccccggaatggctctgggagaaatatggtttgcgtcccgaacaatgggtggattttcgcgccttagcaggcgatccgagcgacaatattccgggagttaaaggtatcggcgagaagacggcgctcaagctccttaaagaatgggggtcgttggagaacttgcttaagaatttagatcaggtcaaaccagagtcagtgcgtgagaagattcttgcacacctcgaagacctcaaattaagccgcgaattgtcccgtgtacgcaccgatttgccgctcgaagttgatttccgtcgtcgccgcgaacctgactgggagggtcttaaagcgtttttagagcgtcttgaatttggttcgctcttgcatgaattcggccttttagaaagcccgttaccagccgaagaagcaccttggccaccgcccgaaggcgcgtttttaggttaccgtttgagtcgcccggaaccgatgtgggccgaattactggctcttgcagcgtctgcccaggggcgtgtgtatcgcgcggaagaccctcatggtgcgctccgtggcctcaaagaagtccgtggactccttgccaaagacttagctgttgttgcattgcgcgaaggtcttgatttacctccgactgatgatccaatgcttcttgcgtacctcttggacccgtcaaacacgacgcccgaaggcgtagcccgtcgttacggcggcgagtggaccgaagatgcaggtgagcgcgcgttattggccgaacgtttgcacgccaatttattaggacgtttgcaaggcgaggaacgtctcctctggctttacgaagaagtggagaaaccattgagtcgcgtgctcgcgcatatggaagctaccggtgtcaaattagacgtggcgtatttggaggcactcagccttgaagttgctgccgaaatgcgccgcttggaggaagaagtattccgtttagcaggccactcctttaaccttaattctcgcgatcagttagaacgtgtgttgttcgatgagcttggtctccctcctatcggcaagacagagaagaccggtaaacgtagcacttcagcggcggttttagaagctcttcgcgaagtccatcccattgtggacaagatcttgcagtaccgcgaactcgcgaaattgaaaggcacctatattgaccctcttccggcattagtccacccgaaaacgggacgcctccatacccgcttcaaccaaacagccacggcgaccggtcgtttgtcctcctctgatccaaaccttcagaatattccagtacgtaccccatttggccagaagatccgccgcgcgtttgtagctgaggagggttggcgtttagtggccctcgattatagccaaattgaattacgtgtccttgcccatctttctggcgatgagaacctcatccgcgtgtttcaggaaggcaaagacattcacactcaaacggcaagctggatgtttggattatcaccagaagcgatcgatcctttgatgcgtcgtgcagcgaagaccgttaatttcggtgttctctacggtatgagtgcccatcgtttgtcgcaggaattaggcattccctatgaagaagctgtcgcgttcattcagcgctactttcaaagctatcccaaagttaaagcatggatcgagaagactctcgaagaaggccgcacacgtggttacgtagagaccttatttggacgtcgccgctatgttcccgatttaaacgctcgcgtgaaatctgtccgtgaagccgccgaacgcatggcgttcaacatgcctgtacagggcacggcagctgacctcatgaaacttgcaatggtgcgcctttttccacaattgcgtgaagttggtgcccgcatgctcttgcaggtccacgatgaactcttgttagaagcgccaaaagagcgtgcggaagaggtggcagccctcgcgaaagaggttatggaaggcgtgtggcccttagcggtgcctcttgaagtcgaagttggtattggcgaggattggttggctgccaaaggataatga

SEQ ID NO: 1540 - protein, 841 aa, synthetic construct
  REGION 1..841: note = Variant of DNA polymerase I from Thermus sp. strain 2.9
MHHHHHHGGSGMLPLFEPKGRVLLVDGHHLAYRNFFALKGLTTSRGEPVQGVYGFAKSLLKALKEDGDVVIVVFDAKAPSFRHEAYEAYKAGRAPTPEDFPRQLALMKELVDLLGLERLEVPGFEADDVLATLAKKAEREGYEVQILTADRDLFQLLSPRISVLHPEGHRITPEWLWEKYGLRPEQWVDFRALAGDPSDNIPGVKGIGEKTALKLLKEWGSLENLLKNLDQVKPESVREKILAHLEDLKLSRELSRVRTDLPLEVDFRRRREPDWEGLKAFLERLEFGSLLHEFGLLESPLPAEEAPWPPPEGAFLGYRLSRPEPMWAELLALAASAQGRVYRAEDPHGALRGLKEVRGLLAKDLAVVALREGLDLPPTDDPMLLAYLLDPSNTTPEGVARRYGGEWTEDAGERALLAERLHANLLGRLQGEERLLWLYEEVEKPLSRVLAHMEATGVKLDVAYLEALSLEVAAEMRRLEEEVFRLAGHSFNLNSRDQLERVLFDELGLPPIGKTEKTGKRSTSAAVLEALREVHPIVDKILQYRELAKLKGTYIDPLPALVHPKTGRLHTRFNQTATATGRLSSSDPNLQNIPVRTPFGQKIRRAFVAEEGWRLVALDYSQIELRVLAHLSGDENLIRVFQEGKDIHTQTASWMFGLSPEAIDPLMRRAAKTVNFGVLYGMSAHRLSQELGIPYEEAVAFIQRYFQSYPKVKAWIEKTLEEGRTRGYVETLFGRRRYVPDLNARVKSVREAAERMAFNMPVQGTAADLMKLAMVRLFPQLREVGARMLLQVHDELLLEAPKERAEEVAALAKEVMEGVWPLAVPLEVEVGIGEDWLAAKG

SEQ ID NO: 1541 - DNA, 2529 bp, synthetic construct
  misc_feature 1..2529: note = Variant of DNA polymerase I from Thermus sp. strain 2.9
  source 1..2529: mol_type = other DNA
atgcaccatcatcatcatcatggcggtagcggcatgttaccgttgttcgaacctaaaggtcgcgtgcttctggttgatggccatcatctcgcgtatcgtaacttctttgccctgaaaggattaaccaccagccgtggcgagccggtacagggtgtctacggctttgcaaagtcgctcctgaaagctctgaaagaagacggtgatgtggtgattgttgtctttgatgcgaaagcgccaagttttcgccacgaagcgtacgaagcttacaaagccgggcgtgctccaacgccggaagactttcctcgccaattggcgcttatgaaggaattagtggatttgcttggcctcgaacgcttggaagttcccggtttcgaggcagacgacgtattagcgactctcgcaaagaaagccgaacgtgagggctatgaagtccagatcttgacagcagatcgcgatcttttccagcttttatctcagcgcatctcggtgttacacccggaagggcatcgtatcaccccggaatggctctgggagaaatatggtttgcgtcccgaacaatgggtggattttcgcgccttagcaggcgatccgagcgacaatattccgggagttaaaggtatcggcgagaagacggcgctcaagctccttaaagaatgggggtcgttggagaacttgcttaagaatttagatcaggtcaaaccagagtcagtgcgtgagaagattcttgcacacctcgaagacctcaaattaagccgcgaattgtcccgtgtacgcaccgatttgccgctcgaagttgatttccgtggccgccgcgaacctgactgggagggtcttaaagcgtttttagagcgtcttgaatttggttcgctcttgcatgaattcggccttttagaaagcccgttaccagccgaagaagcaccttggccaccgcccgaaggcgcgtttttaggttaccgtttgagtcgcccggaaccgatgtgggccgaattattggctcttgcagcgtctgcccagggacgtgtgtatcgcgcggaagaccctcatggtgcgctccgcggcctcaaagaagtccgtggactccttgccaaagacttagctgttgttgcattgcgcgaaggtcttgatttacctccgactgatgatccaatgcttcttgcgtacctcttggacccgtcaaacacgacgcccgaaggcgtagcccgtcgttacggcggcgagtggaccgaagatgcaggcgagcgcgcgttattggccgaacgtttgcacgccaatttattaggacgtttgcaaggcgaggaacgtctcctctggctttacgaagaagtggagaaaccattgagtcgcgtgctcgcgcatatggaagctaccggtgtcaaattagacgtggcgtatttggaggcactcagccttgaagttgctgccgaaatgcgccgcttggaggaagaagtattccgtttagcaggccactcctttaaccttaattctcgcgatcagttagaacgtgtgttgttcgatgaacttggtctccctcctatcggcaagacagagaagaccggtaaacgtagcacttcagcggcggttttagaagctcttcgcgaagtccatcccattgtggacaagatcttgcagtaccgcgaactcgcgaaattgaaaggcacctatattgaccctcttccggcattagtccacccgaaaacgggacgcctccatacccgcttcaaccaaacagccacggcgaccggtcgtttgtcctcctctgatccaaaccttcagaatattccagtacgtaccccattgggccagaagatccgccgcgcgtttgtagctgaggagggttggcgtttagtggccctcgattatagccaaattgaattacgtgtccttgcccatctttctggcgatgagaacctcatccgcgtgtttcaggaaggcaaagacattcacactcaaacggcaagctggatgtttggattatcagctgaagcgatcgatcctttgatgcgtcgtgcagcgaagaccatcaatttcggtgttctctacggtatgagtgcccatcgtttgtcgcaggaattaggcattccctatgaagaagctgcggcgttcattcagcgctactttcaaagctatcccaaagttaaagcatggatcgagaagactctcgaagaaggccgcacacgtggttacgtagagaccttatttggacgtcgccgctatgttcccgatttaaacgctcgcgtgaaatctgtccgtgaagccgccgaacgcatggcgttcaacatgcctgtacagggcacggcagctgacctcatgaaacttgcaatggtgcgcctttttccacaattgcgtgaagttggtgcccgcatgctcttgcaggtccacgatgaactcttgttagaagcgccaaaagagcgtgcggaagaggtggcagccctcgcgaaagaggttatggaaggcgtgtggcccttagcggtgcctcttgaagtcgaagttggtattggcgaggattggttggctgccaaaggataatga

SEQ ID NO: 1542 - protein, 841 aa, synthetic construct
  REGION 1..841: note = Variant of DNA polymerase I from Thermus sp. strain 2.9
MHHHHHHGGSGMLPLFEPKGRVLLVDGHHLAYRNFFALKGLTTSRGEPVQGVYGFAKSLLKALKEDGDVVIVVFDAKAPSFRHEAYEAYKAGRAPTPEDFPRQLALMKELVDLLGLERLEVPGFEADDVLATLAKKAEREGYEVQILTADRDLFQLLSQRISVLHPEGHRITPEWLWEKYGLRPEQWVDFRALAGDPSDNIPGVKGIGEKTALKLLKEWGSLENLLKNLDQVKPESVREKILAHLEDLKLSRELSRVRTDLPLEVDFRGRREPDWEGLKAFLERLEFGSLLHEFGLLESPLPAEEAPWPPPEGAFLGYRLSRPEPMWAELLALAASAQGRVYRAEDPHGALRGLKEVRGLLAKDLAVVALREGLDLPPTDDPMLLAYLLDPSNTTPEGVARRYGGEWTEDAGERALLAERLHANLLGRLQGEERLLWLYEEVEKPLSRVLAHMEATGVKLDVAYLEALSLEVAAEMRRLEEEVFRLAGHSFNLNSRDQLERVLFDELGLPPIGKTEKTGKRSTSAAVLEALREVHPIVDKILQYRELAKLKGTYIDPLPALVHPKTGRLHTRFNQTATATGRLSSSDPNLQNIPVRTPLGQKIRRAFVAEEGWRLVALDYSQIELRVLAHLSGDENLIRVFQEGKDIHTQTASWMFGLSAEAIDPLMRRAAKTINFGVLYGMSAHRLSQELGIPYEEAAAFIQRYFQSYPKVKAWIEKTLEEGRTRGYVETLFGRRRYVPDLNARVKSVREAAERMAFNMPVQGTAADLMKLAMVRLFPQLREVGARMLLQVHDELLLEAPKERAEEVAALAKEVMEGVWPLAVPLEVEVGIGEDWLAAKG

SEQ ID NO: 1543 - DNA, 2529 bp, synthetic construct
  misc_feature 1..2529: note = Variant of DNA polymerase I from Thermus sp. strain 2.9
  source 1..2529: mol_type = other DNA
atgcaccatcatcatcatcatggcggtagcggcatgttaccgttgttcgaacctaaaggtcgcgtgcttctggttgatggccatcatctcgcgtatcgtaacttctttgccctgaaaggattaaccaccagccgtggcgagccggtacagggtgtctacggctttgcaaagtcgctcctgaaagctctgaaagaagacggtgatgtggtgattgttgtctttgatgcgaaagcgccaagttttcgccacgaagcgtacgaagcttacaaagccgggcgtgctccaacgccggaagactttcctcgccaattggcgcttatgaaggaattagtggatttgcttggcctcgaacgcttggaagttcccggtttcgaggcagacgacgtattagcgactctcgcaaagaaagccgaacgtgagggctatgaagtccagatcttgacagcagatcgcgatcttttccagcttttatctccgcgcatctcggtgttacacccggaagggcatcgtatcaccccggaatggctctgggagaaatatggtttgcgtcccgaacaatgggtggattttcgcgccttagcaggcgatccgagcgacaatattccgggagttaaaggtatcggcgagaagacggcgctcaagctccttaaagaatgggggtcgttggagaacttgcttaagaatttagatcaggtcaaaccagagtcagtgcgtgagaagattcttgcacacctcgaagacctcaaattaagccgcgaattgtcccgtgtacgcaccgatttgccgctcgaagttgatttccgtggtcgccgcgaacctgactgggagggtcttaaagcgtttttagagcgtcttgaatttggttcgctcttgcatgaattcggccttttagaaagcccgttaccagccgaagaagcaccttggccaccgcccgaaggcgcgtttttaggttaccgtttgagtcgcccggaaccgatgtgggccgaattatcggctcttgcagcgtctgcccaggagcgtgtgtatcgcgcggaagaccctcatggtgcgctccgcggcctcaaagaagtccgtggactccttgccaaagacttagctgttgttgcattgcgcgaaggtcttgatttacctccgactgatgatccaatgcttcttgcgtacctcttggacccgtcaaacacgacgcccgaaggcgtagcccgtcgttacggcggcgagtggaccgaagatgcagctaagcgcgcgttattggccgaacgtttgcacgccaatttattaggacgtttgcaaggcgaggaacgtctcctctggctttacgaagaagtggagaaaccattgagtcgcgtgctcgcgcatatggaagctaccggtgtcaaattagacgtggcgtatttggagaacctcagccttgaagttgctgccgaaatgcgccgcttggaggaagaagtattccgtttagcaggccactcctttaaccttaattctcgcgatcagttagaacgtgtgttgttcgataaccttggtctccctcctatcggcaagacagagaagaccggtaaacgtagcacttcagcggcggttttagaagctcttcgcgaagtccatcccattgtggacaagatcttgcagtaccgcgaactcgcgaaattgaaaggcacctatattgaccctcttccggcattagtccacccgaaaacgggacgcctccatacccgcttcaaccaaacagccacggcgaccggtcgtttgtcctcctctgatccaaaccttcagaatattccagtacgtaccccattgggccagaagatccgccgcgcgtttgtagctgaggagggttggcgtttagtggccctcgattatagccaaattgaattacgtgtccttgcccatctttctggcgatgagaacctcatccgcgtgtttcaggaaggcaaagacattcacactcaaacggcaagctggatgtttggattatcagctgaagcgatcgatcctttgatgcgtcgtgcagcgaagaccgttaatttcggtgttctctacggtatgagtgcccatcgtttgtcgcaggaattaggcattccctatgaagaagctgccgcgttcattcagaagtactttcaaagctatcccaaagttaaagcatggatcgagaagactctcgaagaaggccgcacacgtggttacgtagagaccttatttggacgtcgccgctatgttcccgatttaaacgctcgcgtgaaatctgtccgtgaagccgccgaacgcatggcgttcaacatgcctgtacagggcacggcagctgacctcatgaaacttgcaatggtgcgcctttttccacaattgcgtgaagttggtgcccgcatgctcttgcaggtccacgatgaactcttgttagaagcgccaaaagagcgtgcggaagaggtggcagccctcgcgaaagaggttatggaaggcgtgtggcccttagcggtgcctcttgaagtcgaagttggtattggcgaggattggttggctgccaaaggataatga

SEQ ID NO: 1544 - protein, 841 aa, synthetic construct
  REGION 1..841: note = Variant of DNA polymerase I from Thermus sp. strain 2.9
MHHHHHHGGSGMLPLFEPKGRVLLVDGHHLAYRNFFALKGLTTSRGEPVQGVYGFAKSLLKALKEDGDVVIVVFDAKAPSFRHEAYEAYKAGRAPTPEDFPRQLALMKELVDLLGLERLEVPGFEADDVLATLAKKAEREGYEVQILTADRDLFQLLSPRISVLHPEGHRITPEWLWEKYGLRPEQWVDFRALAGDPSDNIPGVKGIGEKTALKLLKEWGSLENLLKNLDQVKPESVREKILAHLEDLKLSRELSRVRTDLPLEVDFRGRREPDWEGLKAFLERLEFGSLLHEFGLLESPLPAEEAPWPPPEGAFLGYRLSRPEPMWAELSALAASAQERVYRAEDPHGALRGLKEVRGLLAKDLAVVALREGLDLPPTDDPMLLAYLLDPSNTTPEGVARRYGGEWTEDAAKRALLAERLHANLLGRLQGEERLLWLYEEVEKPLSRVLAHMEATGVKLDVAYLENLSLEVAAEMRRLEEEVFRLAGHSFNLNSRDQLERVLFDNLGLPPIGKTEKTGKRSTSAAVLEALREVHPIVDKILQYRELAKLKGTYIDPLPALVHPKTGRLHTRFNQTATATGRLSSSDPNLQNIPVRTPLGQKIRRAFVAEEGWRLVALDYSQIELRVLAHLSGDENLIRVFQEGKDIHTQTASWMFGLSAEAIDPLMRRAAKTVNFGVLYGMSAHRLSQELGIPYEEAAAFIQKYFQSYPKVKAWIEKTLEEGRTRGYVETLFGRRRYVPDLNARVKSVREAAERMAFNMPVQGTAADLMKLAMVRLFPQLREVGARMLLQVHDELLLEAPKERAEEVAALAKEVMEGVWPLAVPLEVEVGIGEDWLAAKG

SEQ ID NO: 1545 - DNA, 2529 bp, synthetic construct
  misc_feature 1..2529: note = Variant of DNA polymerase I from Thermus sp. strain 2.9
  source 1..2529: mol_type = other DNA
atgcaccatcatcatcatcatggcggtagcggcatgttaccgttgttcgaacctaaaggtcgcgtgcttctggttgatggccatcatctcgcgtatcgtaacttctttgccctgaaaggattaaccaccagccgtggcgagccggtacagggtgtctacggctttgcaaagtcgctcctgaaagctctgaaagaagacggtgatgtggtgattgttgtctttgatgcgaaagcgccaagttttcgccacgaagcgtacgaagcttacaaagccgggcgtgctccaacgccggaagactttcctcgccaattggcgcttatgaaggaattagtggatttgcttggcctcgaacgcttggaagttcccggtttcgaggcagacgacgtattagcgactctcgcaaagaaagccgaacgtgagggctatgaagtccagatcttgacagcagatcgcgatcttttccagcttttatctccgcgcatctcggtgttacacccggaagggcatcgtatcaccccggaatggctctgggagaaatatggtttgcgtcccgaacaatgggtggattttcgcgccttagcaggcgatccgagcgacaatattccgggagttaaaggtatcggcgagaagacggcgctcaagctccttaaagaatgggggtcgttggagaacttgcttaagaatttagatcaggtcaaaccagagtcagtgcgtgagaagattcttgcacacctcgaagacctcaaattaagccgcgaattgtcccgtgtacgcaccgatttgccgctcgaagttgatttccgtggccgccgcgaacctgactgggagggtcttaaagcgtttttagagcgtcttgaatttggttcgctcttgcatgaattcggccttttagaaagcccgttaccagccgaagaagcaccttggccaccgcccgaaggcgcgtttttaggttaccgtttgagtcgcccggaaccgatgtgggccgaattattggctcttgcagcgtctgcccagggacgtgtgtatcgcgcggaagaccctcatggtgcgctccgcggcctcaaagaagtccgtggactccttgccaaagacttagctgttgttgcattgcgcgaaggtcttgatttacctccgactgatgatccaatgcttcttgcgtacctcttggacccgtcaaacacgacgcccgaaggcgtagcccgtcgttacggcggcgagtggaccgaagatgcaggcgagcgcgcgttattggccgaacgtttgcacgccaatttattaggacgtttggcgggcgaggaacgtctcctctggctttacgaagaagtggagaaaccattgagtcgcgtgctcgcgcatatggaagctaccggtgtcaaattagacgtggcgtatttggaggcactcagccttgaagttgctgccgaaatgcgccgcttggaggaagaagtattccgtttagcaggccactcctttaaccttaattctcgcgatcagttagaacgtgtgttgttcgatgaacttggtctccctcctatcggcaagacagagaagaccggtaaacgtagcacttcagcggcggttttagaagctcttcgcgaagtccatcccattgtggacaagatcttgcagtaccgcgaactcgcgaaattgaaaggcacctatattgaccctcttccggcattagtccacccgaaaacgggacgcctccatacccgcttcaaccaaacagccacggcgaccggtcgtttgtcctcctctgatccaaaccttcagaatattccagtacgtaccccattgggccagaagatccgccgcgcgtttgtagctgaggagggttggcgtttagtggccctcgattatagccaaattgaattacgtgtccttgcccatctttctggcgatgagaacctcatccgcgtgtttcaggaaggcaaagacattcacactcaaacggcaagctggatgtttggattatcagctgaagcgatcgatcctttgatgcgtcgtgcagcgaagaccatcaatttcggtgttctctacggtatgagtgcccatcgtttgtcgcaggaattaggcattccctatgaagaagctgcggcgttcattcagcgctactttcaaagctatcccaaagttaaagcatggatcgagaagactctcgaagaaggccgcacacgtggttacgtagagaccttatttggacgtcgccgctatgttcccgatttaaacgctcgcgtgaaatctgtccgtgaagccgccgaacgcatggcgttcaacatgcctgtacagggcacggcagctgacctcatgaaacttgcaatggtgcgcctttttccacaattgcgtgaagttggtgcccgcatgctcttgcaggtccacgatgaactcttgttagaagcgccaaaagagcgtgcggaagaggtggcagccctcgcgaaagaggttatggaaggcgtgtggcccttagcggtgcctcttgaagtcgaagttggtattggcgaggattggtcggctgccaaaggataatga

SEQ ID NO: 1546 - protein, 841 aa, synthetic construct
  REGION 1..841: note = Variant of DNA polymerase I from Thermus sp. strain 2.9
MHHHHHHGGSGMLPLFEPKGRVLLVDGHHLAYRNFFALKGLTTSRGEPVQGVYGFAKSLLKALKEDGDVVIVVFDAKAPSFRHEAYEAYKAGRAPTPEDFPRQLALMKELVDLLGLERLEVPGFEADDVLATLAKKAEREGYEVQILTADRDLFQLLSPRISVLHPEGHRITPEWLWEKYGLRPEQWVDFRALAGDPSDNIPGVKGIGEKTALKLLKEWGSLENLLKNLDQVKPESVREKILAHLEDLKLSRELSRVRTDLPLEVDFRGRREPDWEGLKAFLERLEFGSLLHEFGLLESPLPAEEAPWPPPEGAFLGYRLSRPEPMWAELLALAASAQGRVYRAEDPHGALRGLKEVRGLLAKDLAVVALREGLDLPPTDDPMLLAYLLDPSNTTPEGVARRYGGEWTEDAGERALLAERLHANLLGRLAGEERLLWLYEEVEKPLSRVLAHMEATGVKLDVAYLEALSLEVAAEMRRLEEEVFRLAGHSFNLNSRDQLERVLFDELGLPPIGKTEKTGKRSTSAAVLEALREVHPIVDKILQYRELAKLKGTYIDPLPALVHPKTGRLHTRFNQTATATGRLSSSDPNLQNIPVRTPLGQKIRRAFVAEEGWRLVALDYSQIELRVLAHLSGDENLIRVFQEGKDIHTQTASWMFGLSAEAIDPLMRRAAKTINFGVLYGMSAHRLSQELGIPYEEAAAFIQRYFQSYPKVKAWIEKTLEEGRTRGYVETLFGRRRYVPDLNARVKSVREAAERMAFNMPVQGTAADLMKLAMVRLFPQLREVGARMLLQVHDELLLEAPKERAEEVAALAKEVMEGVWPLAVPLEVEVGIGEDWSAAKG

SEQ ID NO: 1547 - DNA, 2529 bp, synthetic construct
  misc_feature 1..2529: note = Variant of DNA polymerase I from Thermus sp. strain 2.9
  source 1..2529: mol_type = other DNA
atgcaccatcatcatcatcatggcggtagcggcatgttaccgttgttcgaacctaaaggtcgcgtgcttctggttgatggccatcatctcgcgtatcgtaacttctttgccctgaaaggattaaccaccagccgtggcgagccggtacagggtgtctacggctttgcaaagtcgctcctgaaagctctgaaagaagacggtgatgtggtgattgttgtctttgatgcgaaagcgccaagttttcgccacgaagcgtacgaagcttacaaagccgggcgtgctccaacgccggaagactttcctcgccaattggcgcttatgaaggaattagtggatttgcttggcctcgaacgcttggaagttcccggtttcgaggcagacgacgtattagcgactctcgcaaagaaagccgaacgtgagggctatgaagtccagatcttgacagcagatcgcgatcttttccagcttttatctccgcgcatctcggtgttacacccggaagggcatcgtatcaccccggaatggctctgggagaaatatggtttgcgtcccgaacaatgggtggattttcgcgccttagcaggcgatccgagcgacaatattccgggagttaaaggtatcggcgagaagacggcgctcaagctccttaaagaatgggggtcgttggagaacttgcttaagaatttagatcaggtcaaaccagagtcagtgcgtgagaagattcttgcacacctcgaagacctcaaattaagccgcgaattgtcccgtgtacgcaccgatttgccgctcgaagttgatttccgtggccgccgcgaacctgactgggggggtcttaaagcgtttttagagcgtcttgaatttggttcgctcttgcatgaattcggccttttagaaagcccgttaccagccgaagaagcaccttggccaccgcccgaaggcgcgtttttaggttaccgtttgagtcgcccggaaccgatgtgggccgaattattggctcttgcagcgtctgcccagggacgtgtgtatcgcgcggaagaccctcatggtgcgctccgcggcctcaaagaagtccgtggactccttgccaaagacttagctgttgttgcattgcgcgaaggtcttgatttacctccgactgatgatccaatgcttcttgcgtacctcttggacccgtcaaacacgacgcccgaaggcgtagcccgtcgttacggcggcgagtggaccgaagatgcaggcgagcgcgcgttattggccgaacgtttgcacgccaatttattaggacgtttgcaaggcgaggaacgtctcctctggctttacgaagaagtggagaaaccattgagtcgcgtgctcgcgcatatggaagctaccggtgtcaaattagacgtggcgtatttggaggcactcagccttgaagttgctgccgaaatgcgccgcttggaggaagaagtattccgtttagcaggccactcctttaaccttaattctcgcgatcagttagaacgtgtgttgttcgatgaacttggtctccctcctatcggcaagacagagaagaccggtaaacgtagcacttcagcggcggttttagaagctcttcgcgaagtccatcccattgtggacaagatcttgcagtaccgcgaactcgcgaaattgaaaggcacctatattgaccctcttccggcattagtccacccgaaaacgggacgcctccatacccgcttcaaccaaacagccacggcgaccggtcgtttgtcctcctctgatccaaaccttcagaatattccagtacgtaccccattgggccagaagatccgccgcgcgtttgtagctgaggagggttggcgtttagtggccctcgattatagccaaattgaattacgtgtccttgcccatctttctggcgatgagaacctcatccgcgtgtttcaggaaggcaaagacattcacactcaaacggcaagctggatgtttggattatcagctgaagcgatcgatcctttgatgcgtcgtgcagcgaagaccatcaatttcggtgttctctacggtatgagtgcccatcgtttgtcgcaggaattaggcattccctatgaagaagctgcggcgttcattcagcgctactttcaaagctatcccaaagttaaagcatggatcgagaagactctcgaagaaggccgcacacgtggttacgtagagaccttatttggacgtcgccgctatgttcccgatttaaacgctcgcgtgaaatctgtccgtgaagccgccgaacgcatggcgttcaacatgcctgtacagggcacggcagctgacctcatgaaacttgcaatggtgcgcctttttccacaattgcgtgaagttggtgcccgcatgctcttgcaggtccacgatgaactcttgttagaagcgccaaaagagcgtgcggaagaggtggcagccctcgcgaaagaggttatggaaggcgtgtggcccttagcggtgcctcttgaagtcgaagttggtattggcgaggattggttggctgccaaaggataatga

SEQ ID NO: 1548 - protein, 841 aa, synthetic construct
  REGION 1..841: note = Variant of DNA polymerase I from Thermus sp. strain 2.9
MHHHHHHGGSGMLPLFEPKGRVLLVDGHHLAYRNFFALKGLTTSRGEPVQGVYGFAKSLLKALKEDGDVVIVVFDAKAPSFRHEAYEAYKAGRAPTPEDFPRQLALMKELVDLLGLERLEVPGFEADDVLATLAKKAEREGYEVQILTADRDLFQLLSPRISVLHPEGHRITPEWLWEKYGLRPEQWVDFRALAGDPSDNIPGVKGIGEKTALKLLKEWGSLENLLKNLDQVKPESVREKILAHLEDLKLSRELSRVRTDLPLEVDFRGRREPDWGGLKAFLERLEFGSLLHEFGLLESPLPAEEAPWPPPEGAFLGYRLSRPEPMWAELLALAASAQGRVYRAEDPHGALRGLKEVRGLLAKDLAVVALREGLDLPPTDDPMLLAYLLDPSNTTPEGVARRYGGEWTEDAGERALLAERLHANLLGRLQGEERLLWLYEEVEKPLSRVLAHMEATGVKLDVAYLEALSLEVAAEMRRLEEEVFRLAGHSFNLNSRDQLERVLFDELGLPPIGKTEKTGKRSTSAAVLEALREVHPIVDKILQYRELAKLKGTYIDPLPALVHPKTGRLHTRFNQTATATGRLSSSDPNLQNIPVRTPLGQKIRRAFVAEEGWRLVALDYSQIELRVLAHLSGDENLIRVFQEGKDIHTQTASWMFGLSAEAIDPLMRRAAKTINFGVLYGMSAHRLSQELGIPYEEAAAFIQRYFQSYPKVKAWIEKTLEEGRTRGYVETLFGRRRYVPDLNARVKSVREAAERMAFNMPVQGTAADLMKLAMVRLFPQLREVGARMLLQVHDELLLEAPKERAEEVAALAKEVMEGVWPLAVPLEVEVGIGEDWLAAKG

SEQ ID NO: 1549 - DNA, 2529 bp, synthetic construct
  misc_feature 1..2529: note = Variant of DNA polymerase I from Thermus sp. strain 2.9
  source 1..2529: mol_type = other DNA
atgcaccatcatcatcatcatggcggtagcggcatgttaccgttgttcgaacctaaaggtcgcgtgcttctggttgatggccatcatctcgcgtatcgtaacttctttgccctgaaaggattaaccaccagccgtggcgagccggtacagggtgtctacggctttgcaaagtcgctcctgaaagctctgaaagaagacggtgatgtggtgattgttgtctttgatgcgaaagcgccaagttttcgccacactgcgtacgaagcttacaaagccgggcgtgctccaacgccggaagactttcctcgccaattggcgcttatgaaggaattagtggatttgcttggcctcgaacgcttggaagttcccggtttcgaggcagacgacgtattagcgactctcgcaaagaaagccgaacgtgagggctatgaagtccagatcttgacagcagatcgcgatcttttccagcttttatctccgcgcatctcggtgttacacccggaagggcatcgtatcaccccggaatggctctgggagaaatatggtttgcgtcccgaacaatgggtggattttcgcgccttagcaggcgatccgagcgacaatattccgggagttaaaggtatcggcgagaagacggcgctcaagctccttaaagaatgggggtcgttggagaacttgcttaagaatttagatcaggtcaaaccagagtcagtgcgtgagaagattcttgcacacctcgaagacctcaaattaagccgcgaattgtcccgtgtacgcaccgatttgccgctcgaagttgatttccgtggccgccgcgaacctgactgggagggtcttaaagcgtttttagagcgtcttgaatttggttcgctcttgcatgaattcggccttttagaaagcccgttaccagccgaagaagcaccttggccaccgcccgaaggcgcgtttttaggttaccgtttgagtcgcccggaaccgatgtgggccgaattattggctcttgcagcgtctgcccagggacgtgtgtatcgcgcggaagaccctcatggtgcgctccgcggcctcaaagaagtccgtggactccttgccaaagacttagctgttgttgcattgcgcgaaggtcttgatttacctccgactgatgatccaatgcttcttgcgtacctcttggacccgtcaaacacgacgcccgaaggcgtagcccgtcgttacggcggcgagtggaccgaagatgcaggcgagcgcgcgttattggccgaacgtttgcacgccaatttattaggacgtttgcaaggcgaggaacgtctcctctggctttacgaagaagtggagaaaccattgagtcgcgtgctcgcgcatatggaagctaccggtgtcaaattagacgtggcgtatttggaggcactcagccttgaagttgctgccgaaatgcgccgcttggaggaagaagtattccgtttagcaggccactcctttaaccttaattctcgcgatcagttagaacgtgtgttgttcgatgaacttggtctccctcctatcggcaagacagagaagaccggtaaacgtagcacttcagcggcggttttagaagctcttcgcgaagtccatcccattgtggacaagatcttgcagtaccgcgaactcgcgaaattgaaaggcacctatattgaccctcttccggcattagtccacccgaaaacgggacgcctccatacccgcttcaaccaaacagccacggcgaccggtcgtttgtcctcctctgatccaaaccttcagaatattccagtacgtaccccattgggccagaagatccgccgcgcgtttgtagctgaggagggttggcgtttagtggccctcgattatagccaaattgaattacgtgtccttgcccatctttctggcgatgagaacctcatccgcgtgtttcaggaaggcaaagacattcacactcaaacggcaagctggatgtttggattatcagctgaagcgatcgatcctttgatgcgtcgtgcagcgaagaccatcaatttcggtgttctctacggtatgagtgcccatcgtttgtcgcaggaattaggcattccctatgaagaagctgcggcgttcattcagcgctactttcaaagctatcccaaagttaaagcatggatcgagaagactctcgaagaaggccgcacacgtggttacgtagagaccttatttggacgtcgccgctatgttcccgatttaaacgctcgcgtgaaatctgtccgtgaagccgccgaacgcatggcgttcaacatgcctgtacagggcacggcagctgacctcatgaaacttgcaatggtgcgcctttttccacaattgcgtgaagttggtgcccgcatgctcttgcaggtccacgatgaactcttgttagaagcgccaaaagagcgtgcggaagaggtggcagccctcgcgaaagaggttatggaaggcgtgtggcccttagcggtgcctcttgaagtcgaagttggtattggcgaggattggttggctgccaaaggataatga

SEQ ID NO: 1550 - protein, 841 aa, synthetic construct
  REGION 1..841: note = Variant of DNA polymerase I from Thermus sp. strain 2.9
MHHHHHHGGSGMLPLFEPKGRVLLVDGHHLAYRNFFALKGLTTSRGEPVQGVYGFAKSLLKALKEDGDVVIVVFDAKAPSFRHTAYEAYKAGRAPTPEDFPRQLALMKELVDLLGLERLEVPGFEADDVLATLAKKAEREGYEVQILTADRDLFQLLSPRISVLHPEGHRITPEWLWEKYGLRPEQWVDFRALAGDPSDNIPGVKGIGEKTALKLLKEWGSLENLLKNLDQVKPESVREKILAHLEDLKLSRELSRVRTDLPLEVDFRGRREPDWEGLKAFLERLEFGSLLHEFGLLESPLPAEEAPWPPPEGAFLGYRLSRPEPMWAELLALAASAQGRVYRAEDPHGALRGLKEVRGLLAKDLAVVALREGLDLPPTDDPMLLAYLLDPSNTTPEGVARRYGGEWTEDAGERALLAERLHANLLGRLQGEERLLWLYEEVEKPLSRVLAHMEATGVKLDVAYLEALSLEVAAEMRRLEEEVFRLAGHSFNLNSRDQLERVLFDELGLPPIGKTEKTGKRSTSAAVLEALREVHPIVDKILQYRELAKLKGTYIDPLPALVHPKTGRLHTRFNQTATATGRLSSSDPNLQNIPVRTPLGQKIRRAFVAEEGWRLVALDYSQIELRVLAHLSGDENLIRVFQEGKDIHTQTASWMFGLSAEAIDPLMRRAAKTINFGVLYGMSAHRLSQELGIPYEEAAAFIQRYFQSYPKVKAWIEKTLEEGRTRGYVETLFGRRRYVPDLNARVKSVREAAERMAFNMPVQGTAADLMKLAMVRLFPQLREVGARMLLQVHDELLLEAPKERAEEVAALAKEVMEGVWPLAVPLEVEVGIGEDWLAAKG

SEQ ID NO: 1551 - DNA, 2529 bp, synthetic construct
  misc_feature 1..2529: note = Variant of DNA polymerase I from Thermus sp. strain 2.9
  source 1..2529: mol_type = other DNA
atgcaccatcatcatcatcatggcggtagcggcatgttaccgttgttcgaacctaaaggtcgcgtgcttctggttgatggccatcatctcgcgtatcgtaacttctttgccctgaaaggattaaccaccagccgtggcgagccggtacagggtgtctacggctttgcaaagtcgctcctgaaagctctgaaagaagacggtgatgtggtgattgttgtctttgatgcgaaagcgccaagttttcgccacgaagcgtacgaagcttacaaagccgggcgtgctccaacgccggaagactttcctcgccaattggcgcttatgaaggaattagtggatttgcttggcctcgaacgcttggaagttcccggtttcgaggcagacgacgtattagcgactctcgcaaagaaagccgaacgtgagggctatgaagtccagatcttgacagcagatcgcgatcttttccagcttttatctccgcgcatctcggtgttacacccggaagggcatcgtatcaccccggaatggctctgggagaaatatggtttgcgtcccgaacaatgggtggattttcgcgccttagcaggcgatccgagcgacaatattccgggagttaaaggtatcggcgagaagacggcgctcaagctccttaaagaatgggggtcgttggagaacttgcttaagaatttagatcaggtcaaaccagagtcagtgcgtgagaagattcttgcacacctcgaagacctcaaattaagccgcgaattgtcccgtgtacgcaccgatttgccgctcgaagttgatttccgtggccgccgcgaacctgactgggagggtcttaaagcgtttttagagcgtcttgaatttggttcgctcttgcatgaattcggccttttagaaagcccggggccagccgaagaagcaccttggccaccgcccgaaggcgcgtttttaggttaccgtttgagtcgcccggaaccgatgtgggccgaattattggctcttgcagcgtctgcccagggacgtgtgtatcgcgcggaagaccctcatggtgcgctccgcggcctcaaagaagtccgtggactccttgccaaagacttagctgttgttgcattgcgcgaaggtcttgatttacctccgactgatgatccaatgcttcttgcgtacctcttggacccgtcaaacacgacgcccgaaggcgtagcccgtcgttacggcggcgagtggaccgaagatgcaggcgagcgcgcgttattggccgaacgtttgcacgccaatttattaggacgtttgcaaggcgaggaacgtctcctctggctttacgaagaagtggagaaaccattgagtcgcgtgctcgcgcatatggaagctaccggtgtcaaattagacgtggcgtatttggaggcactcagccttgaagttgctgccgaaatgcgccgcttggaggaagaagtattccgtttagcaggccactcctttaaccttaattctcgcgatcagttagaacgtgtgttgttcgatgaacttggtctccctcctatcggcaagacagagaagaccggtaaacgtagcacttcagcggcggttttagaagctcttcgcgaagtccatcccattgtggacaagatcttgcagtaccgcgaactcgcgaaattgaaaggcacctatattgaccctcttccggcattagtccacccgaaaacgggacgcctccatacccgcttcaaccaaacagccacggcgaccggtcgtttgtcctcctctgatccaaaccttcagaatattccagtacgtaccccattgggccagaagatccgccgcgcgtttgtagctgaggagggttggcgtttagtggccctcgattatagccaaattgaattacgtgtccttgcccatctttctggcgatgagaacctcatccgcgtgtttcaggaaggcaaagacattcacactcaaacggcaagctggatgtttggattatcagctgaagcgatcgatcctttgatgcgtcgtgcagcgaagaccatcaatttcggtgttctctacggtatgagtgcccatcgtttgtcgcaggaattaggcattccctatgaagaagctgcggcgttcattcagcgctactttcaaagctatcccaaagttaaagcatggatcgagaagactctcgaagaaggccgcacacgtggttacgtagagaccttatttggacgtcgccgctatgttcccgatttaaacgctcgcgtgaaatctgtccgtgaagccgccgaacgcatggcgttcaacatgcctgtacagggcacggcagctgacctcatgaaacttgcaatggtgcgcctttttccacaattgcgtgaagttggtgcccgcatgctcttgcaggtccacgatgaactcttgttagaagcgccaaaagagcgtgcggaagaggtggcagccctcgcgaaagaggttatggaaggcgtgtggcccttagcggtgcctcttgaagtcgaagttggtattggcgaggattggttggctgccaaaggataatga

SEQ ID NO: 1552 - protein, 841 aa, synthetic construct; identical to SEQ ID NO: 950
  REGION 1..841: note = Variant of DNA polymerase I from Thermus sp. strain 2.9

SEQ ID NO: 1553 - DNA, 2529 bp, synthetic construct
  misc_feature 1..2529: note = Variant of DNA polymerase I from Thermus sp. strain 2.9
  source 1..2529: mol_type = other DNA
atgcaccatcatcatcatcatggcggtagcggcatgttaccgttgttcgaacctaaaggtcgcgtgcttctggttgatggccatcatctcgcgtatcgtaacttctttgccctgaaaggattaaccaccagccgtggcgagccggtacagggtgtctacggctttgcaaagtcgctcctgaaagctctgaaagaagacggtgatgtggtgattgttgtctttgatgcgaaagcgccaagttttcgccacgaagcgtacgaagcttacaaagccgggcgtgctccaacgccggaagactttcctcgccaattggcgcttatgaaggaattagtggatttgcttggcctcgaacgcttggaagttcccggtttcgaggcagacgacgtattagcgactctcgcaaagaaagccgaacgtgagggctatgaagtccagatcttgacagcagatcgcgatcttttccagcttttatctccgcgcatctcggtgttacacccggaagggcatcgtatcaccccggaatggctctgggagaaatatggtttgcgtcccgaacaatgggtggattttcgcgccttagcaggcgatccgagcgacaatattccgggagttaaaggtatcggcgagaagacggcgctcaagctccttaaagaatgggggtcgttggagaacttgcttaagaatttagatcaggtcaaaccagagtcagtgcgtgagaagattcttgcacacctcgaagacctcaaattaagccgcgaattgtcccgtgtacgcaccgatttgccgctcgaagttgatttccgtggccgccgcgaacctgactgggagggtcttaaagcgtttttagagcgtcttgaatttggttcgctcttgcatgaattcggccttttagaaagcccgttaccagccgaagaagcaccttggccaccgcccgaaggcgcgtttttaggttaccgtttgagtcgcccggaaccgatgtgggccgaattattggctcttgcagcgtctgcccagggacgtgtgtatcgcgcggaagaccctcatggtgcgctccgcggcctcaaagaagtccgtggactccttgccaaagacttagctgttgttgcattgcgcgaaggtcttgatttacctccgactgatgatccaatgcttcttgcgtacctcttggacccgtcaaacacgacgcccgaaggcgtagcccgtcgttacggcggcgagtggaccgaagatgcaggcgagcgcgcgttattggccgaacgtttgcacgccaatttattaggacgtttgcaaggcgaggaacgtctcctctggctttacgaagaagtggagaaaccattgagtcgcgtgctcgcgcatatggaagctaccggtgtcaaattagacgtggcgtatttggaggcactcagccttgaagttgctgccgaaatgcgccgcttggaggaagaagtattccgtttagcaggccactcctttaaccttaattctcgcgatcagttagaacgtgtgttgttcgatgaacttggtctccctcctatcggcaagacagagaagaccggtaaacgtagcacttcagcggcggttttagaagctcttcgcgaagtccatcccattgtggacaagatcttgcagtaccgcgaactcgcgaaattgaaaggcacctatattgaccctcttccggcattagtccacccgaaaacgggacgcctccatacccgcttcaaccaaacagccacggcgaccggtcgtttgtcctcctctgatccaaaccttcagaatattccagtacgtaccccattgggccagaagatccgccgcgcgtttgtagctgaggagggttggcgtttagtggccctcgattatagccaaattgaattacgtgtccttgcccatctttctggcgatgagaacctcatccgcgtgtttcaggaaggcaaagacattcacactcaaacggcaagctggatgtttggattatcagctgaagcgatcgatcctttgatgcgtcgtgcagcgaagaccatcaatttcggtgttctctacggtatgagtgcccatcgtttgtcgcaggaattaggcattccctatacggaagctgcggcgttcattcagcgctactttcaaagctatcccaaagttaaagcatggatcgagaagactctcgaagaaggccgcacacgtggttacgtagagaccttatttggacgtcgccgctatgttcccgatttaaacgctcgcgtgaaatctgtccgtgaagccgccgaacgcatggcgttcaacatgcctgtacagggcacggcagctgacctcatgaaacttgcaatggtgcgcctttttccacaattgcgtgaagttggtgcccgcatgctcttgcaggtccacgatgaactcttgttagaagcgccaaaagagcgtgcggaagaggtggcagccctcgcgaaagaggttatggaaggcgtgtggcccttagcggtgcctcttgaagtcgaagttggtattggcgaggattggttggctgccaaaggataatga

SEQ ID NO: 1554 - protein, 841 aa, synthetic construct
  REGION 1..841: note = Variant of DNA polymerase I from Thermus sp. strain 2.9
MHHHHHHGGSGMLPLFEPKGRVLLVDGHHLAYRNFFALKGLTTSRGEPVQGVYGFAKSLLKALKEDGDVVIVVFDAKAPSFRHEAYEAYKAGRAPTPEDFPRQLALMKELVDLLGLERLEVPGFEADDVLATLAKKAEREGYEVQILTADRDLFQLLSPRISVLHPEGHRITPEWLWEKYGLRPEQWVDFRALAGDPSDNIPGVKGIGEKTALKLLKEWGSLENLLKNLDQVKPESVREKILAHLEDLKLSRELSRVRTDLPLEVDFRGRREPDWEGLKAFLERLEFGSLLHEFGLLESPLPAEEAPWPPPEGAFLGYRLSRPEPMWAELLALAASAQGRVYRAEDPHGALRGLKEVRGLLAKDLAVVALREGLDLPPTDDPMLLAYLLDPSNTTPEGVARRYGGEWTEDAGERALLAERLHANLLGRLQGEERLLWLYEEVEKPLSRVLAHMEATGVKLDVAYLEALSLEVAAEMRRLEEEVFRLAGHSFNLNSRDQLERVLFDELGLPPIGKTEKTGKRSTSAAVLEALREVHPIVDKILQYRELAKLKGTYIDPLPALVHPKTGRLHTRFNQTATATGRLSSSDPNLQNIPVRTPLGQKIRRAFVAEEGWRLVALDYSQIELRVLAHLSGDENLIRVFQEGKDIHTQTASWMFGLSAEAIDPLMRRAAKTINFGVLYGMSAHRLSQELGIPYTEAAAFIQRYFQSYPKVKAWIEKTLEEGRTRGYVETLFGRRRYVPDLNARVKSVREAAERMAFNMPVQGTAADLMKLAMVRLFPQLREVGARMLLQVHDELLLEAPKERAEEVAALAKEVMEGVWPLAVPLEVEVGIGEDWLAAKG

SEQ ID NO: 1555 - DNA, 2529 bp, synthetic construct; identical to SEQ ID NO: 1047
  misc_feature 1..2529: note = Variant of DNA polymerase I from Thermus sp. strain 2.9
  source 1..2529: mol_type = other DNA

SEQ ID NO: 1556 - protein, 841 aa, synthetic construct; identical to SEQ ID NO: 1048
  REGION 1..841: note = Variant of DNA polymerase I from Thermus sp. strain 2.9

SEQ ID NO: 1557 - DNA, 2529 bp, synthetic construct
  misc_feature 1..2529: note = Variant of DNA polymerase I from Thermus sp. strain 2.9
  source 1..2529: mol_type = other DNA
atgcaccatcatcatcatcatggcggtagcggcatgttaccgttgttcgaacctaaaggtcgcgtgcttctggttgatggccatcatctcgcgtatcgtaacttctttgccctgaaaggattaaccaccagccgtggcgagccggtacagggtgtctacggctttgcaaagtcgctcctgaaagctctgaaagaagacggtgatgtggtgattgttgtctttgatgcgaaagcgccaagttttcgccacgaagcgtacgaagcttacaaagccgggcgtgctccaacgccggaagactttcctcgccaattggcgcttatgaaggaattagtggatttgcttggcctcgaacgcttggaagttcccggtttcgaggcagacgacgtattagcgactctcgcaaagaaagccgaacgtgagggctatgaagtccagatcttgacagcagatcgcgatcttttccagcttttatctccgcgcatctcggtgttacacccggaagggcatcgtatcaccccggaatggctctgggagaaatatggtttgcgtcccgaacaatgggtggattttcgcgccttagcaggcgatccgagcgacaatattccgggagttaaaggtatcggcgagaagacggcgctcaagctccttaaagaatgggggtcgttggagaacttgcttaagaatttagatcaggtcaaaccagagtcagtgcgtgagaagattcttgcacacctcgaagacctcaaattaagccgcgaattgtcccgtgtacgcaccgatttgccgctcgaagttgatttccgtggccgccgcgaacctgactggatgggtcttaaagcgtttttagagcgtcttgaatttggttcgctcttgcatgaattcggccttttagaaagcccgttaccagccgaagaagcaccttggccaccgcccgaaggcgcgtttttaggttaccgtttgagtcgcccggaaccgatgtgggccgaattattggctcttgcagcgtctgcccagggacgtgtgtatcgcgcggaagaccctcatggtgcgctccgcggcctcaaagaagtccgtggactccttgccaaagacttagctgttgttgcattgcgcgaaggtcttgatttacctccgactgatgatccaatgcttcttgcgtacctcttggacccgtcaaacacgacgcccgaaggcgtagcccgtcgttacggcggcgagtggaccgaagatgcaggcgagcgcgcgttattggccgaacgtttgcacgccaatttattaggacgtttgcaaggcgaggaacgtctcctctggctttacgaagaagtggagaaaccattgagtcgcgtgctcgcgcatatggaagctaccggtgtcaaattagacgtggcgtatttggaggcactcagccttgaagttgctgccgaaatgcgccgcttggaggaagaagtattccgtttagcaggccactcctttaaccttaattctcgcgatcagttagaacgtgtgttgttcgatgaacttggtctccctcctatcggcaagacagagaagaccggtaaacgtagcacttcagcggcggttttagaagctcttcgcgaagtccatcccattgtggacaagatcttgcagtaccgcgaactcgcgaaattgaaaggcacctatattgaccctcttccggcattagtccacccgaaaacgggacgcctccatacccgcttcaaccaaacagccacggcgaccggtcgtttgtcctcctctgatccaaaccttcagaatattccagtacgtaccccattgggccagaagatccgccgcgcgtttgtagctgaggagggttggcgtttagtggccctcgattatagccaaattgaattacgtgtccttgcccatctttctggcgatgagaacctcatccgcgtgtttcaggaaggcaaagacattcacactcaaacggcaagctggatgtttggattatcagctgaagcgatcgatcctttgatgcgtcgtgcagcgaagaccatcaatttcggtgttctctacggtatgagtgcccatcgtttgtcgcaggaattaggcattccctatgaagaagctgcggcgttcattcagcgctactttcaaagctatcccaaagttaaagcatggatcgagaagactctcgaagaaggccgcacacgtggttacgtagagaccttatttggacgtcgccgctatgttcccgatttaaacgctcgcgtgaaatctgtccgtgaagccgccgaacgcatggcgttcaacatgcctgtacagggcacggcagctgacctcatgaaacttgcaatggtgcgcctttttccacaattgcgtgaagttggtgcccgcatgctcttgcaggtccacgatgaactcttgttagaagcgccaaaagagcgtgcggaagaggtggcagccctcgcgaaagaggttatggaaggcgtgtggcccttagcggtgcctcttgaagtcgaagttggtattggcgaggattggttggctgccaaaggataatga

SEQ ID NO: 1558 - protein, 841 aa, synthetic construct
  REGION 1..841: note = Variant of DNA polymerase I from Thermus sp. strain 2.9
MHHHHHHGGSGMLPLFEPKGRVLLVDGHHLAYRNFFALKGLTTSRGEPVQGVYGFAKSLLKALKEDGDVVIVVFDAKAPSFRHEAYEAYKAGRAPTPEDFPRQLALMKELVDLLGLERLEVPGFEADDVLATLAKKAEREGYEVQILTADRDLFQLLSPRISVLHPEGHRITPEWLWEKYGLRPEQWVDFRALAGDPSDNIPGVKGIGEKTALKLLKEWGSLENLLKNLDQVKPESVREKILAHLEDLKLSRELSRVRTDLPLEVDFRGRREPDWMGLKAFLERLEFGSLLHEFGLLESPLPAEEAPWPPPEGAFLGYRLSRPEPMWAELLALAASAQGRVYRAEDPHGALRGLKEVRGLLAKDLAVVALREGLDLPPTDDPMLLAYLLDPSNTTPEGVARRYGGEWTEDAGERALLAERLHANLLGRLQGEERLLWLYEEVEKPLSRVLAHMEATGVKLDVAYLEALSLEVAAEMRRLEEEVFRLAGHSFNLNSRDQLERVLFDELGLPPIGKTEKTGKRSTSAAVLEALREVHPIVDKILQYRELAKLKGTYIDPLPALVHPKTGRLHTRFNQTATATGRLSSSDPNLQNIPVRTPLGQKIRRAFVAEEGWRLVALDYSQIELRVLAHLSGDENLIRVFQEGKDIHTQTASWMFGLSAEAIDPLMRRAAKTINFGVLYGMSAHRLSQELGIPYEEAAAFIQRYFQSYPKVKAWIEKTLEEGRTRGYVETLFGRRRYVPDLNARVKSVREAAERMAFNMPVQGTAADLMKLAMVRLFPQLREVGARMLLQVHDELLLEAPKERAEEVAALAKEVMEGVWPLAVPLEVEVGIGEDWLAAKG

SEQ ID NO: 1559 - DNA, 2529 bp, synthetic construct
  misc_feature 1..2529: note = Variant of DNA polymerase I from Thermus sp. strain 2.9
  source 1..2529: mol_type = other DNA
atgcaccatcatcatcatcatggcggtagcggcatgttaccgttgttcgaacctaaaggtcgcgtgcttctggttgatggccatcatctcgcgtatcgtaacttctttgccctgaaaggattaaccaccagccgtggcgagccggtacagggtgtctacggctttgcaaagtcgctcctgaaagctctgaaagaagacggtgatgtggtgattgttgtctttgatgcgaaagcgccaagttttcgccacgaagcgtacgaagcttacaaagccgggcgtgctccaacgccggaagactttcctcgccaattggcgcttatgaaggaattagtggatttgcttggcctcgaacgcttggaagttcccggtttcgaggcagacgacgtattagcgactctcgcaaagaaagccgaacgtgagggctatgaagtccagatcttgacagcagatcgcgatcttttccagcttttatctccgcgcatctcggtgttacacccggaagggcatcgtatcaccccggaatggctctgggagaaatatggtttgcgtcccgaacaatgggtggattttcgcgccttagcaggcgatccgagcgacaatattccgggagttaaaggtatcggcgagaagacggcgctcaagctccttaaagaatgggggtcgttggagaacttgcttaagaatttagatcaggtcaaaccagagtcagtgcgtgagaagattcttgcacacctcgaagacctcaaattaagcctggaattgtcccgtgtacgcaccgatttgccgctcgaagttgatttccgtggccgccgcgaacctgactgggagggtcttaaagcgtttttagagcgtcttgaatttggttcgctcttgcatgaattcggccttttagaaagcccgttaccagccgaagaagcaccttggccaccgcccgaaggcgcgtttttaggttaccgtttgagtcgcccggaaccgatgtgggccgaattactggctcttgcagcgtctgcccagggacgtgtgtatcgcgcggaagaccctcatggtgcgctccgtggcctcaaagaagtccgtggactccttgccaaagacttagctgttgttgcattgcgcgaaggtcttgatttacctccgactgatgatccaatgcttcttgcgtacctcttggacccgtcaaacacgacgcccgaaggcgtagcccgtcgttacggcggcgagtggaccgaagatgcaggcgagcgcgcgttattggccgaacgtttgcacgccaatttattaggacgtttgcaaggcgaggaacgtctcctctggctttacgaagaagtggagaaaccattgagtcgcgtgctcgcgcatatggaagctaccggtgtcaaattagacgtggcgtatttggaggctctcagccttgaagttgctgccgaaatgcgccgcttggaggaagaagtattccgtttagcaggccactcctttaaccttaattctcgcgatcagttagaacgtgtgttgttcgatgagcttggtctccctcctatcggcaagacagagaagaccggtaaacgtagcacttcagcggcggttttagaagctcttcgcgaagtccatcccattgtggacaagatcttgcagtaccgcgaactcgcgaaattgaaaggcacctatattgaccctcttccggcattagtccacccgaaaacgggacgcctccatacccgcttcaaccaaacagccacggcgaccggtcgtttgtcctcctctgatccaaaccttcagaatattccagtacgtaccccattgggccagaagatccgccgcgcgtttgtagctgaggagggttggcgtttagtggccctcgattatagccaaattgaattacgtgtccttgcccatctttctggcgatgagaacctcatccgcgtgtttcaggaaggcaaagacattcacactcaaacggcaagctggatgtttggattatcagctgaagcgatcgatcctttgatgcgtcgtgcagcgaagaccattaatttcggtgttctctacggtatgagtgcccatcgtttgtcgcaggaattaggcattccctatgaagaagctgcggcgttcattcagcgctactttcaaagctatcccaaagttaaagcatggatcgagaagactctcgaagaaggccgcacacgtggttacgtagagaccttatttggacgtcgccgctatgttcccgatttaaacgctcgcgtgaaatctgtccgtgaagccgccgaacgcatggcgttcaacatgcctgtacagggcacggcagctgacctcatgaaacttgcaatggtgcgcctttttccacaattgcgtgaagttggtgcccgcatgctcttgcaggtccacgatgaactcttgttagaagcgccaaaagagcgtgcggaagaggtggcagccctcgcgaaagaggttatggaaggcgtgtggcccttagcggtgcctcttgaagtcgaagttggtattggcgaggattggttggctgccaaaggataatga

SEQ ID NO: 1560 - protein, 841 aa, synthetic construct; identical to SEQ ID NO: 1098
  REGION 1..841: note = Variant of DNA polymerase I from Thermus sp. strain 2.9

SEQ ID NO: 1561 - DNA, 2529 bp, synthetic construct
  misc_feature 1..2529: note = Variant of DNA polymerase I from Thermus sp. strain 2.9
  source 1..2529: mol_type = other DNA
atgcaccatcatcatcatcatggcggtagcggcatgttaccgttgttcgaacctaaaggtcgcgtgcttctggttgatggccatcatctcgcgtatcgtaacttctttgccctgaaaggattaaccaccagccgtggcgagccggtacagggtgtctacggctttgcaaagtcgctcctgaaagctctgaaagaagacggtgatgtggtgattgttgtctttgatgcgaaagcgccaagttttcgccacgaagcgtacgaagcttacaaagccgggcgtgctccaacgccggaagactttcctcgccaattggcgcttatgaaggaattagtggatttgcttggcctcgaacgcttggaagttcccggtttcgaggcagacgacgtattagcgactctcgcaaagaaagccgaacgtgagggctatgaagtccagatcttgacagcagatcgcgatcttttccagcttttatctccgcgcatctcggtgttacacccggaagggcatcgtatcaccccggaatggctctgggagaaatatggtttgcgtcccgaacaatgggtggattttcgcgccttagcaggcgatccgagcgacaatattccgggagttaaaggtatcggcgagaagacggcgctcaagctccttaaagaatgggggtcgttggagaacttgcttaagaatttagatcaggtcaaaccagagtcagtgcgtgagaagattcttgcacacctcgaagacctcaaattaagccgcgaattgtcccgtgtacgcaccgatttgccgctcgaagttgatttccgtggccgccgcgaacctgactgggagggtcttaaagcgtttttagagcgtcttgaatttggttcgctcttgcatgaattcggccttttagaaagcccgttaccagccgaagaagcaccttggccaccgcccgaaggcgcgtttttaggttaccgtttgagtcgcccggaaccgatgtgggccgaattattggctcttgcagcgtctgcccagggacgtgtgtatcgcgcggaagaccctcatggtgcgctccgcggcctcaaagaagtccgtggactccttgccaaagacttagctgttgttgcattgcgcgaaggtcttgatttacctccgactgatgatccaatgcttcttgcgtacctcttggacccgtcaaacacgacgcccgaaggcgtagcccgtcgttacggcggcgagtggaccgaagatgcaggcgagcgcgcgttattggccgaacgtttgcacgccaatttattaggacgtttgcaaggcgaggaacgtctcctctggctttacgaagaagtggagaaaccattgagtcgcgtgctcgcgcatatggaagctaccggtgtcaaattagacgtggcgtatttggaggcactcagccttgaagttgctgccgaaatgcgccgcttggaggaagaagtattccgtttagcaggccactcctttaaccttaattctcgcgatcagttagaacgtgtgttgttcgatgaacttggtctccctcctatcggcaagacagagaagaccggtaaacgtagcacttcagcggcggttttagaagctcttcgcgaagtccatcccattgtggacaagatcttgcagtaccgcgaactcgcgaaattgaaaggcacctatattgaccctcttccggcattagtccacccgaaaacgggacgcctccatacccgcttcaaccaaacagccacggcgaccggtcgtttgtcctcctctgatccaaaccttcagaatattccagtacgtaccccattgggccagaagatccgccgcgcgtttgtagctgaggagggttggcgtttagtggccctcgattatagccaaattgaattacgtgtccttgcccatctttctggcgatgagaacctcatccgcgtgtttcaggaaggcaaagacattcacactcaaacggcaagctggatgtttggattatcagctgaagcgatcgatcctttgatgcgtcgtgcagcgaagaccgttaatttcggtgttctctacggtatgagtgcccatcgtttgtcgcaggaattaggcattccctatgaagaagctgccgcgttcattcagcgctactttcaaagctatcccaaagttaaagcatggatcgagaagactctcgaagaaggccgcacacgtggttacgtagagaccttatttggacgtcgccgctatgttcccgatttaaacgctcgcgtgaaatctgtccgtgaagccgccgaacgcatggcgttcaacatgcctgtacagggcacggcagctgacctcatgaaacttgcaatggtgcgcctttttccacaattgcgtgaagttggtgcccgcatgctcttgcaggtccacgatgaactcttgttagaagcgccaaaagagcgtgcggaagaggtggcagccctcgcgaaagaggttatggaaggcgtgtggcccttagcggtgcctcttgaagtcgaagttggtattggcgaggattggttggctgccaaaggataatga

SEQ ID NO: 1562 - protein, 841 aa, synthetic construct; identical to SEQ ID NO: 1076
  REGION 1..841: note = Variant of DNA polymerase I from Thermus sp. strain 2.9

SEQ ID NO: 1563 - DNA, 2529 bp, synthetic construct; identical to SEQ ID NO: 909
  misc_feature 1..2529: note = Variant of DNA polymerase I from Thermus sp. strain 2.9
  source 1..2529: mol_type = other DNA

SEQ ID NO: 1564 - protein, 841 aa, synthetic construct; identical to SEQ ID NO: 910
  REGION 1..841: note = Variant of DNA polymerase I from Thermus sp. strain 2.9

SEQ ID NO: 1565 - DNA, 2529 bp, synthetic construct
  misc_feature 1..2529: note = Variant of DNA polymerase I from Thermus sp. strain 2.9
  source 1..2529: mol_type = other DNA
atgcaccatcatcatcatcatggcggtagcggcatgttaccgttgttcgaacctaaaggtcgcgtgcttctggttgatggccatcatctcgcgtatcgtaacttctttgccctgaaaggattaaccaccagccgtggcgagccggtacagggtgtctacggctttgcaaagtcgctcctgaaagctctgaaagaagacggtgatgtggtgattgttgtctttgatgcgaaagcgccaagttttcgccacgaagcgtacgaagcttacaaagccgggcgtgctccaacgccggaagactttcctcgccaattggcgcttatgaaggaattagtggatttgcttggcctcgaacgcttggaagttcccggtttcgaggcagacgacgtattagcgactctcgcaaagaaagccgaacgtgagggctatgaagtccagatcttgacagcagatcgcgatcttttccagcttttatctccgcgcatctcggtgttacacccggaagggcatcgtatcaccccggaatggctctgggagaaatatggtttgcgtcccgaacaatgggtggattttcgcgccttagcaggcgatccgagcgacaatattccgggagttaaaggtatcggcgagaagacggcgctcaagctccttaaagaatgggggtcgttggagaacttgcttaagaatttagatcaggtcaaaccagagtcagtgcgtgagaagattcttgcacacctcgaagacctcaaattaagccgcgaattgtcccgtgtacgcaccgatttgccgctcgaagttgatttccgtggccgccgcgaacctgactgggagggtcttaaagcgtttttagagcgtcttgaatttggttcgctcttgcatgaattcggccttttagaaagcccgttaccagccgaagaagcaccttggccaccgcccgaaggcgcgtttttaggttaccgtttgagtcgcccggaaccgatgtgggccgaattattggctcttgcagcgtctgcccagggacgtgtgtatcgcgcggaagaccctcatggtgcgctccgcggcctcaaagaagtccgtggactccttgccaaagacttagctgttgttgcattgcgcgaaggtcttgatttacctccgactgatgatccaatgcttcttgcgtacctcttggacccgtcaaacacgacgcccgaaggcgtagcccgtcgttacggcggcgagtggaccgaagatgcaggcgagcgcgcgttattggccgaacgtttgcacgccaatttattaggacgtttgcaaggcgaggaacgtctcctctggctttacgaagaagtggagaaaccattgagtcgcgtgctcgcgcatatggaagctaccggtgtcaaattagacgtggcgtatttggaggcactcagcatggaagttgctgccgaaatgcgccgcttggaggaagaagtattccgtttagcaggccactcctttaaccttaattctcgcgatcagttagaacgtgtgttgttcgatgaacttggtctccctcctatcggcaagacagagaagaccggtaaacgtagcacttcagcggcggttttagaagctcttcgcgaagtccatcccattgtggacaagatcttgcagtaccgcgaactcgcgaaattgaaaggcacctatattgaccctcttccggcattagtccacccgaaaacgggacgcctccatacccgcttcaaccaaacagccacggcgaccggtcgtttgtcctcctctgatccaaaccttcagaatattccagtacgtaccccattgggccagaagatccgccgcgcgtttgtagctgaggagggttggcgtttagtggccctcgattatagccaaattgaattacgtgtccttgcccatctttctggcgatgagaacctcatccgcgtgtttcaggaaggcaaagacattcacactcaaacggcaagctggatgtttggattatcagctgaagcgatcgatcctttgatgcgtcgtgcagcgaagaccatcaatttcggtgttctctacggtatgagtgcccatcgtttgtcgcaggaattaggcattccctatgaagaagctgcggcgttcattcagcgctactttcaaagctatcccaaagttaaagcatggatcgagaagactctcgaagaaggccgcacacgtggttacgtagagaccttatttggacgtcgccgctatgttcccgatttaaacgctcgcgtgaaatctgtccgtgaagccgccgaacgcatggcgttcaacatgcctgtacagggcacggcagctgacctcatgaaacttgcaatggtgcgcctttttccacaattgcgtgaagttggtgcccgcatgctcttgcaggtccacgatgaactcttgttagaagcgccaaaagagcgtgcggaagaggtggcagccctcgcgaaagaggttatggaaggcgtgtggcccttagcggtgcctcttgaagtcgaagttggtattggcgaggattggttggctgccaaaggataatga

SEQ ID NO: 1566 - protein, 841 aa, synthetic construct
  REGION 1..841: note = Variant of DNA polymerase I from Thermus sp. strain 2.9
MHHHHHHGGSGMLPLFEPKGRVLLVDGHHLAYRNFFALKGLTTSRGEPVQGVYGFAKSLLKALKEDGDVVIVVFDAKAPSFRHEAYEAYKAGRAPTPEDFPRQLALMKELVDLLGLERLEVPGFEADDVLATLAKKAEREGYEVQILTADRDLFQLLSPRISVLHPEGHRITPEWLWEKYGLRPEQWVDFRALAGDPSDNIPGVKGIGEKTALKLLKEWGSLENLLKNLDQVKPESVREKILAHLEDLKLSRELSRVRTDLPLEVDFRGRREPDWEGLKAFLERLEFGSLLHEFGLLESPLPAEEAPWPPPEGAFLGYRLSRPEPMWAELLALAASAQGRVYRAEDPHGALRGLKEVRGLLAKDLAVVALREGLDLPPTDDPMLLAYLLDPSNTTPEGVARRYGGEWTEDAGERALLAERLHANLLGRLQGEERLLWLYEEVEKPLSRVLAHMEATGVKLDVAYLEALSMEVAAEMRRLEEEVFRLAGHSFNLNSRDQLERVLFDELGLPPIGKTEKTGKRSTSAAVLEALREVHPIVDKILQYRELAKLKGTYIDPLPALVHPKTGRLHTRFNQTATATGRLSSSDPNLQNIPVRTPLGQKIRRAFVAEEGWRLVALDYSQIELRVLAHLSGDENLIRVFQEGKDIHTQTASWMFGLSAEAIDPLMRRAAKTINFGVLYGMSAHRLSQELGIPYEEAAAFIQRYFQSYPKVKAWIEKTLEEGRTRGYVETLFGRRRYVPDLNARVKSVREAAERMAFNMPVQGTAADLMKLAMVRLFPQLREVGARMLLQVHDELLLEAPKERAEEVAALAKEVMEGVWPLAVPLEVEVGIGEDWLAAKG

SEQ ID NO: 1567 - DNA, 2529 bp, synthetic construct
  misc_feature 1..2529: note = Variant of DNA polymerase I from Thermus sp. strain 2.9
  source 1..2529: mol_type = other DNA
atgcaccatcatcatcatcatggcggtagcggcatgttaccgttgttcgaacctaaaggtcgcgtgcttctggttgatggccatcatctcgcgtatcgtaacttctttgccctgaaaggattaaccaccagccgtggcgagccggtacagggtgtctacggctttgcaaagtcgctcctgaaagctctgaaagaagacggtgatgtggtgattgttgtctttgatgcgaaagcgccaagttttcgccacgaagcgtacgaagcttacaaagccgggcgtgctccaacgccggaagactttcctcgccaattggcgcttatgaaggaattagtggatttgcttggcctcgaacgcttggaagttcccggtttcgaggcagacgacgtattagcgactctcgcaaagaaagccgaacgtgagggctatgaagtccagatcttgacagcagatcgcgatcttttccagcttttatctccgcgcatctcggtgttacacccggaagggcatcgtatcaccccggaatggctctgggggaaatatggtttgcgtcccgaacaatgggtggattttcgcgccttagcaggcgatccgagcgacaatattccgggagttaaaggtatcggcgagaagacggcgctcaagctccttaaagaatgggggtcgttggagaacttgcttaagaatttagatcaggtcaaaccagagtcagtgcgtgagaagattcttgcacacctcgaagacctcaaattaagccgcgaattgtcccgtgtacgcaccgatttgccgctcgaagttgatttccgtggccgccgcgaacctgactgggagggtcttaaagcgtttttagagcgtcttgaatttggttcgctcttgcatgaattcggccttttagaaagcccgttaccagccgaagaagcaccttggccaccgcccgaaggcgcgtttttaggttaccgtttgagtcgcccggaaccgatgtgggccgaattattggctcttgcagcgtctgcccagggacgtgtgtatcgcgcggaagaccctcatggtgcgctccgcggcctcaaagaagtccgtggactccttgccaaagacttagctgttgttgcattgcgcgaaggtcttgatttacctccgactgatgatccaatgcttcttgcgtacctcttggacccgtcaaacacgacgcccgaaggcgtagcccgtcgttacggcggcgagtggaccgaagatgcaggcgagcgcgcgttattggccgaacgtttgcacgccaatttattaggacgtttgcaaggcgaggaacgtctcctctggctttacgaagaagtggagaaaccattgagtcgcgtgctcgcgcatatggaagctaccggtgtcaaattagacgtggcgtatttggaggcactcagccttgaagttgctgccgaaatgcgccgcttggaggaagaagtattccgtttagcaggccactcctttaaccttaattctcgcgatcagttagaacgtgtgttgttcgatgaacttggtctccctcctatcggcaagacagagaagaccggtaaacgtagcacttcagcggcggttttagaagctcttcgcgaagtccatcccattgtggacaagatcttgcagtaccgcgaactcgcgaaattgaaaggcacctatattgaccctcttccggcattagtccacccgaaaacgggacgcctccatacccgcttcaaccaaacagccacggcgaccggtcgtttgtcctcctctgatccaaaccttcagaatattccagtacgtaccccattgggccagaagatccgccgcgcgtttgtagctgaggagggttggcgtttagtggccctcgattatagccaaattgaattacgtgtccttgcccatctttctggcgatgagaacctcatccgcgtgtttcaggaaggcaaagacattcacactcaaacggcaagctggatgtttggattatcagctgaagcgatcgatcctttgatgcgtcgtgcagcgaagaccatcaatttcggtgttctctacggtatgagtgcccatcgtttgtcgcaggaattaggcattccctatgaagaagctgcggcgttcattcagcgctactttcaaagctatcccaaagttaaagcatggatcgagaagactctcgaagaaggccgcacacgtggttacgtagagaccttatttggacgtcgccgctatgttcccgatttaaacgctcgcgtgaaatctgtccgtgaagccgccgaacgcatggcgttcaacatgcctgtacagggcacggcagctgacctcatgaaacttgcaatggtgcgcctttttccacaattgcgtgaagttggtgcccgcatgctcttgcaggtccacgatgaactcttgttagaagcgccaaaagagcgtgcggaagaggtggcagccctcgcgaaagaggttatggaaggcgtgtggcccttagcggtgcctcttgaagtcgaagttggtattggcgaggattggttggctgccaaaggataatga

SEQ ID NO: 1568 - protein, 841 aa, synthetic construct
  REGION 1..841: note = Variant of DNA polymerase I from Thermus sp. strain 2.9
MHHHHHHGGSGMLPLFEPKGRVLLVDGHHLAYRNFFALKGLTTSRGEPVQGVYGFAKSLLKALKEDGDVVIVVFDAKAPSFRHEAYEAYKAGRAPTPEDFPRQLALMKELVDLLGLERLEVPGFEADDVLATLAKKAEREGYEVQILTADRDLFQLLSPRISVLHPEGHRITPEWLWGKYGLRPEQWVDFRALAGDPSDNIPGVKGIGEKTALKLLKEWGSLENLLKNLDQVKPESVREKILAHLEDLKLSRELSRVRTDLPLEVDFRGRREPDWEGLKAFLERLEFGSLLHEFGLLESPLPAEEAPWPPPEGAFLGYRLSRPEPMWAELLALAASAQGRVYRAEDPHGALRGLKEVRGLLAKDLAVVALREGLDLPPTDDPMLLAYLLDPSNTTPEGVARRYGGEWTEDAGERALLAERLHANLLGRLQGEERLLWLYEEVEKPLSRVLAHMEATGVKLDVAYLEALSLEVAAEMRRLEEEVFRLAGHSFNLNSRDQLERVLFDELGLPPIGKTEKTGKRSTSAAVLEALREVHPIVDKILQYRELAKLKGTYIDPLPALVHPKTGRLHTRFNQTATATGRLSSSDPNLQNIPVRTPLGQKIRRAFVAEEGWRLVALDYSQIELRVLAHLSGDENLIRVFQEGKDIHTQTASWMFGLSAEAIDPLMRRAAKTINFGVLYGMSAHRLSQELGIPYEEAAAFIQRYFQSYPKVKAWIEKTLEEGRTRGYVETLFGRRRYVPDLNARVKSVREAAERMAFNMPVQGTAADLMKLAMVRLFPQLREVGARMLLQVHDELLLEAPKERAEEVAALAKEVMEGVWPLAVPLEVEVGIGEDWLAAKG

SEQ ID NO: 1569 - DNA, 2529 bp, synthetic construct
  misc_feature 1..2529: note = Variant of DNA polymerase I from Thermus sp. strain 2.9
  source 1..2529: mol_type = other DNA
atgcaccatcatcatcatcatggcggtagcggcatgttaccgttgttcgaacctaaaggtcgcgtgcttctggttgatggccatcatctcgcgtatcgtaacttctttgccctgaaaggattaaccaccagccgtggcgagccggtacagggtgtctacggctttgcaaagtcgctcctgaaagctctgaaagaagacggtgatgtggtgattgttgtctttgatgcgaaagcgccaagttttcgccacgaagcgtacgaagcttacaaagccgggcgtgctccaacgccggaagactttcctcgccaattggcgcttatgaaggaattagtggatttgcttggcctcgaacgcttggaagttcccggtttcgaggcagacgacgtattagcgactctcgcaaagaaagccgaacgtgagggctatgaagtccagatcttgacagcagatcgcgatcttttccagcttttatctccgcgcatctcggtgttacacccggaagggcatcgtatcaccccggaatggctctgggagaaatatggtttgcgtcccgaacaatgggtggattttcgcgccttagcaggcgatccgagcgacaatattccgggagttaaaggtatcggcgagaagacggcgctcaagctccttaaagaatgggggtcgttggagaacttgcttaagaatttagatcaggtcaaaccagagtcagtgcgtgagaagattcttgcacacctcgaagacctcaaattaagccgcgaattgtcccgtgtacgcaccgatttgccgctcgaagttgatttccgtggccgccgcgaacctgactgggagggtcttaaagcgtttttagagcgtcttgaatttggttcgctcttgcatgaattcggccttttagaaagcccgttaccagccgaagaagcaccttggccaccgcccgaaggcgcgtttttaggttaccgtttgagtcgcccggaaccgatgtgggccgaattattggctcttgcagcgtctgcccagggacgtgtgtatcgcgcggaagaccctcatggtgcgctccgcggcctcaaagaagtccgtggactccttgccaaagacttagctgttgttgcattgcgcgaaggtcttgatttacctccgactgatgatccaatgcttcttgcgtacctcttggacccgtcaaacacgacgcccgaaggcgtagcccgtcgttacggcggcgagtggaccgaagatgcaggcgagcgcgcgttattggccgaacgtttgcacgccaatttattaggacgtttgcaaggcgaggaacgtctcctctggctttacgaagaagtggagaaaccattgagtcgcgtgctcgcgcatatggaagctaccggtgtcaaattagacgtggcgtatttggaggcactcagccttgaagttgctgccgaaatgcgccgcttggaggaagaagtattccgtttagcaggccactcctttaaccttaattctcgcgatcagttagaacgtgtgttgttcgatgaacttggtctccctcctatcggcaagacagagaagaccggtaaacgtagcacttcagcggcggttttagaagctcttcgcgaagtccatcccattgtggacaagatcttgcagtaccgcgaactcgcgaaattgaaaggcacctatattgaccctcttccggcattagtccacccgaaaacgggacgcctccatacccgcttcaaccaaacagccacggcgaccggtcgtttgtcctcctctgatccaaaccttcagaatattccagtacgtaccccattgggccagaagatccgccgcgcgtttgtagctgaggagggttggcgtttagtggccctcgattatagccaaattgaattacgtgtccttgcccatctttctggcgatgagaacctcatccgcgtgtttcaggaaggcaaagacattcacactcaaacggcaagctggatgtttggattatcagctgaagcgatcgatcctttgatgcgtcgtgcagcgaagaccatcaatttcggtgttctctacggtatgagtgcccatcgtttgtcgcaggaattaggcattccctcggaagaagctgcggcgttcattcagcgctactttcaaagctatcccaaagttaaagcatggatcgagaagactctcgaagaaggccgcacacgtggttacgtagagaccttatttggacgtcgccgctatgttcccgatttaaacgctcgcgtgaaatctgtccgtgaagccgccgaacgcatggcgttcaacatgcctgtacagggcacggcagctgacctcatgaaacttgcaatggtgcgcctttttccacaattgcgtgaagttggtgcccgcatgctcttgcaggtccacgatgaactcttgttagaagcgccaaaagagcgtgcggaagaggtggcagccctcgcgaaagaggttatggaaggcgtgtggcccttagcggtgcctcttgaagtcgaagttggtattggcgaggattggttggctgccaaaggataatga

SEQ ID NO: 1570 - protein, 841 aa, synthetic construct
  REGION 1..841: note = Variant of DNA polymerase I from Thermus sp. strain 2.9
MHHHHHHGGSGMLPLFEPKGRVLLVDGHHLAYRNFFALKGLTTSRGEPVQGVYGFAKSLLKALKEDGDVVIVVFDAKAPSFRHEAYEAYKAGRAPTPEDFPRQLALMKELVDLLGLERLEVPGFEADDVLATLAKKAEREGYEVQILTADRDLFQLLSPRISVLHPEGHRITPEWLWEKYGLRPEQWVDFRALAGDPSDNIPGVKGIGEKTALKLLKEWGSLENLLKNLDQVKPESVREKILAHLEDLKLSRELSRVRTDLPLEVDFRGRREPDWEGLKAFLERLEFGSLLHEFGLLESPLPAEEAPWPPPEGAFLGYRLSRPEPMWAELLALAASAQGRVYRAEDPHGALRGLKEVRGLLAKDLAVVALREGLDLPPTDDPMLLAYLLDPSNTTPEGVARRYGGEWTEDAGERALLAERLHANLLGRLQGEERLLWLYEEVEKPLSRVLAHMEATGVKLDVAYLEALSLEVAAEMRRLEEEVFRLAGHSFNLNSRDQLERVLFDELGLPPIGKTEKTGKRSTSAAVLEALREVHPIVDKILQYRELAKLKGTYIDPLPALVHPKTGRLHTRFNQTATATGRLSSSDPNLQNIPVRTPLGQKIRRAFVAEEGWRLVALDYSQIELRVLAHLSGDENLIRVFQEGKDIHTQTASWMFGLSAEAIDPLMRRAAKTINFGVLYGMSAHRLSQELGIPSEEAAAFIQRYFQSYPKVKAWIEKTLEEGRTRGYVETLFGRRRYVPDLNARVKSVREAAERMAFNMPVQGTAADLMKLAMVRLFPQLREVGARMLLQVHDELLLEAPKERAEEVAALAKEVMEGVWPLAVPLEVEVGIGEDWLAAKG

SEQ ID NO: 1571 - DNA, 2529 bp, synthetic construct
  misc_feature 1..2529: note = Variant of DNA polymerase I from Thermus sp. strain 2.9
  source 1..2529: mol_type = other DNA
atgcaccatcatcatcatcatggcggtagcggcatggggccgttgttcgaacctaaaggtcgcgtgcttctggttgatggccatcatctcgcgtatcgtaacttctttgccctgaaaggattaaccaccagccgtggcgagccggtacagggtgtctacggctttgcaaagtcgctcctgaaagctctgaaagaagacggtgatgtggtgattgttgtctttgatgcgaaagcgccaagttttcgccacgaagcgtacgaagcttacaaagccgggcgtgctccaacgccggaagactttcctcgccaattggcgcttatgaaggaattagtggatttgcttggcctcgaacgcttggaagttcccggtttcgaggcagacgacgtattagcgactctcgcaaagaaagccgaacgtgagggctatgaagtccagatcttgacagcagatcgcgatcttttccagcttttatctccgcgcatctcggtgttacacccggaagggcatcgtatcaccccggaatggctctgggagaaatatggtttgcgtcccgaacaatgggtggattttcgcgccttagcaggcgatccgagcgacaatattccgggagttaaaggtatcggcgagaagacggcgctcaagctccttaaagaatgggggtcgttggagaacttgcttaagaatttagatcaggtcaaaccagagtcagtgcgtgagaagattcttgcacacctcgaagacctcaaattaagccgcgaattgtcccgtgtacgcaccgatttgccgctcgaagttgatttccgtggccgccgcgaacctgactgggagggtcttaaagcgtttttagagcgtcttgaatttggttcgctcttgcatgaattcggccttttagaaagcccgttaccagccgaagaagcaccttggccaccgcccgaaggcgcgtttttaggttaccgtttgagtcgcccggaaccgatgtgggccgaattattggctcttgcagcgtctgcccagggacgtgtgtatcgcgcggaagaccctcatggtgcgctccgcggcctcaaagaagtccgtggactccttgccaaagacttagctgttgttgcattgcgcgaaggtcttgatttacctccgactgatgatccaatgcttcttgcgtacctcttggacccgtcaaacacgacgcccgaaggcgtagcccgtcgttacggcggcgagtggaccgaagatgcaggcgagcgcgcgttattggccgaacgtttgcacgccaatttattaggacgtttgcaaggcgaggaacgtctcctctggctttacgaagaagtggagaaaccattgagtcgcgtgctcgcgcatatggaagctaccggtgtcaaattagacgtggcgtatttggaggcactcagccttgaagttgctgccgaaatgcgccgcttggaggaagaagtattccgtttagcaggccactcctttaaccttaattctcgcgatcagttagaacgtgtgttgttcgatgaacttggtctccctcctatcggcaagacagagaagaccggtaaacgtagcacttcagcggcggttttagaagctcttcgcgaagtccatcccattgtggacaagatcttgcagtaccgcgaactcgcgaaattgaaaggcacctatattgaccctcttccggcattagtccacccgaaaacgggacgcctccatacccgcttcaaccaaacagccacggcgaccggtcgtttgtcctcctctgatccaaaccttcagaatattccagtacgtaccccattgggccagaagatccgccgcgcgtttgtagctgaggagggttggcgtttagtggccctcgattatagccaaattgaattacgtgtccttgcccatctttctggcgatgagaacctcatccgcgtgtttcaggaaggcaaagacattcacactcaaacggcaagctggatgtttggattatcagctgaagcgatcgatcctttgatgcgtcgtgcagcgaagaccatcaatttcggtgttctctacggtatgagtgcccatcgtttgtcgcaggaattaggcattccctatgaagaagctgcggcgttcattcagcgctactttcaaagctatcccaaagttaaagcatggatcgagaagactctcgaagaaggccgcacacgtggttacgtagagaccttatttggacgtcgccgctatgttcccgatttaaacgctcgcgtgaaatctgtccgtgaagccgccgaacgcatggcgttcaacatgcctgtacagggcacggcagctgacctcatgaaacttgcaatggtgcgcctttttccacaattgcgtgaagttggtgcccgcatgctcttgcaggtccacgatgaactcttgttagaagcgccaaaagagcgtgcggaagaggtggcagccctcgcgaaagaggttatggaaggcgtgtggcccttagcggtgcctcttgaagtcgaagttggtattggcgaggattggttggctgccaaaggataatga

SEQ ID NO: 1572 - protein, 841 aa, synthetic construct
  REGION 1..841: note = Variant of DNA polymerase I from Thermus sp. strain 2.9
MHHHHHHGGSGMGPLFEPKGRVLLVDGHHLAYRNFFALKGLTTSRGEPVQGVYGFAKSLLKALKEDGDVVIVVFDAKAPSFRHEAYEAYKAGRAPTPEDFPRQLALMKELVDLLGLERLEVPGFEADDVLATLAKKAEREGYEVQILTADRDLFQLLSPRISVLHPEGHRITPEWLWEKYGLRPEQWVDFRALAGDPSDNIPGVKGIGEKTALKLLKEWGSLENLLKNLDQVKPESVREKILAHLEDLKLSRELSRVRTDLPLEVDFRGRREPDWEGLKAFLERLEFGSLLHEFGLLESPLPAEEAPWPPPEGAFLGYRLSRPEPMWAELLALAASAQGRVYRAEDPHGALRGLKEVRGLLAKDLAVVALREGLDLPPTDDPMLLAYLLDPSNTTPEGVARRYGGEWTEDAGERALLAERLHANLLGRLQGEERLLWLYEEVEKPLSRVLAHMEATGVKLDVAYLEALSLEVAAEMRRLEEEVFRLAGHSFNLNSRDQLERVLFDELGLPPIGKTEKTGKRSTSAAVLEALREVHPIVDKILQYRELAKLKGTYIDPLPALVHPKTGRLHTRFNQTATATGRLSSSDPNLQNIPVRTPLGQKIRRAFVAEEGWRLVALDYSQIELRVLAHLSGDENLIRVFQEGKDIHTQTASWMFGLSAEAIDPLMRRAAKTINFGVLYGMSAHRLSQELGIPYEEAAAFIQRYFQSYPKVKAWIEKTLEEGRTRGYVETLFGRRRYVPDLNARVKSVREAAERMAFNMPVQGTAADLMKLAMVRLFPQLREVGARMLLQVHDELLLEAPKERAEEVAALAKEVMEGVWPLAVPLEVEVGIGEDWLAAKG

SEQ ID NO: 1573 - DNA, 2529 bp, synthetic construct
  misc_feature 1..2529: note = Variant of DNA polymerase I from Thermus sp. strain 2.9
  source 1..2529: mol_type = other DNA
atgcaccatcatcatcatcatggcggtagcggcatgttaccgttgttcgaacctaaaggtcgcgtgcttctggttgatggccatcatctcgcgtatcgtaacttctttgccctgaaaggattaaccaccagccgtggcgagccggtacagggtgtctacggctttgcaaagtcgctcctgaaagctctgaaagaagacggtgatgtggtgattgttgtctttgatgcgaaagcgccaagttttcgccacgaagcgtacgaagcttacaaagccgggcgtgctccaacgccggaagactttcctcgccaattggcgcttatgaaggaattagtggatttgcttggcctcgaacgcttggaagttcccggtttcgaggcagacgacgtattagcgactctcgcaaagaaagccgaacgtgagggctatgaagtccagatcttgacagcagatcgcgatcttttccagcttttatctccgcgcatctcggtgttacacccggaagggcatcgtatcaccccggaatggctctgggagaaatatggtttgcgtcccgaacaatgggtggattttcgcgccttagcaggcgatccgagcgacaatattccgggagttaaaggtatcggcgagaagacggcgctcaagctccttaaagaatgggggtcgttggagaacttgcttaagaatttagatcaggtcaaaccagagtcagtgcgtgagaagattcttgcacacctcgaagacctcaaattaagccgcgaattgtcccgtgtacgcaccgatttgccgctcgaagttgatttccgtggccgccgcgaacctgactgggagggtcttaaagcgtttttagagcgtcttgaatttggttcgctcttgcatgaattcggccttttagaaagcccgttaccagccgaagaagcaccttggccaccgcccgaaggcgcgtttttaggttaccgtttgagtcgcccggaaccgatgtgggccgaattattggctcttgcagcgtctgcccagggacgtgtgtatcgcgcggaagaccctcatggtgcgctccgcggcctcaaagaagtccgtggactccttgccaaagacttagctgttgttgcattgcgcgaaggtcttgatttacctccgactgatgatccaatgcttcttgcgtacctcttggacccgtcaaacacgacgcccgaaggcgtagcccgtcgttacggcggcgagtggaccgaagatgcaggcgagcgcgcgttattggccgaacgtttgcacgccaatttattaggacgtttgcaaggcgaggaacgtctcctctggctttacgaagaagtggagaaaccattgagtcgcgtgctcgcgcatatggaagctaccggtgtcaaattagacgtggcgtatttggaggcactcagccttgaagttgctgccgaaatgcgcatgttggaggaagaagtattccgtttagcaggccactcctttaaccttaattctcgcgatcagttagaacgtgtgttgttcgatgaacttggtctccctcctatcggcaagacagagaagaccggtaaacgtagcacttcagcggcggttttagaagctcttcgcgaagtccatcccattgtggacaagatcttgcagtaccgcgaactcgcgaaattgaaaggcacctatattgaccctcttccggcattagtccacccgaaaacgggacgcctccatacccgcttcaaccaaacagccacggcgaccggtcgtttgtcctcctctgatccaaaccttcagaatattccagtacgtaccccattgggccagaagatccgccgcgcgtttgtagctgaggagggttggcgtttagtggccctcgattatagccaaattgaattacgtgtccttgcccatctttctggcgatgagaacctcatccgcgtgtttcaggaaggcaaagacattcacactcaaacggcaagctggatgtttggattatcagctgaagcgatcgatcctttgatgcgtcgtgcagcgaagaccatcaatttcggtgttctctacggtatgagtgcccatcgtttgtcgcaggaattaggcattccctatgaagaagctgcggcgttcattcagcgctactttcaaagctatcccaaagttaaagcatggatcgagaagactctcgaagaaggccgcacacgtggttacgtagagaccttatttggacgtcgccgctatgttcccgatttaaacgctcgcgtgaaatctgtccgtgaagccgccgaacgcatggcgttcaacatgcctgtacagggcacggcagctgacctcatgaaacttgcaatggtgcgcctttttccacaattgcgtgaagttggtgcccgcatgctcttgcaggtccacgatgaactcttgttagaagcgccaaaagagcgtgcggaagaggtggcagccctcgcgaaagaggttatggaaggcgtgtggcccttagcggtgcctcttgaagtcgaagttggtattggcgaggattggttggctgccaaaggataatga

SEQ ID NO: 1574 - protein, 841 aa, synthetic construct
  REGION 1..841: note = Variant of DNA polymerase I from Thermus sp. strain 2.9
MHHHHHHGGSGMLPLFEPKGRVLLVDGHHLAYRNFFALKGLTTSRGEPVQGVYGFAKSLLKALKEDGDVVIVVFDAKAPSFRHEAYEAYKAGRAPTPEDFPRQLALMKELVDLLGLERLEVPGFEADDVLATLAKKAEREGYEVQILTADRDLFQLLSPRISVLHPEGHRITPEWLWEKYGLRPEQWVDFRALAGDPSDNIPGVKGIGEKTALKLLKEWGSLENLLKNLDQVKPESVREKILAHLEDLKLSRELSRVRTDLPLEVDFRGRREPDWEGLKAFLERLEFGSLLHEFGLLESPLPAEEAPWPPPEGAFLGYRLSRPEPMWAELLALAASAQGRVYRAEDPHGALRGLKEVRGLLAKDLAVVALREGLDLPPTDDPMLLAYLLDPSNTTPEGVARRYGGEWTEDAGERALLAERLHANLLGRLQGEERLLWLYEEVEKPLSRVLAHMEATGVKLDVAYLEALSLEVAAEMRMLEEEVFRLAGHSFNLNSRDQLERVLFDELGLPPIGKTEKTGKRSTSAAVLEALREVHPIVDKILQYRELAKLKGTYIDPLPALVHPKTGRLHTRFNQTATATGRLSSSDPNLQNIPVRTPLGQKIRRAFVAEEGWRLVALDYSQIELRVLAHLSGDENLIRVFQEGKDIHTQTASWMFGLSAEAIDPLMRRAAKTINFGVLYGMSAHRLSQELGIPYEEAAAFIQRYFQSYPKVKAWIEKTLEEGRTRGYVETLFGRRRYVPDLNARVKSVREAAERMAFNMPVQGTAADLMKLAMVRLFPQLREVGARMLLQVHDELLLEAPKERAEEVAALAKEVMEGVWPLAVPLEVEVGIGEDWLAAKG

SEQ ID NO: 1575 - DNA, 2529 bp, synthetic construct; identical to SEQ ID NO: 941
  misc_feature 1..2529: note = Variant of DNA polymerase I from Thermus sp. strain 2.9
  source 1..2529: mol_type = other DNA

SEQ ID NO: 1576 - protein, 841 aa, synthetic construct; identical to SEQ ID NO: 942
  REGION 1..841: note = Variant of DNA polymerase I from Thermus sp. strain 2.9

SEQ ID NO: 1577 - DNA, 2529 bp, synthetic construct
  misc_feature 1..2529: note = Variant of DNA polymerase I from Thermus sp. strain 2.9
  source 1..2529: mol_type = other DNA
atgcaccatcatcatcatcatggcggtagcggcatgttaccgttgttcgaacctaaaggtcgcgtgcttctggttgatggccatcatctcgcgtatcgtaacttctttgccctgaaaggattaaccaccagccgtggcgagccggtacagggtgtctacggctttgcaaagtcgctcctgaaagctctgaaagaagacggtgatgtggtgattgttgtctttgatgcgaaagcgccaagttttcgccacgaagcgtacgaagcttacaaagccgggcgtgctccaacgccggaagactttcctcgccaattggcgcttatgaaggaattagtggatttgcttggcctcgaacgcttggaagttcccggtttcgaggcagacgacgtattagcgactctcgcaaagaaagccgaacgtgagggctatgaagtccagatcttgacagcagatcgcgatcttttccagcttttatctccgcgcatctcggtgttacacccggaagggcatcgtatcaccccggaatggctctgggagaaatatggtttgcgtcccgaacaatgggtggattttcgcgccttagccggcgatccgagcgacaatattccgggagttaaaggtatcggcgagaagacggcgctcaagctccttaaagaatgggggtcgttggagaacttgcttaagaatttagatcaggtcaaaccagagtcagtgcgtgagaagattcttgcacacctcgaagacctcaaattaagccgcgaattgtcccgtgtacgcaccgatttgccgctcgaagttgatttccgtggccgccgcgaacctgactgggagggtcttaaagcgtttttagagcgtcttgaatttggttcgctcttgcatgaattcggccttttagaaagcccgttaccagccgaagaagcaccttggccaccgcccgaaggcgcgtttttaggttaccgtttgagtcgcccggaaccgatgtgggccgaattattggctcttgcagcgtctgcccagggacgtgtgtatcgcgcggaagaccctcatggtgcgctccgcggcctcaaagaagtccgtggactccttgccaaagacttagctgttgttgcattgcgcgaaggtcttgatttacctccgactgatgatccaatgcttcttgcgtacctcttggacccgtcaaacacgacgcccgaaggcgtagcccgtcgttacggcggcgagtggaccgaagatgcaggcgagcgcgcgttattggccgaacgtttgcacgccaatttattaggacgtttgcaaggcgaggaacgtctcctctggctttacgaagaagtggagaaaccattgagtcgcgtgctcgcgcatatggaagctaccggtgtcaaattagacgtggcgtatttggaggcactcagccttgaagttgctgccgaaatgcgccgcttggaggaagaagtattccgtttagcaggccactcctttaaccttaattctcgcgatcagttagaacgtgtgttgttcgatgaacttggtctccctcctatcggcaagacagagaagaccggtaaacgtagcacttcagcggcggttttagaagctcttcgcgaagtccatcccattgtggacaagatcttgcagtaccgcgaactcgcgaaattgaaaggcacctatattgaccctcttccggcattagtccacccgaaaacgggacgcctccatacccgcttcaaccaaacagccacggcgaccggtcgtttgtcctcctctgatccaaaccttcagaatattccagtacgtaccccattgggccagaagatccgccgcgcgtttgtagctgaggagggttggcgtttagtggccctcgattatagccaaattgaattacgtgtccttgcccatctttctggcgatgagaacctcatccgcgtgtttcaggaaggcaaagacattcacactcaaacggcaagctggatgtttggagtgccggcggaagcgatcgatcctttgatgcgtcgtgcagcgaagaccatcaatttcggtgttctctacggtatgagtgcccatcgtttgtcgcaggaattaggcattccctatgaagaagctgcggcgttcattcagcgctactttcaaagctatcccaaagttaaagcatggatcgagaagactctcgaagaaggccgcacacgtggttacgtagagaccttatttggacgtcgccgctatgttcccgatttaaacgctcgcgtgaaatctgtccgtgaagccgccgaacgcatggcgttcaacatgcctgtacagggcacggcagctgacctcatgaaacttgcaatggtgcgcctttttccacaattgcgtgaagttggtgcccgcatgctcttgcaggtccacgatgaactcttgttagaagcgccaaaagagcgtgcggaagaggtggcagccctcgcgaaagaggttatggaaggcgtgtggcccttagcggtgcctcttgaagtcgaagttggtattggcgaggattggttggctgccaaaggataatga

SEQ ID NO: 1578 - protein, 841 aa, synthetic construct; identical to SEQ ID NO: 808
  REGION 1..841: note = Variant of DNA polymerase I from Thermus sp. strain 2.9

SEQ ID NO: 1579 - DNA, 2529 bp, synthetic construct
  misc_feature 1..2529: note = Variant of DNA polymerase I from Thermus sp. strain 2.9
  source 1..2529: mol_type = other DNA
atgcaccatcatcatcatcatggcggtagcggcatgttaccgttgttcgaacctaaaggtcgcgtgcttctggttgatggccatcatctcgcgtatcgtaacttctttgccctgaaaggattaaccaccagccgtggcgagccggtacagggtgtctacggctttgcaaagtcgctcctgaaagctctgaaagaagacggtgatgtggtgattgttgtctttgatgcgaaagcgccaagttttcgccacgaagcgtacgaagcttacaaagccgggcgtgctccaacgccggaagactttcctcgccaattggcgcttatgaaggaattagtggatttgcttggcctcgaacgcttggaagttcccggtttcgaggcagacgacgtattagcgactctcgcaaagaaagccgaacgtgagggctatgaagtccagatcttgacagcagatcgcgatcttttccagcttttatctccgcgcatctcggtgttacacccggaagggcatcgtatcaccccggaatggctctggcttaaatatggtttgcgtcccgaacaatgggtggattttcgcgccttagcaggcgatccgagcgacaatattccgggagttaaaggtatcggcgagaagacggcgctcaagctccttaaagaatgggggtcgttggagaacttgcttaagaatttagatcaggtcaaaccagagtcagtgcgtgagaagattcttgcacacctcgaagacctcaaattaagccgcgaattgtcccgtgtacgcaccgatttgccgctcgaagttgatttccgtggccgccgcgaacctgactgggagggtcttaaagcgtttttagagcgtcttgaatttggttcgctcttgcatgaattcggccttttagaaagcccgttaccagccgaagaagcaccttggccaccgcccgaaggcgcgtttttaggttaccgtttgagtcgcccggaaccgatgtgggccgaattattggctcttgcagcgtctgcccagggacgtgtgtatcgcgcggaagaccctcatggtgcgctccgcggcctcaaagaagtccgtggactccttgccaaagacttagctgttgttgcattgcgcgaaggtcttgatttacctccgactgatgatccaatgcttcttgcgtacctcttggacccgtcaaacacgacgcccgaaggcgtagcccgtcgttacggcggcgagtggaccgaagatgcaggcgagcgcgcgttattggccgaacgtttgcacgccaatttattaggacgtttgcaaggcgaggaacgtctcctctggctttacgaagaagtggagaaaccattgagtcgcgtgctcgcgcatatggaagctaccggtgtcaaattagacgtggcgtatttggaggcactcagccttgaagttgctgccgaaatgcgccgcttggaggaagaagtattccgtttagcaggccactcctttaaccttaattctcgcgatcagttagaacgtgtgttgttcgatgaacttggtctccctcctatcggcaagacagagaagaccggtaaacgtagcacttcagcggcggttttagaagctcttcgcgaagtccatcccattgtggacaagatcttgcagtaccgcgaactcgcgaaattgaaaggcacctatattgaccctcttccggcattagtccacccgaaaacgggacgcctccatacccgcttcaaccaaacagccacggcgaccggtcgtttgtcctcctctgatccaaaccttcagaatattccagtacgtaccccattgggccagaagatccgccgcgcgtttgtagctgaggagggttggcgtttagtggccctcgattatagccaaattgaattacgtgtccttgcccatctttctggcgatgagaacctcatccgcgtgtttcaggaaggcaaagacattcacactcaaacggcaagctggatgtttggattatcagctgaagcgatcgatcctttgatgcgtcgtgcagcgaagaccatcaatttcggtgttctctacggtatgagtgcccatcgtttgtcgcaggaattaggcattccctatgaagaagctgcggcgttcattcagcgctactttcaaagctatcccaaagttaaagcatggatcgagaagactctcgaagaaggccgcacacgtggttacgtagagaccttatttggacgtcgccgctatgttcccgatttaaacgctcgcgtgaaatctgtccgtgaagccgccgaacgcatggcgttcaacatgcctgtacagggcacggcagctgacctcatgaaacttgcaatggtgcgcctttttccacaattgcgtgaagttggtgcccgcatgctcttgcaggtccacgatgaactcttgttagaagcgccaaaagagcgtgcggaagaggtggcagccctcgcgaaagaggttatggaaggcgtgtggcccttagcggtgcctcttgaagtcgaagttggtattggcgaggattggttggctgccaaaggataatga

SEQ ID NO: 1580 - protein, 841 aa, synthetic construct
  REGION 1..841: note = Variant of DNA polymerase I from Thermus sp. strain 2.9
MHHHHHHGGSGMLPLFEPKGRVLLVDGHHLAYRNFFALKGLTTSRGEPVQGVYGFAKSLLKALKEDGDVVIVVFDAKAPSFRHEAYEAYKAGRAPTPEDFPRQLALMKELVDLLGLERLEVPGFEADDVLATLAKKAEREGYEVQILTADRDLFQLLSPRISVLHPEGHRITPEWLWLKYGLRPEQWVDFRALAGDPSDNIPGVKGIGEKTALKLLKEWGSLENLLKNLDQVKPESVREKILAHLEDLKLSRELSRVRTDLPLEVDFRGRREPDWEGLKAFLERLEFGSLLHEFGLLESPLPAEEAPWPPPEGAFLGYRLSRPEPMWAELLALAASAQGRVYRAEDPHGALRGLKEVRGLLAKDLAVVALREGLDLPPTDDPMLLAYLLDPSNTTPEGVARRYGGEWTEDAGERALLAERLHANLLGRLQGEERLLWLYEEVEKPLSRVLAHMEATGVKLDVAYLEALSLEVAAEMRRLEEEVFRLAGHSFNLNSRDQLERVLFDELGLPPIGKTEKTGKRSTSAAVLEALREVHPIVDKILQYRELAKLKGTYIDPLPALVHPKTGRLHTRFNQTATATGRLSSSDPNLQNIPVRTPLGQKIRRAFVAEEGWRLVALDYSQIELRVLAHLSGDENLIRVFQEGKDIHTQTASWMFGLSAEAIDPLMRRAAKTINFGVLYGMSAHRLSQELGIPYEEAAAFIQRYFQSYPKVKAWIEKTLEEGRTRGYVETLFGRRRYVPDLNARVKSVREAAERMAFNMPVQGTAADLMKLAMVRLFPQLREVGARMLLQVHDELLLEAPKERAEEVAALAKEVMEGVWPLAVPLEVEVGIGEDWLAAKG

SEQ ID NO: 1581 - DNA, 2529 bp, synthetic construct
  misc_feature 1..2529: note = Variant of DNA polymerase I from Thermus sp. strain 2.9
  source 1..2529: mol_type = other DNA
atgcaccatcatcatcatcatggcggtagcggcatgttaccgttgttcgaacctaaaggtcgcgtgcttctggttgatggccatcatctcgcgtatcgtaacttctttgccctgaaaggattaaccaccagccgtggcgagccggtacagggtgtctacggctttgcaaagtcgctcctgaaagctctgaaagaagacggtgatgtggtgattgttgtctttgatgcgaaagcgccaagttttcgccacgaagcgtacgaagcttacaaagccgggcgtgctccaacgccggaagactttcctcgccaattggcgcttatgaaggaattagtggatttgcttggcctcgaacgcttggaagttcccggtttcgaggcagacgacgtattagcgactctcgcaaagaaagccgaacgtgagggctatgaagtccagatcttgacagcagatcgcgatcttttccagcttttatctccgcgcatctcggtgttacacccggaagggcatcgtatcaccccggaatggctctgggagaaatatggtttgcgtcccgaacaatgggtggattttcgcgccttagcaggcgatccgagcgacaatattccgggagttaaaggtatcggcgagaagacggcgctcaagctccttaaagaatgggggtcgttggagaacttgcttaagaatttagatcaggtcaaaccagagtcagtgcgtgagaagattcttgcacacctcgaagacctcaaattaagccgcgaattgtcccgtgtacgcaccgatttgccgctcgaagttgatttccgtggccgccgcgaacctgactgggcgggtcttaaagcgtttttagagcgtcttgaatttggttcgctcttgcatgaattcggccttttagaaagcccgttaccagccgaagaagcaccttggccaccgcccgaaggcgcgtttttaggttaccgtttgagtcgcccggaaccgatgtgggccgaattattggctcttgcagcgtctgcccagggacgtgtgtatcgcgcggaagaccctcatggtgcgctccgcggcctcaaagaagtccgtggactccttgccaaagacttagctgttgttgcattgcgcgaaggtcttgatttacctccgactgatgatccaatgcttcttgcgtacctcttggacccgtcaaacacgacgcccgaaggcgtagcccgtcgttacggcggcgagtggaccgaagatgcaggcgagcgcgcgttattggccgaacgtttgcacgccaatttattaggacgtttgcaaggcgaggaacgtctcctctggctttacgaagaagtggagaaaccattgagtcgcgtgctcgcgcatatggaagctaccggtgtcaaattagacgtggcgtatttggaggcactcagccttgaagttgctgccgaaatgcgccgcttggaggaagaagtattccgtttagcaggccactcctttaaccttaattctcgcgatcagttagaacgtgtgttgttcgatgaacttggtctccctcctatcggcaagacagagaagaccggtaaacgtagcacttcagcggcggttttagaagctcttcgcgaagtccatcccattgtggacaagatcttgcagtaccgcgaactcgcgaaattgaaaggcacctatattgaccctcttccggcattagtccacccgaaaacgggacgcctccatacccgcttcaaccaaacagccacggcgaccggtcgtttgtcctcctctgatccaaaccttcagaatattccagtacgtaccccattgggccagaagatccgccgcgcgtttgtagctgaggagggttggcgtttagtggccctcgattatagccaaattgaattacgtgtccttgcccatctttctggcgatgagaacctcatccgcgtgtttcaggaaggcaaagacattcacactcaaacggcaagctggatgtttggattatcagctgaagcgatcgatcctttgatgcgtcgtgcagcgaagaccatcaatttcggtgttctctacggtatgagtgcccatcgtttgtcgcaggaattaggcattccctatgaagaagctgcggcgttcattcagcgctactttcaaagctatcccaaagttaaagcatggatcgagaagactctcgaagaaggccgcacacgtggttacgtagagaccttatttggacgtcgccgctatgttcccgatttaaacgctcgcgtgaaatctgtccgtgaagccgccgaacgcatggcgttcaacatgcctgtacagggcacggcagctgacctcatgaaacttgcaatggtgcgcctttttccacaattgcgtgaagttggtgcccgcatgctcttgcaggtccacgatgaactcttgttagaagcgccaaaagagcgtgcggaagaggtggcagccctcgcgaaagaggttatggaaggcgtgtggcccttagcggtgcctcttgaagtcgaagttggtattggcgaggattggttggctgccaaaggataatga

SEQ ID NO: 1582 - protein, 841 aa, synthetic construct
  REGION 1..841: note = Variant of DNA polymerase I from Thermus sp. strain 2.9
MHHHHHHGGSGMLPLFEPKGRVLLVDGHHLAYRNFFALKGLTTSRGEPVQGVYGFAKSLLKALKEDGDVVIVVFDAKAPSFRHEAYEAYKAGRAPTPEDFPRQLALMKELVDLLGLERLEVPGFEADDVLATLAKKAEREGYEVQILTADRDLFQLLSPRISVLHPEGHRITPEWLWEKYGLRPEQWVDFRALAGDPSDNIPGVKGIGEKTALKLLKEWGSLENLLKNLDQVKPESVREKILAHLEDLKLSRELSRVRTDLPLEVDFRGRREPDWAGLKAFLERLEFGSLLHEFGLLESPLPAEEAPWPPPEGAFLGYRLSRPEPMWAELLALAASAQGRVYRAEDPHGALRGLKEVRGLLAKDLAVVALREGLDLPPTDDPMLLAYLLDPSNTTPEGVARRYGGEWTEDAGERALLAERLHANLLGRLQGEERLLWLYEEVEKPLSRVLAHMEATGVKLDVAYLEALSLEVAAEMRRLEEEVFRLAGHSFNLNSRDQLERVLFDELGLPPIGKTEKTGKRSTSAAVLEALREVHPIVDKILQYRELAKLKGTYIDPLPALVHPKTGRLHTRFNQTATATGRLSSSDPNLQNIPVRTPLGQKIRRAFVAEEGWRLVALDYSQIELRVLAHLSGDENLIRVFQEGKDIHTQTASWMFGLSAEAIDPLMRRAAKTINFGVLYGMSAHRLSQELGIPYEEAAAFIQRYFQSYPKVKAWIEKTLEEGRTRGYVETLFGRRRYVPDLNARVKSVREAAERMAFNMPVQGTAADLMKLAMVRLFPQLREVGARMLLQVHDELLLEAPKERAEEVAALAKEVMEGVWPLAVPLEVEVGIGEDWLAAKG

SEQ ID NO: 1583 - DNA, 2529 bp, synthetic construct
  misc_feature 1..2529: note = Variant of DNA polymerase I from Thermus sp. strain 2.9
  source 1..2529: mol_type = other DNA
atgcaccatcatcatcatcatggcggtagcggcatgttaccgttgttcgaacctaaaggtcgcgtgcttctggttgatggccatcatctcgcgtatcgtaacttctttgccctgaaaggattaaccaccagccgtggcgagccggtacagggtgtctacggctttgcaaagtcgctcctgaaagctctgaaagaagacggtgatgtggtgattgttgtctttgatgcgaaagcgccaagttttcgccacgaagcgtacgaagcttacaaagccgggcgtgctccaacgccggaagactttcctcgccaattggcgcttatgaaggaattagtggatttgcttggcctcgaacgcttggaagttcccggtttcgaggcagacgacgtattagcgactctcgcaaagaaagccgaacgtgagggctatgaagtccagatcttgacagcagatcgcgatcttttccagcttttatctccgcgcatctcggtgttacacccggaagggcatcgtatcaccccggaatggctctgggagaaatatggtttgcgtcccgaacaatgggtggattttcgcgccttagcaggcgatccgagcgacaatattccgggagttaaaggtatcggcgagaagacggcgctcaagctccttaaagaatgggggtcgttggagaacttgcttaagaatttagatcaggtcaaaccagagtcagtgcgtgagaagattcttgcacacctcgaagacctcaaattaagccgcgaattgtcccgtgtacgcaccgatttgccgctcgaagttgatttccgtggccgccgcgaacctgactgggagggtcttaaagcgtttttagagcgtcttgaatttggttcgctcttgcatgaattcggccttttagaaagcccgttaccagccgaagaagcaccttggccaccgcccgaaggcgcgtttttaggttaccgtttgagtcgcccggaaccgatgtgggccgaattattggctcttgcagcgtctgcccagggacgtgtgtatcgcgcggaagaccctcatggtgcgctccgcggcctcaaagaagtccgtggactccttgccaaagacttagctgttgttgcattgcgcgaaggtcttgatttacctccgactgatgatccaatgcttcttgcgtacctcttggacccgtcaaacacgacgcccgaaggcgtagcccgtcgttacggcggcgagtggaccgaagatgcaggcgagcgcgcgttattggccgaacgtttgcacgccaatttattaggacgtttgtttggcgaggaacgtctcctctggctttacgaagaagtggagaaaccattgagtcgcgtgctcgcgcatatggaagctaccggtgtcaaattagacgtggcgtatttggaggcactcagccttgaagttgctgccgaaatgcgccgcttggaggaagaagtattccgtttagcaggccactcctttaaccttaattctcgcgatcagttagaacgtgtgttgttcgatgaacttggtctccctcctatcggcaagacagagaagaccggtaaacgtagcacttcagcggcggttttagaagctcttcgcgaagtccatcccattgtggacaagatcttgcagtaccgcgaactcgcgaaattgaaaggcacctatattgaccctcttccggcattagtccacccgaaaacgggacgcctccatacccgcttcaaccaaacagccacggcgaccggtcgtttgtcctcctctgatccaaaccttcagaatattccagtacgtaccccattgggccagaagatccgccgcgcgtttgtagctgaggagggttggcgtttagtggccctcgattatagccaaattgaattacgtgtccttgcccatctttctggcgatgagaacctcatccgcgtgtttcaggaaggcaaagacattcacactcaaacggcaagctggatgtttggattatcagctgaagcgatcgatcctttgatgcgtcgtgcagcgaagaccatcaatttcggtgttctctacggtatgagtgcccatcgtttgtcgcaggaattaggcattccctatgaagaagctgcggcgttcattcagcgctactttcaaagctatcccaaagttaaagcatggatcgagaagactctcgaagaaggccgcacacgtggttacgtagagaccttatttggacgtcgccgctatgttcccgatttaaacgctcgcgtgaaatctgtccgtgaagccgccgaacgcatggcgttcaacatgcctgtacagggcacggcagctgacctcatgaaacttgcaatggtgcgcctttttccacaattgcgtgaagttggtgcccgcatgctcttgcaggtccacgatgaactcttgttagaagcgccaaaagagcgtgcggaagaggtggcagccctcgcgaaagaggttatggaaggcgtgtggcccttagcggtgcctcttgaagtcgaagttggtattggcgaggattggttggctgccaaaggataatga

SEQ ID NO: 1584 - protein, 841 aa, synthetic construct
  REGION 1..841: note = Variant of DNA polymerase I from Thermus sp. strain 2.9
MHHHHHHGGSGMLPLFEPKGRVLLVDGHHLAYRNFFALKGLTTSRGEPVQGVYGFAKSLLKALKEDGDVVIVVFDAKAPSFRHEAYEAYKAGRAPTPEDFPRQLALMKELVDLLGLERLEVPGFEADDVLATLAKKAEREGYEVQILTADRDLFQLLSPRISVLHPEGHRITPEWLWEKYGLRPEQWVDFRALAGDPSDNIPGVKGIGEKTALKLLKEWGSLENLLKNLDQVKPESVREKILAHLEDLKLSRELSRVRTDLPLEVDFRGRREPDWEGLKAFLERLEFGSLLHEFGLLESPLPAEEAPWPPPEGAFLGYRLSRPEPMWAELLALAASAQGRVYRAEDPHGALRGLKEVRGLLAKDLAVVALREGLDLPPTDDPMLLAYLLDPSNTTPEGVARRYGGEWTEDAGERALLAERLHANLLGRLFGEERLLWLYEEVEKPLSRVLAHMEATGVKLDVAYLEALSLEVAAEMRRLEEEVFRLAGHSFNLNSRDQLERVLFDELGLPPIGKTEKTGKRSTSAAVLEALREVHPIVDKILQYRELAKLKGTYIDPLPALVHPKTGRLHTRFNQTATATGRLSSSDPNLQNIPVRTPLGQKIRRAFVAEEGWRLVALDYSQIELRVLAHLSGDENLIRVFQEGKDIHTQTASWMFGLSAEAIDPLMRRAAKTINFGVLYGMSAHRLSQELGIPYEEAAAFIQRYFQSYPKVKAWIEKTLEEGRTRGYVETLFGRRRYVPDLNARVKSVREAAERMAFNMPVQGTAADLMKLAMVRLFPQLREVGARMLLQVHDELLLEAPKERAEEVAALAKEVMEGVWPLAVPLEVEVGIGEDWLAAKG

SEQ ID NO: 1585 - DNA, 2529 bp, synthetic construct
  misc_feature 1..2529: note = Variant of DNA polymerase I from Thermus sp. strain 2.9
  source 1..2529: mol_type = other DNA
atgcaccatcatcatcatcatggcggtagcggcatgttaccgttgttcgaacctaaaggtcgcgtgcttctggttgatggccatcatctcgcgtatcgtaacttctttgccctgaaaggattaaccaccagccgtggcgagccggtacagggtgtctacggctttgcaaagtcgctcctgaaagctctgaaagaagacggtgatgtggtgattgttgtctttgatgcgaaagcgccaagttttcgccacgaagcgtactctgcttacaaagccgggcgtgctccaacgccggaagactttcctcgccaattggcgcttatgaaggaattagtggatttgcttggcctcgaacgcttggaagttcccggtttcgaggcagacgacgtattagcgactctcgcaaagaaagccgaacgtgagggctatgaagtccagatcttgacagcagatcgcgatcttttccagcttttatctccgcgcatctcggtgttacacccggaagggcatcgtatcaccccggaatggctctgggagaaatatggtttgcgtcccgaacaatgggtggattttcgcgccttagcaggcgatccgagcgacaatattccgggagttaaaggtatcggcgagaagacggcgctcaagctccttaaagaatgggggtcgttggagaacttgcttaagaatttagatcaggtcaaaccagagtcagtgcgtgagaagattcttgcacacctcgaagacctcaaattaagccgcgaattgtcccgtgtacgcaccgatttgccgctcgaagttgatttccgtggccgccgcgaacctgactgggagggtcttaaagcgtttttagagcgtcttgaatttggttcgctcttgcatgaattcggccttttagaaagcccgttaccagccgaagaagcaccttggccaccgcccgaaggcgcgtttttaggttaccgtttgagtcgcccggaaccgatgtgggccgaattattggctcttgcagcgtctgcccagggacgtgtgtatcgcgcggaagaccctcatggtgcgctccgcggcctcaaagaagtccgtggactccttgccaaagacttagctgttgttgcattgcgcgaaggtcttgatttacctccgactgatgatccaatgcttcttgcgtacctcttggacccgtcaaacacgacgcccgaaggcgtagcccgtcgttacggcggcgagtggaccgaagatgcaggcgagcgcgcgttattggccgaacgtttgcacgccaatttattaggacgtttgcaaggcgaggaacgtctcctctggctttacgaagaagtggagaaaccattgagtcgcgtgctcgcgcatatggaagctaccggtgtcaaattagacgtggcgtatttggaggcactcagccttgaagttgctgccgaaatgcgccgcttggaggaagaagtattccgtttagcaggccactcctttaaccttaattctcgcgatcagttagaacgtgtgttgttcgatgaacttggtctccctcctatcggcaagacagagaagaccggtaaacgtagcacttcagcggcggttttagaagctcttcgcgaagtccatcccattgtggacaagatcttgcagtaccgcgaactcgcgaaattgaaaggcacctatattgaccctcttccggcattagtccacccgaaaacgggacgcctccatacccgcttcaaccaaacagccacggcgaccggtcgtttgtcctcctctgatccaaaccttcagaatattccagtacgtaccccattgggccagaagatccgccgcgcgtttgtagctgaggagggttggcgtttagtggccctcgattatagccaaattgaattacgtgtccttgcccatctttctggcgatgagaacctcatccgcgtgtttcaggaaggcaaagacattcacactcaaacggcaagctggatgtttggattatcagctgaagcgatcgatcctttgatgcgtcgtgcagcgaagaccatcaatttcggtgttctctacggtatgagtgcccatcgtttgtcgcaggaattaggcattccctatgaagaagctgcggcgttcattcagcgctactttcaaagctatcccaaagttaaagcatggatcgagaagactctcgaagaaggccgcacacgtggttacgtagagaccttatttggacgtcgccgctatgttcccgatttaaacgctcgcgtgaaatctgtccgtgaagccgccgaacgcatggcgttcaacatgcctgtacagggcacggcagctgacctcatgaaacttgcaatggtgcgcctttttccacaattgcgtgaagttggtgcccgcatgctcttgcaggtccacgatgaactcttgttagaagcgccaaaagagcgtgcggaagaggtggcagccctcgcgaaagaggttatggaaggcgtgtggcccttagcggtgcctcttgaagtcgaagttggtattggcgaggattggttggctgccaaaggataatga

SEQ ID NO: 1586 - protein, 841 aa, synthetic construct
  REGION 1..841: note = Variant of DNA polymerase I from Thermus sp. strain 2.9
MHHHHHHGGSGMLPLFEPKGRVLLVDGHHLAYRNFFALKGLTTSRGEPVQGVYGFAKSLLKALKEDGDVVIVVFDAKAPSFRHEAYSAYKAGRAPTPEDFPRQLALMKELVDLLGLERLEVPGFEADDVLATLAKKAEREGYEVQILTADRDLFQLLSPRISVLHPEGHRITPEWLWEKYGLRPEQWVDFRALAGDPSDNIPGVKGIGEKTALKLLKEWGSLENLLKNLDQVKPESVREKILAHLEDLKLSRELSRVRTDLPLEVDFRGRREPDWEGLKAFLERLEFGSLLHEFGLLESPLPAEEAPWPPPEGAFLGYRLSRPEPMWAELLALAASAQGRVYRAEDPHGALRGLKEVRGLLAKDLAVVALREGLDLPPTDDPMLLAYLLDPSNTTPEGVARRYGGEWTEDAGERALLAERLHANLLGRLQGEERLLWLYEEVEKPLSRVLAHMEATGVKLDVAYLEALSLEVAAEMRRLEEEVFRLAGHSFNLNSRDQLERVLFDELGLPPIGKTEKTGKRSTSAAVLEALREVHPIVDKILQYRELAKLKGTYIDPLPALVHPKTGRLHTRFNQTATATGRLSSSDPNLQNIPVRTPLGQKIRRAFVAEEGWRLVALDYSQIELRVLAHLSGDENLIRVFQEGKDIHTQTASWMFGLSAEAIDPLMRRAAKTINFGVLYGMSAHRLSQELGIPYEEAAAFIQRYFQSYPKVKAWIEKTLEEGRTRGYVETLFGRRRYVPDLNARVKSVREAAERMAFNMPVQGTAADLMKLAMVRLFPQLREVGARMLLQVHDELLLEAPKERAEEVAALAKEVMEGVWPLAVPLEVEVGIGEDWLAAKG

SEQ ID NO: 1587 - DNA, 2529 bp, synthetic construct; identical to SEQ ID NO: 973
  misc_feature 1..2529: note = Variant of DNA polymerase I from Thermus sp. strain 2.9
  source 1..2529: mol_type = other DNA

SEQ ID NO: 1588 - protein, 841 aa, synthetic construct; identical to SEQ ID NO: 974
  REGION 1..841: note = Variant of DNA polymerase I from Thermus sp. strain 2.9

SEQ ID NO: 1589 - DNA, 2529 bp, synthetic construct; identical to SEQ ID NO: 785
  misc_feature 1..2529: note = Variant of DNA polymerase I from Thermus sp. strain 2.9
  source 1..2529: mol_type = other DNA

SEQ ID NO: 1590 - protein, 841 aa, synthetic construct; identical to SEQ ID NO: 786
  REGION 1..841: note = Variant of DNA polymerase I from Thermus sp. strain 2.9

SEQ ID NO: 1591 - DNA, 2529 bp, synthetic construct
  misc_feature 1..2529: note = Variant of DNA polymerase I from Thermus sp. strain 2.9
  source 1..2529: mol_type = other DNA
atgcaccatcatcatcatcatggcggtagcggcatgttaccgttgttcgaacctaaaggtcgcgtgcttctggttgatggccatcatctcgcgtatcgtaacttctttgccctgaaaggattaaccaccagccgtggcgagccggtacagggtgtctacggctttgcaaagtcgctcctgaaagctctgaaagaagacggtgatgtggtgattgttgtctttgatgcgaaagcgccaagttttcgccacgaagcgtacgaagcttacaaagccgggcgtgctccaacgccggaagactttcctcgccaattggcgcttatgaaggaattagtggatttgcttggcctcgaacgcttggaagttcccggtttcgaggcagacgacgtattagcgactctcgcaaagaaagccgaacgtgagggctatgaagtccagatcttgacagcagatcgcgatcttttccagcttttatctccgcgcatctcggtgttacacccggaagggcatcgtatcaccccggaatggctctgggagaaatatggtttgcgtcccgaacaatgggtggattttcgcgccttagcaggcgatccgagcgacaatattccgggagttaaaggtatcggcgagaagacggcgctcaagctccttaaagaatgggggtcgttggagaacttgcttaagaatttagatcaggtcaaaccagagtcagtgcgtgagaagattcttgcacacctcgaagacctcaaattaagccgcgaattgtcccgtgtacgcaccgatttgccgctcgaagttgatttccgtggccgccgcgaacctgactgggatggtcttaaagcgtttttagagcgtcttgaatttggttcgctcttgcatgaattcggccttttagaaagcccgttaccagccgaagaagcaccttggccaccgcccgaaggcgcgtttttaggttaccgtttgagtcgcccggaaccgatgtgggccgaattattggctcttgcagcgtctgcccagggacgtgtgtatcgcgcggaagaccctcatggtgcgctccgcggcctcaaagaagtccgtggactccttgccaaagacttagctgttgttgcattgcgcgaaggtcttgatttacctccgactgatgatccaatgcttcttgcgtacctcttggacccgtcaaacacgacgcccgaaggcgtagcccgtcgttacggcggcgagtggaccgaagatgcaggcgagcgcgcgttattggccgaacgtttgcacgccaatttattaggacgtttgcaaggcgaggaacgtctcctctggctttacgaagaagtggagaaaccattgagtcgcgtgctcgcgcatatggaagctaccggtgtcaaattagacgtggcgtatttggaggcactcagccttgaagttgctgccgaaatgcgccgcttggaggaagaagtattccgtttagcaggccactcctttaaccttaattctcgcgatcagttagaacgtgtgttgttcgatgaacttggtctccctcctatcggcaagacagagaagaccggtaaacgtagcacttcagcggcggttttagaagctcttcgcgaagtccatcccattgtggacaagatcttgcagtaccgcgaactcgcgaaattgaaaggcacctatattgaccctcttccggcattagtccacccgaaaacgggacgcctccatacccgcttcaaccaaacagccacggcgaccggtcgtttgtcctcctctgatccaaaccttcagaatattccagtacgtaccccattgggccagaagatccgccgcgcgtttgtagctgaggagggttggcgtttagtggccctcgattatagccaaattgaattacgtgtccttgcccatctttctggcgatgagaacctcatccgcgtgtttcaggaaggcaaagacattcacactcaaacggcaagctggatgtttggattatcagctgaagcgatcgatcctttgatgcgtcgtgcagcgaagaccatcaatttcggtgttctctacggtatgagtgcccatcgtttgtcgcaggaattaggcattccctatgaagaagctgcggcgttcattcagcgctactttcaaagctatcccaaagttaaagcatggatcgagaagactctcgaagaaggccgcacacgtggttacgtagagaccttatttggacgtcgccgctatgttcccgatttaaacgctcgcgtgaaatctgtccgtgaagccgccgaacgcatggcgttcaacatgcctgtacagggcacggcagctgacctcatgaaacttgcaatggtgcgcctttttccacaattgcgtgaagttggtgcccgcatgctcttgcaggtccacgatgaactcttgttagaagcgccaaaagagcgtgcggaagaggtggcagccctcgcgaaagaggttatggaaggcgtgtggcccttagcggtgcctcttgaagtcgaagttggtattggcgaggattggttggctgccaaaggataatga

SEQ ID NO: 1592 - protein, 841 aa, synthetic construct
  REGION 1..841: note = Variant of DNA polymerase I from Thermus sp. strain 2.9
MHHHHHHGGSGMLPLFEPKGRVLLVDGHHLAYRNFFALKGLTTSRGEPVQGVYGFAKSLLKALKEDGDVVIVVFDAKAPSFRHEAYEAYKAGRAPTPEDFPRQLALMKELVDLLGLERLEVPGFEADDVLATLAKKAEREGYEVQILTADRDLFQLLSPRISVLHPEGHRITPEWLWEKYGLRPEQWVDFRALAGDPSDNIPGVKGIGEKTALKLLKEWGSLENLLKNLDQVKPESVREKILAHLEDLKLSRELSRVRTDLPLEVDFRGRREPDWDGLKAFLERLEFGSLLHEFGLLESPLPAEEAPWPPPEGAFLGYRLSRPEPMWAELLALAASAQGRVYRAEDPHGALRGLKEVRGLLAKDLAVVALREGLDLPPTDDPMLLAYLLDPSNTTPEGVARRYGGEWTEDAGERALLAERLHANLLGRLQGEERLLWLYEEVEKPLSRVLAHMEATGVKLDVAYLEALSLEVAAEMRRLEEEVFRLAGHSFNLNSRDQLERVLFDELGLPPIGKTEKTGKRSTSAAVLEALREVHPIVDKILQYRELAKLKGTYIDPLPALVHPKTGRLHTRFNQTATATGRLSSSDPNLQNIPVRTPLGQKIRRAFVAEEGWRLVALDYSQIELRVLAHLSGDENLIRVFQEGKDIHTQTASWMFGLSAEAIDPLMRRAAKTINFGVLYGMSAHRLSQELGIPYEEAAAFIQRYFQSYPKVKAWIEKTLEEGRTRGYVETLFGRRRYVPDLNARVKSVREAAERMAFNMPVQGTAADLMKLAMVRLFPQLREVGARMLLQVHDELLLEAPKERAEEVAALAKEVMEGVWPLAVPLEVEVGIGEDWLAAKG

SEQ ID NO: 1593 - DNA, 2529 bp, synthetic construct
  misc_feature 1..2529: note = Variant of DNA polymerase I from Thermus sp. strain 2.9
  source 1..2529: mol_type = other DNA
atgcaccatcatcatcatcatggcggtagcggcatgttaccgttgttcgaacctaaaggtcgcgtgcttctggttgatggccatcatctcgcgtatcgtaacttctttgccctgaaaggattaaccaccagccgtggcgagccggtacagggtgtctacggctttgcaaagtcgctcctgaaagctctgaaagaagacggtgatgtggtgattgttgtctttgatgcgaaagcgccaagttttcgccacgaagcgtacgaagcttacaaagccgggcgtgctccaacgccggaagactttcctcgccaattggcgcttatgaaggaattagtggatttgcttggcctcgaacgcttggaagttcccggtttcgaggcagacgacgtattagcgactctcgcaaagaaagccgaacgtgagggctatgaagtccagatcttgacagcagatcgcgatcttttccagcttttatctccgcgcatctcggtgttacacccggaagggcatcgtatcaccccggaatggctctgggagaaatatggtttgcgtcccgaacaatgggtggattttcgcgccttagcaggcgatccgagcgacaatattccgggagttaaaggtatcggcgagaagacggcgctcaagctccttaaagaatgggggtcgttggagaacttgcttaagaatttagatcaggtcaaaccagagtcagtgcgtgagaagattcttgcacacctcgaagacctcaaattaagccgcgaattgtcccgtgtacgcaccgatttgccgctcgaagttgatttccgtggccgccgcgaacctgactgggagggtcttaaagcgtttttagagcgtcttgaatttggttcgctcttgcatgaattcggccttttagaaagcccgttaccagccgaagaagcaccttggccaccgcccgaaggcgcgtttttaggttaccgtttgagtcgcccggaaccgatgtgggccgaattattggctcttgcagcgtctgcccagggacgtgtgtatcgcgcggaagaccctcatggtgcgctccgcggcctcaaagaagtccgtggactccttgccaaagacttagctgttgttgcattgcgcgaaggtcttgatttacctccgactgatgatccaatgcttcttgcgtacctcttggacccgtcaaacacgacgcccgaaggcgtagcccgtcgttacggcggcgagtggaccgaagatgcaggcgagcgcgcgttattggccgaacgtttgcacgccaatttattaggacgtttgcaaggcgaggaacgtctcctctggctttacgaagaagtggagaaaccattgagtcgcgtgctcgcgcatatggaagctaccggtgtcaaattagacgtggcgtatttggaggcactcagccttgaagttgctgccgaaatgcgccgcttggaggaagaagtattccgtttagcaggccactcctttaaccttaattctcgcgatcagttagaacgtgtgttgttcgatgaacttggtctccctcctatcggcaagacagagaagaccggtaaacgtagcacttcagcggcggttttagaagctcttcgcgaagtccatcccattgtggacaagatcttgcagtaccgcgaactcgcgaaattgaaaggcacctatattgaccctcttccggcattagtccacccgaaaacgggacgcctccatacccgcttcaaccaaacagccacggcgaccggtcgtttgtcctcctctgatccaaaccttcagaatattccagtacgtaccccattgggccagaagatccgccgcgcgtttgtagctgaggagggttggcgtttagtggccctcgattatagccaaattgaattacgtgtccttgcccatctttctggcgatgagaacctcatccgcgtgtttcgggaaggcaaagacattcacactcaaacggcaagctggatgtttggattatcagctgaagcgatcgatcctttgatgcgtcgtgcagcgaagaccatcaatttcggtgttctctacggtatgagtgcccatcgtttgtcgcaggaattaggcattccctatgaagaagctgcggcgttcattcagcgctactttcaaagctatcccaaagttaaagcatggatcgagaagactctcgaagaaggccgcacacgtggttacgtagagaccttatttggacgtcgccgctatgttcccgatttaaacgctcgcgtgaaatctgtccgtgaagccgccgaacgcatggcgttcaacatgcctgtacagggcacggcagctgacctcatgaaacttgcaatggtgcgcctttttccacaattgcgtgaagttggtgcccgcatgctcttgcaggtccacgatgaactcttgttagaagcgccaaaagagcgtgcggaagaggtggcagccctcgcgaaagaggttatggaaggcgtgtggcccttagcggtgcctcttgaagtcgaagttggtattggcgaggattggttggctgccaaaggataatga

SEQ ID NO: 1594 - protein, 841 aa, synthetic construct
  REGION 1..841: note = Variant of DNA polymerase I from Thermus sp. strain 2.9
MHHHHHHGGSGMLPLFEPKGRVLLVDGHHLAYRNFFALKGLTTSRGEPVQGVYGFAKSLLKALKEDGDVVIVVFDAKAPSFRHEAYEAYKAGRAPTPEDFPRQLALMKELVDLLGLERLEVPGFEADDVLATLAKKAEREGYEVQILTADRDLFQLLSPRISVLHPEGHRITPEWLWEKYGLRPEQWVDFRALAGDPSDNIPGVKGIGEKTALKLLKEWGSLENLLKNLDQVKPESVREKILAHLEDLKLSRELSRVRTDLPLEVDFRGRREPDWEGLKAFLERLEFGSLLHEFGLLESPLPAEEAPWPPPEGAFLGYRLSRPEPMWAELLALAASAQGRVYRAEDPHGALRGLKEVRGLLAKDLAVVALREGLDLPPTDDPMLLAYLLDPSNTTPEGVARRYGGEWTEDAGERALLAERLHANLLGRLQGEERLLWLYEEVEKPLSRVLAHMEATGVKLDVAYLEALSLEVAAEMRRLEEEVFRLAGHSFNLNSRDQLERVLFDELGLPPIGKTEKTGKRSTSAAVLEALREVHPIVDKILQYRELAKLKGTYIDPLPALVHPKTGRLHTRFNQTATATGRLSSSDPNLQNIPVRTPLGQKIRRAFVAEEGWRLVALDYSQIELRVLAHLSGDENLIRVFREGKDIHTQTASWMFGLSAEAIDPLMRRAAKTINFGVLYGMSAHRLSQELGIPYEEAAAFIQRYFQSYPKVKAWIEKTLEEGRTRGYVETLFGRRRYVPDLNARVKSVREAAERMAFNMPVQGTAADLMKLAMVRLFPQLREVGARMLLQVHDELLLEAPKERAEEVAALAKEVMEGVWPLAVPLEVEVGIGEDWLAAKG

SEQ ID NO: 1595 - DNA, 2529 bp, synthetic construct
  misc_feature 1..2529: note = Variant of DNA polymerase I from Thermus sp. strain 2.9
  source 1..2529: mol_type = other DNA
atgcaccatcatcatcatcatggcggtagcggcatgttaccgttgttcgaacctaaaggtcgcgtgcttctggttgatggccatcatctcgcgtatcgtaacttctttgccctgaaaggattaaccaccagccgtggcgagccggtacagggtgtctacggctttgcaaagtcgctcctgaaagctctgaaagaagacggtgatgtggtgattgttgtctttgatgcgaaagcgccaagttttcgccacgaagcgtacgaagcttacaaagccgggcgtgctccaacgccggaagactttcctcgccaattggcgcttatgaaggaattagtggatttgcttggcctcgaacgcttggaagttcccggtttcgaggcagacgacgtattagcgactctcgcaaagaaagccgaacgtgagggctatgaagtccagatcttgacagcagatcgcgatcttttccagcttttatctccgcgcatctcggtgttacacccggaagggcatcgtatcaccccggaatggctctgggagaaatatggtttgcgtcccgaacaatgggtggattttcgcgccttagcaggcgatccgagcgacaatattccgggagttaaaggtatcggcgagaagacggcgctcaagctccttaaagaatgggggtcgttggagaacttgcttaaggatttagatcaggtcaaaccagagtcagtgcgtgagaagattcttgcacacctcgaagacctcaaattaagccgcgaattgtcccgtgtacgcaccgatttgccgctcgaagttgatttccgtggccgccgcgaacctgactgggagggtcttaaagcgtttttagagcgtcttgaatttggttcgctcttgcatgaattcggccttttagaaagcccgttaccagccgaagaagcaccttggccaccgcccgaaggcgcgtttttaggttaccgtttgagtcgcccggaaccgatgtgggccgaattattggctcttgcagcgtctgcccagggacgtgtgtatcgcgcggaagaccctcatggtgcgctccgcggcctcaaagaagtccgtggactccttgccaaagacttagctgttgttgcattgcgcgaaggtcttgatttacctccgactgatgatccaatgcttcttgcgtacctcttggacccgtcaaacacgacgcccgaaggcgtagcccgtcgttacggcggcgagtggaccgaagatgcaggcgagcgcgcgttattggccgaacgtttgcacgccaatttattaggacgtttgcaaggcgaggaacgtctcctctggctttacgaagaagtggagaaaccattgagtcgcgtgctcgcgcatatggaagctaccggtgtcaaattagacgtggcgtatttggaggcactcagccttgaagttgctgccgaaatgcgccgcttggaggaagaagtattccgtttagcaggccactcctttaaccttaattctcgcgatcagttagaacgtgtgttgttcgatgaacttggtctccctcctatcggcaagacagagaagaccggtaaacgtagcacttcagcggcggttttagaagctcttcgcgaagtccatcccattgtggacaagatcttgcagtaccgcgaactcgcgaaattgaaaggcacctatattgaccctcttccggcattagtccacccgaaaacgggacgcctccatacccgcttcaaccaaacagccacggcgaccggtcgtttgtcctcctctgatccaaaccttcagaatattccagtacgtaccccattgggccagaagatccgccgcgcgtttgtagctgaggagggttggcgtttagtggccctcgattatagccaaattgaattacgtgtccttgcccatctttctggcgatgagaacctcatccgcgtgtttcaggaaggcaaagacattcacactcaaacggcaagctggatgtttggattatcagctgaagcgatcgatcctttgatgcgtcgtgcagcgaagaccatcaatttcggtgttctctacggtatgagtgcccatcgtttgtcgcaggaattaggcattccctatgaagaagctgcggcgttcattcagcgctactttcaaagctatcccaaagttaaagcatggatcgagaagactctcgaagaaggccgcacacgtggttacgtagagaccttatttggacgtcgccgctatgttcccgatttaaacgctcgcgtgaaatctgtccgtgaagccgccgaacgcatggcgttcaacatgcctgtacagggcacggcagctgacctcatgaaacttgcaatggtgcgcctttttccacaattgcgtgaagttggtgcccgcatgctcttgcaggtccacgatgaactcttgttagaagcgccaaaagagcgtgcggaagaggtggcagccctcgcgaaagaggttatggaaggcgtgtggcccttagcggtgcctcttgaagtcgaagttggtattggcgaggattggttggctgccaaaggataatga

SEQ ID NO: 1596 - protein, 841 aa, synthetic construct
  REGION 1..841: note = Variant of DNA polymerase I from Thermus sp. strain 2.9
MHHHHHHGGSGMLPLFEPKGRVLLVDGHHLAYRNFFALKGLTTSRGEPVQGVYGFAKSLLKALKEDGDVVIVVFDAKAPSFRHEAYEAYKAGRAPTPEDFPRQLALMKELVDLLGLERLEVPGFEADDVLATLAKKAEREGYEVQILTADRDLFQLLSPRISVLHPEGHRITPEWLWEKYGLRPEQWVDFRALAGDPSDNIPGVKGIGEKTALKLLKEWGSLENLLKDLDQVKPESVREKILAHLEDLKLSRELSRVRTDLPLEVDFRGRREPDWEGLKAFLERLEFGSLLHEFGLLESPLPAEEAPWPPPEGAFLGYRLSRPEPMWAELLALAASAQGRVYRAEDPHGALRGLKEVRGLLAKDLAVVALREGLDLPPTDDPMLLAYLLDPSNTTPEGVARRYGGEWTEDAGERALLAERLHANLLGRLQGEERLLWLYEEVEKPLSRVLAHMEATGVKLDVAYLEALSLEVAAEMRRLEEEVFRLAGHSFNLNSRDQLERVLFDELGLPPIGKTEKTGKRSTSAAVLEALREVHPIVDKILQYRELAKLKGTYIDPLPALVHPKTGRLHTRFNQTATATGRLSSSDPNLQNIPVRTPLGQKIRRAFVAEEGWRLVALDYSQIELRVLAHLSGDENLIRVFQEGKDIHTQTASWMFGLSAEAIDPLMRRAAKTINFGVLYGMSAHRLSQELGIPYEEAAAFIQRYFQSYPKVKAWIEKTLEEGRTRGYVETLFGRRRYVPDLNARVKSVREAAERMAFNMPVQGTAADLMKLAMVRLFPQLREVGARMLLQVHDELLLEAPKERAEEVAALAKEVMEGVWPLAVPLEVEVGIGEDWLAAKG

SEQ ID NO: 1597 - DNA, 2529 bp, synthetic construct
  misc_feature 1..2529: note = Variant of DNA polymerase I from Thermus sp. strain 2.9
  source 1..2529: mol_type = other DNA
atgcaccatcatcatcatcatggcggtagcggcatgttaccgttgttcgaacctaaaggtcgcgtgcttctggttgatggccatcatctcgcgtatcgtaacttctttgccctgaaaggattaaccaccagccgtggcgagccggtacagggtgtctacggctttgcaaagtcgctcctgaaagctctgaaagaagacggtgatgtggtgattgttgtctttgatgcgaaagcgccaagttttcgccacgaagcgtacgaagcttacaaagccgggcgtgctccaacgccggaagactttcctcgccaattggcgcttatgaaggaattagtggatttgcttggcctcgaacgcttggaagttcccggtttcgaggcagacgacgtattagcgactctcgcaaagaaagccgaacgtgagggctatgaagtccagatcttgacagcagatcgcgatcttttccagcttttatctccgcgcatctcggtgttacacccggaagggcatcgtatcaccccggaatggctctggaataaatatggtttgcgtcccgaacaatgggtggattttcgcgccttagcaggcgatccgagcgacaatattccgggagttaaaggtatcggcgagaagacggcgctcaagctccttaaagaatgggggtcgttggagaacttgcttaagaatttagatcaggtcaaaccagagtcagtgcgtgagaagattcttgcacacctcgaagacctcaaattaagccgcgaattgtcccgtgtacgcaccgatttgccgctcgaagttgatttccgtggccgccgcgaacctgactgggagggtcttaaagcgtttttagagcgtcttgaatttggttcgctcttgcatgaattcggccttttagaaagcccgttaccagccgaagaagcaccttggccaccgcccgaaggcgcgtttttaggttaccgtttgagtcgcccggaaccgatgtgggccgaattattggctcttgcagcgtctgcccagggacgtgtgtatcgcgcggaagaccctcatggtgcgctccgcggcctcaaagaagtccgtggactccttgccaaagacttagctgttgttgcattgcgcgaaggtcttgatttacctccgactgatgatccaatgcttcttgcgtacctcttggacccgtcaaacacgacgcccgaaggcgtagcccgtcgttacggcggcgagtggaccgaagatgcaggcgagcgcgcgttattggccgaacgtttgcacgccaatttattaggacgtttgcaaggcgaggaacgtctcctctggctttacgaagaagtggagaaaccattgagtcgcgtgctcgcgcatatggaagctaccggtgtcaaattagacgtggcgtatttggaggcactcagccttgaagttgctgccgaaatgcgccgcttggaggaagaagtattccgtttagcaggccactcctttaaccttaattctcgcgatcagttagaacgtgtgttgttcgatgaacttggtctccctcctatcggcaagacagagaagaccggtaaacgtagcacttcagcggcggttttagaagctcttcgcgaagtccatcccattgtggacaagatcttgcagtaccgcgaactcgcgaaattgaaaggcacctatattgaccctcttccggcattagtccacccgaaaacgggacgcctccatacccgcttcaaccaaacagccacggcgaccggtcgtttgtcctcctctgatccaaaccttcagaatattccagtacgtaccccattgggccagaagatccgccgcgcgtttgtagctgaggagggttggcgtttagtggccctcgattatagccaaattgaattacgtgtccttgcccatctttctggcgatgagaacctcatccgcgtgtttcaggaaggcaaagacattcacactcaaacggcaagctggatgtttggattatcagctgaagcgatcgatcctttgatgcgtcgtgcagcgaagaccatcaatttcggtgttctctacggtatgagtgcccatcgtttgtcgcaggaattaggcattccctatgaagaagctgcggcgttcattcagcgctactttcaaagctatcccaaagttaaagcatggatcgagaagactctcgaagaaggccgcacacgtggttacgtagagaccttatttggacgtcgccgctatgttcccgatttaaacgctcgcgtgaaatctgtccgtgaagccgccgaacgcatggcgttcaacatgcctgtacagggcacggcagctgacctcatgaaacttgcaatggtgcgcctttttccacaattgcgtgaagttggtgcccgcatgctcttgcaggtccacgatgaactcttgttagaagcgccaaaagagcgtgcggaagaggtggcagccctcgcgaaagaggttatggaaggcgtgtggcccttagcggtgcctcttgaagtcgaagttggtattggcgaggattggttggctgccaaaggataatga

SEQ ID NO: 1598 - protein, 841 aa, synthetic construct
  REGION 1..841: note = Variant of DNA polymerase I from Thermus sp. strain 2.9
MHHHHHHGGSGMLPLFEPKGRVLLVDGHHLAYRNFFALKGLTTSRGEPVQGVYGFAKSLLKALKEDGDVVIVVFDAKAPSFRHEAYEAYKAGRAPTPEDFPRQLALMKELVDLLGLERLEVPGFEADDVLATLAKKAEREGYEVQILTADRDLFQLLSPRISVLHPEGHRITPEWLWNKYGLRPEQWVDFRALAGDPSDNIPGVKGIGEKTALKLLKEWGSLENLLKNLDQVKPESVREKILAHLEDLKLSRELSRVRTDLPLEVDFRGRREPDWEGLKAFLERLEFGSLLHEFGLLESPLPAEEAPWPPPEGAFLGYRLSRPEPMWAELLALAASAQGRVYRAEDPHGALRGLKEVRGLLAKDLAVVALREGLDLPPTDDPMLLAYLLDPSNTTPEGVARRYGGEWTEDAGERALLAERLHANLLGRLQGEERLLWLYEEVEKPLSRVLAHMEATGVKLDVAYLEALSLEVAAEMRRLEEEVFRLAGHSFNLNSRDQLERVLFDELGLPPIGKTEKTGKRSTSAAVLEALREVHPIVDKILQYRELAKLKGTYIDPLPALVHPKTGRLHTRFNQTATATGRLSSSDPNLQNIPVRTPLGQKIRRAFVAEEGWRLVALDYSQIELRVLAHLSGDENLIRVFQEGKDIHTQTASWMFGLSAEAIDPLMRRAAKTINFGVLYGMSAHRLSQELGIPYEEAAAFIQRYFQSYPKVKAWIEKTLEEGRTRGYVETLFGRRRYVPDLNARVKSVREAAERMAFNMPVQGTAADLMKLAMVRLFPQLREVGARMLLQVHDELLLEAPKERAEEVAALAKEVMEGVWPLAVPLEVEVGIGEDWLAAKG

SEQ ID NO: 1599 - DNA, 2529 bp, synthetic construct; identical to SEQ ID NO: 1303
  misc_feature 1..2529: note = Variant of DNA polymerase I from Thermus sp. strain 2.9
  source 1..2529: mol_type = other DNA

SEQ ID NO: 1600 - protein, 841 aa, synthetic construct; identical to SEQ ID NO: 1304
  REGION 1..841: note = Variant of DNA polymerase I from Thermus sp. strain 2.9

SEQ ID NO: 1601 - DNA, 2529 bp, synthetic construct
  misc_feature 1..2529: note = Variant of DNA polymerase I from Thermus sp. strain 2.9
  source 1..2529: mol_type = other DNA
atgcaccatcatcatcatcatggcggtagcggcatgttaccgttgttcgaacctaaaggtcgcgtgcttctggttgatggccatcatctcgcgtatcgtaacttctttgccctgaaaggattaaccaccagccgtggcgagccggtacagggtgtctacggctttgcaaagtcgctcctgaaagctctgaaagaagacggtgatgtggtgattgttgtctttgatgcgaaagcgccaagttttcgccacgaagcgtacgaagcttacaaagccgggcgtgctccaacgccggaagactttcctcgccaattggcgcttatgaaggaattagtggatttgcttggcctcgaacgcttggaagttcccggtttcgaggcagacgacgtattagcgactctcgcaaagaaagccgaacgtgagggctatgaagtccagatcttgacagcagatcgcgatcttttccagcttttatctccgcgcatctcggtgttacacccggaagggcatcgtatcaccccggaatggctctgggagaaatatggtttgcgtcccgaacaatgggtggattttcgcgccttagcaggcgatccgagcgacaatattccgggagttaaaggtatcggcgagaagacggcgctcaagctccttaaagaatgggggtcgttggagaacttgcttaagaatttagatcaggtcaaaccagagtcagtgcgtgagaagattcttgcacacctcgaagacctcaaattaagccgcgaattgtcccgtgtacgcaccgatttgccgctcgaagttgatttccgtggccgccgcgaacctgactgggagggtcttaaagcgtttttagagcgtcttgaatttggttcgctcttgcatgaattcggccttttagaaagcccgttaccagccgaagaagcaccttggccaccgcccgaaggcgcgtttttaggttaccgtttgagtcgcccggaaccgatgtgggccgaattattggctcttgcagcgtctgcccagggacgtgtgtatcgcgcggaagaccctcatggtgcgctccgcggcctcaaagaagtccgtggactccttgccaaagacttagctgttgttgcattgcgcgaaggtcttgatttacctccgactgatgatccaatgcttcttgcgtacctcttggacccgtcaaacacgacgcccgaaggcgtagcccgtcgttacggcggcgagtggaccgaagatgcaggcgagcgcgcgttattggccgaacgtttgcacgccaatttattaggacgtttgcaaggcgaggaacgtctcctctggctttacgaagaagtggagaaaccattgagtcgcgtgctcgcgcatatggaagctaccggtgtcaaattagacgtggcgtatttggaggcactcagccttgaagttgctgccgaaatgcgccgcttggaggaagaagtattccgtttagcaggccactcctttaaccttaattctcgcgatcagttagaacgtgtgttgttcgatgaacttggtctccctcctatcggcaagacagagaagaccggtaaacgtagcacttcagcggcggttttagaagctcttcgcctggtccatcccattgtggacaagatcttgcagtaccgcgaactcgcgaaattgaaaggcacctatattgaccctcttccggcattagtccacccgaaaacgggacgcctccatacccgcttcaaccaaacagccacggcgaccggtcgtttgtcctcctctgatccaaaccttcagaatattccagtacgtaccccattgggccagaagatccgccgcgcgtttgtagctgaggagggttggcgtttagtggccctcgattatagccaaattgaattacgtgtccttgcccatctttctggcgatgagaacctcatccgcgtgtttcaggaaggcaaagacattcacactcaaacggcaagctggatgtttggattatcagctgaagcgatcgatcctttgatgcgtcgtgcagcgaagaccatcaatttcggtgttctctacggtatgagtgcccatcgtttgtcgcaggaattaggcattccctatgaagaagctgcggcgttcattcagcgctactttcaaagctatcccaaagttaaagcatggatcgagaagactctcgaagaaggccgcacacgtggttacgtagagaccttatttggacgtcgccgctatgttcccgatttaaacgctcgcgtgaaatctgtccgtgaagccgccgaacgcatggcgttcaacatgcctgtacagggcacggcagctgacctcatgaaacttgcaatggtgcgcctttttccacaattgcgtgaagttggtgcccgcatgctcttgcaggtccacgatgaactcttgttagaagcgccaaaagagcgtgcggaagaggtggcagccctcgcgaaagaggttatggaaggcgtgtggcccttagcggtgcctcttgaagtcgaagttggtattggcgaggattggttggctgccaaaggataatga

SEQ ID NO: 1602 - protein, 841 aa, synthetic construct; identical to SEQ ID NO: 1276
  REGION 1..841: note = Variant of DNA polymerase I from Thermus sp. strain 2.9

SEQ ID NO: 1603 - DNA, 2529 bp, synthetic construct; identical to SEQ ID NO: 1009
  misc_feature 1..2529: note = Variant of DNA polymerase I from Thermus sp. strain 2.9
  source 1..2529: mol_type = other DNA

SEQ ID NO: 1604 - protein, 841 aa, synthetic construct; identical to SEQ ID NO: 1010
  REGION 1..841: note = Variant of DNA polymerase I from Thermus sp. strain 2.9

SEQ ID NO: 1605 - DNA, 2529 bp, synthetic construct
  misc_feature 1..2529: note = Variant of DNA polymerase I from Thermus sp. strain 2.9
  source 1..2529: mol_type = other DNA
atgcaccatcatcatcatcatggcggtagcggcatgttaccgttgttcgaacctaaaggtcgcgtgcttctggttgatggccatcatctcgcgtatcgtaacttctttgccctgaaaggattaaccaccagccgtggcgagccggtacagggtgtctacggctttgcaaagtcgctcctgaaagctctgaaagaagacggtgatgtggtgattgttgtctttgatgcgaaagcgccaagttttcgccacgaagcgtacgaagcttacaaagccgggcgtgctccaacgccggaagactttcctcgccaattggcgcttatgaaggaattagtggatttgcttggcctcgaacgcttggaagttcccggtttcgaggcagacgacgtattagcgactctcgcaaagaaagccgaacgtgagggctatgaagtccagatcttgacagcagatcgcgatcttttccagcttttatctccgcgcatctcggtgttacacccggaagggcatcgtatcaccccggaatggctctgggagaaatatggtttgcgtcccgaacaatgggtggattttcgcgccttagcaggcgatccgagcgacaatattccgggagttaaaggtatcggcgagaagacggcgctcaagctccttaaagaatgggggtcgttggagaacttgcttaagaatttagatcaggtcaaaccagagtcagtgcgtgagaagattcttgcacacctcgaagacctccgtttaagccgcgaattgtcccgtgtacgcaccgatttgccgctcgaagttgatttccgtggccgccgcgaacctgactgggagggtcttaaagcgtttttagagcgtcttgaatttggttcgctcttgcatgaattcggccttttagaaagcccgttaccagccgaagaagcaccttggccaccgcccgaaggcgcgtttttaggttaccgtttgagtcgcccggaaccgatgtgggccgaattattggctcttgcagcgtctgcccagggacgtgtgtatcgcgcggaagaccctcatggtgcgctccgcggcctcaaagaagtccgtggactccttgccaaagacttagctgttgttgcattgcgcgaaggtcttgatttacctccgactgatgatccaatgcttcttgcgtacctcttggacccgtcaaacacgacgcccgaaggcgtagcccgtcgttacggcggcgagtggaccgaagatgcaggcgagcgcgcgttattggccgaacgtttgcacgccaatttattaggacgtttgcaaggcgaggaacgtctcctctggctttacgaagaagtggagaaaccattgagtcgcgtgctcgcgcatatggaagctaccggtgtcaaattagacgtggcgtatttggaggcactcagccttgaagttgctgccgaaatgcgccgcttggaggaagaagtattccgtttagcaggccactcctttaaccttaattctcgcgatcagttagaacgtgtgttgttcgatgaacttggtctccctcctatcggcaagacagagaagaccggtaaacgtagcacttcagcggcggttttagaagctcttcgcgaagtccatcccattgtggacaagatcttgcagtaccgcgaactcgcgaaattgaaaggcacctatattgaccctcttccggcattagtccacccgaaaacgggacgcctccatacccgcttcaaccaaacagccacggcgaccggtcgtttgtcctcctctgatccaaaccttcagaatattccagtacgtaccccattgggccagaagatccgccgcgcgtttgtagctgaggagggttggcgtttagtggccctcgattatagccaaattgaattacgtgtccttgcccatctttctggcgatgagaacctcatccgcgtgtttcaggaaggcaaagacattcacactcaaacggcaagctggatgtttggattatcagctgaagcgatcgatcctttgatgcgtcgtgcagcgaagaccatcaatttcggtgttctctacggtatgagtgcccatcgtttgtcgcaggaattaggcattccctatgaagaagctgcggcgttcattcagcgctactttcaaagctatcccaaagttaaagcatggatcgagaagactctcgaagaaggccgcacacgtggttacgtagagaccttatttggacgtcgccgctatgttcccgatttaaacgctcgcgtgaaatctgtccgtgaagccgccgaacgcatggcgttcaacatgcctgtacagggcacggcagctgacctcatgaaacttgcaatggtgcgcctttttccacaattgcgtgaagttggtgcccgcatgctcttgcaggtccacgatgaactcttgttagaagcgccaaaagagcgtgcggaagaggtggcagccctcgcgaaagaggttatggaaggcgtgtggcccttagcggtgcctcttgaagtcgaagttggtattggcgaggattggttggctgccaaaggataatga

SEQ ID NO: 1606 - protein, 841 aa, synthetic construct
  REGION 1..841: note = Variant of DNA polymerase I from Thermus sp. strain 2.9
MHHHHHHGGSGMLPLFEPKGRVLLVDGHHLAYRNFFALKGLTTSRGEPVQGVYGFAKSLLKALKEDGDVVIVVFDAKAPSFRHEAYEAYKAGRAPTPEDFPRQLALMKELVDLLGLERLEVPGFEADDVLATLAKKAEREGYEVQILTADRDLFQLLSPRISVLHPEGHRITPEWLWEKYGLRPEQWVDFRALAGDPSDNIPGVKGIGEKTALKLLKEWGSLENLLKNLDQVKPESVREKILAHLEDLRLSRELSRVRTDLPLEVDFRGRREPDWEGLKAFLERLEFGSLLHEFGLLESPLPAEEAPWPPPEGAFLGYRLSRPEPMWAELLALAASAQGRVYRAEDPHGALRGLKEVRGLLAKDLAVVALREGLDLPPTDDPMLLAYLLDPSNTTPEGVARRYGGEWTEDAGERALLAERLHANLLGRLQGEERLLWLYEEVEKPLSRVLAHMEATGVKLDVAYLEALSLEVAAEMRRLEEEVFRLAGHSFNLNSRDQLERVLFDELGLPPIGKTEKTGKRSTSAAVLEALREVHPIVDKILQYRELAKLKGTYIDPLPALVHPKTGRLHTRFNQTATATGRLSSSDPNLQNIPVRTPLGQKIRRAFVAEEGWRLVALDYSQIELRVLAHLSGDENLIRVFQEGKDIHTQTASWMFGLSAEAIDPLMRRAAKTINFGVLYGMSAHRLSQELGIPYEEAAAFIQRYFQSYPKVKAWIEKTLEEGRTRGYVETLFGRRRYVPDLNARVKSVREAAERMAFNMPVQGTAADLMKLAMVRLFPQLREVGARMLLQVHDELLLEAPKERAEEVAALAKEVMEGVWPLAVPLEVEVGIGEDWLAAKG

SEQ ID NO: 1607 - DNA, 2529 bp, synthetic construct; identical to SEQ ID NO: 925
  misc_feature 1..2529: note = Variant of DNA polymerase I from Thermus sp. strain 2.9
  source 1..2529: mol_type = other DNA

SEQ ID NO: 1608 - protein, 841 aa, synthetic construct; identical to SEQ ID NO: 926
  REGION 1..841: note = Variant of DNA polymerase I from Thermus sp. strain 2.9

SEQ ID NO: 1609 - DNA, 2529 bp, synthetic construct
  misc_feature 1..2529: note = Variant of DNA polymerase I from Thermus sp. strain 2.9
  source 1..2529: mol_type = other DNA
atgcaccatcatcatcatcatggcggtagcggcatgttaccgttgttcgaacctaaaggtcgcgtgcttctggttgatggccatcatctcgcgtatcgtaacttctttgccctgaaaggattaaccaccagccgtggcgagccggtacagggtgtctacggctttgcaaagtcgctcctgaaagctctgaaagaagacggtgatgtggtgattgttgtctttgatgcgaaagcgccaagttttcgccacgaagcgtacgaagcttacaaagccgggcgtgctccaacgccggaagactttcctcgccaattggcgcttatgaaggaattagtggatttgcttggcctcgaacgcttggaagttcccggtttcgaggcagacgacgtattagcgactctcgcaaagaaagccgaacgtgagggctatgaagtccagatcttgacagcagatcgcgatcttttccagcttttatctccgcgcatctcggtgttacacccggaagggcatcgtatcaccccggaatggctctgggagaaatatggtttgcgtcccgaacaatgggtggattttcgcgccttagcaggcgatccgagcgacaatattccgggagttaaaggtatcggcgagaagacggcgctcaagctccttaaagaatgggggtcgttggagaacttgcttaagaatttagatcaggtcaaaccagagtcagtgcgtgagaagattcttgcacacctcgaagacctcaaattaagccgcgaattgtcccgtgtacgcaccgatttgccgctcgaagttgatttccgtggccgccgcgaacctgactgggagggtcttaaagcgtttttagagcgtcttgaatttggttcgctcttgcatgaattcggccttttagaaagcccgttaccagccgaagaagcaccttggccaccgcccgaaggcgcgtttttaggttaccgtttgagtcgcccggaaccgatgtgggccgaattattggctcttgcagcgtctgcccagggacgtgtgtatcgcgcggaagaccctcatggtgcgctccgcggcctcaaagaagtccgtggactccttgccaaagacttagctgttgttgcattgcgcgaaggtcttgatttacctccgactgatgatccaatgcttcttgcgtacctcttggacccgtcaaacacgacgcccgaaggcgtagcccgtcgttacggcggcgagtggaccgaagatgcaggcgagcgcgcgttattggccgaacgtttgcacgccaatttattaggacgtttgcaaggcgaggaacgtctcctctggctttacgaagaagtggagaaaccattgagtcgcgtgctcgcgcatatggaagctaccggtgtcaaattagacgtggcgtatttggaggcactcagccttgaagttgctgccgaaatgcgcgggttggaggaagaagtattccgtttagcaggccactcctttaaccttaattctcgcgatcagttagaacgtgtgttgttcgatgaacttggtctccctcctatcggcaagacagagaagaccggtaaacgtagcacttcagcggcggttttagaagctcttcgcgaagtccatcccattgtggacaagatcttgcagtaccgcgaactcgcgaaattgaaaggcacctatattgaccctcttccggcattagtccacccgaaaacgggacgcctccatacccgcttcaaccaaacagccacggcgaccggtcgtttgtcctcctctgatccaaaccttcagaatattccagtacgtaccccattgggccagaagatccgccgcgcgtttgtagctgaggagggttggcgtttagtggccctcgattatagccaaattgaattacgtgtccttgcccatctttctggcgatgagaacctcatccgcgtgtttcaggaaggcaaagacattcacactcaaacggcaagctggatgtttggattatcagctgaagcgatcgatcctttgatgcgtcgtgcagcgaagaccatcaatttcggtgttctctacggtatgagtgcccatcgtttgtcgcaggaattaggcattccctatgaagaagctgcggcgttcattcagcgctactttcaaagctatcccaaagttaaagcatggatcgagaagactctcgaagaaggccgcacacgtggttacgtagagaccttatttggacgtcgccgctatgttcccgatttaaacgctcgcgtgaaatctgtccgtgaagccgccgaacgcatggcgttcaacatgcctgtacagggcacggcagctgacctcatgaaacttgcaatggtgcgcctttttccacaattgcgtgaagttggtgcccgcatgctcttgcaggtccacgatgaactcttgttagaagcgccaaaagagcgtgcggaagaggtggcagccctcgcgaaagaggttatggaaggcgtgtggcccttagcggtgcctcttgaagtcgaagttggtattggcgaggattggttggctgccaaaggataatga

SEQ ID NO: 1610 - protein, 841 aa, synthetic construct; identical to SEQ ID NO: 1046
  REGION 1..841: note = Variant of DNA polymerase I from Thermus sp. strain 2.9

SEQ ID NO: 1611 - DNA, 2529 bp, synthetic construct
  misc_feature 1..2529: note = Variant of DNA polymerase I from Thermus sp. strain 2.9
  source 1..2529: mol_type = other DNA
atgcaccatcatcatcatcatggcggtagcggcatgttaccgttgttcaagcctaaaggtcgcgtgcttctggttgatggccatcatctcgcgtatcgtaacttctttgccctgaaaggattaaccaccagccgtggcgagccggtacagggtgtctacggctttgcaaagtcgctcctgaaagctctgaaagaagacggtgatgtggtgattgttgtctttgatgcgaaagcgccaagttttcgccacgaagcgtacgaagcttacaaagccgggcgtgctccaacgccggaagactttcctcgccaattggcgcttatgaaggaattagtggatttgcttggcctcgaacgcttggaagttcccggtttcgaggcagacgacgtattagcgactctcgcaaagaaagccgaacgtgagggctatgaagtccagatcttgacagcagatcgcgatcttttccagcttttatctccgcgcatctcggtgttacacccggaagggcatcgtatcaccccggaatggctctgggagaaatatggtttgcgtcccgaacaatgggtggattttcgcgccttagcaggcgatccgagcgacaatattccgggagttaaaggtatcggcgagaagacggcgctcaagctccttaaagaatgggggtcgttggagaacttgcttaagaatttagatcaggtcaaaccagagtcagtgcgtgagaagattcttgcacacctcgaagacctcaaattaagccgcgaattgtcccgtgtacgcaccgatttgccgctcgaagttgatttccgtggccgccgcgaacctgactgggagggtcttaaagcgtttttagagcgtcttgaatttggttcgctcttgcatgaattcggccttttagaaagcccgttaccagccgaagaagcaccttggccaccgcccgaaggcgcgtttttaggttaccgtttgagtcgcccggaaccgatgtgggccgaattattggctcttgcagcgtctgcccagggacgtgtgtatcgcgcggaagaccctcatggtgcgctccgcggcctcaaagaagtccgtggactccttgccaaagacttagctgttgttgcattgcgcgaaggtcttgatttacctccgactgatgatccaatgcttcttgcgtacctcttggacccgtcaaacacgacgcccgaaggcgtagcccgtcgttacggcggcgagtggaccgaagatgcaggcgagcgcgcgttattggccgaacgtttgcacgccaatttattaggacgtttgcaaggcgaggaacgtctcctctggctttacgaagaagtggagaaaccattgagtcgcgtgctcgcgcatatggaagctaccggtgtcaaattagacgtggcgtatttggaggcactcagccttgaagttgctgccgaaatgcgccgcttggaggaagaagtattccgtttagcaggccactcctttaaccttaattctcgcgatcagttagaacgtgtgttgttcgatgaacttggtctccctcctatcggcaagacagagaagaccggtaaacgtagcacttcagcggcggttttagaagctcttcgcgaagtccatcccattgtggacaagatcttgcagtaccgcgaactcgcgaaattgaaaggcacctatattgaccctcttccggcattagtccacccgaaaacgggacgcctccatacccgcttcaaccaaacagccacggcgaccggtcgtttgtcctcctctgatccaaaccttcagaatattccagtacgtaccccattgggccagaagatccgccgcgcgtttgtagctgaggagggttggcgtttagtggccctcgattatagccaaattgaattacgtgtccttgcccatctttctggcgatgagaacctcatccgcgtgtttcaggaaggcaaagacattcacactcaaacggcaagctggatgtttggattatcagctgaagcgatcgatcctttgatgcgtcgtgcagcgaagaccatcaatttcggtgttctctacggtatgagtgcccatcgtttgtcgcaggaattaggcattccctatgaagaagctgcggcgttcattcagcgctactttcaaagctatcccaaagttaaagcatggatcgagaagactctcgaagaaggccgcacacgtggttacgtagagaccttatttggacgtcgccgctatgttcccgatttaaacgctcgcgtgaaatctgtccgtgaagccgccgaacgcatggcgttcaacatgcctgtacagggcacggcagctgacctcatgaaacttgcaatggtgcgcctttttccacaattgcgtgaagttggtgcccgcatgctcttgcaggtccacgatgaactcttgttagaagcgccaaaagagcgtgcggaagaggtggcagccctcgcgaaagaggttatggaaggcgtgtggcccttagcggtgcctcttgaagtcgaagttggtattggcgaggattggttggctgccaaaggataatga

SEQ ID NO: 1612 - protein, 841 aa, synthetic construct
  REGION 1..841: note = Variant of DNA polymerase I from Thermus sp. strain 2.9
MHHHHHHGGSGMLPLFKPKGRVLLVDGHHLAYRNFFALKGLTTSRGEPVQGVYGFAKSLLKALKEDGDVVIVVFDAKAPSFRHEAYEAYKAGRAPTPEDFPRQLALMKELVDLLGLERLEVPGFEADDVLATLAKKAEREGYEVQILTADRDLFQLLSPRISVLHPEGHRITPEWLWEKYGLRPEQWVDFRALAGDPSDNIPGVKGIGEKTALKLLKEWGSLENLLKNLDQVKPESVREKILAHLEDLKLSRELSRVRTDLPLEVDFRGRREPDWEGLKAFLERLEFGSLLHEFGLLESPLPAEEAPWPPPEGAFLGYRLSRPEPMWAELLALAASAQGRVYRAEDPHGALRGLKEVRGLLAKDLAVVALREGLDLPPTDDPMLLAYLLDPSNTTPEGVARRYGGEWTEDAGERALLAERLHANLLGRLQGEERLLWLYEEVEKPLSRVLAHMEATGVKLDVAYLEALSLEVAAEMRRLEEEVFRLAGHSFNLNSRDQLERVLFDELGLPPIGKTEKTGKRSTSAAVLEALREVHPIVDKILQYRELAKLKGTYIDPLPALVHPKTGRLHTRFNQTATATGRLSSSDPNLQNIPVRTPLGQKIRRAFVAEEGWRLVALDYSQIELRVLAHLSGDENLIRVFQEGKDIHTQTASWMFGLSAEAIDPLMRRAAKTINFGVLYGMSAHRLSQELGIPYEEAAAFIQRYFQSYPKVKAWIEKTLEEGRTRGYVETLFGRRRYVPDLNARVKSVREAAERMAFNMPVQGTAADLMKLAMVRLFPQLREVGARMLLQVHDELLLEAPKERAEEVAALAKEVMEGVWPLAVPLEVEVGIGEDWLAAKG

SEQ ID NO: 1613 - DNA, 2529 bp, synthetic construct
  misc_feature 1..2529: note = Variant of DNA polymerase I from Thermus sp. strain 2.9
  source 1..2529: mol_type = other DNA
atgcaccatcatcatcatcatggcggtagcggcatgttaccgttgttcgaacctaaaggtcgcgtgcttctggttgatggccatcatctcgcgtatcgtaacttctttgccctgaaaggattaaccaccagccgtggcgagccggtacagggtgtctacggctttgcaaagtcgctcctgaaagctctgaaagaagacggtgatgtggtgattgttgtctttgatgcgaaagcgccaagttttcgccacgaagcgtacgaagcttacaaagccgggcgtgctccaacgccggaagactttcctcgccaattggcgcttatgaaggaattagtggatttgcttggcctcgaacgcttggaagttcccggtttcgaggcagacgacgtattagcgactctcgcaaagaaagccgaacgtgagggctatgaagtccagatcttgacagcagatcgcgatcttttccagcttttatctccgcgcatctcggtgttacacccggaagggcatcgtatcaccccggaatggctctgggagaaatatggtttgcgtcccgaacaatgggtggattttcgcgccttagcaggcgatccgagcgacaatattccgggagttaaaggtatcggcgagaagacggcgctcaagctccttaaagaatgggggtcgttggagaacttgcttaagaatttagatcaggtcaaaccagagtcagtgcgtgagaagattcttgcacacctcgaagacctcaaattaagccgcgaattgtcccgtgtacgcaccgatttgccgctcactgttgatttccgtggccgccgcgaacctgactgggagggtcttaaagcgtttttagagcgtcttgaatttggttcgctcttgcatgaattcggccttttagaaagcccgttaccagccgaagaagcaccttggccaccgcccgaaggcgcgtttttaggttaccgtttgagtcgcccggaaccgatgtgggccgaattattggctcttgcagcgtctgcccagggacgtgtgtatcgcgcggaagaccctcatggtgcgctccgcggcctcaaagaagtccgtggactccttgccaaagacttagctgttgttgcattgcgcgaaggtcttgatttacctccgactgatgatccaatgcttcttgcgtacctcttggacccgtcaaacacgacgcccgaaggcgtagcccgtcgttacggcggcgagtggaccgaagatgcaggcgagcgcgcgttattggccgaacgtttgcacgccaatttattaggacgtttgcaaggcgaggaacgtctcctctggctttacgaagaagtggagaaaccattgagtcgcgtgctcgcgcatatggaagctaccggtgtcaaattagacgtggcgtatttggaggcactcagccttgaagttgctgccgaaatgcgccgcttggaggaagaagtattccgtttagcaggccactcctttaaccttaattctcgcgatcagttagaacgtgtgttgttcgatgaacttggtctccctcctatcggcaagacagagaagaccggtaaacgtagcacttcagcggcggttttagaagctcttcgcgaagtccatcccattgtggacaagatcttgcagtaccgcgaactcgcgaaattgaaaggcacctatattgaccctcttccggcattagtccacccgaaaacgggacgcctccatacccgcttcaaccaaacagccacggcgaccggtcgtttgtcctcctctgatccaaaccttcagaatattccagtacgtaccccattgggccagaagatccgccgcgcgtttgtagctgaggagggttggcgtttagtggccctcgattatagccaaattgaattacgtgtccttgcccatctttctggcgatgagaacctcatccgcgtgtttcaggaaggcaaagacattcacactcaaacggcaagctggatgtttggattatcagctgaagcgatcgatcctttgatgcgtcgtgcagcgaagaccatcaatttcggtgttctctacggtatgagtgcccatcgtttgtcgcaggaattaggcattccctatgaagaagctgcggcgttcattcagcgctactttcaaagctatcccaaagttaaagcatggatcgagaagactctcgaagaaggccgcacacgtggttacgtagagaccttatttggacgtcgccgctatgttcccgatttaaacgctcgcgtgaaatctgtccgtgaagccgccgaacgcatggcgttcaacatgcctgtacagggcacggcagctgacctcatgaaacttgcaatggtgcgcctttttccacaattgcgtgaagttggtgcccgcatgctcttgcaggtccacgatgaactcttgttagaagcgccaaaagagcgtgcggaagaggtggcagccctcgcgaaagaggttatggaaggcgtgtggcccttagcggtgcctcttgaagtcgaagttggtattggcgaggattggttggctgccaaaggataatga

SEQ ID NO: 1614 - protein, 841 aa, synthetic construct
  REGION 1..841: note = Variant of DNA polymerase I from Thermus sp. strain 2.9
MHHHHHHGGSGMLPLFEPKGRVLLVDGHHLAYRNFFALKGLTTSRGEPVQGVYGFAKSLLKALKEDGDVVIVVFDAKAPSFRHEAYEAYKAGRAPTPEDFPRQLALMKELVDLLGLERLEVPGFEADDVLATLAKKAEREGYEVQILTADRDLFQLLSPRISVLHPEGHRITPEWLWEKYGLRPEQWVDFRALAGDPSDNIPGVKGIGEKTALKLLKEWGSLENLLKNLDQVKPESVREKILAHLEDLKLSRELSRVRTDLPLTVDFRGRREPDWEGLKAFLERLEFGSLLHEFGLLESPLPAEEAPWPPPEGAFLGYRLSRPEPMWAELLALAASAQGRVYRAEDPHGALRGLKEVRGLLAKDLAVVALREGLDLPPTDDPMLLAYLLDPSNTTPEGVARRYGGEWTEDAGERALLAERLHANLLGRLQGEERLLWLYEEVEKPLSRVLAHMEATGVKLDVAYLEALSLEVAAEMRRLEEEVFRLAGHSFNLNSRDQLERVLFDELGLPPIGKTEKTGKRSTSAAVLEALREVHPIVDKILQYRELAKLKGTYIDPLPALVHPKTGRLHTRFNQTATATGRLSSSDPNLQNIPVRTPLGQKIRRAFVAEEGWRLVALDYSQIELRVLAHLSGDENLIRVFQEGKDIHTQTASWMFGLSAEAIDPLMRRAAKTINFGVLYGMSAHRLSQELGIPYEEAAAFIQRYFQSYPKVKAWIEKTLEEGRTRGYVETLFGRRRYVPDLNARVKSVREAAERMAFNMPVQGTAADLMKLAMVRLFPQLREVGARMLLQVHDELLLEAPKERAEEVAALAKEVMEGVWPLAVPLEVEVGIGEDWLAAKG

SEQ ID NO: 1615 - DNA, 2529 bp, synthetic construct
  misc_feature 1..2529: note = Variant of DNA polymerase I from Thermus sp. strain 2.9
  source 1..2529: mol_type = other DNA
atgcaccatcatcatcatcatggcggtagcggcatgttaccgttgttcgaacctaaaggtcgcgtgcttctggttgatggccatcatctcgcgtatcgtaacttctttgccctgaaaggattaaccaccagccgtggcgagccggtacagggtgtctacggctttgcaaagtcgctcctgaaagctctgaaagaagacggtgatgtggtgattgttgtctttgatgcgaaagcgccaagttttcgccacgaagcgtacgaagcttacaaagccgggcgtgctccaacgccggaagactttcctcgccaattggcgcttatgaaggaattagtggatttgcttggcctcgaacgcttggaagttcccggtttcgaggcagacgacgtattagcgactctcgcaaagaaagccgaacgtgagggctatgaagtccagatcttgacagcagatcgcgatcttttccagcttttatctccgcgcatctcggtgttacacccggaagggcatcgtatcaccccggaatggctctgggagaaatatggtttgcgtcccgaacaatgggtggattttcgcgccttagcaggcgatccgagcgacaatattccgggagttaaaggtatcggcgagaagacggcgctcaagctccttaaagaatgggggtcgttggagaacttgcttaagaatttagatcaggtcaaaccagagtcagtgcgtgagaagattcttgcacacctcgaagacctcaaattaagccgcgaattgtcccgtgtacgcaccgatttgccgctcgaagttgatttccgtggccgccgcgaacctgactgggagggtcttaaagcgtttttagagcgtcttgaatttggttcgctcttgcatgaattcggccttttagaaagcccgttaccagccgaagaagcaccttggccaccgcccgaaggcgcgtttttaggttaccgtttgagtcgcagtgaaccgatgtgggccgaattattggctcttgcagcgtctgcccagggacgtgtgtatcgcgcggaagaccctcatggtgcgctccgcggcctcaaagaagtccgtggactccttgccaaagacttagctgttgttgcattgcgcgaaggtcttgatttacctccgactgatgatccaatgcttcttgcgtacctcttggacccgtcaaacacgacgcccgaaggcgtagcccgtcgttacggcggcgagtggaccgaagatgcaggcgagcgcgcgttattggccgaacgtttgcacgccaatttattaggacgtttgcaaggcgaggaacgtctcctctggctttacgaagaagtggagaaaccattgagtcgcgtgctcgcgcatatggaagctaccggtgtcaaattagacgtggcgtatttggaggcactcagccttgaagttgctgccgaaatgcgccgcttggaggaagaagtattccgtttagcaggccactcctttaaccttaattctcgcgatcagttagaacgtgtgttgttcgatgaacttggtctccctcctatcggcaagacagagaagaccggtaaacgtagcacttcagcggcggttttagaagctcttcgcgaagtccatcccattgtggacaagatcttgcagtaccgcgaactcgcgaaattgaaaggcacctatattgaccctcttccggcattagtccacccgaaaacgggacgcctccatacccgcttcaaccaaacagccacggcgaccggtcgtttgtcctcctctgatccaaaccttcagaatattccagtacgtaccccattgggccagaagatccgccgcgcgtttgtagctgaggagggttggcgtttagtggccctcgattatagccaaattgaattacgtgtccttgcccatctttctggcgatgagaacctcatccgcgtgtttcaggaaggcaaagacattcacactcaaacggcaagctggatgtttggattatcagctgaagcgatcgatcctttgatgcgtcgtgcagcgaagaccatcaatttcggtgttctctacggtatgagtgcccatcgtttgtcgcaggaattaggcattccctatgaagaagctgcggcgttcattcagcgctactttcaaagctatcccaaagttaaagcatggatcgagaagactctcgaagaaggccgcacacgtggttacgtagagaccttatttggacgtcgccgctatgttcccgatttaaacgctcgcgtgaaatctgtccgtgaagccgccgaacgcatggcgttcaacatgcctgtacagggcacggcagctgacctcatgaaacttgcaatggtgcgcctttttccacaattgcgtgaagttggtgcccgcatgctcttgcaggtccacgatgaactcttgttagaagcgccaaaagagcgtgcggaagaggtggcagccctcgcgaaagaggttatggaaggcgtgtggcccttagcggtgcctcttgaagtcgaagttggtattggcgaggattggttggctgccaaaggataatga

SEQ ID NO: 1616 - protein, 841 aa, synthetic construct
  REGION 1..841: note = Variant of DNA polymerase I from Thermus sp. strain 2.9
MHHHHHHGGSGMLPLFEPKGRVLLVDGHHLAYRNFFALKGLTTSRGEPVQGVYGFAKSLLKALKEDGDVVIVVFDAKAPSFRHEAYEAYKAGRAPTPEDFPRQLALMKELVDLLGLERLEVPGFEADDVLATLAKKAEREGYEVQILTADRDLFQLLSPRISVLHPEGHRITPEWLWEKYGLRPEQWVDFRALAGDPSDNIPGVKGIGEKTALKLLKEWGSLENLLKNLDQVKPESVREKILAHLEDLKLSRELSRVRTDLPLEVDFRGRREPDWEGLKAFLERLEFGSLLHEFGLLESPLPAEEAPWPPPEGAFLGYRLSRSEPMWAELLALAASAQGRVYRAEDPHGALRGLKEVRGLLAKDLAVVALREGLDLPPTDDPMLLAYLLDPSNTTPEGVARRYGGEWTEDAGERALLAERLHANLLGRLQGEERLLWLYEEVEKPLSRVLAHMEATGVKLDVAYLEALSLEVAAEMRRLEEEVFRLAGHSFNLNSRDQLERVLFDELGLPPIGKTEKTGKRSTSAAVLEALREVHPIVDKILQYRELAKLKGTYIDPLPALVHPKTGRLHTRFNQTATATGRLSSSDPNLQNIPVRTPLGQKIRRAFVAEEGWRLVALDYSQIELRVLAHLSGDENLIRVFQEGKDIHTQTASWMFGLSAEAIDPLMRRAAKTINFGVLYGMSAHRLSQELGIPYEEAAAFIQRYFQSYPKVKAWIEKTLEEGRTRGYVETLFGRRRYVPDLNARVKSVREAAERMAFNMPVQGTAADLMKLAMVRLFPQLREVGARMLLQVHDELLLEAPKERAEEVAALAKEVMEGVWPLAVPLEVEVGIGEDWLAAKG

SEQ ID NO: 1617 - DNA, 2529 bp, synthetic construct
  misc_feature 1..2529: note = Variant of DNA polymerase I from Thermus sp. strain 2.9
  source 1..2529: mol_type = other DNA
atgcaccatcatcatcatcatggcggtagcggcatgttaccgttgttcgaacctaaaggtcgcgtgcttctggttgatggccatcatctcgcgtatcgtaacttctttgccctgaaaggattaaccaccagccgtggcgagccggtacagggtgtctacggctttgcaaagtcgctcctgaaagctctgaaagaagacggtgatgtggtgattgttgtctttgatgcgaaagcgccaagttttcgccacgaagcgtacgaagcttacaaagccgggcgtgctccaacgccggaagactttcctcgccaattggcgcttatgaaggaattagtggatttgcttggcctcgaacgcttggaagttcccggtttcgaggcagacgacgtattagcgactctcgcaaagaaagccgaacgtgagggctatgaagtccagatcttgacagcagatcgcgatcttttccagcttttatctccgcgcatctcggtgttacacccggaagggcatcgtatcaccccggaatggctctgggagaaatatggtttgcgtcccgaacaatgggtggattttcgcgccttagcaggcgatccgagcgacaatattccgggagttaaaggtatcggcgagaagacggcgctcaagctccttaaagaatgggggtcgttggagaacttgcttaagaatttagatcaggtcaaaccagagtcagtgcgtgagaagattcttgcacacctcgaagacctcaaattaagccgcgaattgtcccgtgtacgcaccgatttgccgctcgaagttgatttccgtggccgccgcgaacctgacggtgagggtcttaaagcgtttttagagcgtcttgaatttggttcgctcttgcatgaattcggccttttagaaagcccgttaccagccgaagaagcaccttggccaccgcccgaaggcgcgtttttaggttaccgtttgagtcgcccggaaccgatgtgggccgaattattggctcttgcagcgtctgcccagggacgtgtgtatcgcgcggaagaccctcatggtgcgctccgcggcctcaaagaagtccgtggactccttgccaaagacttagctgttgttgcattgcgcgaaggtcttgatttacctccgactgatgatccaatgcttcttgcgtacctcttggacccgtcaaacacgacgcccgaaggcgtagcccgtcgttacggcggcgagtggaccgaagatgcaggcgagcgcgcgttattggccgaacgtttgcacgccaatttattaggacgtttgcaaggcgaggaacgtctcctctggctttacgaagaagtggagaaaccattgagtcgcgtgctcgcgcatatggaagctaccggtgtcaaattagacgtggcgtatttggaggcactcagccttgaagttgctgccgaaatgcgccgcttggaggaagaagtattccgtttagcaggccactcctttaaccttaattctcgcgatcagttagaacgtgtgttgttcgatgaacttggtctccctcctatcggcaagacagagaagaccggtaaacgtagcacttcagcggcggttttagaagctcttcgcgaagtccatcccattgtggacaagatcttgcagtaccgcgaactcgcgaaattgaaaggcacctatattgaccctcttccggcattagtccacccgaaaacgggacgcctccatacccgcttcaaccaaacagccacggcgaccggtcgtttgtcctcctctgatccaaaccttcagaatattccagtacgtaccccattgggccagaagatccgccgcgcgtttgtagctgaggagggttggcgtttagtggccctcgattatagccaaattgaattacgtgtccttgcccatctttctggcgatgagaacctcatccgcgtgtttcaggaaggcaaagacattcacactcaaacggcaagctggatgtttggattatcagctgaagcgatcgatcctttgatgcgtcgtgcagcgaagaccatcaatttcggtgttctctacggtatgagtgcccatcgtttgtcgcaggaattaggcattccctatgaagaagctgcggcgttcattcagcgctactttcaaagctatcccaaagttaaagcatggatcgagaagactctcgaagaaggccgcacacgtggttacgtagagaccttatttggacgtcgccgctatgttcccgatttaaacgctcgcgtgaaatctgtccgtgaagccgccgaacgcatggcgttcaacatgcctgtacagggcacggcagctgacctcatgaaacttgcaatggtgcgcctttttccacaattgcgtgaagttggtgcccgcatgctcttgcaggtccacgatgaactcttgttagaagcgccaaaagagcgtgcggaagaggtggcagccctcgcgaaagaggttatggaaggcgtgtggcccttagcggtgcctcttgaagtcgaagttggtattggcgaggattggttggctgccaaaggataatga

SEQ ID NO: 1618 - protein, 841 aa, synthetic construct
  REGION 1..841: note = Variant of DNA polymerase I from Thermus sp. strain 2.9
MHHHHHHGGSGMLPLFEPKGRVLLVDGHHLAYRNFFALKGLTTSRGEPVQGVYGFAKSLLKALKEDGDVVIVVFDAKAPSFRHEAYEAYKAGRAPTPEDFPRQLALMKELVDLLGLERLEVPGFEADDVLATLAKKAEREGYEVQILTADRDLFQLLSPRISVLHPEGHRITPEWLWEKYGLRPEQWVDFRALAGDPSDNIPGVKGIGEKTALKLLKEWGSLENLLKNLDQVKPESVREKILAHLEDLKLSRELSRVRTDLPLEVDFRGRREPDGEGLKAFLERLEFGSLLHEFGLLESPLPAEEAPWPPPEGAFLGYRLSRPEPMWAELLALAASAQGRVYRAEDPHGALRGLKEVRGLLAKDLAVVALREGLDLPPTDDPMLLAYLLDPSNTTPEGVARRYGGEWTEDAGERALLAERLHANLLGRLQGEERLLWLYEEVEKPLSRVLAHMEATGVKLDVAYLEALSLEVAAEMRRLEEEVFRLAGHSFNLNSRDQLERVLFDELGLPPIGKTEKTGKRSTSAAVLEALREVHPIVDKILQYRELAKLKGTYIDPLPALVHPKTGRLHTRFNQTATATGRLSSSDPNLQNIPVRTPLGQKIRRAFVAEEGWRLVALDYSQIELRVLAHLSGDENLIRVFQEGKDIHTQTASWMFGLSAEAIDPLMRRAAKTINFGVLYGMSAHRLSQELGIPYEEAAAFIQRYFQSYPKVKAWIEKTLEEGRTRGYVETLFGRRRYVPDLNARVKSVREAAERMAFNMPVQGTAADLMKLAMVRLFPQLREVGARMLLQVHDELLLEAPKERAEEVAALAKEVMEGVWPLAVPLEVEVGIGEDWLAAKG

SEQ ID NO: 1619 - DNA, 2529 bp, synthetic construct; identical to SEQ ID NO: 1177
  misc_feature 1..2529: note = Variant of DNA polymerase I from Thermus sp. strain 2.9
  source 1..2529: mol_type = other DNA

SEQ ID NO: 1620 - protein, 841 aa, synthetic construct; identical to SEQ ID NO: 1178
  REGION 1..841: note = Variant of DNA polymerase I from Thermus sp. strain 2.9

SEQ ID NO: 1621 - DNA, 2529 bp, synthetic construct
  misc_feature 1..2529: note = Variant of DNA polymerase I from Thermus sp. strain 2.9
  source 1..2529: mol_type = other DNA
atgcaccatcatcatcaccatggcggtagcggcatgttaccgttgttcgaacctttgggtcgcgtgcttctggttgatggccatcatctcgcgtatcgtaacttctttgccctgaaaggattaaccaccagccgtggcgagccggtacagggtgtctacggctttgcaaagtcgctcctgaaagctctgaaagaagacggtgatgtggtgattgttgtctttgatgcgaaagcgccaagttttcgccacgaagcgtacgaagcttacaaagccgggcgtgctccaacgccggaagactttcctcgccaattggcgcttatgaaggaattagtggatttgcttggcctcgaacgcttggaagttcccggtttcgaggcagacgacgtattagcgactctcgcaaagaaagccgaacgtgagggctatgaagtccagatcttgacagcagatcgcgatcttttccagcttttatctccgcgcatctcggtgttacacccggaagggcatcgtatcaccccggaatggctctgggagaaatatggtttgcgtcccgaacaatgggtggattttcgcgccttagcaggcgatccgagcgacaatattccgggagttaaaggtatcggcgagaagacggcgctcaggctccttaaagaatgggggtcgttggagaacttgcttaagaatttagatcaggtcaaaccagagtcagtgcgtgagaagattcttgcacacctcgaagacctcaaattaagccgcgaattgtcccgtgtacgcaccgatttgccgctcgaagttgatttccgtggccgccgcgaacctgactgggagggtcttaaagcgtttttagagcgtcttgaatttggttcgctcttgcatgaattcggccttttagaaagcccgttaccagccgaagaagcaccttggccaccgcccgaaggcgcgtttttaggttaccgtttgagtcgcccggaaccgatgtgggccgaattattggctcttgcagcgtctgcccagggacgtgtgtatcgcgcggaagaccctcatggtgcgctccgcggcctcaaagaagtccgtggactccttgccaaagacttagctgttgttgcattgcgcgaaggtcttgatttacctccgactgatgatccaatgcttcttgcgtacctcttggacccgtcaaacacgacgcccgaaggcgtagcccgtcgttacggcggcgagtggaccgaagatgcaggcgagcgcgcgttattggccgaacgtttgcacgccaatttattaggacgtttgcaaggcgaggaacgtctcctctggctttacgaagaagtggagaaaccattgagtcgcgtgctcgcgcatatggaagctaccggtgtcaaattagacgtggcgtatttggaggcactcagccttgaagttgctgccgaaatgcgccgcttggaggaagaagtattccgtttagcaggccactcctttaaccttaattctcgcgatcagttagaacgtgtgttgttcgatgaacttggtctccctcctatcggcaagacagagaagaccggtaaacgtagcacttcagcggcggttttagaagctcttcgcgaagtccatcccattgtggacaagatcttgcagtaccgcgaactcgcgaaattgaaaggcacctatattgaccctcttccggcattagtccacccgaaaacgggacgcctccatacccgcttcaaccaaacagccacggcgaccggtcgtttgtcctcctctgatccaaaccttcagaatattccagtacgtaccccattgggccagaagatccgccgcgcgtttgtagctgaggagggttggcgtttagtggccctcgattatagccaaattgaattacgtgtccttgcccatctttctggcgatgagaacctcatccgcgtgtttcaggaaggcaaagacattcacactcaaacggcaagctggatgtttggattatcagctgaagcgatcgatcctttgatgcgtcgtgcagcgaagaccatcaatttcggtgttctctacggtatgagtgcccatcgtttgtcgcaggaattaggcattccctatgaagaagctgcggcgttcattcagcgctactttcaaagctatcccaaagttaaagcatggatcgagaagactctcgaagaaggccgcacacgtggttacgtagagaccttatttggacgtcgccgctatgttcccgatttaaacgctcgcgtgaaatctgtccgtgaagccgccgaacgcatggcgttcaacatgcctgtacagggcacggcagctgacctcatgaaacttgcaatggtgcgcctttttccacaattgcgtgaagttggtgcccgcatgctcttgcaggtccacgatgaactcttgttagaagcgccaaaagagcgtgcggaagaggtggcagccctcgcgaaagaggttatggaaggcgtgtggcccttagcggtgcctcttgaagtcgaagttggtattggcgaggattggttggctgccaaaggataatga

SEQ ID NO: 1622 - protein, 841 aa, synthetic construct
  REGION 1..841: note = Variant of DNA polymerase I from Thermus sp. strain 2.9
MHHHHHHGGSGMLPLFEPLGRVLLVDGHHLAYRNFFALKGLTTSRGEPVQGVYGFAKSLLKALKEDGDVVIVVFDAKAPSFRHEAYEAYKAGRAPTPEDFPRQLALMKELVDLLGLERLEVPGFEADDVLATLAKKAEREGYEVQILTADRDLFQLLSPRISVLHPEGHRITPEWLWEKYGLRPEQWVDFRALAGDPSDNIPGVKGIGEKTALRLLKEWGSLENLLKNLDQVKPESVREKILAHLEDLKLSRELSRVRTDLPLEVDFRGRREPDWEGLKAFLERLEFGSLLHEFGLLESPLPAEEAPWPPPEGAFLGYRLSRPEPMWAELLALAASAQGRVYRAEDPHGALRGLKEVRGLLAKDLAVVALREGLDLPPTDDPMLLAYLLDPSNTTPEGVARRYGGEWTEDAGERALLAERLHANLLGRLQGEERLLWLYEEVEKPLSRVLAHMEATGVKLDVAYLEALSLEVAAEMRRLEEEVFRLAGHSFNLNSRDQLERVLFDELGLPPIGKTEKTGKRSTSAAVLEALREVHPIVDKILQYRELAKLKGTYIDPLPALVHPKTGRLHTRFNQTATATGRLSSSDPNLQNIPVRTPLGQKIRRAFVAEEGWRLVALDYSQIELRVLAHLSGDENLIRVFQEGKDIHTQTASWMFGLSAEAIDPLMRRAAKTINFGVLYGMSAHRLSQELGIPYEEAAAFIQRYFQSYPKVKAWIEKTLEEGRTRGYVETLFGRRRYVPDLNARVKSVREAAERMAFNMPVQGTAADLMKLAMVRLFPQLREVGARMLLQVHDELLLEAPKERAEEVAALAKEVMEGVWPLAVPLEVEVGIGEDWLAAKG

SEQ ID NO: 1623 - DNA, 2529 bp, synthetic construct
  misc_feature 1..2529: note = Variant of DNA polymerase I from Thermus sp. strain 2.9
  source 1..2529: mol_type = other DNA
atgcaccatcatcatcatcatggcggtagcggcatgttaccgttgttcgaacctaaaggtcgcgtgcttctggttgatggccatcatctcgcgtatcgtaacttctttgccctgaaaggattaaccaccagccgtggcgagccggtacagggtgtctacggctttgcaaagtcgctcctgaaagctctgaaagaagacggtgatgtggtgattgttgtctttgatgcgaaagcgccaagttttcgccacgaagcgtacgaagcttacaaagccgggcgtgctccaacgccggaagactttcctcgccaattggcgcttatgaaggaattagtggatttgcttggcctcgaacgcttggaagttcccggtttcgaggcagacgacgtattagcgactctcgcaaagaaagccgaacgtgagggctatgaagtccagatcttgacagcagatcgcgatcttttccagcttttatctccgcgcatctcggtgttacacccggaagggcatcgtatcaccccggaatggctctgggagaaatatggtttgcgtcccgaacaatgggtggattttcgcgccttagcaggcgatccgagcgacaatattccgggagttaaaggtatcggcgagaagacggcgctcaagctccttaaagaatgggggtcgttggagaacttgcttaagaatttagatcaggtcaaaccagagtcagtgcgtgagaagattcttgcacacctcgaagacctcaaattaagccgcgaattgtcccgtgtacgcaccgatttgccgctcgaagttgatttccgtggccgccgcgaacctgactgggagggtcttaaagcgtttttagagcgtcttgaatttggttcgctcttgcatgaattcggccttttagaaagcccgttaccagccgaagaagcaccttggccaccgcccgaaggcgcgtttttaggttaccgtttgagtcgcccggaaccgatgtgggccgaattattggctcttgcagcgtctgcccagggacgtgtgtatcgcgcgggggaccctcatggtgcgctccgcggcctcaaagaagtccgtggactccttgccaaagacttagctgttgttgcattgcgcgaaggtcttgatttacctccgactgatgatccaatgcttcttgcgtacctcttggacccgtcaaacacgacgcccgaaggcgtagcccgtcgttacggcggcgagtggaccgaagatgcaggcgagcgcgcgttattggccgaacgtttgcacgccaatttattaggacgtttgcaaggcgaggaacgtctcctctggctttacgaagaagtggagaaaccattgagtcgcgtgctcgcgcatatggaagctaccggtgtcaaattagacgtggcgtatttggaggcactcagccttgaagttgctgccgaaatgcgccgcttggaggaagaagtattccgtttagcaggccactcctttaaccttaattctcgcgatcagttagaacgtgtgttgttcgatgaacttggtctccctcctatcggcaagacagagaagaccggtaaacgtagcacttcagcggcggttttagaagctcttcgcgaagtccatcccattgtggacaagatcttgcagtaccgcgaactcgcgaaattgaaaggcacctatattgaccctcttccggcattagtccacccgaaaacgggacgcctccatacccgcttcaaccaaacagccacggcgaccggtcgtttgtcctcctctgatccaaaccttcagaatattccagtacgtaccccattgggccagaagatccgccgcgcgtttgtagctgaggagggttggcgtttagtggccctcgattatagccaaattgaattacgtgtccttgcccatctttctggcgatgagaacctcatccgcgtgtttcaggaaggcaaagacattcacactcaaacggcaagctggatgtttggattatcagctgaagcgatcgatcctttgatgcgtcgtgcagcgaagaccatcaatttcggtgttctctacggtatgagtgcccatcgtttgtcgcaggaattaggcattccctatgaagaagctgcggcgttcattcagcgctactttcaaagctatcccaaagttaaagcatggatcgagaagactctcgaagaaggccgcacacgtggttacgtagagaccttatttggacgtcgccgctatgttcccgatttaaacgctcgcgtgaaatctgtccgtgaagccgccgaacgcatggcgttcaacatgcctgtacagggcacggcagctgacctcatgaaacttgcaatggtgcgcctttttccacaattgcgtgaagttggtgcccgcatgctcttgcaggtccacgatgaactcttgttagaagcgccaaaagagcgtgcggaagaggtggcagccctcgcgaaagaggttatggaaggcgtgtggcccttagcggtgcctcttgaagtcgaagttggtattggcgaggattggttggctgccaaaggataatga

SEQ ID NO: 1624 - protein, 841 aa, synthetic construct
  REGION 1..841: note = Variant of DNA polymerase I from Thermus sp. strain 2.9
MHHHHHHGGSGMLPLFEPKGRVLLVDGHHLAYRNFFALKGLTTSRGEPVQGVYGFAKSLLKALKEDGDVVIVVFDAKAPSFRHEAYEAYKAGRAPTPEDFPRQLALMKELVDLLGLERLEVPGFEADDVLATLAKKAEREGYEVQILTADRDLFQLLSPRISVLHPEGHRITPEWLWEKYGLRPEQWVDFRALAGDPSDNIPGVKGIGEKTALKLLKEWGSLENLLKNLDQVKPESVREKILAHLEDLKLSRELSRVRTDLPLEVDFRGRREPDWEGLKAFLERLEFGSLLHEFGLLESPLPAEEAPWPPPEGAFLGYRLSRPEPMWAELLALAASAQGRVYRAGDPHGALRGLKEVRGLLAKDLAVVALREGLDLPPTDDPMLLAYLLDPSNTTPEGVARRYGGEWTEDAGERALLAERLHANLLGRLQGEERLLWLYEEVEKPLSRVLAHMEATGVKLDVAYLEALSLEVAAEMRRLEEEVFRLAGHSFNLNSRDQLERVLFDELGLPPIGKTEKTGKRSTSAAVLEALREVHPIVDKILQYRELAKLKGTYIDPLPALVHPKTGRLHTRFNQTATATGRLSSSDPNLQNIPVRTPLGQKIRRAFVAEEGWRLVALDYSQIELRVLAHLSGDENLIRVFQEGKDIHTQTASWMFGLSAEAIDPLMRRAAKTINFGVLYGMSAHRLSQELGIPYEEAAAFIQRYFQSYPKVKAWIEKTLEEGRTRGYVETLFGRRRYVPDLNARVKSVREAAERMAFNMPVQGTAADLMKLAMVRLFPQLREVGARMLLQVHDELLLEAPKERAEEVAALAKEVMEGVWPLAVPLEVEVGIGEDWLAAKG

SEQ ID NO: 1625 - DNA, 2529 bp, synthetic construct
  misc_feature 1..2529: note = Variant of DNA polymerase I from Thermus sp. strain 2.9
  source 1..2529: mol_type = other DNA
atgcaccatcatcatcatcatggcggtagcggcatgttaccgttgttcgaacctaaaggtcgcgtgcttctggttgatggccatcatctcgcgtatcgtaacttctttgccctgaaaggattaaccaccagccgtggcgagccggtacagggtgtctacggctttgcaaagtcgctcctgaaagctctgaaagaagacggtgatgtggtgattgttgtctttgatgcgaaagcgccaagttttcgccacgaagcgtacgaagcttacaaagccgggcgtgctccaacgccggaagactttcctcgccaattggcgcttatgaaggaattagtggatttgcttggcctcgaacgcttggaagttcccggtttcgaggcagacgacgtattagcgactctcgcaaagaaagccgaacgtgagggctatgaagtccagatcttgacagcagatcgcgatcttttccagcttttatctccgcgcatctcggtgttacacccggaagggcatcgtatcaccccggaatggctctgggagaaatatggtttgcgtcccgaacaatgggtggattttcgcgccttagcaggcgatccgagcgacaatattccgggagttaaaggtatcggcgagaagacggcgctcaagctccttaaagaatgggggtcgttggagaacttgcttaagaatttagatcaggtcaaaccagagtcagtgcgtgagaagattcttgcacacctcgaagacctcaaattaagccgcgaattgtcccgtgtacgcaccgatttgccgctcgaagttgatttccgtggccgccgcgaacctgactgggagggtcttaaagcgtttttagagcgtcttgaatttggttcgctcttgcatgaattcggtcttttagaaagcccgttaccagccgaagaagcaccttggccaccgcccgaaggcgcgtttttaggttaccgtttgagtcgcccggaaccgatgtgggccgaattattggctcttgcagcgtctgcccagggacgtgtgtatcgcgcggaagaccctcatggtgcgctccgcggcctcaaagaagtccgtggactccttgccaaagacttagctgttgttgcattgcgcgaaggtcttgatttacctccgactgatgatccaatgcttcttgcgtacctcttggacccgtcaaacacgacgcccgaaggcgtagcccgtcgttacggcggcgagtggaccgaagatgcaggcgagcgcgcgttattggccgaacgtttgcacgccaatttattaggacgtttgcaaggcgaggaacgtctcctctggctttacgaagaagtggagaaaccattgagtcgcgtgctcgcgcatatggaagctaccggtgtcaaattagacgtggcgtatttggaggcactcagccgtgaagttgctgccgaaatgcgccgcttggaggaagaagtattccgtttagcaggccactcctttaaccttaattctcgcgatcagttagaacgtgtgttgttcgatgaacttggtctccctcctatcggcaagacagagaagaccggtaaacgtagcacttcagcggcggttttagaagctcttcgcgaagtccatcccattgtggacaagatcttgcagtaccgcgaactcgcgaaattgaaaggcacctatattgaccctcttccggcattagtccacccgaaaacgggacgcctccatacccgcttcaaccaaacagccacggcgaccggtcgtttgtcctcctctgatccaaaccttcagaatattccagtacgtaccccattgggccagaagatccgccgcgcgtttgtagctgaggagggttggcgtttagtggccctcgattatagccaaattgaattacgtgtccttgcccatctttctggcgatgagaacctcatccgcgtgtttcaggaaggcaaagacattcacactcaaacggcaagctggatgtttggattatcagctgaagcgatcgatcctttgatgcgtcgtgcagcgaagaccatcaatttcggtgttctctacggtatgagtgcccatcgtttgtcgcaggaattaggcattccctatgaagaagctgcggcgttcattcagcgctactttcaaagctatcccaaagttaaagcatggatcgagaagactctcgaagaaggccgcacacgtggttacgtagagaccttatttggacgtcgccgctatgttcccgatttaaacgctcgcgtgaaatctgtccgtgaagccgccgaacgcatggcgttcaacatgcctgtacagggcacggcagctgacctcatgaaacttgcaatggtgcgcctttttccacaattgcgtgaagttggtgcccgcatgctcttgcaggtccacgatgaactcttgttagaagcgccaaaagagcgtgcggaagaggtggcagccctcgcgaaagaggttatggaaggcgtgtggcccttagcggtgcctcttgaagtcgaagttggtattggcgaggattggttggctgccaaaggataatga

SEQ ID NO: 1626 - protein, 841 aa, synthetic construct
  REGION 1..841: note = Variant of DNA polymerase I from Thermus sp. strain 2.9
MHHHHHHGGSGMLPLFEPKGRVLLVDGHHLAYRNFFALKGLTTSRGEPVQGVYGFAKSLLKALKEDGDVVIVVFDAKAPSFRHEAYEAYKAGRAPTPEDFPRQLALMKELVDLLGLERLEVPGFEADDVLATLAKKAEREGYEVQILTADRDLFQLLSPRISVLHPEGHRITPEWLWEKYGLRPEQWVDFRALAGDPSDNIPGVKGIGEKTALKLLKEWGSLENLLKNLDQVKPESVREKILAHLEDLKLSRELSRVRTDLPLEVDFRGRREPDWEGLKAFLERLEFGSLLHEFGLLESPLPAEEAPWPPPEGAFLGYRLSRPEPMWAELLALAASAQGRVYRAEDPHGALRGLKEVRGLLAKDLAVVALREGLDLPPTDDPMLLAYLLDPSNTTPEGVARRYGGEWTEDAGERALLAERLHANLLGRLQGEERLLWLYEEVEKPLSRVLAHMEATGVKLDVAYLEALSREVAAEMRRLEEEVFRLAGHSFNLNSRDQLERVLFDELGLPPIGKTEKTGKRSTSAAVLEALREVHPIVDKILQYRELAKLKGTYIDPLPALVHPKTGRLHTRFNQTATATGRLSSSDPNLQNIPVRTPLGQKIRRAFVAEEGWRLVALDYSQIELRVLAHLSGDENLIRVFQEGKDIHTQTASWMFGLSAEAIDPLMRRAAKTINFGVLYGMSAHRLSQELGIPYEEAAAFIQRYFQSYPKVKAWIEKTLEEGRTRGYVETLFGRRRYVPDLNARVKSVREAAERMAFNMPVQGTAADLMKLAMVRLFPQLREVGARMLLQVHDELLLEAPKERAEEVAALAKEVMEGVWPLAVPLEVEVGIGEDWLAAKG

SEQ ID NO: 1627 - DNA, 2529 bp, synthetic construct; identical to SEQ ID NO: 995
  misc_feature 1..2529: note = Variant of DNA polymerase I from Thermus sp. strain 2.9
  source 1..2529: mol_type = other DNA

SEQ ID NO: 1628 - protein, 841 aa, synthetic construct; identical to SEQ ID NO: 996
  REGION 1..841: note = Variant of DNA polymerase I from Thermus sp. strain 2.9

SEQ ID NO: 1629 - DNA, 2529 bp, synthetic construct
  misc_feature 1..2529: note = Variant of DNA polymerase I from Thermus sp. strain 2.9
  source 1..2529: mol_type = other DNA
atgcaccatcatcatcatcatggcggtagcggcatgttaccgttgttcgaacctaaaggtcgcgtgcttctggttgatggccatcatctcgcgtatcgtaacttctttgccctgaaaggattaaccaccagccgtggcgagccggtacagggtgtctacggctttgcaaagtcgctcctgaaagctctgaaagaagacggtgatgtggtgattgttgtctttgatgcgaaagcgccaagttttcgccacgaagcgtacgaagcttacaaagccgggcgtgctccaacgccggaagactttcctcgccaattggcgcttatgaaggaattagtggatttgcttggcctcgaacgcttggaagttcccggtttcgaggcagacgacgtattagcgactctcgcaaagaaagccgaacgtgagggctatgaagtccagatcttgacagcagatcgcgatcttttccagcttttatctccgcgcatctcggtgttacacccggaagggcatcgtatcaccccggaatggctctgggagaaatatggtttgcgtcccgaacaatgggtggattttcgcgccttagcaggcgatccgagcgacaatattccgggagttaaaggtatcggcgagaagacggcgctcaagctccttaaagaatgggggtcgttggagaacttgcttaagaatttagatcaggtcaaaccagagtcagtgcgtgagaagattcttgcacacctcgaagacctcaaattaagccgcgaattgtcccgtgtacgcaccgatttgccgctcgaagttgatttccgtggccgccgcgaacctgactgggagggtcttaaagcgtttttagagcgtcttgaatttggttcgctcttgcatgaattcggccttttagaaagcccgttaccagccgaagaagcaccttggccaccgcccgaaggcgcgtttttaggttaccgtttgagtcgcccggaaccgatgtgggccgaattattggctcttgcagcgtctgcccagggacgtgtgtatcgcgcggaagaccctcatggtgcgctccgcggcctcaaagaagtccgtggactccttgccaaagacttagctgtcgttgcattgcgcgaaggtcttgatttacctccgactgatgatccaatgcttcttgcgtacctcttggacccgtcaaacacgacgcccgaaggcgtagcccgtcgttacggcggcgagtggaccgaagatgcaggcgagcgcgcgttattggccgaacgtttgcacgccaatttattaggacgtttgcaaggcgaggaacgtctcctctggctttacgaagaagtggagaaaccattgagtcgcgtgctcgcgcatatggaagctaccggtgtcaaattagacgtggcgtatttggaggcactcagccttgaagttgctgccgaaatgcgccgcttggaggaagaagtattccgtttagcaggccactcctttaaccttaattctcgcgatcagttagaacgtgtgttgttcgatgaacttggtctccctcctatcggcaagacagagaagaccggtaaacgtagcacttcagcggcggttttagaagctcttcgcgaagtccatcccattgtggacaagatcttgcagtaccgcgaactcgcgaaattgaaaggcacctatattgaccctcttccggcattagtccacccgaaaacgggacgcctccatacccgcttcaaccaaacagccacggcgaccggtcgtttgtcctcctctgatccaaaccttcagaatattccagtacgtacccttttgggccagaagatccgccgcgcgtttgtagctgaggagggttggcgtttagtggccctcgattatagccaaattgaattacgtgtccttgcccatctttctggcgatgagaacctcatccgcgtgtttcaggaaggcaaagacattcacactcaaacggcaagctggatgtttggattatcagctgaagcgatcgatcctttgatgcgtcgtgcagcgaagaccatcaatttcggtgttctctacggtatgagtgcccatcgtttgtcgcaggaattaggcattccctatgaagaagctgcggcgttcattcagcgctacttccaaagctatcccaaagttaaagcatggatcgagaagactctcgaagaaggccgcacacgtggttacgtagagaccttatttggacgtcgccgctatgttcccgatttaaacgctcgcgtgaaatctgtccgtgaagccgccgaacgcatggcgttcaacatgcctgtacagggcacggcagctgacctcatgaaacttgcaatggtgcgcctttttccacaattgcgtgaagttggtgcccgcatgctcttgcaggtccacgatgaactcttgttagaagcgccaaaagagcgtgcggaagaggtggcagccctcgcgaaagaggttatggaaggcgtgtggcccttagcggtgcctcttgaagtcgaagttggtattggcgaggattggttggctgccaaaggataatga

SEQ ID NO: 1630 - protein, 841 aa, synthetic construct; identical to SEQ ID NO: 1442
  REGION 1..841: note = Variant of DNA polymerase I from Thermus sp. strain 2.9

SEQ ID NO: 1631 - DNA, 2529 bp, synthetic construct
  misc_feature 1..2529: note = Variant of DNA polymerase I from Thermus sp. strain 2.9
  source 1..2529: mol_type = other DNA
atgcaccatcatcatcatcatggcggtagcggcatgttaccgttgttcgaacctaaaggtcgcgtgcttctggttgatggccatcatctcgcgtatcgtaacttctttgccctgaaaggattaaccaccagccgtggcgagccggtacagggtgtctacggctttgcaaagtcgctcctgaaagctctgaaagaagacggtgatgtggtgattgttgtctttgatgcgaaagcgccaagttttcgccacaatgcgtacgaagcttacaaagccgggcgtgctccaacgccggaagactttcctcgccaattggcgcttatgaaggaattagtggatttgcttggcctcgaacgcttggaagttcccggtttcgaggcagacgacgtattagcgactctcgcaaagaaagccgaacgtgagggctatgaagtccagatcttgacagcagatcgcgatcttttccagcttttatctccgcgcatctcggtgttacacccggaagggcatcgtatcaccccggaatggctctgggagaaatatggtttgcgtcccgaacaatgggtggattttcgcgccttagcaggcgatccgagcgacaatattccgggagttaaaggtatcggcgagaagacggcgctcaagctccttaaagaatgggggtcgttggagaacttgcttaagaatttagatcaggtcaaaccagagtcagtgcgtgagaagattcttgcacacctcgaagacctcaaattaagccgcgaattgtcccgtgtacgcaccgatttgccgctcgaagttgatttccgtggccgccgcgaacctgactgggagggtcttaaagcgtttttagagcgtcttgaatttggttcgctcttgcatgaattcggccttttagaaagcccgttaccagccgaagaagcaccttggccaccgcccgaaggcgcgtttttaggttaccgtttgagtcgcccggaaccgatgtgggccgaattattggctcttgcagcgtctgcccagggacgtgtgtatcgcgcggaagaccctcatggtgcgctccgcggcctcaaagaagtccgtggactccttgccaaagacttagctgttgttgcattgcgcgaaggtcttgatttacctccgactgatgatccaatgcttcttgcgtacctcttggacccgtcaaacacgacgcccgaaggcgtagcccgtcgttacggcggcgagtggaccgaagatgcaggcgagcgcgcgttattggccgaacgtttgcacgccaatttattaggacgtttgcaaggcgaggaacgtctcctctggctttacgaagaagtggagaaaccattgagtcgcgtgctcgcgcatatggaagctaccggtgtcaaattagacgtggcgtatttggaggcactcagccttgaagttgctgccgaaatgcgccgcttggaggaagaagtattccgtttagcaggccactcctttaaccttaattctcgcgatcagttagaacgtgtgttgttcgatgaacttggtctccctcctatcggcaagacagagaagaccggtaaacgtagcacttcagcggcggttttagaagctcttcgcgaagtccatcccattgtggacaagatcttgcagtaccgcgaactcgcgaaattgaaaggcacctatattgaccctcttccggcattagtccacccgaaaacgggacgcctccatacccgcttcaaccaaacagccacggcgaccggtcgtttgtcctcctctgatccaaaccttcagaatattccagtacgtaccccattgggccagaagatccgccgcgcgtttgtagctgaggagggttggcgtttagtggccctcgattatagccaaattgaattacgtgtccttgcccatctttctggcgatgagaacctcatccgcgtgtttcaggaaggcaaagacattcacactcaaacggcaagctggatgtttggattatcagctgaagcgatcgatcctttgatgcgtcgtgcagcgaagaccatcaatttcggtgttctctacggtatgagtgcccatcgtttgtcgcaggaattaggcattccctatgaagaagctgcggcgttcattcagcgctactttcaaagctatcccaaagttaaagcatggatcgagaagactctcgaagaaggccgcacacgtggttacgtagagaccttatttggacgtcgccgctatgttcccgatttaaacgctcgcgtgaaatctgtccgtgaagccgccgaacgcatggcgttcaacatgcctgtacagggcacggcagctgacctcatgaaacttgcaatggtgcgcctttttccacaattgcgtgaagttggtgcccgcatgctcttgcaggtccacgatgaactcttgttagaagcgccaaaagagcgtgcggaagaggtggcagccctcgcgaaagaggttatggaaggcgtgtggcccttagcggtgcctcttgaagtcgaagttggtattggcgaggattggttggctgccaaaggataatga

SEQ ID NO: 1632 - protein, 841 aa, synthetic construct
  REGION 1..841: note = Variant of DNA polymerase I from Thermus sp. strain 2.9
MHHHHHHGGSGMLPLFEPKGRVLLVDGHHLAYRNFFALKGLTTSRGEPVQGVYGFAKSLLKALKEDGDVVIVVFDAKAPSFRHNAYEAYKAGRAPTPEDFPRQLALMKELVDLLGLERLEVPGFEADDVLATLAKKAEREGYEVQILTADRDLFQLLSPRISVLHPEGHRITPEWLWEKYGLRPEQWVDFRALAGDPSDNIPGVKGIGEKTALKLLKEWGSLENLLKNLDQVKPESVREKILAHLEDLKLSRELSRVRTDLPLEVDFRGRREPDWEGLKAFLERLEFGSLLHEFGLLESPLPAEEAPWPPPEGAFLGYRLSRPEPMWAELLALAASAQGRVYRAEDPHGALRGLKEVRGLLAKDLAVVALREGLDLPPTDDPMLLAYLLDPSNTTPEGVARRYGGEWTEDAGERALLAERLHANLLGRLQGEERLLWLYEEVEKPLSRVLAHMEATGVKLDVAYLEALSLEVAAEMRRLEEEVFRLAGHSFNLNSRDQLERVLFDELGLPPIGKTEKTGKRSTSAAVLEALREVHPIVDKILQYRELAKLKGTYIDPLPALVHPKTGRLHTRFNQTATATGRLSSSDPNLQNIPVRTPLGQKIRRAFVAEEGWRLVALDYSQIELRVLAHLSGDENLIRVFQEGKDIHTQTASWMFGLSAEAIDPLMRRAAKTINFGVLYGMSAHRLSQELGIPYEEAAAFIQRYFQSYPKVKAWIEKTLEEGRTRGYVETLFGRRRYVPDLNARVKSVREAAERMAFNMPVQGTAADLMKLAMVRLFPQLREVGARMLLQVHDELLLEAPKERAEEVAALAKEVMEGVWPLAVPLEVEVGIGEDWLAAKG

SEQ ID NO: 1633 - DNA, 2529 bp, synthetic construct
  misc_feature 1..2529: note = Variant of DNA polymerase I from Thermus sp. strain 2.9
  source 1..2529: mol_type = other DNA
atgcaccatcatcatcatcatggcggtagcggcatgttaccgttgttcgaacctaaaggtcgcgtgcttctggttgatggccatcatctcgcgtatcgtaacttctttgccctgaaaggattaaccaccagccgtggcgagccggtacagggtgtctacggctttgcaaagtcgctcctgaaagctctgaaagaagacggtgatgtggtgattgttgtctttgatgcgaaagcgccaagttttcgccacgaagcgtacgaagcttacaaagccgggcgtgctccaacgccggaagactttcctcgccaattggcgcttatgaaggaattagtggatttgcttggcctcgaacgcttggaagttcccggtttcgaggcagacgacgtattagcgactctcgcaaagaaagccgaacgtgagggctatgaagtccagatcttgacagcagatcgcgatcttttccagcttttatctccgcgcatctcggtgttacacccggaagggcatcgtatcaccccggaatggctctgggagaaatatggtttgcgtcccgaacaatgggtggattttcgcgccttagcaggcgatccgagcgacaatattccgggagttaaaggtatcggcgagaagacggcgctcaagctccttaaagaatgggggtcgttggagaacttgcttaagaatttagatcaggtcaaaccagagtcagtgcgtgagaagattcttgcacacctcgaagacctcaaattaagccgcgaattgtcccgtgtacgcaccgatttgccgctcgaagttgatttccgtggccgccgcgaacctgacgtggagggtcttaaagcgtttttagagcgtcttgaatttggttcgctcttgcatgaattcggccttttagaaagcccgttaccagccgaagaagcaccttggccaccgcccgaaggcgcgtttttaggttaccgtttgagtcgcccggaaccgatgtgggccgaattattggctcttgcagcgtctgcccagggacgtgtgtatcgcgcggaagaccctcatggtgcgctccgcggcctcaaagaagtccgtggactccttgccaaagacttagctgttgttgcattgcgcgaaggtcttgatttacctccgactgatgatccaatgcttcttgcgtacctcttggacccgtcaaacacgacgcccgaaggcgtagcccgtcgttacggcggcgagtggaccgaagatgcaggcgagcgcgcgttattggccgaacgtttgcacgccaatttattaggacgtttgcaaggcgaggaacgtctcctctggctttacgaagaagtggagaaaccattgagtcgcgtgctcgcgcatatggaagctaccggtgtcaaattagacgtggcgtatttggaggcactcagccttgaagttgctgccgaaatgcgccgcttggaggaagaagtattccgtttagcaggccactcctttaaccttaattctcgcgatcagttagaacgtgtgttgttcgatgaacttggtctccctcctatcggcaagacagagaagaccggtaaacgtagcacttcagcggcggttttagaagctcttcgcgaagtccatcccattgtggacaagatcttgcagtaccgcgaactcgcgaaattgaaaggcacctatattgaccctcttccggcattagtccacccgaaaacgggacgcctccatacccgcttcaaccaaacagccacggcgaccggtcgtttgtcctcctctgatccaaaccttcagaatattccagtacgtaccccattgggccagaagatccgccgcgcgtttgtagctgaggagggttggcgtttagtggccctcgattatagccaaattgaattacgtgtccttgcccatctttctggcgatgagaacctcatccgcgtgtttcaggaaggcaaagacattcacactcaaacggcaagctggatgtttggattatcagctgaagcgatcgatcctttgatgcgtcgtgcagcgaagaccatcaatttcggtgttctctacggtatgagtgcccatcgtttgtcgcaggaattaggcattccctatgaagaagctgcggcgttcattcagcgctactttcaaagctatcccaaagttaaagcatggatcgagaagactctcgaagaaggccgcacacgtggttacgtagagaccttatttggacgtcgccgctatgttcccgatttaaacgctcgcgtgaaatctgtccgtgaagccgccgaacgcatggcgttcaacatgcctgtacagggcacggcagctgacctcatgaaacttgcaatggtgcgcctttttccacaattgcgtgaagttggtgcccgcatgctcttgcaggtccacgatgaactcttgttagaagcgccaaaagagcgtgcggaagaggtggcagccctcgcgaaagaggttatggaaggcgtgtggcccttagcggtgcctcttgaagtcgaagttggtattggcgaggattggttggctgccaaaggataatga

SEQ ID NO: 1634 - protein, 841 aa, synthetic construct
  REGION 1..841: note = Variant of DNA polymerase I from Thermus sp. strain 2.9
MHHHHHHGGSGMLPLFEPKGRVLLVDGHHLAYRNFFALKGLTTSRGEPVQGVYGFAKSLLKALKEDGDVVIVVFDAKAPSFRHEAYEAYKAGRAPTPEDFPRQLALMKELVDLLGLERLEVPGFEADDVLATLAKKAEREGYEVQILTADRDLFQLLSPRISVLHPEGHRITPEWLWEKYGLRPEQWVDFRALAGDPSDNIPGVKGIGEKTALKLLKEWGSLENLLKNLDQVKPESVREKILAHLEDLKLSRELSRVRTDLPLEVDFRGRREPDVEGLKAFLERLEFGSLLHEFGLLESPLPAEEAPWPPPEGAFLGYRLSRPEPMWAELLALAASAQGRVYRAEDPHGALRGLKEVRGLLAKDLAVVALREGLDLPPTDDPMLLAYLLDPSNTTPEGVARRYGGEWTEDAGERALLAERLHANLLGRLQGEERLLWLYEEVEKPLSRVLAHMEATGVKLDVAYLEALSLEVAAEMRRLEEEVFRLAGHSFNLNSRDQLERVLFDELGLPPIGKTEKTGKRSTSAAVLEALREVHPIVDKILQYRELAKLKGTYIDPLPALVHPKTGRLHTRFNQTATATGRLSSSDPNLQNIPVRTPLGQKIRRAFVAEEGWRLVALDYSQIELRVLAHLSGDENLIRVFQEGKDIHTQTASWMFGLSAEAIDPLMRRAAKTINFGVLYGMSAHRLSQELGIPYEEAAAFIQRYFQSYPKVKAWIEKTLEEGRTRGYVETLFGRRRYVPDLNARVKSVREAAERMAFNMPVQGTAADLMKLAMVRLFPQLREVGARMLLQVHDELLLEAPKERAEEVAALAKEVMEGVWPLAVPLEVEVGIGEDWLAAKG

SEQ ID NO: 1635 - DNA, 2529 bp, synthetic construct
  misc_feature 1..2529: note = Variant of DNA polymerase I from Thermus sp. strain 2.9
  source 1..2529: mol_type = other DNA
atgcaccatcatcatcatcatggcggtagcggcatgttaccgttgttcgaacctaaaggtcgcgtgcttctggttgatggccatcatctcgcgtatcgtaacttctttgccctgaaaggattaaccaccagccgtggcgagccggtacagggtgtctacggctttgcaaagtcgctcctgaaagctctgaaagaagacggtgatgtggtgattgttgtctttgatgcgaaagcgccaagttttcgccacgaagcgtacgaagcttacaaagccgggcgtgctccaacgccggaagactttcctcgccaattggcgcttatgaaggaattagtggatttgcttggcctcgaacgcttggaagttcccggtttcgaggcagacgacgtattagcgactctcgcaaagaaagccgaacgtgagggctatgaagtccagatcttgacagcagatcgcgatcttttccagcttttatctccgcgcatctcggtgttacacccggaagggcatcgtatcaccccggaatggctctgggagaaatatggtttgcgtcccgaacaatgggtggattttcgcgccttagcaggcgatccgagcgacaatattccgggagttaaaggtatcggcgagaagacggcgctcaagctccttaaagaatgggggtcgttggagaacttgcttaagaatttagatcaggtcaaaccagagtcagtgcgtgagaagattcttgcacacctcgaagacctcaaattaagccgcgaattgtcccgtgtacgcaccgatttgccgctcgaagttgatttccgttgccgccgcgaacctgactgggagggtcttaaagcgtttttagagcgtcttgaatttggttcgctcttgcatgaattcggccttttagaaagcccgttaccagccgaagaagcaccttggccaccgcccgaaggcgcgtttttaggttaccgtttgagtcgcccggaaccgatgtgggccgaattattggctcttgcagcgtctgcccagggacgtgtgtatcgcgcggaagaccctcatggtgcgctccgcggcctcaaagaagtccgtggactccttgccaaagacttagctgttgttgcattgcgcgaaggtcttgatttacctccgactgatgatccaatgcttcttgcgtacctcttggacccgtcaaacacgacgcccgaaggcgtagcccgtcgttacggcggcgagtggaccgaagatgcaggcgagcgcgcgttattggccgaacgtttgcacgccaatttattaggacgtttgcaaggcgaggaacgtctcctctggctttacgaagaagtggagaaaccattgagtcgcgtgctcgcgcatatggaagctaccggtgtcaaattagacgtggcgtatttggaggcactcagccttgaagttgctgccgaaatgcgccgcttggaggaagaagtattccgtttagcaggccactcctttaaccttaattctcgcgatcagttagaacgtgtgttgttcgatgaacttggtctccctcctatcggcaagacagagaagaccggtaaacgtagcacttcagcggcggttttagaagctcttcgcgaagtccatcccattgtggacaagatcttgcagtaccgcgaactcgcgaaattgaaaggcacctatattgaccctcttccggcattagtccacccgaaaacgggacgcctccatacccgcttcaaccaaacagccacggcgaccggtcgtttgtcctcctctgatccaaaccttcagaatattccagtacgtaccccattgggccagaagatccgccgcgcgtttgtagctgaggagggttggcgtttagtggccctcgattatagccaaattgaattacgtgtccttgcccatctttctggcgatgagaacctcatccgcgtgtttcaggaaggcaaagacattcacactcaaacggcaagctggatgtttggattatcagctgaagcgatcgatcctttgatgcgtcgtgcagcgaagaccatcaatttcggtgttctctacggtatgagtgcccatcgtttgtcgcaggaattaggcattccccgggaagaagctgcggcgttcattcagcgctactttcaaagctatcccaaagttaaagcatggatcgagaagactctcgaagaaggccgcacacgtggttacgtagagaccttatttggacgtcgccgctatgttcccgatttaaacgctcgcgtgaaatctgtccgtgaagccgccgaacgcatggcgttcaacatgcctgtacagggcacggcagctgacctcatgaaacttgcaatggtgcgcctttttccacaattgcgtgaagttggtgcccgcatgctcttgcaggtccacgatgaactcttgttagaagcgccaaaagagcgtgcggaagaggtggcagccctcgcgaaagaggttatggaaggcgtgtggcccttagcggtgcctcttgaagtcgaagttggtattggcgaggattggttggctgccaaaggataatga

SEQ ID NO: 1636 - protein, 841 aa, synthetic construct
  REGION 1..841: note = Variant of DNA polymerase I from Thermus sp. strain 2.9
MHHHHHHGGSGMLPLFEPKGRVLLVDGHHLAYRNFFALKGLTTSRGEPVQGVYGFAKSLLKALKEDGDVVIVVFDAKAPSFRHEAYEAYKAGRAPTPEDFPRQLALMKELVDLLGLERLEVPGFEADDVLATLAKKAEREGYEVQILTADRDLFQLLSPRISVLHPEGHRITPEWLWEKYGLRPEQWVDFRALAGDPSDNIPGVKGIGEKTALKLLKEWGSLENLLKNLDQVKPESVREKILAHLEDLKLSRELSRVRTDLPLEVDFRCRREPDWEGLKAFLERLEFGSLLHEFGLLESPLPAEEAPWPPPEGAFLGYRLSRPEPMWAELLALAASAQGRVYRAEDPHGALRGLKEVRGLLAKDLAVVALREGLDLPPTDDPMLLAYLLDPSNTTPEGVARRYGGEWTEDAGERALLAERLHANLLGRLQGEERLLWLYEEVEKPLSRVLAHMEATGVKLDVAYLEALSLEVAAEMRRLEEEVFRLAGHSFNLNSRDQLERVLFDELGLPPIGKTEKTGKRSTSAAVLEALREVHPIVDKILQYRELAKLKGTYIDPLPALVHPKTGRLHTRFNQTATATGRLSSSDPNLQNIPVRTPLGQKIRRAFVAEEGWRLVALDYSQIELRVLAHLSGDENLIRVFQEGKDIHTQTASWMFGLSAEAIDPLMRRAAKTINFGVLYGMSAHRLSQELGIPREEAAAFIQRYFQSYPKVKAWIEKTLEEGRTRGYVETLFGRRRYVPDLNARVKSVREAAERMAFNMPVQGTAADLMKLAMVRLFPQLREVGARMLLQVHDELLLEAPKERAEEVAALAKEVMEGVWPLAVPLEVEVGIGEDWLAAKG

SEQ ID NO: 1637 - DNA, 2529 bp, synthetic construct
  misc_feature 1..2529: note = Variant of DNA polymerase I from Thermus sp. strain 2.9
  source 1..2529: mol_type = other DNA
atgcaccatcatcatcatcatggcggtagcggcatgttaccgttgttcgaacctaaaggtcgcgtgcttctggttgatggccatcatctcgcgtatcgtaacttctttgccctgaaaggattaaccaccagccgtggcgagccggtacagggtgtctacggctttgcaaagtcgctcctgaaagctctgaaagaagacggtgatgtggtgattgttgtctttgatgcgaaagcgccaagttttcgccacgaagcgtacgaagcttacaaagccgggcgtgctccaacgccggaagactttcctcgccaattggcgcttatgaaggaattagtggatttgcttggcctcgaacgcttggaagttcccggtttcgaggcagacgacgtattagcgactctcgcaaagaaagccgaacgtgagggctatgaagtccagatcttgacagcagatcgcgatcttttccagcttttatctccgcgcatctcggtgttacacccggaagggcatcgtatcaccccggaatggctctgggagaaatatggtttgcgtcccgaacaatgggtggattttcgcgccttagcaggcgatccgagcgacaatattccgggagttaaaggtatcggcgagaagacggcgctcaagctccttaaagaatgggggtcgttggagaacttgcttaagaatttagatcaggtcaaaccagagtcagtgcgtgagaagattcttgcacacctcgaagacctcaaattaagccgcgaattgtcccgtgtacgcaccgatttgccgctcgaagttgatttccgtggccgccgcgaacctgactgggagggtcttaaagcgtttttagagcgtcttgaatttggttcgctcttgcatgaattcggccttttagaaagcccgttaccagccgaagaagcaccttggccaccgcccgaaggcgcgtttttaggttaccgtttgagtcgcccggaaccgatgtgggccgaattattggctcttgcagcgtctgcccagggacgtgtgtatcgcgcggaagaccctcatggtgcgctccgcggcctcaaagaagtccgtggactccttgccaaagacttagctgttgttgcattgcgcgaaggtcttgatttacctccgactgatgatccaatgcttcttgcgtacctcttggacccgtcaaacacgacgcccgaaggcgtagcccgtcgttacggcggcgagtggaccgaagatgcaggcgagcgcgcgttattggccgaacgtttgcacgccaatttattaggacgtttgcaaggcgaggaacgtctcctctggctttacgaagaagtggagaaaccattgagtcgcgtgctcgcgcatatggaagctaccggtgtcaaattagacgtggcgtatttggaggcactcagccttgaagttgctgccgaaatgcgccgcttggaggaagaagtattctggttagcaggccactcctttaaccttaattctcgcgatcagttagaacgtgtgttgttcgatgaacttggtctccctcctatcggcaagacagagaagaccggtaaacgtagcacttcagcggcggttttagaagctcttcgcgaagtccatcccattgtggacaagatcttgcagtaccgcgaactcgcgaaattgaaaggcacctatattgaccctcttccggcattagtccacccgaaaacgggacgcctccatacccgcttcaaccaaacagccacggcgaccggtcgtttgtcctcctctgatccaaaccttcagaatattccagtacgtaccccattgggccagaagatccgccgcgcgtttgtagctgaggagggttggcgtttagtggccctcgattatagccaaattgaattacgtgtccttgcccatctttctggcgatgagaacctcatccgcgtgtttcaggaaggcaaagacattcacactcaaacggcaagctggatgtttggattatcagctgaagcgatcgatcctttgatgcgtcgtgcagcgaagaccatcaatttcggtgttctctacggtatgagtgcccatcgtttgtcgcaggaattaggcattccctatgaagaagctgcggcgttcattcagcgctactttcaaagctatcccaaagttaaagcatggatcgagaagactctcgaagaaggccgcacacgtggttacgtagagaccttatttggacgtcgccgctatgttcccgatttaaacgctcgcgtgaaatctgtccgtgaagccgccgaacgcatggcgttcaacatgcctgtacagggcacggcagctgacctcatgaaacttgcaatggtgcgcctttttccacaattgcgtgaagttggtgcccgcatgctcttgcaggtccacgatgaactcttgttagaagcgccaaaagagcgtgcggaagaggtggcagccctcgcgaaagaggttatggaaggcgtgtggcccttagcggtgcctcttgaagtcgaagttggtattggcgaggattggttggctgccaaaggataatga

SEQ ID NO: 1638 - protein, 841 aa, synthetic construct
  REGION 1..841: note = Variant of DNA polymerase I from Thermus sp. strain 2.9
MHHHHHHGGSGMLPLFEPKGRVLLVDGHHLAYRNFFALKGLTTSRGEPVQGVYGFAKSLLKALKEDGDVVIVVFDAKAPSFRHEAYEAYKAGRAPTPEDFPRQLALMKELVDLLGLERLEVPGFEADDVLATLAKKAEREGYEVQILTADRDLFQLLSPRISVLHPEGHRITPEWLWEKYGLRPEQWVDFRALAGDPSDNIPGVKGIGEKTALKLLKEWGSLENLLKNLDQVKPESVREKILAHLEDLKLSRELSRVRTDLPLEVDFRGRREPDWEGLKAFLERLEFGSLLHEFGLLESPLPAEEAPWPPPEGAFLGYRLSRPEPMWAELLALAASAQGRVYRAEDPHGALRGLKEVRGLLAKDLAVVALREGLDLPPTDDPMLLAYLLDPSNTTPEGVARRYGGEWTEDAGERALLAERLHANLLGRLQGEERLLWLYEEVEKPLSRVLAHMEATGVKLDVAYLEALSLEVAAEMRRLEEEVFWLAGHSFNLNSRDQLERVLFDELGLPPIGKTEKTGKRSTSAAVLEALREVHPIVDKILQYRELAKLKGTYIDPLPALVHPKTGRLHTRFNQTATATGRLSSSDPNLQNIPVRTPLGQKIRRAFVAEEGWRLVALDYSQIELRVLAHLSGDENLIRVFQEGKDIHTQTASWMFGLSAEAIDPLMRRAAKTINFGVLYGMSAHRLSQELGIPYEEAAAFIQRYFQSYPKVKAWIEKTLEEGRTRGYVETLFGRRRYVPDLNARVKSVREAAERMAFNMPVQGTAADLMKLAMVRLFPQLREVGARMLLQVHDELLLEAPKERAEEVAALAKEVMEGVWPLAVPLEVEVGIGEDWLAAKG

SEQ ID NO: 1639 - DNA, 2529 bp, synthetic construct
  misc_feature 1..2529: note = Variant of DNA polymerase I from Thermus sp. strain 2.9
  source 1..2529: mol_type = other DNA
atgcaccatcatcatcatcatggcggtagcggcatgttaccgttgttcgaacctaaaggtcgcgtgcttctggttgatggccatcatctcgcgtatcgtaacttctttgccctgaaaggattaaccaccagccgtggcgagccggtacagggtgtctacggctttgcaaagtcgctcctgaaagctctgaaagaagacggtgatgtggtgattgttgtctttgatgcgaaagcgccaagttttcgccacgaagcgtacgaagcttacaaagccgggcgtgctccaacgccggaagactttcctcgccaattggcgcttatgaaggaattagtggatttgcttggcctcgaacgcttggaagttcccggtttcgaggcagacgacgtattagcgactctcgcaaagaaagccgaacgtgagggctatgaagtccagatcttgacagcagatcgcgatcttttccagcttttatctccgcgcatctcggtgttacacccggaagggcatcgtatcaccccggaatggctctgggagaaatatggtttgcgtcccgaacaatgggtggattttcgcgccttagcaggcgatccgagcgacaatattccgggagttaaaggtatcggcgagaagacggcgctcaagctccttaaagaatgggggtcgttggagaacttgcttaagaatttagatcaggtcaaaccagagtcagtgcgtgagaagattcttgcacacctcgaagacctcaaattaagccgcgaattgtcccgtgtacgcaccgatttgccgctcgaagttgatttccgtggccgccgcgaacctgactgggagggtcttaaagcgtttttagagcgtcttgaatttggttcgctcttgcatgaattcggccttttagaaagcccgttaccagccgaagaagcaccttggccaccgcccgaaggcgcgtttttaggttaccgtttgagtcgcccggaaccgatgtgggccgaattattggctcttgcagcgtctgcccagggacgtgtgtatcgcgcggaagaccctcatggtgcgctccgcggcctcaaagaagtccgtggactccttgccaaagacttagctgttgttgcattgcgcgaaggtcttgatttacctccgactgatgatccaatgcttcttgcgtacctcttggacccgtcaaacacgacgcccgaaggcgtagcccgtcgttacggcggcgagtggaccgaagatgcaggcgagcgcgcgttattggccgaacgtttgcacgccaatttattaggacgtttgcaaggcgaggaacgtctcctctggctttacgaagaagtggagaaaccattgagtcgcgtgctcgcgcatatggaagctaccggtgtcaaattagacgtggcgtatttggaggcactcagccttgaagttgctgccgaaatgcgccgcttggaggaagaagtattccgtttagcaggccactcctttaaccttaattctcgcgatcagttagaacgtgtgttgttcgatgaacttggtctcccttgtatcggcaagacagagaagaccggtaaacgtagcacttcagcggcggttttagaagctcttcgcgaagtccatcccattgtggacaagatcttgcagtaccgcgaactcgcgaaattgaaaggcacctatattgaccctcttccggcattagtccacccgaaaacgggacgcctccatacccgcttcaaccaaacagccacggcgaccggtcgtttgtcctcctctgatccaaaccttcagaatattccagtacgtaccccattgggccagaagatccgccgcgcgtttgtagctgaggagggttggcgtttagtggccctcgattatagccaaattgaattacgtgtccttgcccatctttctggcgatgagaacctcatccgcgtgtttcaggaaggcaaagacattcacactcaaacggcaagctggatgtttggattatcagctgaagcgatcgatcctttgatgcgtcgtgcagcgaagaccatcaatttcggtgttctctacggtatgagtgcccatcgtttgtcgcaggaattaggcattccctatgaagaagctgcggcgttcattcagcgctactttcaaagctatcccaaagttaaagcatggatcgagaagactctcgaagaaggccgcacacgtggttacgtagagaccttatttggacgtcgccgctatgttcccgatttaaacgctcgcgtgaaatctgtccgtgaagccgccgaacgcatggcgttcaacatgcctgtacagggcacggcagctgacctcatgaaacttgcaatggtgcgcctttttccacaattgcgtgaagttggtgcccgcatgctcttgcaggtccacgatgaactcttgttagaagcgccaaaagagcgtgcggaagaggtggcagccctcgcgaaagaggttatggaaggcgtgtggcccttagcggtgcctcttgaagtcgaagttggtattggcgaggattggttggctgccaaaggataatga

SEQ ID NO: 1640 - protein, 841 aa, synthetic construct
  REGION 1..841: note = Variant of DNA polymerase I from Thermus sp. strain 2.9
MHHHHHHGGSGMLPLFEPKGRVLLVDGHHLAYRNFFALKGLTTSRGEPVQGVYGFAKSLLKALKEDGDVVIVVFDAKAPSFRHEAYEAYKAGRAPTPEDFPRQLALMKELVDLLGLERLEVPGFEADDVLATLAKKAEREGYEVQILTADRDLFQLLSPRISVLHPEGHRITPEWLWEKYGLRPEQWVDFRALAGDPSDNIPGVKGIGEKTALKLLKEWGSLENLLKNLDQVKPESVREKILAHLEDLKLSRELSRVRTDLPLEVDFRGRREPDWEGLKAFLERLEFGSLLHEFGLLESPLPAEEAPWPPPEGAFLGYRLSRPEPMWAELLALAASAQGRVYRAEDPHGALRGLKEVRGLLAKDLAVVALREGLDLPPTDDPMLLAYLLDPSNTTPEGVARRYGGEWTEDAGERALLAERLHANLLGRLQGEERLLWLYEEVEKPLSRVLAHMEATGVKLDVAYLEALSLEVAAEMRRLEEEVFRLAGHSFNLNSRDQLERVLFDELGLPCIGKTEKTGKRSTSAAVLEALREVHPIVDKILQYRELAKLKGTYIDPLPALVHPKTGRLHTRFNQTATATGRLSSSDPNLQNIPVRTPLGQKIRRAFVAEEGWRLVALDYSQIELRVLAHLSGDENLIRVFQEGKDIHTQTASWMFGLSAEAIDPLMRRAAKTINFGVLYGMSAHRLSQELGIPYEEAAAFIQRYFQSYPKVKAWIEKTLEEGRTRGYVETLFGRRRYVPDLNARVKSVREAAERMAFNMPVQGTAADLMKLAMVRLFPQLREVGARMLLQVHDELLLEAPKERAEEVAALAKEVMEGVWPLAVPLEVEVGIGEDWLAAKG

SEQ ID NO: 1641 - DNA, 2529 bp, synthetic construct
  misc_feature 1..2529: note = Variant of DNA polymerase I from Thermus sp. strain 2.9
  source 1..2529: mol_type = other DNA
atgcaccatcatcatcatcatggcggtagcggcatgttaccgttgttcgaacctaaaggtcgcgtgcttctggttgatggccatcatctcgcgtatcgtaacttctttgccctgaaaggattaaccaccagccgtggcgagccggtacagggtgtctacggctttgcaaagtcgctcctgaaagctctgaaagaagacggtgatgtggtgattgttgtctttgatgcgaaagcgccaagttttcgccacgaagcgtacgaagcttacaaagccgggcgtgctccaacgccggaagactttcctcgccaattggcgcttatgaaggaattagtggatttgcttggcctcgaacgcttggaagttcccggtttcgaggcagacgacgtattagcgactctcgcaaagaaagccgaacgtgagggctatgaagtccagatcttgacagcagatcgcgatcttttccagcttttatctccgcgcatctcggtgttacacccggaagggcatcgtatcaccccggaatggctctggtctaaatatggtttgcgtcccgaacaatgggtggattttcgcgccttagcaggcgatccgagcgacaatattccgggagttaaaggtatcggcgagaagacggcgctcaagctccttaaagaatgggggtcgttggagaacttgcttaagaatttagatcaggtcaaaccagagtcagtgcgtgagaagattcttgcacacctcgaagacctcaaattaagccgcgaattgtcccgtgtacgcaccgatttgccgctcgaagttgatttccgtggccgccgcgaacctgactgggagggtcttaaagcgtttttagagcgtcttgaatttggttcgctcttgcatgaattcggccttttagaaagcccgttaccagccgaagaagcaccttggccaccgcccgaaggcgcgtttttaggttaccgtttgagtcgcccggaaccgatgtgggccgaattattggctcttgcagcgtctgcccagggacgtgtgtatcgcgcggaagaccctcatggtgcgctccgcggcctcaaagaagtccgtggactccttgccaaagacttagctgttgttgcattgcgcgaaggtcttgatttacctccgactgatgatccaatgcttcttgcgtacctcttggacccgtcaaacacgacgcccgaaggcgtagcccgtcgttacggcggcgagtggaccgaagatgcaggcgagcgcgcgttattggccgaacgtttgcacgccaatttattaggacgtttgcaaggcgaggaacgtctcctctggctttacgaagaagtggagaaaccattgagtcgcgtgctcgcgcatatggaagctaccggtgtcaaattagacgtggcgtatttggaggcactcagccttgaagttgctgccgaaatgcgccgcttggaggaagaagtattccgtttagcaggccactcctttaaccttaattctcgcgatcagttagaacgtgtgttgttcgatgaacttggtctccctcctatcggcaagacagagaagaccggtaaacgtagcacttcagcggcggttttagaagctcttcgcgaagtccatcccattgtggacaagatcttgcagtaccgcgaactcgcgaaattgaaaggcacctatattgaccctcttccggcattagtccacccgaaaacgggacgcctccatacccgcttcaaccaaacagccacggcgaccggtcgtttgtcctcctctgatccaaaccttcagaatattccagtacgtaccccattgggccagaagatccgccgcgcgtttgtagctgaggagggttggcgtttagtggccctcgattatagccaaattgaattacgtgtccttgcccatctttctggcgatgagaacctcatccgcgtgtttcaggaaggcaaagacattcacactcaaacggcaagctggatgtttggattatcagctgaagcgatcgatcctttgatgcgtcgtgcagcgaagaccatcaatttcggtgttctctacggtatgagtgcccatcgtttgtcgcaggaattaggcattccctatgaagaagctgcggcgttcattcagcgctactttcaaagctatcccaaagttaaagcatggatcgagaagactctcgaagaaggccgcacacgtggttacgtagagaccttatttggacgtcgccgctatgttcccgatttaaacgctcgcgtgaaatctgtccgtgaagccgccgaacgcatggcgttcaacatgcctgtacagggcacggcagctgacctcatgaaacttgcaatggtgcgcctttttccacaattgcgtgaagttggtgcccgcatgctcttgcaggtccacgatgaactcttgttagaagcgccaaaagagcgtgcggaagaggtggcagccctcgcgaaagaggttatggaaggcgtgtggcccttagcggtgcctcttgaagtcgaagttggtattggcgaggattggttggctgccaaaggataatga

SEQ ID NO: 1642 - protein, 841 aa, synthetic construct
  REGION 1..841: note = Variant of DNA polymerase I from Thermus sp. strain 2.9
MHHHHHHGGSGMLPLFEPKGRVLLVDGHHLAYRNFFALKGLTTSRGEPVQGVYGFAKSLLKALKEDGDVVIVVFDAKAPSFRHEAYEAYKAGRAPTPEDFPRQLALMKELVDLLGLERLEVPGFEADDVLATLAKKAEREGYEVQILTADRDLFQLLSPRISVLHPEGHRITPEWLWSKYGLRPEQWVDFRALAGDPSDNIPGVKGIGEKTALKLLKEWGSLENLLKNLDQVKPESVREKILAHLEDLKLSRELSRVRTDLPLEVDFRGRREPDWEGLKAFLERLEFGSLLHEFGLLESPLPAEEAPWPPPEGAFLGYRLSRPEPMWAELLALAASAQGRVYRAEDPHGALRGLKEVRGLLAKDLAVVALREGLDLPPTDDPMLLAYLLDPSNTTPEGVARRYGGEWTEDAGERALLAERLHANLLGRLQGEERLLWLYEEVEKPLSRVLAHMEATGVKLDVAYLEALSLEVAAEMRRLEEEVFRLAGHSFNLNSRDQLERVLFDELGLPPIGKTEKTGKRSTSAAVLEALREVHPIVDKILQYRELAKLKGTYIDPLPALVHPKTGRLHTRFNQTATATGRLSSSDPNLQNIPVRTPLGQKIRRAFVAEEGWRLVALDYSQIELRVLAHLSGDENLIRVFQEGKDIHTQTASWMFGLSAEAIDPLMRRAAKTINFGVLYGMSAHRLSQELGIPYEEAAAFIQRYFQSYPKVKAWIEKTLEEGRTRGYVETLFGRRRYVPDLNARVKSVREAAERMAFNMPVQGTAADLMKLAMVRLFPQLREVGARMLLQVHDELLLEAPKERAEEVAALAKEVMEGVWPLAVPLEVEVGIGEDWLAAKG

SEQ ID NO: 1643 - DNA, 2529 bp, synthetic construct
  misc_feature 1..2529: note = Variant of DNA polymerase I from Thermus sp. strain 2.9
  source 1..2529: mol_type = other DNA
atgcaccatcatcatcatcatggcggtagcggcatgttaccgttgttcggtcctaaaggtcgcgtgcttctggttgatggccatcatctcgcgtatcgtaacttctttgccctgaaaggattaaccaccagccgtggcgagccggtacagggtgtctacggctttgcaaagtcgctcctgaaagctctgaaagaagacggtgatgtggtgattgttgtctttgatgcgaaagcgccaagttttcgccacgaagcgtacgaagcttacaaagccgggcgtgctccaacgccggaagactttcctcgccaattggcgcttatgaaggaattagtggatttgcttggcctcgaacgcttggaagttcccggtttcgaggcagacgacgtattagcgactctcgcaaagaaagccgaacgtgagggctatgaagtccagatcttgacagcagatcgcgatcttttccagcttttatctccgcgcatctcggtgttacacccggaagggcatcgtatcaccccggaatggctctgggagaaatatggtttgcgtcccgaacaatgggtggattttcgcgccttagcaggcgatccgagcgacaatattccgggagttaaaggtatcggcgagaagacggcgctcaagctccttaaagaatgggggtcgttggagaacttgcttaagaatttagatcaggtcaaaccagagtcagtgcgtgagaagattcttgcacacctcgaagacctcaaattaagccgcgaattgtcccgtgtacgcaccgatttgccgctcgaagttgatttccgtggccgccgcgaacctgactgggagggtcttaaagcgtttttagagcgtcttgaatttggttcgctcttgcatgaattcggccttttagaaagcccgttaccagccgaagaagcaccttggccaccgcccgaaggcgcgtttttaggttaccgtttgagtcgcccggaaccgatgtgggccgaattattggctcttgcagcgtctgcccagggacgtgtgtatcgcgcggaagaccctcatggtgcgctccgcggcctcaaagaagtccgtggactccttgccaaagacttagctgttgttgcattgcgcgaaggtcttgatttacctccgactgatgatccaatgcttcttgcgtacctcttggacccgtcaaacacgacgcccgaaggcgtagcccgtcgttacggcggcgagtggaccgaagatgcaggcgagcgcgcgttattggccgaacgtttgcacgccaatttattaggacgtttgcaaggcgaggaacgtctcctctggctttacgaagaagtggagaaaccattgagtcgcgtgctcgcgcatatggaagctaccggtgtcaaattagacgtggcgtatttggaggcactcagccttgaagttgctgccgaaatgcgccgcttggaggaagaagtattccgtttagcaggccactcctttaaccttaattctcgcgatcagttagaacgtgtgttgttcgatgaacttggtctccctcctatcggcaagacagagaagaccggtaaacgtagcacttcagcggcggttttagaagctcttcgcgaagtccatcccattgtggacaagatcttgcagtaccgcgaactcgcgaaattgaaaggcacctatattgaccctcttccggcattagtccacccgaaaacgggacgcctccatacccgcttcaaccaaacagccacggcgaccggtcgtttgtcctcctctgatccaaaccttcagaatattccagtacgtaccccattgggccagaagatccgccgcgcgtttgtagctgaggagggttggcgtttagtggccctcgattatagccaaattgaattacgtgtccttgcccatctttctggcgatgagaacctcatccgcgtgtttcaggaaggcaaagacattcacactcaaacggcaagctggatgtttggattatcagctgaagcgatcgatcctttgatgcgtcgtgcagcgaagaccatcaatttcggtgttctctacggtatgagtgcccatcgtttgtcgcaggaattaggcattccctatgaagaagctgcggcgttcattcagcgctactttcaaagctatcccaaagttaaagcatggatcgagaagactctcgaagaaggccgcacacgtggttacgtagagaccttatttggacgtcgccgctatgttcccgatttaaacgctcgcgtgaaatctgtccgtgaagccgccgaacgcatggcgttcaacatgcctgtacagggcacggcagctgacctcatgaaacttgcaatggtgcgcctttttccacaattgcgtgaagttggtgcccgcatgctcttgcaggtccacgatgaactcttgttagaagcgccaaaagagcgtgcggaagaggtggcagccctcgcgaaagaggttatggaaggcgtgtggcccttagcggtgcctcttgaagtcgaagttggtattggcgaggattggttggctgccaaaggataatga

SEQ ID NO: 1644 - protein, 841 aa, synthetic construct
  REGION 1..841: note = Variant of DNA polymerase I from Thermus sp. strain 2.9
MHHHHHHGGSGMLPLFGPKGRVLLVDGHHLAYRNFFALKGLTTSRGEPVQGVYGFAKSLLKALKEDGDVVIVVFDAKAPSFRHEAYEAYKAGRAPTPEDFPRQLALMKELVDLLGLERLEVPGFEADDVLATLAKKAEREGYEVQILTADRDLFQLLSPRISVLHPEGHRITPEWLWEKYGLRPEQWVDFRALAGDPSDNIPGVKGIGEKTALKLLKEWGSLENLLKNLDQVKPESVREKILAHLEDLKLSRELSRVRTDLPLEVDFRGRREPDWEGLKAFLERLEFGSLLHEFGLLESPLPAEEAPWPPPEGAFLGYRLSRPEPMWAELLALAASAQGRVYRAEDPHGALRGLKEVRGLLAKDLAVVALREGLDLPPTDDPMLLAYLLDPSNTTPEGVARRYGGEWTEDAGERALLAERLHANLLGRLQGEERLLWLYEEVEKPLSRVLAHMEATGVKLDVAYLEALSLEVAAEMRRLEEEVFRLAGHSFNLNSRDQLERVLFDELGLPPIGKTEKTGKRSTSAAVLEALREVHPIVDKILQYRELAKLKGTYIDPLPALVHPKTGRLHTRFNQTATATGRLSSSDPNLQNIPVRTPLGQKIRRAFVAEEGWRLVALDYSQIELRVLAHLSGDENLIRVFQEGKDIHTQTASWMFGLSAEAIDPLMRRAAKTINFGVLYGMSAHRLSQELGIPYEEAAAFIQRYFQSYPKVKAWIEKTLEEGRTRGYVETLFGRRRYVPDLNARVKSVREAAERMAFNMPVQGTAADLMKLAMVRLFPQLREVGARMLLQVHDELLLEAPKERAEEVAALAKEVMEGVWPLAVPLEVEVGIGEDWLAAKG

SEQ ID NO: 1645 - DNA, 2529 bp, synthetic construct
  misc_feature 1..2529: note = Variant of DNA polymerase I from Thermus sp. strain 2.9
  source 1..2529: mol_type = other DNA
atgcaccatcatcatcatcatggcggtagcggcatgttaccgttgttcgaacctaaaggtcgcgtgcttctggttgatggccatcatctcgcgtatcgtaacttctttgccctgaaaggattaaccaccagccgtggcgagccggtacagggtgtctacggctttgcaaagtcgctcctgaaagctctgaaagaagacggtgatgtggtgattgttgtctttgatgcgaaagcgccaagttttcgccacgaagcgtaccgtgcttacaaagccgggcgtgctccaacgccggaagactttcctcgccaattggcgcttatgaaggaattagtggatttgcttggcctcgaacgcttggaagttcccggtttcgaggcagacgacgtattagcgactctcgcaaagaaagccgaacgtgagggctatgaagtccagatcttgacagcagatcgcgatcttttccagcttttatctccgcgcatctcggtgttacacccggaagggcatcgtatcaccccggaatggctctgggagaaatatggtttgcgtcccgaacaatgggtggattttcgcgccttagcaggcgatccgagcgacaatattccgggagttaaaggtatcggcgagaagacggcgctcaagctccttaaagaatgggggtcgttggagaacttgcttaagaatttagatcaggtcaaaccagagtcagtgcgtgagaagattcttgcacacctcgaagacctcaaattaagccgcgaattgtcccgtgtacgcaccgatttgccgctcgaagttgatttccgtggccgccgcgaacctgactgggagggtcttaaagcgtttttagagcgtcttgaatttggttcgctcttgcatgaattcggccttttagaaagcccgttaccagccgaagaagcaccttggccaccgcccgaaggcgcgtttttaggttaccgtttgagtcgcccggaaccgatgtgggccgaattattggctcttgcagcgtctgcccagggacgtgtgtatcgcgcggaagaccctcatggtgcgctccgcggcctcaaagaagtccgtggactccttgccaaagacttagctgttgttgcattgcgcgaaggtcttgatttacctccgactgatgatccaatgcttcttgcgtacctcttggacccgtcaaacacgacgcccgaaggcgtagcccgtcgttacggcggcgagtggaccgaagatgcaggcgagcgcgcgttattggccgaacgtttgcacgccaatttattaggacgtttgcaaggcgaggaacgtctcctctggctttacgaagaagtggagaaaccattgagtcgcgtgctcgcgcatatggaagctaccggtgtcaaattagacgtggcgtatttggaggcactcagccttgaagttgctgccgaaatgcgccgcttggaggaagaagtattccgtttagcaggccactcctttaaccttaattctcgcgatcagttagaacgtgtgttgttcgatgaacttggtctccctcctatcggcaagacagagaagaccggtaaacgtagcacttcagcggcggttttagaagctcttcgcgaagtccatcccattgtggacaagatcttgcagtaccgcgaactcgcgaaattgaaaggcacctatattgaccctcttccggcattagtccacccgaaaacgggacgcctccatacccgcttcaaccaaacagccacggcgaccggtcgtttgtcctcctctgatccaaaccttcagaatattccagtacgtaccccattgggccagaagatccgccgcgcgtttgtagctgaggagggttggcgtttagtggccctcgattatagccaaattgaattacgtgtccttgcccatctttctggcgatgagaacctcatccgcgtgtttcaggaaggcaaagacattcacactcaaacggcaagctggatgtttggattatcagctgaagcgatcgatcctttgatgcgtcgtgcagcgaagaccatcaatttcggtgttctctacggtatgagtgcccatcgtttgtcgcaggaattaggcattccctatgaagaagctgcggcgttcattcagcgctactttcaaagctatcccaaagttaaagcatggatcgagaagactctcgaagaaggccgcacacgtggttacgtagagaccttatttggacgtcgccgctatgttcccgatttaaacgctcgcgtgaaatctgtccgtgaagccgccgaacgcatggcgttcaacatgcctgtacagggcacggcagctgacctcatgaaacttgcaatggtgcgcctttttccacaattgcgtgaagttggtgcccgcatgctcttgcaggtccacgatgaactcttgttagaagcgccaaaagagcgtgcggaagaggtggcagccctcgcgaaagaggttatggaaggcgtgtggcccttagcggtgcctcttgaagtcgaagttggtattggcgaggattggttggctgccaaaggataatga

SEQ ID NO: 1646 - protein, 841 aa, synthetic construct; identical to SEQ ID NO: 1518
  REGION 1..841: note = Variant of DNA polymerase I from Thermus sp. strain 2.9

SEQ ID NO: 1647 - DNA, 2529 bp, synthetic construct
  misc_feature 1..2529: note = Variant of DNA polymerase I from Thermus sp. strain 2.9
  source 1..2529: mol_type = other DNA
atgcaccatcatcatcatcatggcggtagcggcatgttaccgttgttcgaacctaaaggtcgcgtgcttctggttgatggccatcatctcgcgtatcgtaacttctttgccctgaaaggattaaccaccagccgtggcgagccggtacagggtgtctacggctttgcaaagtcgctcctgaaagctctgaaagaagacggtgatgtggtgattgttgtctttgatgcgaaagcgccaagttttcgccacgaagcgtacgaagcttacaaagccgggcgtgctccaacgccggaagactttcctcgccaattggcgcttatgaaggaattagtggatttgcttggcctcgaacgcttggaagttcccggtttcgaggcagacgacgtattagcgactctcgcaaagaaagccgaacgtgagggctatgaagtccagatcttgacagcagatcgcgatcttttccagcttttatctccgcgcatctcggtgttacacccggaagggcatcgtatcaccccggaatggctctgggagaaatatggtttgcgtcccgaacaatgggtggattttcgcgccttagcaggcgatccgagcgacaatattccgggagttaaaggtatcggcgagaagacggcgctcaagctccttaaagaatgggggtcgttggagaacttgcttaagaatttagatcaggtcaaaccagagtcagtgcgtgagaagattcttgcacacctcgaagacctcaaattaagccgcgaattgtcccgtgtacgcaccgatttgccgctcgaagttgatttccgtggccgccgcgaacctgactgggagggtcttaaagcgtttttagagcgtcttgaatttggttcgctcttgcatgaattcggccttttagaaagcccgttaccagccgaagaagcaccttggccaccgcccgaaggcgcgtttttaggttaccgtttgagtcgcccggaaccgatgtgggccgaattattggctcttgcagcgtctgcccagggacgtgtgtatcgcgcggaagaccctcatggtgcgctccgcggcctcaaagaagtccgtggactccttgccaaagacttagctgttgttgcattgcgcgaaggtcttgatttacctccgactgatgatccaatgcttcttgcgtacctcttggacccgtcaaacacgacgcccgaaggcgtagcccgtcgttacggcggcgagtggaccgaagatgcaggcgagcgcgcgttattggccgaacgtttgcacgccaatttattaggacgtttgcaaggcgaggaacgtctcctctggctttacgaagaagtggagaaaccattgagtcgcgtgctcgcgcatatggaagctaccggtgtcaaattagacgtggcgtatttggaggcactcagccttgaagttgctgccgaaatgcgccgcttggaggaagaagtattccgtttagcaggccactcctttaaccttaattctcgcgatcagttagaacgtgtgttgttcgatgaacttggtctccctcctatcggcaagacagagactaccggtaaacgtagcacttcagcggcggttttagaagctcttcgcgaagtccatcccattgtggacaagatcttgcagtaccgcgaactcgcgaaattgaaaggcacctatattgaccctcttccggcattagtccacccgaaaacgggacgcctccatacccgcttcaaccaaacagccacggcgaccggtcgtttgtcctcctctgatccaaaccttcagaatattccagtacgtaccccattgggccagaagatccgccgcgcgtttgtagctgaggagggttggcgtttagtggccctcgattatagccaaattgaattacgtgtccttgcccatctttctggcgatgagaacctcatccgcgtgtttcaggaaggcaaagacattcacactcaaacggcaagctggatgtttggattatcagctgaagcgatcgatcctttgatgcgtcgtgcagcgaagaccatcaatttcggtgttctctacggtatgagtgcccatcgtttgtcgcaggaattaggcattccctatgaagaagctgcggcgttcattcagcgctactttcaaagctatcccaaagttaaagcatggatcgagaagactctcgaagaaggccgcacacgtggttacgtagagaccttatttggacgtcgccgctatgttcccgatttaaacgctcgcgtgaaatctgtccgtgaagccgccgaacgcatggcgttcaacatgcctgtacagggcacggcagctgacctcatgaaacttgcaatggtgcgcctttttccacaattgcgtgaagttggtgcccgcatgctcttgcaggtccacgatgaactcttgttagaagcgccaaaagagcgtgcggaagaggtggcagccctcgcgaaagaggttatggaaggcgtgtggcccttagcggtgcctcttgaagtcgaagttggtattggcgaggattggttggctgccaaaggataatga

SEQ ID NO: 1648 - protein, 841 aa, synthetic construct; identical to SEQ ID NO: 914
  REGION 1..841: note = Variant of DNA polymerase I from Thermus sp. strain 2.9

SEQ ID NO: 1649 - DNA, 2529 bp, synthetic construct; identical to SEQ ID NO: 1605
  misc_feature 1..2529: note = Variant of DNA polymerase I from Thermus sp. strain 2.9
  source 1..2529: mol_type = other DNA

SEQ ID NO: 1650 - protein, 841 aa, synthetic construct; identical to SEQ ID NO: 1606
  REGION 1..841: note = Variant of DNA polymerase I from Thermus sp. strain 2.9

SEQ ID NO: 1651 - DNA, 2529 bp, synthetic construct
  misc_feature 1..2529: note = Variant of DNA polymerase I from Thermus sp. strain 2.9
  source 1..2529: mol_type = other DNA
atgcaccatcatcatcatcatggcggtagcggcatgttaccgttgttcgaacctaaaggtcgcgtgcttctggttgatggccatcatctcgcgtatcgtaacttctttgccctgaaaggattaaccaccagccgtggcgagccggtacagggtgtctacggctttgcaaagtcgctcctgaaagctctgaaagaagacggtgatgtggtgattgttgtctttgatgcgaaagcgccaagttttcgccacgaagcgtacgaagcttacaaagccgggcgtgctccaacgccggaagactttcctcgccaattggcgcttatgaaggaattagtggatttgcttggcctcgaacgcttggaagttcccggtttcgaggcagacgacgtattagcgactctcgcaaagaaagccgaacgtgagggctatgaagtccagatcttgacagcagatcgcgatcttttccagcttttatctccgcgcatctcggtgttacacccggaagggcatcgtatcaccccggaatggctctgggagaaatatggtttgcgtcccgaacaatgggtggattttcgcgccttagcaggcgatccgagcgacaatattccgggagttaaaggtatcggcgagaagacggcgctcaagctccttaaagaatgggggtcgttggagaacttgcttaagaatttagatcaggtcaaaccagagtcagtgcgtgagaagattcttgcacacctcgaagacctcaaattaagccgcgaattgtcccgtgtacgcaccgatttgccgctcgaagttgatttccgtggccgccgcgaacctgactgggagggtcttaaagcgtttttagagcgtcttgaatttggttcgctcttgcatgaattcggccttttagaaagcccgttaccagccgaagaagcaccttggccaccgcccgaaggcgcgtttttaggttaccgtttgagtcgcccggaaccgatgtgggccgaattattggctcttgcagcgtctgcccagggacgtgtgtatcgcgcggaagaccctcatggtgcgctccgcggcctctttgaagtccgtggactccttgccaaagacttagctgttgttgcattgcgcgaaggtcttgatttacctccgactgatgatccaatgcttcttgcgtacctcttggacccgtcaaacacgacgcccgaaggcgtagcccgtcgttacggcggcgagtggaccgaagatgcaggcgagcgcgcgttattggccgaacgtttgcacgccaatttattaggacgtttgcaaggcgaggaacgtctcctctggctttacgaagaagtggagaaaccattgagtcgcgtgctcgcgcatatggaagctaccggtgtcaaattagacgtggcgtatttggaggcactcagccttgaagttgctgccgaaatgcgccgcttggaggaagaagtattccgtttagcaggccactcctttaaccttaattctcgcgatcagttagaacgtgtgttgttcgatgaacttggtctccctcctatcggcaagacagagaagaccggtaaacgtagcacttcagcggcggttttagaagctcttcgcgaagtccatcccattgtggacaagatcttgcagtaccgcgaactcgcgaaattgaaaggcacctatattgaccctcttccggcattagtccacccgaaaacgggacgcctccatacccgcttcaaccaaacagccacggcgaccggtcgtttgtcctcctctgatccaaaccttcagaatattccagtacgtaccccattgggccagaagatccgccgcgcgtttgtagctgaggagggttggcgtttagtggccctcgattatagccaaattgaattacgtgtccttgcccatctttctggcgatgagaacctcatccgcgtgtttcaggaaggcaaagacattcacactcaaacggcaagctggatgtttggattatcagctgaagcgatcgatcctttgatgcgtcgtgcagcgaagaccatcaatttcggtgttctctacggtatgagtgcccatcgtttgtcgcaggaattaggcattccctatgaagaagctgcggcgttcattcagcgctactttcaaagctatcccaaagttaaagcatggatcgagaagactctcgaagaaggccgcacacgtggttacgtagagaccttatttggacgtcgccgctatgttcccgatttaaacgctcgcgtgaaatctgtccgtgaagccgccgaacgcatggcgttcaacatgcctgtacagggcacggcagctgacctcatgaaacttgcaatggtgcgcctttttccacaattgcgtgaagttggtgcccgcatgctcttgcaggtccacgatgaactcttgttagaagcgccaaaagagcgtgcggaagaggtggcagccctcgcgaaagaggttatggaaggcgtgtggcccttagcggtgcctcttgaagtcgaagttggtattggcgaggattggttggctgccaaaggataatga

SEQ ID NO: 1652 - protein, 841 aa, synthetic construct
  REGION 1..841: note = Variant of DNA polymerase I from Thermus sp. strain 2.9
MHHHHHHGGSGMLPLFEPKGRVLLVDGHHLAYRNFFALKGLTTSRGEPVQGVYGFAKSLLKALKEDGDVVIVVFDAKAPSFRHEAYEAYKAGRAPTPEDFPRQLALMKELVDLLGLERLEVPGFEADDVLATLAKKAEREGYEVQILTADRDLFQLLSPRISVLHPEGHRITPEWLWEKYGLRPEQWVDFRALAGDPSDNIPGVKGIGEKTALKLLKEWGSLENLLKNLDQVKPESVREKILAHLEDLKLSRELSRVRTDLPLEVDFRGRREPDWEGLKAFLERLEFGSLLHEFGLLESPLPAEEAPWPPPEGAFLGYRLSRPEPMWAELLALAASAQGRVYRAEDPHGALRGLFEVRGLLAKDLAVVALREGLDLPPTDDPMLLAYLLDPSNTTPEGVARRYGGEWTEDAGERALLAERLHANLLGRLQGEERLLWLYEEVEKPLSRVLAHMEATGVKLDVAYLEALSLEVAAEMRRLEEEVFRLAGHSFNLNSRDQLERVLFDELGLPPIGKTEKTGKRSTSAAVLEALREVHPIVDKILQYRELAKLKGTYIDPLPALVHPKTGRLHTRFNQTATATGRLSSSDPNLQNIPVRTPLGQKIRRAFVAEEGWRLVALDYSQIELRVLAHLSGDENLIRVFQEGKDIHTQTASWMFGLSAEAIDPLMRRAAKTINFGVLYGMSAHRLSQELGIPYEEAAAFIQRYFQSYPKVKAWIEKTLEEGRTRGYVETLFGRRRYVPDLNARVKSVREAAERMAFNMPVQGTAADLMKLAMVRLFPQLREVGARMLLQVHDELLLEAPKERAEEVAALAKEVMEGVWPLAVPLEVEVGIGEDWLAAKG

SEQ ID NO: 1653 - DNA, 2529 bp, synthetic construct
  misc_feature 1..2529: note = Variant of DNA polymerase I from Thermus sp. strain 2.9
  source 1..2529: mol_type = other DNA
atgcaccatcatcatcatcatggcggtagcggcatgttaccgttgttcgaacctaaaggtcgcgtgcttctggttgatggccatcatctcgcgtatcgtaacttctttgccctgaaaggattaaccaccagccgtggcgagccggtacagggtgtctacggctttgcaaagtcgctcctgaaagctctgaaagaagacggtgatgtggtgattgttgtctttgatgcgaaagcgccaagttttcgccacgaagcgtacgaagcttacaaagccgggcgtgctccaacgccggaagactttcctcgccaattggcgcttatgaaggaattagtggatttgcttggcctcgaacgcttggaagttcccggtttcgaggcagacgacgtattagcgactctcgcaaagaaagccgaacgtgagggctatgaagtccagatcttgacagcagatcgcgatcttttccagcttttatctccgcgcatctcggtgttacacccggaagggcatcgtatcaccccggaatggctctgggagaaatatggtttgcgtcccgaacaatgggtggattttcgcgccttagcaggcgatccgagcgacaatattccgggagttaaaggtatcggcgagaagacggcgctcaagctccttaaagaatgggggtcgttggagaacttgcttaagaatttagatcaggtcaaaccagagtcagtgcgtgagaagattcttgcacacctcgaagacctcaaattaagccgcgaattgtcccgtgtacgcaccgatttgccgctcgaagttgatttccgtggccgccgcgaacctgactgggagggtcttaaagcgtttttagagcgtcttgaatttggttcgctcttgcatgaattcggccttttagaaagcccgttaccagccgaagaagcaccttggccaccgcccgaaggcgcgtttttaggttaccgtttgagtcgcccggaaccgatgtgggccgaattactggctcttgcagcgtctgcccagggacgtgtgtatcgcgcggaagaccctcatggtgcgctccgcggcctcaaagaagtccgtggactccttgccaaagacttagctgttgttgcattgcgcgaaggtcttgatttacctccgactgatgatccaatgcttcttgcgtacctcttggacccgtcaaacacgacgcccgaaggcgtagcccgtcgttacggcggcgagtggaccgaagatgcaggcgagcgcgcgttattggccgaacgtttgcacgccaatttattaggacgtttgcaaggcgaggaacgtctcctctggctttacgaagaagtggagaaaccattgagtcgcgtgctcgcgcatatggaagctaccggtgtcaaattagacgtggcgtatttggaggcactcagccttgaagttgctgccgaaatgcgccgcttggaggaagaagtattccgtttagcaggccactcctttaaccttaattctcgcgatcagttagaacgtgtgttgttcgatgaacttggtctccctcctatcggcaagacagagaagaccggtaaacgtagcacttcagcggcggttttagaagctcttcgcgaagtccatcccattgtggacaagatcttgcagtaccgcgaactcgcgaaattgaaaggcacctatattgaccctcttccggcattagtccacccgaaaacgggacgcctccatacccgcttcaaccaaacagccacggcgaccggtcgtttgtcctcctctgatccaaaccttcagaatattccagtacgtaccccattgggccagaagatccgccgcgcgtttgtagctgaggagggttggcgtttagtggccctcgattatagccaaattgaattacgtgtccttgcccatctttctggcgatgagaacctcatccgcgtgtttcaggaaggcaaagacattcacactcaaacggcaagctggatgtttggattatcagctgaagcgatcgatcctttgatgcgtcgtgcagcgaagaccgttaatttcggtgttctctacggtatgagtgcccatcgtttgtcgcaggaattaggcattccctatgaagaagctgcggcgttcattcagcgctactttcaaagctatcccaaagttaaagcatggatcgagaagactctcgaagaaggccgcacacgtggttacgtagagaccttatttggacgtcgccgctatgttcccgatttaaacgctcgcgtgaaatctgtccgtgaagccgccgaacgcatggcgttcaacatgcctgtacagggcacggcagctgacctcatgaaacttgcaatggtgcgcctttttccacaattgcgtgaagttggtgcccgcatgctcttgcaggtccacgatgaactcttgttagaagcgccaaaagagcgtgcggaagaggtggcagccctcgcgaaagaggttatggaaggcgtgtggcccttagcggtgcctcttgaagtcgaagttggtattggcgaggattggttggctgccaaaggataatga

SEQ ID NO: 1654 - protein, 841 aa, synthetic construct; identical to SEQ ID NO: 1076
  REGION 1..841: note = Variant of DNA polymerase I from Thermus sp. strain 2.9

SEQ ID NO: 1655 - DNA, 2529 bp, synthetic construct
  misc_feature 1..2529: note = Variant of DNA polymerase I from Thermus sp. strain 2.9
  source 1..2529: mol_type = other DNA
atgcaccatcatcatcatcatggcggtagcggcatgttaccgttgttcgaacctaaaggtcgcgtgcttctggttgatggccatcatctcgcgtatcgtaacttctttgccctgaaaggattaaccaccagccgtggcgagccggtacagggtgtctacggctttgcaaagtcgctcctgaaagctctgaaagaagacggtgatgtggtgattgttgtctttgatgcgaaagcgccaagttttcgccacgaagcgtacgaagcttacaaagccgggcgtgctccaacgccggaagactttcctcgccaattggcgcttatgaaggaattagtggatttgcttggcctcgaacgcttggaagttcccggtttcgaggcagacgacgtattagcgactctcgcaaagaaagccgaacgtgagggctatgaagtccagatcttgacagcagatcgcgatcttttccagcttttatctccgcgcatctcggtgttacacccggaagggcatcgtatcaccccggaatggctctgggagaaatatggtttgcgtcccgaacaatgggtggattttcgcgccttagcaggcgatccgagcgacaatattccgggagttaaaggtatcggcgagaagacggcgctcaagctccttaaagaatgggggtcgttggagaacttgcttaagaatttagatcaggtcaaaccagagtcagtgcgtgagaagattcttgcacacctcgaagacctcaaattaagccgcgaattgtcccgtgtacgcaccgatttgccgctcgaagttgatttccgtggccgccgcgaacctgactgggagggtcttaaagcgtttttagagcgtcttgaatttggttcgctcttgcatgaattcggccttttagaaagcccgttaccagccgaagaagcaccttggccaccgcccgaaggcgcgtttttaggttaccgtttgagtcgcccggaaccgatgtgggccgaattattggctcttgcagcgtctgcccagggacgtgtgtatcgcgcggaagaccctcatggtgcgctccgcggcctcaaagaagtccgtggactccttgccaaagacttagctgttgttgcattgcgcgaaggtcttgatttacctccgactgatgatccaatgcttcttgcgtacctcttggacccgtcaaacacgacgcccgaaggcgtagcccgtcgttacggcggcgagtggaccgaagatgcaggcgagcgcgcgttattggccgaacgtttgcacgccaatttattaggacgtttgcaaggcgaggaacgtctcctctggctttacgaagaagtggagaaaccattgagtcgcgtgctcgcgcatatggaagctaccggtgtcaaattagacgtggcgtatttggaggcactcagccttgaagttgctgccgaaatgcgccgcttggaggaagaagtattccgtttagcaggccactcctttaaccttaattctcgcgatcagttagaacgtgtgttgttcgatgaacttggtctccctcctatcggcaagacagagaagaccggtaaacgtagcacttcagcggcggttttagaagctcttcgcgaagtccatcccattgtggacaagatcttgcagtaccgcgaactcgcgaaattgaaaggcacctatattgaccctcttccggcattagtccacccgaaaacgggacgcctccatacccgcttcaaccaaacagccacggcgaccggtcgtttgtcctcctctgatccaaaccttcagaatattccagtacgtaccccattgggccagaagatccgccgcgcgtttgtagctgaggagggttggcgtttagtggccctcgattatagccaaattgaattacgtgtccttgcccatctttctggcgatgagaacctcatccgcgtgtttcaggaaggcaaagacattcacactcaaacggcaagctggatgtttggattatcagctgaagcgatcgatcctttgatgcgtcgtgcagcgaagaccatcaatttcggtgttctctacggtatgagtgcccatcgtttgtcgcaggaattaggcattccctatgaagaagctgcggcgttcattcagcgctactttcaaagctatcccaaagttaaagcatggatcgagaagactctcgaagaaggccgcacacgtggttacgtagagaccttatttggacgtcgccgctatgttcccgatttaaacgctcgcgtgaaatctgtccgtgaagccgccgaacgcatggcgttcaacatgcctgtacagggcacggcagctgacctcatgaaacttgcaatggtgcgcctttttccacaattgcgtgaagttggtgcccgcatgctcttgcaggtccacgatgaactcttgttagaagcgccaaaagagcgtgcggaagaggtggcagccctcgcgaaagaggttatggaaggcgtgtggaggttagcggtgcctcttgaagtcgaagttggtattggcgaggattggttggctgccaaaggataatga

SEQ ID NO: 1656 - protein, 841 aa, synthetic construct
  REGION 1..841: note = Variant of DNA polymerase I from Thermus sp. strain 2.9
MHHHHHHGGSGMLPLFEPKGRVLLVDGHHLAYRNFFALKGLTTSRGEPVQGVYGFAKSLLKALKEDGDVVIVVFDAKAPSFRHEAYEAYKAGRAPTPEDFPRQLALMKELVDLLGLERLEVPGFEADDVLATLAKKAEREGYEVQILTADRDLFQLLSPRISVLHPEGHRITPEWLWEKYGLRPEQWVDFRALAGDPSDNIPGVKGIGEKTALKLLKEWGSLENLLKNLDQVKPESVREKILAHLEDLKLSRELSRVRTDLPLEVDFRGRREPDWEGLKAFLERLEFGSLLHEFGLLESPLPAEEAPWPPPEGAFLGYRLSRPEPMWAELLALAASAQGRVYRAEDPHGALRGLKEVRGLLAKDLAVVALREGLDLPPTDDPMLLAYLLDPSNTTPEGVARRYGGEWTEDAGERALLAERLHANLLGRLQGEERLLWLYEEVEKPLSRVLAHMEATGVKLDVAYLEALSLEVAAEMRRLEEEVFRLAGHSFNLNSRDQLERVLFDELGLPPIGKTEKTGKRSTSAAVLEALREVHPIVDKILQYRELAKLKGTYIDPLPALVHPKTGRLHTRFNQTATATGRLSSSDPNLQNIPVRTPLGQKIRRAFVAEEGWRLVALDYSQIELRVLAHLSGDENLIRVFQEGKDIHTQTASWMFGLSAEAIDPLMRRAAKTINFGVLYGMSAHRLSQELGIPYEEAAAFIQRYFQSYPKVKAWIEKTLEEGRTRGYVETLFGRRRYVPDLNARVKSVREAAERMAFNMPVQGTAADLMKLAMVRLFPQLREVGARMLLQVHDELLLEAPKERAEEVAALAKEVMEGVWRLAVPLEVEVGIGEDWLAAKG

SEQ ID NO: 1657 - DNA, 2529 bp, synthetic construct
  misc_feature 1..2529: note = Variant of DNA polymerase I from Thermus sp. strain 2.9
  source 1..2529: mol_type = other DNA
atgcaccatcatcatcatcatggcggtagcggcatgttaccgttgttcgaacctaaaggtcgcgtgcttctggttgatggccatcatctcgcgtatcgtaacttctttgccctgaaaggattaaccaccagccgtggcgagccggtacagggtgtctacggctttgcaaagtcgctcctgaaagctctgaaagaagacggtgatgtggtgattgttgtctttgatgcgaaagcgccaagttttcgccacgaagcgtacgaagcttacaaagccgggcgtgctccaacgccggaagactttcctcgccaattggcgcttatgaaggaattagtggatttgcttggcctcgaacgcttggaagttcccggtttcgaggcagacgacgtattagcgactctcgcaaagaaagccgaacgtgagggctatgaagtccagatcttgacagcagatcgcgatcttttccagcttttatctccgcgcatctcggtgttacacccggaagggcatcgtatcaccccggaatggctctggggtaaatatggtttgcgtcccgaacaatgggtggattttcgcgccttagcaggcgatccgagcgacaatattccgggagttaaaggtatcggcgagaagacggcgctcaagctccttaaagaatgggggtcgttggagaacttgcttaagaatttagatcaggtcaaaccagagtcagtgcgtgagaagattcttgcacacctcgaagacctcaaattaagccgcgaattgtcccgtgtacgcaccgatttgccgctcgaagttgatttccgtggccgccgcgaacctgactgggagggtcttaaagcgtttttagagcgtcttgaatttggttcgctcttgcatgaattcggccttttagaaagcccgttaccagccgaagaagcaccttggccaccgcccgaaggcgcgtttttaggttaccgtttgagtcgcccggaaccgatgtgggccgaattattggctcttgcagcgtctgcccagggacgtgtgtatcgcgcggaagaccctcatggtgcgctccgcggcctcaaagaagtccgtggactccttgccaaagacttagctgttgttgcattgcgcgaaggtcttgatttacctccgactgatgatccaatgcttcttgcgtacctcttggacccgtcaaacacgacgcccgaaggcgtagcccgtcgttacggcggcgagtggaccgaagatgcaggcgagcgcgcgttattggccgaacgtttgcacgccaatttattaggacgtttgcaaggcgaggaacgtctcctctggctttacgaagaagtggagaaaccattgagtcgcgtgctcgcgcatatggaagctaccggtgtcaaattagacgtggcgtatttggaggcactcagccttgaagttgctgccgaaatgcgccgcttggaggaagaagtattccgtttagcaggccactcctttaaccttaattctcgcgatcagttagaacgtgtgttgttcgatgaacttggtctccctcctatcggcaagacagagaagaccggtaaacgtagcacttcagcggcggttttagaagctcttcgcgaagtccatcccattgtggacaagatcttgcagtaccgcgaactcgcgaaattgaaaggcacctatattgaccctcttccggcattagtccacccgaaaacgggacgcctccatacccgcttcaaccaaacagccacggcgaccggtcgtttgtcctcctctgatccaaaccttcagaatattccagtacgtaccccattgggccagaagatccgccgcgcgtttgtagctgaggagggttggcgtttagtggccctcgattatagccaaattgaattacgtgtccttgcccatctttctggcgatgagaacctcatccgcgtgtttcaggaaggcaaagacattcacactcaaacggcaagctggatgtttggattatcagctgaagcgatcgatcctttgatgcgtcgtgcagcgaagaccatcaatttcggtgttctctacggtatgagtgcccatcgtttgtcgcaggaattaggcattccctatgaagaagctgcggcgttcattcagcgctactttcaaagctatcccaaagttaaagcatggatcgagaagactctcgaagaaggccgcacacgtggttacgtagagaccttatttggacgtcgccgctatgttcccgatttaaacgctcgcgtgaaatctgtccgtgaagccgccgaacgcatggcgttcaacatgcctgtacagggcacggcagctgacctcatgaaacttgcaatggtgcgcctttttccacaattgcgtgaagttggtgcccgcatgctcttgcaggtccacgatgaactcttgttagaagcgccaaaagagcgtgcggaagaggtggcagccctcgcgaaagaggttatggaaggcgtgtggcccttagcggtgcctcttgaagtcgaagttggtattggcgaggattggttggctgccaaaggataatga

SEQ ID NO: 1658 - protein, 841 aa, synthetic construct; identical to SEQ ID NO: 1568
  REGION 1..841: note = Variant of DNA polymerase I from Thermus sp. strain 2.9

SEQ ID NO: 1659 - DNA, 2529 bp, synthetic construct
  misc_feature 1..2529: note = Variant of DNA polymerase I from Thermus sp. strain 2.9
  source 1..2529: mol_type = other DNA
atgcaccatcatcatcatcatggcggtagcggcatgttaccgttgttcgaacctaaaggtcgcgtgcttctggttgatggccatcatctcgcgtatcgtaacttctttgccctgaaaggattaaccaccagccgtggcgagccggtacagggtgtctacggctttgcaaagtcgctcctgaaagctctgaaagaagacggtgatgtggtgattgttgtctttgatgcgaaagcgccaagttttcgccacgaagcgtacgaagcttacaaagccgggcgtgctccaacgccggaagactttcctcgccaattggcgcttatgaaggaattagtggatttgcttggcctcgaacgcttggaagttcccggtttcgaggcagacgacgtattagcgactctcgcaaagaaagccgaacgtgagggctatgaagtccagatcttgacagcagatcgcgatcttttccagcttttatctccgcgcatctcggtgttacacccggaagggcatcgtatcaccccggaatggctctgggagaaatatggtttgcgtcccgaacaatgggtggattttcgcgccttagcaggcgatccgagcgacaatattccgggagttaaaggtatcggcgagaagacggcgctcaagctccttaaagaatgggggtcgttggagaacttgcttaagaatttagatcaggtcaaaccagagtcagtgcgtgagaagattcttgcacacctcgaagacctcggtttaagccgcgaattgtcccgtgtacgcaccgatttgccgctcgaagttgatttccgtggccgccgcgaacctgactgggagggtcttaaagcgtttttagagcgtcttgaatttggttcgctcttgcatgaattcggccttttagaaagcccgttaccagccgaagaagcaccttggccaccgcccgaaggcgcgtttttaggttaccgtttgagtcgcccggaaccgatgtgggccgaattattggctcttgcagcgtctgcccagggacgtgtgtatcgcgcggaagaccctcatggtgcgctccgcggcctcaaagaagtccgtggactccttgccaaagacttagctgttgttgcattgcgcgaaggtcttgatttacctccgactgatgatccaatgcttcttgcgtacctcttggacccgtcaaacacgacgcccgaaggcgtagcccgtcgttacggcggcgagtggaccgaagatgcaggcgagcgcgcgttattggccgaacgtttgcacgccaatttattaggacgtttgcaaggcgaggaacgtctcctctggctttacgaagaagtggagaaaccattgagtcgcgtgctcgcgcatatggaagctaccggtgtcaaattagacgtggcgtatttggaggcactcagccttgaagttgctgccgaaatgcgccgcttggaggaagaagtattccgtttagcaggccactcctttaaccttaattctcgcgatcagttagaacgtgtgttgttcgatgaacttggtctccctcctatcggcaagacagagaagaccggtaaacgtagcacttcagcggcggttttagaagctcttcgcgaagtccatcccattgtggacaagatcttgcagtaccgcgaactcgcgaaattgaaaggcacctatattgaccctcttccggcattagtccacccgaaaacgggacgcctccatacccgcttcaaccaaacagccacggcgaccggtcgtttgtcctcctctgatccaaaccttcagaatattccagtacgtaccccattgggccagaagatccgccgcgcgtttgtagctgaggagggttggcgtttagtggccctcgattatagccaaattgaattacgtgtccttgcccatctttctggcgatgagaacctcatccgcgtgtttcaggaaggcaaagacattcacactcaaacggcaagctggatgtttggattatcagctgaagcgatcgatcctttgatgcgtcgtgcagcgaagaccatcaatttcggtgttctctacggtatgagtgcccatcgtttgtcgcaggaattaggcattccctatgaagaagctgcggcgttcattcagcgctactttcaaagctatcccaaagttaaagcatggatcgagaagactctcgaagaaggccgcacacgtggttacgtagagaccttatttggacgtcgccgctatgttcccgatttaaacgctcgcgtgaaatctgtccgtgaagccgccgaacgcatggcgttcaacatgcctgtacagggcacggcagctgacctcatgaaacttgcaatggtgcgcctttttccacaattgcgtgaagttggtgcccgcatgctcttgcaggtccacgatgaactcttgttagaagcgccaaaagagcgtgcggaagaggtggcagccctcgcgaaagaggttatggaaggcgtgtggcccttagcggtgcctcttgaagtcgaagttggtattggcgaggattggttggctgccaaaggataatga

SEQ ID NO: 1660 - protein, 841 aa, synthetic construct
  REGION 1..841: note = Variant of DNA polymerase I from Thermus sp. strain 2.9
MHHHHHHGGSGMLPLFEPKGRVLLVDGHHLAYRNFFALKGLTTSRGEPVQGVYGFAKSLLKALKEDGDVVIVVFDAKAPSFRHEAYEAYKAGRAPTPEDFPRQLALMKELVDLLGLERLEVPGFEADDVLATLAKKAEREGYEVQILTADRDLFQLLSPRISVLHPEGHRITPEWLWEKYGLRPEQWVDFRALAGDPSDNIPGVKGIGEKTALKLLKEWGSLENLLKNLDQVKPESVREKILAHLEDLGLSRELSRVRTDLPLEVDFRGRREPDWEGLKAFLERLEFGSLLHEFGLLESPLPAEEAPWPPPEGAFLGYRLSRPEPMWAELLALAASAQGRVYRAEDPHGALRGLKEVRGLLAKDLAVVALREGLDLPPTDDPMLLAYLLDPSNTTPEGVARRYGGEWTEDAGERALLAERLHANLLGRLQGEERLLWLYEEVEKPLSRVLAHMEATGVKLDVAYLEALSLEVAAEMRRLEEEVFRLAGHSFNLNSRDQLERVLFDELGLPPIGKTEKTGKRSTSAAVLEALREVHPIVDKILQYRELAKLKGTYIDPLPALVHPKTGRLHTRFNQTATATGRLSSSDPNLQNIPVRTPLGQKIRRAFVAEEGWRLVALDYSQIELRVLAHLSGDENLIRVFQEGKDIHTQTASWMFGLSAEAIDPLMRRAAKTINFGVLYGMSAHRLSQELGIPYEEAAAFIQRYFQSYPKVKAWIEKTLEEGRTRGYVETLFGRRRYVPDLNARVKSVREAAERMAFNMPVQGTAADLMKLAMVRLFPQLREVGARMLLQVHDELLLEAPKERAEEVAALAKEVMEGVWPLAVPLEVEVGIGEDWLAAKG

SEQ ID NO: 1661 - DNA, 2529 bp, synthetic construct
  misc_feature 1..2529: note = Variant of DNA polymerase I from Thermus sp. strain 2.9
  source 1..2529: mol_type = other DNA
atgcaccatcatcatcatcatggcggtagcggcatgttaccgttgttcgaacctaaaggtcgcgtgcttctggttgatggccatcatctcgcgtatcgtaacttctttgccctgaaaggattaaccaccagccgtggcgagccggtacagggtgtctacggctttgcaaagtcgctcctgaaagctctgaaagaagacggtgatgtggtgattgttgtctttgatgcgaaagcgccaagttttcgccacgaagcgtacgaagcttacaaagccgggcgtgctccaacgccggaagactttcctcgccaattggcgcttatgaaggaattagtggatttgcttggcctcgaacgcttggaagttcccggtttcgaggcagacgacgtattagcgactctcgcaaagaaagccgaacgtgagggctatgaagtccagatcttgacagcagatcgcgatcttttccagcttttatctccgcgcatctcggtgttacacccggaagggcatcgtatcaccccggaatggctctgggagaaatatggtttgcgtcccgaacaatgggtggattttcgcgccttagcaggcgatccgagcgacaatattccgggagttaaaggtatcggcgagaagacggcgctcaagctccttaaagaatgggggtcgttggagaacttgcttaagaatttagatcaggtcaaaccagagtcagtgcgtgagaagattcttgcacacctcgaagacctcaaattaagccgcgaattgtcccgtgtacgcaccgatttgccgctcgaagttgatttccgtggccgccgcgaacctgactgggagggtcttaaagcgtttttagagcgtcttgaatttggttcgctcttgcatgaattcggccttttagaaagcccgttaccagccgaagaagcaccttggccaccgcccgaaggcgcgtttttaggttaccgtttgagtttgccggaaccgatgtgggccgaattattggctcttgcagcgtctgcccagggacgtgtgtatcgcgcggaagaccctcatggtgcgctccgcggcctcaaagaagtccgtggactccttgccaaagacttagctgttgttgcattgcgcgaaggtcttgatttacctccgactgatgatccaatgcttcttgcgtacctcttggacccgtcaaacacgacgcccgaaggcgtagcccgtcgttacggcggcgagtggaccgaagatgcaggcgagcgcgcgttattggccgaacgtttgcacgccaatttattaggacgtttgcaaggcgaggaacgtctcctctggctttacgaagaagtggagaaaccattgagtcgcgtgctcgcgcatatggaagctaccggtgtcaaattagacgtggcgtatttggaggcactcagccttgaagttgctgccgaaatgcgccgcttggaggaagaagtattccgtttagcaggccactcctttaaccttaattctcgcgatcagttagaacgtgtgttgttcgatgaacttggtctccctcctatcggcaagacagagaagaccggtaaacgtagcacttcagcggcggttttagaagctcttcgcgaagtccatcccattgtggacaagatcttgcagtaccgcgaactcgcgaaattgaaaggcacctatattgaccctcttccggcattagtccacccgaaaacgggacgcctccatacccgcttcaaccaaacagccacggcgaccggtcgtttgtcctcctctgatccaaaccttcagaatattccagtacgtaccccattgggccagaagatccgccgcgcgtttgtagctgaggagggttggcgtttagtggccctcgattatagccaaattgaattacgtgtccttgcccatctttctggcgatgagaacctcatccgcgtgtttcaggaaggcaaagacattcacactcaaacggcaagctggatgtttggattatcagctgaagcgatcgatcctttgatgcgtcgtgcagcgaagaccatcaatttcggtgttctctacggtatgagtgcccatcgtttgtcgcaggaattaggcattccctatgaagaagctgcggcgttcattcagcgctactttcaaagctatcccaaagttaaagcatggatcgagaagactctcgaagaaggccgcacacgtggttacgtagagaccttatttggacgtcgccgctatgttcccgatttaaacgctcgcgtgaaatctgtccgtgaagccgccgaacgcatggcgttcaacatgcctgtacagggcacggcagctgacctcatgaaacttgcaatggtgcgcctttttccacaattgcgtgaagttggtgcccgcatgctcttgcaggtccacgatgaactcttgttagaagcgccaaaagagcgtgcggaagaggtggcagccctcgcgaaagaggttatggaaggcgtgtggcccttagcggtgcctcttgaagtcgaagttggtattggcgaggattggttggctgccaaaggataatga

SEQ ID NO: 1662 - protein, 841 aa, synthetic construct
  REGION 1..841: note = Variant of DNA polymerase I from Thermus sp. strain 2.9
MHHHHHHGGSGMLPLFEPKGRVLLVDGHHLAYRNFFALKGLTTSRGEPVQGVYGFAKSLLKALKEDGDVVIVVFDAKAPSFRHEAYEAYKAGRAPTPEDFPRQLALMKELVDLLGLERLEVPGFEADDVLATLAKKAEREGYEVQILTADRDLFQLLSPRISVLHPEGHRITPEWLWEKYGLRPEQWVDFRALAGDPSDNIPGVKGIGEKTALKLLKEWGSLENLLKNLDQVKPESVREKILAHLEDLKLSRELSRVRTDLPLEVDFRGRREPDWEGLKAFLERLEFGSLLHEFGLLESPLPAEEAPWPPPEGAFLGYRLSLPEPMWAELLALAASAQGRVYRAEDPHGALRGLKEVRGLLAKDLAVVALREGLDLPPTDDPMLLAYLLDPSNTTPEGVARRYGGEWTEDAGERALLAERLHANLLGRLQGEERLLWLYEEVEKPLSRVLAHMEATGVKLDVAYLEALSLEVAAEMRRLEEEVFRLAGHSFNLNSRDQLERVLFDELGLPPIGKTEKTGKRSTSAAVLEALREVHPIVDKILQYRELAKLKGTYIDPLPALVHPKTGRLHTRFNQTATATGRLSSSDPNLQNIPVRTPLGQKIRRAFVAEEGWRLVALDYSQIELRVLAHLSGDENLIRVFQEGKDIHTQTASWMFGLSAEAIDPLMRRAAKTINFGVLYGMSAHRLSQELGIPYEEAAAFIQRYFQSYPKVKAWIEKTLEEGRTRGYVETLFGRRRYVPDLNARVKSVREAAERMAFNMPVQGTAADLMKLAMVRLFPQLREVGARMLLQVHDELLLEAPKERAEEVAALAKEVMEGVWPLAVPLEVEVGIGEDWLAAKG

SEQ ID NO: 1663 - DNA, 2529 bp, synthetic construct
  misc_feature 1..2529: note = Variant of DNA polymerase I from Thermus sp. strain 2.9
  source 1..2529: mol_type = other DNA
atgcaccatcatcatcatcatggcggtagcggcatgttaccgttgttcgaacctaaaggtcgcgtgcttctggttgatggccatcatctcgcgtatcgtaacttctttgccctgaaaggattaaccaccagccgtggcgagccggtacagggtgtctacggctttgcaaagtcgctcctgaaagctctgaaagaagacggtgatgtggtgattgttgtctttgatgcgaaagcgccaagttttcgccacgaagcgtacgaagcttacaaagccgggcgtgctccaacgccggaagactttcctcgccaattggcgcttatgaaggaattagtggatttgcttggcctcgaacgcttggaagttcccggtttcgaggcagacgacgtattagcgactctcgcaaagaaagccgaacgtgagggctatgaagtccagatcttgacagcagatcgcgatcttttccagcttttatctccgcgcatctcggtgttacacccggaagggcatcgtatcaccccggaatggctctgggagaaatatggtttgcgtcccgaacaatgggtggattttcgcgccttagcaggcgatccgagcgacaatattccgggagttaaaggtatcggcgagaagacggcgctcaagctccttaaagaatgggggtcgttggagaacttgcttaagaatttagatcaggtcaaaccagagtcagtgcgtgagaagattcttgcacacctcgaagacctcaaattaagccgcgaattgtcccgtgtacgcaccgatttgccgctcgaagttgatttccgtggccgccgcgaacctgactgggagggtcttaaagcgtttttagagcgtcttgaatttggttcgctcttgcatgaattcggccttttagaaagcccgttaccagccgaagaagcaccttggccaccgcccgaaggcgcgtttttaggttaccgtttgagtcgcccggaaccgatgtgggccgaattattggctcttgcagcgtctgcccagggacgtgtgtatcgcgcggaagaccctcatggtgcgctccgcggcctcaaagaagtccgtggactccttgccaaagacttagctgttgttgcattgcgcgaaggtcttgatttacctccgactgatgatccaatgcttcttgcgtacctcttggacccgtcaaacacgacgcccgaaggcgtagcccgtcgttacggcggcgagtggaccgaagatgcaggcgagcgcgcgttattggccgaacgtttgcacgccaatttattaggacgtttgcaaggcgaggaacgtctcctctggctttacgaagaagtggagaaaccattgagtcgcgtgctcgcgcatatggaagctaccggtgtcaaattagacgtggcgtatttggaggcactcagccttgaagttgctgccgaaatgcgccgcttggaggaagaagtattccgtttagcaggccactcctttaaccttaattctcgcgatcagttagaacgtgtgttgttcgatgaacttggtctccctcctatcggcaagacagagaagaccggtaaacgtagcacttcagcggcggttttagaagctcttcgcgaagtccatcccattgtggacaagatcttgcagtaccgcgaactcgcgaaattgaaaggcacctatattgaccctcttccggcattagtccacccgaaaacgggacgcctccatacccgcttcaaccaaacagccacggcgaccggtcgtttgtcctcctctgatccaaaccttcagaatattccagtacgtaccccattgggccagaagatccgccgcgcgtttgtagctgaggagggttggcgtttagtggccctcgattatagccaaattgaattacgtgtccttgcccatctttctggcgatgagaacctcatccgcgtgtttcaggaaggcaaagacattcacactcaaacggcaagctggatgtttggattatcagctgaagcgatcgatcctttgatgcgtcgtgcagcgaagaccatcaatttcggtgttctctacggtatgagtgcccatcgtttgtcgcaggaattaggcattccctattgggaagctgcggcgttcattcagcgctactttcaaagctatcccaaagttaaagcatggatcgagaagactctcgaagaaggccgcacacgtggttacgtagagaccttatttggacgtcgccgctatgttcccgatttaaacgctcgcgtgaaatctgtccgtgaagccgccgaacgcatggcgttcaacatgcctgtacagggcacggcagctgacctcatgaaacttgcaatggtgcgcctttttccacaattgcgtgaagttggtgcccgcatgctcttgcaggtccacgatgaactcttgttagaagcgccaaaagagcgtgcggaagaggtggcagccctcgcgaaagaggttatggaaggcgtgtggcccttagcggtgcctcttgaagtcgaagttggtattggcgaggattggttggctgccaaaggataatga

SEQ ID NO: 1664 - protein, 841 aa, synthetic construct
  REGION 1..841: note = Variant of DNA polymerase I from Thermus sp. strain 2.9
MHHHHHHGGSGMLPLFEPKGRVLLVDGHHLAYRNFFALKGLTTSRGEPVQGVYGFAKSLLKALKEDGDVVIVVFDAKAPSFRHEAYEAYKAGRAPTPEDFPRQLALMKELVDLLGLERLEVPGFEADDVLATLAKKAEREGYEVQILTADRDLFQLLSPRISVLHPEGHRITPEWLWEKYGLRPEQWVDFRALAGDPSDNIPGVKGIGEKTALKLLKEWGSLENLLKNLDQVKPESVREKILAHLEDLKLSRELSRVRTDLPLEVDFRGRREPDWEGLKAFLERLEFGSLLHEFGLLESPLPAEEAPWPPPEGAFLGYRLSRPEPMWAELLALAASAQGRVYRAEDPHGALRGLKEVRGLLAKDLAVVALREGLDLPPTDDPMLLAYLLDPSNTTPEGVARRYGGEWTEDAGERALLAERLHANLLGRLQGEERLLWLYEEVEKPLSRVLAHMEATGVKLDVAYLEALSLEVAAEMRRLEEEVFRLAGHSFNLNSRDQLERVLFDELGLPPIGKTEKTGKRSTSAAVLEALREVHPIVDKILQYRELAKLKGTYIDPLPALVHPKTGRLHTRFNQTATATGRLSSSDPNLQNIPVRTPLGQKIRRAFVAEEGWRLVALDYSQIELRVLAHLSGDENLIRVFQEGKDIHTQTASWMFGLSAEAIDPLMRRAAKTINFGVLYGMSAHRLSQELGIPYWEAAAFIQRYFQSYPKVKAWIEKTLEEGRTRGYVETLFGRRRYVPDLNARVKSVREAAERMAFNMPVQGTAADLMKLAMVRLFPQLREVGARMLLQVHDELLLEAPKERAEEVAALAKEVMEGVWPLAVPLEVEVGIGEDWLAAKG

SEQ ID NO: 1665 - DNA, 2529 bp, synthetic construct
  misc_feature 1..2529: note = Variant of DNA polymerase I from Thermus sp. strain 2.9
  source 1..2529: mol_type = other DNA
atgcaccatcatcatcatcatggcggtagcggcatgttaccgttgttcgaacctaaaggtcgcgtgcttctggttgatggccatcatctcgcgtatcgtaacttctttgccctgaaaggattaaccaccagccgtggcgagccggtacagggtgtctacggctttgcaaagtcgctcctgaaagctctgaaagaagacggtgatgtggtgattgttgtctttgatgcgaaagcgccaagttttcgccacgaagcgtacgaagcttacaaagccgggcgtgctccaacgccggaagactttcctcgccaattggcgcttatgaaggaattagtggatttgcttggcctcgaacgcttggaagttcccggtttcgaggcagacgacgtattagcgactctcgcaaagaaagccgaacgtgagggctatgaagtccagatcttgacagcagatcgcgatcttttccagcttttatctccgcgcatctcggtgttacacccggaagggcatcgtatcaccccggaatggctctgggagaaatatggtttgcgtcccgaacaatgggtggattttcgcgccttagcaggcgatccgagcgacaatattccgggagttaaaggtatcggcgagaagacggcgctcaagctccttaaagaatgggggtcgttggagaacttgcttaagaatttagatcaggtcaaaccagagtcagtgcgtgagaagattcttgcacacctcgaagacctcaaattaagccgcgaattgtcccgtgtacgcaccgatttgccgctcgaagttgatttccgtggccgccgcgaacctgactgggagggtcttaaagcgtttttagagcgtcttgaatttggttcgctcttgcatgaattcggccttttagaaagcccgttaccagccgaagaagcaccttggccaccgcccgaaggcgcgtttttaggttaccgtttgagtcgcccggaaccgatgtgggccgaattattggctcttgcagcgtctgcccagggacgtgtgtatcgcgcggaagaccctcatggtgcgctccgcggcctcaaagaagtccgtggactccttgccaaagacttagctgttgttgcattgcgcgaaggtcttgatttacctccgactgatgatccaatgcttcttgcgtacctcttggacccgtcaaacacgacgcccgaaggcgtagcccgtcgttacggcggcgagtggaccgaagatgcaggcgagcgcgcgttattggccgaacgtttgcacgccaatttattaggacgtttgcaaggcgaggaacgtctcctctggctttacgaagaagtggagaaaccattgagtcgcgtgctcgcgcatatggaagctaccggtgtcaaattagacgtggcgtatttggaggcactcagccttgaagttgctgccgaaatgcgccgcttggaggaagaagtattccgtttagcaggccactcctttaaccttaattctcgcgatcagttagaacgtgtgttgttcgatgaacttggtctccctgagatcggcaagacagagaagaccggtaaacgtagcacttcagcggcggttttagaagctcttcgcgaagtccatcccattgtggacaagatcttgcagtaccgcgaactcgcgaaattgaaaggcacctatattgaccctcttccggcattagtccacccgaaaacgggacgcctccatacccgcttcaaccaaacagccacggcgaccggtcgtttgtcctcctctgatccaaaccttcagaatattccagtacgtaccccattgggccagaagatccgccgcgcgtttgtagctgaggagggttggcgtttagtggccctcgattatagccaaattgaattacgtgtccttgcccatctttctggcgatgagaacctcatccgcgtgtttcaggaaggcaaagacattcacactcaaacggcaagctggatgtttggattatcagctgaagcgatcgatcctttgatgcgtcgtgcagcgaagaccatcaatttcggtgttctctacggtatgagtgcccatcgtttgtcgcaggaattaggcattccctatgaagaagctgcggcgttcattcagcgctactttcaaagctatcccaaagttaaagcatggatcgagaagactctcgaagaaggccgcacacgtggttacgtagagaccttatttggacgtcgccgctatgttcccgatttaaacgctcgcgtgaaatctgtccgtgaagccgccgaacgcatggcgttcaacatgcctgtacagggcacggcagctgacctcatgaaacttgcaatggtgcgcctttttccacaattgcgtgaagttggtgcccgcatgctcttgcaggtccacgatgaactcttgttagaagcgccaaaagagcgtgcggaagaggtggcagccctcgcgaaagaggttatggaaggcgtgtggcccttagcggtgcctcttgaagtcgaagttggtattggcgaggattggttggctgccaaaggataatga

SEQ ID NO: 1666 - protein, 841 aa, synthetic construct
  REGION 1..841: note = Variant of DNA polymerase I from Thermus sp. strain 2.9
MHHHHHHGGSGMLPLFEPKGRVLLVDGHHLAYRNFFALKGLTTSRGEPVQGVYGFAKSLLKALKEDGDVVIVVFDAKAPSFRHEAYEAYKAGRAPTPEDFPRQLALMKELVDLLGLERLEVPGFEADDVLATLAKKAEREGYEVQILTADRDLFQLLSPRISVLHPEGHRITPEWLWEKYGLRPEQWVDFRALAGDPSDNIPGVKGIGEKTALKLLKEWGSLENLLKNLDQVKPESVREKILAHLEDLKLSRELSRVRTDLPLEVDFRGRREPDWEGLKAFLERLEFGSLLHEFGLLESPLPAEEAPWPPPEGAFLGYRLSRPEPMWAELLALAASAQGRVYRAEDPHGALRGLKEVRGLLAKDLAVVALREGLDLPPTDDPMLLAYLLDPSNTTPEGVARRYGGEWTEDAGERALLAERLHANLLGRLQGEERLLWLYEEVEKPLSRVLAHMEATGVKLDVAYLEALSLEVAAEMRRLEEEVFRLAGHSFNLNSRDQLERVLFDELGLPEIGKTEKTGKRSTSAAVLEALREVHPIVDKILQYRELAKLKGTYIDPLPALVHPKTGRLHTRFNQTATATGRLSSSDPNLQNIPVRTPLGQKIRRAFVAEEGWRLVALDYSQIELRVLAHLSGDENLIRVFQEGKDIHTQTASWMFGLSAEAIDPLMRRAAKTINFGVLYGMSAHRLSQELGIPYEEAAAFIQRYFQSYPKVKAWIEKTLEEGRTRGYVETLFGRRRYVPDLNARVKSVREAAERMAFNMPVQGTAADLMKLAMVRLFPQLREVGARMLLQVHDELLLEAPKERAEEVAALAKEVMEGVWPLAVPLEVEVGIGEDWLAAKG

SEQ ID NO: 1667 - DNA, 2529 bp, synthetic construct
  misc_feature 1..2529: note = Variant of DNA polymerase I from Thermus sp. strain 2.9
  source 1..2529: mol_type = other DNA
atgcaccatcatcatcatcatggcggtagcggcatgttaccgttgttcgaacctaaaggtcgcgtgcttctggttgatggccatcatctcgcgtatcgtaacttctttgccctgaaaggattaaccaccagccgtggcgagccggtacagggtgtctacggctttgcaaagtcgctcctgaaagctctgaaagaagacggtgatgtggtgattgttgtctttgatgcgaaagcgccaagttttcgccacgaagcgtacgaagcttacaaagccgggcgtgctccaacgccggaagactttcctcgccaattggcgcttatgaaggaattagtggatttgcttggcctcgaacgcttggaagttcccggtttcgaggcagacgacgtattagcgactctcgcaaagaaagccgaacgtgagggctatgaagtccagatcttgacagcagatcgcgatcttttccagcttttatctccgcgcatctcggtgttacacccggaagggcatcgtatcaccccggaatggctctgggagaaatatggtttgcgtcccgaacaatgggtggattttcgcgccttagcaggcgatccgagcgacaatattccgggagttaaaggtatcggcgagaagacggcgctcaagctccttaaagaatgggggtcgttggagaacttgcttaagaatttagatcaggtcaaaccagagtcagtgcgtgagaagattcttgcacacctcgaagacctcaaattaagccgcgaattgtcccgtgtacgcaccgatttgccgctcgaagttgatttccgtggccgccgcgaacctgactgggagggtcttaaagcgtttttagagcgtcttgaatttggttcgctcttgcatgaattcggccttttagaaagcccgttaccagccgaagaagcaccttggccaccgcccgaaggcgcgtttttaggttaccgtttgagtcgcccggaaccgatgtgggccgaattattggctcttgcagcgtctgcccagggacgtgtgtatcgcgcggaagaccctcatggtgcgctccgcggcctcaaagaagtccgtggactccttgccaaagacttagctgttgttgcattgcgcgaaggtcttgatttacctccgactgatgatccaatgcttcttgcgtacctcttggacccgtcaaacacgacgcccgaaggcgtagcccgtcgttacggcggcgagtggaccgaagatgcaggcgagcgcgcgttattggccgaacgtttgcacgccaatttattaggacgtttgcaaggcgaggaacgtctcctctggctttacgaagaagtggagaaaccattgagtcgcgtgctcgcgcatatggaagctaccggtgtcaaattagacgtggcgtatttggaggcactcagccttgaagttgctgccgaaatgcgccgcttggaggaagaagtattccgtttagcaggccactcctttaaccttaattctcgcgatcagttagaacgtgtgttgttcgatgaacttggtctccctcctatcggcaagacagagaagaccggtaaacgtagcacttcagcggcggttttagaagctcttcgcgaagtccatcccattgtggacaagatcttgcagtaccgcgaactcgcgaaattgaaaggcacctatattgaccctcttccggcattagtccacccgaaaacgggacgcctccatacccgcttcaaccaaacagccacggcgaccggtcgtttgtcctcctctgatccaaaccttcagaatattccagtacgtaccccattgggccagaagatccgccgcgcgtttgtagctgaggagggttggcgtttagtggccctcgattatagccaaattgaattacgtgtccttgcccatctttctggcgatgagaacctcatccgcgtgtttcaggaaggcaaagacattcacactcaaacggcaagctggatgtttggattatcagctgaagcgatcgatcctttgatgcgtcgtgcagcgaagaccatcaatttcggtgttctctacggtatgagtgcccatcgtttgtcgcaggaattaggcattccctatgaagaagctgcggcgttcattcagcgctactttcaaagctatcccaaagttaaagcatggatcgagaagactctcgaagaaggccgcctgcgtggttacgtagagaccttatttggacgtcgccgctatgttcccgatttaaacgctcgcgtgaaatctgtccgtgaagccgccgaacgcatggcgttcaacatgcctgtacagggcacggcagctgacctcatgaaacttgcaatggtgcgcctttttccacaattgcgtgaagttggtgcccgcatgctcttgcaggtccacgatgaactcttgttagaagcgccaaaagagcgtgcggaagaggtggcagccctcgcgaaagaggttatggaaggcgtgtggcccttagcggtgcctcttgaagtcgaagttggtattggcgaggattggttggctgccaaaggataatga

SEQ ID NO: 1668 - protein, 841 aa, synthetic construct
  REGION 1..841: note = Variant of DNA polymerase I from Thermus sp. strain 2.9
MHHHHHHGGSGMLPLFEPKGRVLLVDGHHLAYRNFFALKGLTTSRGEPVQGVYGFAKSLLKALKEDGDVVIVVFDAKAPSFRHEAYEAYKAGRAPTPEDFPRQLALMKELVDLLGLERLEVPGFEADDVLATLAKKAEREGYEVQILTADRDLFQLLSPRISVLHPEGHRITPEWLWEKYGLRPEQWVDFRALAGDPSDNIPGVKGIGEKTALKLLKEWGSLENLLKNLDQVKPESVREKILAHLEDLKLSRELSRVRTDLPLEVDFRGRREPDWEGLKAFLERLEFGSLLHEFGLLESPLPAEEAPWPPPEGAFLGYRLSRPEPMWAELLALAASAQGRVYRAEDPHGALRGLKEVRGLLAKDLAVVALREGLDLPPTDDPMLLAYLLDPSNTTPEGVARRYGGEWTEDAGERALLAERLHANLLGRLQGEERLLWLYEEVEKPLSRVLAHMEATGVKLDVAYLEALSLEVAAEMRRLEEEVFRLAGHSFNLNSRDQLERVLFDELGLPPIGKTEKTGKRSTSAAVLEALREVHPIVDKILQYRELAKLKGTYIDPLPALVHPKTGRLHTRFNQTATATGRLSSSDPNLQNIPVRTPLGQKIRRAFVAEEGWRLVALDYSQIELRVLAHLSGDENLIRVFQEGKDIHTQTASWMFGLSAEAIDPLMRRAAKTINFGVLYGMSAHRLSQELGIPYEEAAAFIQRYFQSYPKVKAWIEKTLEEGRLRGYVETLFGRRRYVPDLNARVKSVREAAERMAFNMPVQGTAADLMKLAMVRLFPQLREVGARMLLQVHDELLLEAPKERAEEVAALAKEVMEGVWPLAVPLEVEVGIGEDWLAAKG

SEQ ID NO: 1669 - DNA, 2529 bp, synthetic construct
  misc_feature 1..2529: note = Variant of DNA polymerase I from Thermus sp. strain 2.9
  source 1..2529: mol_type = other DNA
atgcaccatcatcatcatcatggcggtagcggcatgttaccgttgttcgaacctaaaggtcgcgtgcttctggttgatggccatcatctcgcgtatcgtaacttctttgccctgaaaggattaaccaccagccgtggcgagccggtacagggtgtctacggctttgcaaagtcgctcctgaaagctctgaaagaagacggtgatgtggtgattgttgtctttgatgcgaaagcgccaagttttcgccacgaagcgtacgaagcttacaaagccgggcgtgctccaacgccggaagactttcctcgccaattggcgcttatgaaggaattagtggatttgcttggcctcgaacgcttggaagttcccggtttcgaggcagacgacgtattagcgactctcgcaaagaaagccgaacgtgagggctatgaagtccagatcttgacagcagatcgcgatcttttccagcttttatctccgcgcatctcggtgttacacccggaagggcatcgtatcaccccggaatggctctgggagaaatatggtttgcgtcccgaacaatgggtggattttcgcgccttagcaggcgatccgagcgacaatattccgggagttaaaggtatcggcgagaagacggcgctcaagctccttaaagaatgggggtcgttggagaacttgcttaagaatttagatcaggtcaaaccagagtcagtgcgtgagaagattcttgcacacctcgaagacctcaaattaagccgcgaattgtcccgtgtacgcaccgatttgccgctcgaagttgatttccgtggccgccgcgaacctgactgggagggtcttaaagcgtttttagagcgtcttgaatttggttcgctcttgcatgaattcggccttttagaaagcccgttaccagccgaagaagcaccttggccaccgcccgaaggcgcgtttttaggttaccgtttgagtcgcccggaaccgatgtgggccgaattattggctcttgcagcgtctgcccagggacgtgtgtatcgcgcggaagaccctcatggtgcgctccgcggcctcaaagaagtccgtggactccttgccaaagacttagctgttgttgcattgcgcgaaggtcttgatttacctccgactgatgatccaatgcttcttgcgtacctcttggacccgtcaaacacgacgcccgaaggcgtagcccgtcgttacggcggcgagtggaccgaagatgcaggcgagcgcgcgttattggccgaacgtttgcacgccaatttattaggacgtttgcaaggcgaggaacgtctcctctggctttacgaagaagtggagaaaccattgagtcgcgtgctcgcgcatatggaagctaccggtgtcaaattagacgtggcgtatttggaggcactcagccttgaagttgctgccgaaatgcgccgcttggaggaagaagtattccgtttagcaggccactcctttaaccttaattctcgcgatcagttagaacgtgtgttgttcgatgaacttggtctccctcctatcggcaagacagagaagaccggtaaacgtagcacttcagcggcggttttagaagctcttcgcgaagtccatcccattgtggacaagatcttgcagtaccgcgaactcgcgaaattgaaaggcacctatattgaccctcttccggcattagtccacccgaaaacgggacgcctccatacccgcttcaaccaaacagccacggcgaccggtcgtttgtcctcctctgatccaaaccttcagaatattccagtacgtaccccattgggccagaagatccgccgcgcgtttgtagctgaggagggttggcgtttagtggccctcgattatagccaaattgaattacgtgtccttgcccatctttctggcgatgagaacctcatccgcgtgtttcaggaaggcaaagacattcacactcaaacggcaagctggatgtttggattatcagctgaagcgatcgatcctttgatgcgtcgtgcagcgaagaccatcaatttcggtgttctctacggtatgagtgcccatcgtttgtcgcaggaattaggcattccctatgaagaagctgcggcgttcattaagcgctactttcaaagctatcccaaagttaaagcatggatcgagaagactctcgaagaaggccgcacacgtggttacgtagagaccttatttggacgtcgccgctatgttcccgatttaaacgctcgcgtgaaatctgtccgtgaagccgccgaacgcatggcgttcaacatgcctgtacagggcacggcagctgacctcatgaaacttgcaatggtgcgcctttttccacaattgcgtgaagttggtgcccgcatgctcttgcaggtccacgatgaactcttgttagaagcgccaaaagagcgtgcggaagaggtggcagccctcgcgaaagaggttatggaaggcgtgtggcccttagcggtgcctcttgaagtcgaagttggtattggcgaggattggttggctgccaaaggataatga

SEQ ID NO: 1670 - protein, 841 aa, synthetic construct
  REGION 1..841: note = Variant of DNA polymerase I from Thermus sp. strain 2.9
MHHHHHHGGSGMLPLFEPKGRVLLVDGHHLAYRNFFALKGLTTSRGEPVQGVYGFAKSLLKALKEDGDVVIVVFDAKAPSFRHEAYEAYKAGRAPTPEDFPRQLALMKELVDLLGLERLEVPGFEADDVLATLAKKAEREGYEVQILTADRDLFQLLSPRISVLHPEGHRITPEWLWEKYGLRPEQWVDFRALAGDPSDNIPGVKGIGEKTALKLLKEWGSLENLLKNLDQVKPESVREKILAHLEDLKLSRELSRVRTDLPLEVDFRGRREPDWEGLKAFLERLEFGSLLHEFGLLESPLPAEEAPWPPPEGAFLGYRLSRPEPMWAELLALAASAQGRVYRAEDPHGALRGLKEVRGLLAKDLAVVALREGLDLPPTDDPMLLAYLLDPSNTTPEGVARRYGGEWTEDAGERALLAERLHANLLGRLQGEERLLWLYEEVEKPLSRVLAHMEATGVKLDVAYLEALSLEVAAEMRRLEEEVFRLAGHSFNLNSRDQLERVLFDELGLPPIGKTEKTGKRSTSAAVLEALREVHPIVDKILQYRELAKLKGTYIDPLPALVHPKTGRLHTRFNQTATATGRLSSSDPNLQNIPVRTPLGQKIRRAFVAEEGWRLVALDYSQIELRVLAHLSGDENLIRVFQEGKDIHTQTASWMFGLSAEAIDPLMRRAAKTINFGVLYGMSAHRLSQELGIPYEEAAAFIKRYFQSYPKVKAWIEKTLEEGRTRGYVETLFGRRRYVPDLNARVKSVREAAERMAFNMPVQGTAADLMKLAMVRLFPQLREVGARMLLQVHDELLLEAPKERAEEVAALAKEVMEGVWPLAVPLEVEVGIGEDWLAAKG

SEQ ID NO: 1671 - DNA, 2529 bp, synthetic construct
  misc_feature 1..2529: note = Variant of DNA polymerase I from Thermus sp. strain 2.9
  source 1..2529: mol_type = other DNA
atgcaccatcatcatcatcatggcggtagcggcatgttaccgttgttcgaacctaaaggtcgcgtgcttctggttgatggccatcatctcgcgtatcgtaacttctttgccctgaaaggattaaccaccagccgtggcgagccggtacagggtgtctacggctttgcaaagtcgctcctgaaagctctgaaagaagacggtgatgtggtgattgttgtctttgatgcgaaagcgccaagttttcgccacgaagcgtaccaggcttacaaagccgggcgtgctccaacgccggaagactttcctcgccaattggcgcttatgaaggaattagtggatttgcttggcctcgaacgcttggaagttcccggtttcgaggcagacgacgtattagcgactctcgcaaagaaagccgaacgtgagggctatgaagtccagatcttgacagcagatcgcgatcttttccagcttttatctccgcgcatctcggtgttacacccggaagggcatcgtatcaccccggaatggctctgggagaaatatggtttgcgtcccgaacaatgggtggattttcgcgccttagcaggcgatccgagcgacaatattccgggagttaaaggtatcggcgagaagacggcgctcaagctccttaaagaatgggggtcgttggagaacttgcttaagaatttagatcaggtcaaaccagagtcagtgcgtgagaagattcttgcacacctcgaagacctcaaattaagccgcgaattgtcccgtgtacgcaccgatttgccgctcgaagttgatttccgtggccgccgcgaacctgactgggagggtcttaaagcgtttttagagcgtcttgaatttggttcgctcttgcatgaattcggccttttagaaagcccgttaccagccgaagaagcaccttggccaccgcccgaaggcgcgtttttaggttaccgtttgagtcgcccggaaccgatgtgggccgaattattggctcttgcagcgtctgcccagggacgtgtgtatcgcgcggaagaccctcatggtgcgctccgcggcctcaaagaagtccgtggactccttgccaaagacttagctgttgttgcattgcgcgaaggtcttgatttacctccgactgatgatccaatgcttcttgcgtacctcttggacccgtcaaacacgacgcccgaaggcgtagcccgtcgttacggcggcgagtggaccgaagatgcaggcgagcgcgcgttattggccgaacgtttgcacgccaatttattaggacgtttgcaaggcgaggaacgtctcctctggctttacgaagaagtggagaaaccattgagtcgcgtgctcgcgcatatggaagctaccggtgtcaaattagacgtggcgtatttggaggcactcagccttgaagttgctgccgaaatgcgccgcttggaggaagaagtattccgtttagcaggccactcctttaaccttaattctcgcgatcagttagaacgtgtgttgttcgatgaacttggtctccctcctatcggcaagacagagaagaccggtaaacgtagcacttcagcggcggttttagaagctcttcgcgaagtccatcccattgtggacaagatcttgcagtaccgcgaactcgcgaaattgaaaggcacctatattgaccctcttccggcattagtccacccgaaaacgggacgcctccatacccgcttcaaccaaacagccacggcgaccggtcgtttgtcctcctctgatccaaaccttcagaatattccagtacgtaccccattgggccagaagatccgccgcgcgtttgtagctgaggagggttggcgtttagtggccctcgattatagccaaattgaattacgtgtccttgcccatctttctggcgatgagaacctcatccgcgtgtttcaggaaggcaaagacattcacactcaaacggcaagctggatgtttggattatcagctgaagcgatcgatcctttgatgcgtcgtgcagcgaagaccatcaatttcggtgttctctacggtatgagtgcccatcgtttgtcgcaggaattaggcattccctatgaagaagctgcggcgttcattcagcgctactttcaaagctatcccaaagttaaagcatggatcgagaagactctcgaagaaggccgcacacgtggttacgtagagaccttatttggacgtcgccgctatgttcccgatttaaacgctcgcgtgaaatctgtccgtgaagccgccgaacgcatggcgttcaacatgcctgtacagggcacggcagctgacctcatgaaacttgcaatggtgcgcctttttccacaattgcgtgaagttggtgcccgcatgctcttgcaggtccacgatgaactcttgttagaagcgccaaaagagcgtgcggaagaggtggcagccctcgcgaaagaggttatggaaggcgtgtggcccttagcggtgcctcttgaagtcgaagttggtattggcgaggattggttggctgccaaaggataatga

SEQ ID NO: 1672 - protein, 841 aa, synthetic construct
  REGION 1..841: note = Variant of DNA polymerase I from Thermus sp. strain 2.9
MHHHHHHGGSGMLPLFEPKGRVLLVDGHHLAYRNFFALKGLTTSRGEPVQGVYGFAKSLLKALKEDGDVVIVVFDAKAPSFRHEAYQAYKAGRAPTPEDFPRQLALMKELVDLLGLERLEVPGFEADDVLATLAKKAEREGYEVQILTADRDLFQLLSPRISVLHPEGHRITPEWLWEKYGLRPEQWVDFRALAGDPSDNIPGVKGIGEKTALKLLKEWGSLENLLKNLDQVKPESVREKILAHLEDLKLSRELSRVRTDLPLEVDFRGRREPDWEGLKAFLERLEFGSLLHEFGLLESPLPAEEAPWPPPEGAFLGYRLSRPEPMWAELLALAASAQGRVYRAEDPHGALRGLKEVRGLLAKDLAVVALREGLDLPPTDDPMLLAYLLDPSNTTPEGVARRYGGEWTEDAGERALLAERLHANLLGRLQGEERLLWLYEEVEKPLSRVLAHMEATGVKLDVAYLEALSLEVAAEMRRLEEEVFRLAGHSFNLNSRDQLERVLFDELGLPPIGKTEKTGKRSTSAAVLEALREVHPIVDKILQYRELAKLKGTYIDPLPALVHPKTGRLHTRFNQTATATGRLSSSDPNLQNIPVRTPLGQKIRRAFVAEEGWRLVALDYSQIELRVLAHLSGDENLIRVFQEGKDIHTQTASWMFGLSAEAIDPLMRRAAKTINFGVLYGMSAHRLSQELGIPYEEAAAFIQRYFQSYPKVKAWIEKTLEEGRTRGYVETLFGRRRYVPDLNARVKSVREAAERMAFNMPVQGTAADLMKLAMVRLFPQLREVGARMLLQVHDELLLEAPKERAEEVAALAKEVMEGVWPLAVPLEVEVGIGEDWLAAKG

SEQ ID NO: 1673 - DNA, 2529 bp, synthetic construct
  misc_feature 1..2529: note = Variant of DNA polymerase I from Thermus sp. strain 2.9
  source 1..2529: mol_type = other DNA
atgcaccatcatcatcatcatggcggtagcggcatgttaccgttgttcgaacctaaaggtcgcgtgcttctggttgatggccatcatctcgcgtatcgtaacttctttgccctgaaaggattaaccaccagccgtggcgagccggtacagggtgtctacggctttgcaaagtcgctcctgaaagctctgaaagaagacggtgatgtggtgattgttgtctttgatgcgaaagcgccaagttttcgccacgaagcgtacgaagcttacaaagccgggcgtgctccaacgccggaagactttcctcgccaattggcgcttatgaaggaattagtggatttgcttggcctcgaacgcttggaagttcccggtttcgaggcagacgacgtattagcgactctcgcaaagaaagccgaacgtgagggctatgaagtccagatcttgacagcagatcgcgatcttttccagcttttatctccgcgcatctcggtgttacacccggaagggcatcgtatcaccccggaatggctctgggagaaatatggtttgcgtcccgaacaatgggtggattttcgcgccttagtgggcgatccgagcgacaatattccgggagttaaaggtatcggcgagaagacggcgctcaagctccttaaagaatgggggtcgttggagaacttgcttaagaatttagatcaggtcaaaccagagtcagtgcgtgagaagattcttgcacacctcgaagacctcaaattaagccgtgaattgtcccgtgtacgcaccgatttgccgctcgaagttgatttccgtggccgccgcgaacctgactgggagggtcttaaagcgtttttagagcgtcttgaatttggttcgctcttgcatgaattcggccttttagaaagcccgttaccagccgaagaagcaccttggccaccgcccgaaggcgcgtttttaggttaccgtttgagtcgcccggaaccgatgtgggccgaattattggctcttgcagcgtctgcccagggacgtgtgtatcgcgcggaagaccctcatggtgcgctccgcggcctcaaagaagtcaatggactccttgccaaagacttagctgttgttgcattgcgcgaaggtcttgatttacctccgactgatgatccaatgcttcttgcgtacctcttggacccgtcaaacacgacgcccgaaggcgtagcccgtcgttacggcggcgagtggaccgaagatgcaggtgagcgcgcgttattggccgaacgtttgcacgccaatttattaggacgtttgcaaggcgaggaacgtctcctctggctttacgaagaagtggagaaaccattgagtcgcgtgctcgcgcatatggaagctaccggtgtcaaattagacgtggcgtatttggaggcactcagccttgaagttgctgccgaaatgcgccgcttggaggaagaagtattccgtttagcaggccactccttttatcttaattctcgcgatcagttagaacgtgtgttgttcgatgagcttggtctccctcctatcggcaagacagagaagaccggtaaacgtagcacttcagcggcggttttagaagctcttcgcgaagtccatcccattgtggacaagatcttgcagtaccgcgaactcgcgaaattgaaaggcacctatattgaccctcttccggcattagtccacccgaaaacgggacgcctccatacccgcttcaaccaaacagccacggcgaccggtcgtttgtcctcctctgatccaaaccttcagaatattccagtacgtaccccattgggccagaagatccgccgcgcgtttgtagctgaggagggttggcgtttagtggccctcgattatagccaaattgaattacgtgtccttgcccatctttctggcgatgagaacctcatccgcgtgtttcaggaaggcaaagacattcacactcaaacggcaagctggatgtttggattatcagctgaagcgatcgatcctttgatgcgtcgtgcagcgaagaccatcaatttcggtgttctctacggtatgagtgcccatcgtttgtcgcaggaattaggcattccctatgaagaagctgcggcgttcattcagaagtactttcaaagctatcccaaagttaaagcatggatcgagaagactctcgaagaaggccgcacacgtggttacgtagagaccttatttggacgtcgccgctatgttcccgatttaaacgctcgcgtgaaatctgtccgtgaagccgccgaacgcatggcgttcaacatgcctgtacagggcacggcagctgacctcatgaaacttgcaatggtgcgcctttttccacaattgcgtgaagttggtgcccgcatgctcttgcaggtccacgatgaactcttgttagaagcgccaaaagagcgtgcggaagaggtggcagccctcgcgaaagaggttatggaaggcgtgtggcccttagcggtgcctcttgaagtcgaagttggtattggcgaggattggttggctgccaaaggataatga

SEQ ID NO: 1674 - protein, 841 aa, synthetic construct
  REGION 1..841: note = Variant of DNA polymerase I from Thermus sp. strain 2.9
MHHHHHHGGSGMLPLFEPKGRVLLVDGHHLAYRNFFALKGLTTSRGEPVQGVYGFAKSLLKALKEDGDVVIVVFDAKAPSFRHEAYEAYKAGRAPTPEDFPRQLALMKELVDLLGLERLEVPGFEADDVLATLAKKAEREGYEVQILTADRDLFQLLSPRISVLHPEGHRITPEWLWEKYGLRPEQWVDFRALVGDPSDNIPGVKGIGEKTALKLLKEWGSLENLLKNLDQVKPESVREKILAHLEDLKLSRELSRVRTDLPLEVDFRGRREPDWEGLKAFLERLEFGSLLHEFGLLESPLPAEEAPWPPPEGAFLGYRLSRPEPMWAELLALAASAQGRVYRAEDPHGALRGLKEVNGLLAKDLAVVALREGLDLPPTDDPMLLAYLLDPSNTTPEGVARRYGGEWTEDAGERALLAERLHANLLGRLQGEERLLWLYEEVEKPLSRVLAHMEATGVKLDVAYLEALSLEVAAEMRRLEEEVFRLAGHSFYLNSRDQLERVLFDELGLPPIGKTEKTGKRSTSAAVLEALREVHPIVDKILQYRELAKLKGTYIDPLPALVHPKTGRLHTRFNQTATATGRLSSSDPNLQNIPVRTPLGQKIRRAFVAEEGWRLVALDYSQIELRVLAHLSGDENLIRVFQEGKDIHTQTASWMFGLSAEAIDPLMRRAAKTINFGVLYGMSAHRLSQELGIPYEEAAAFIQKYFQSYPKVKAWIEKTLEEGRTRGYVETLFGRRRYVPDLNARVKSVREAAERMAFNMPVQGTAADLMKLAMVRLFPQLREVGARMLLQVHDELLLEAPKERAEEVAALAKEVMEGVWPLAVPLEVEVGIGEDWLAAKG

SEQ ID NO: 1675 - DNA, 2529 bp, synthetic construct
  misc_feature 1..2529: note = Variant of DNA polymerase I from Thermus sp. strain 2.9
  source 1..2529: mol_type = other DNA
atgcaccatcatcatcatcatggcggtagcggcatgttaccgttgttcgaacctaaaggtcgcgtgcttctggttgatggccatcatctcgcgtatcgtaacttctttgccctgaaaggattaaccaccagccgtggcgagccggtacagggtgtctacggctttgcaaagtcgctcctgaaagctctgaaagaagacggtgatgtggtgattgttgtctttgatgcgaaagcgccaagttttcgccacgaagcgtacgaagcttacaaagccgggcgtgctccaacgccggaagactttcctcgccaattggcgcttatgaaggaattagtggatttgcttggcctcgaacgcttggaagttcccggtttcgaggcagacgacgtattagcgactctcgcaaagaaagccgaacgtgagggctatgaagtccagatcttgacagcagatcgcgatcttttccagcttttatctccgcgcatctcggtgttacacccggaagggcatcgtatcaccccggaatggctctgggagaaatatggtttgcgtcccgaacaatgggtggattttcgcgccttagtgggcgatccgagcgacaatattccgggagttaaaggtatcggcgagaagacggcgctcaagctccttaaagaatgggggtcgttggagaacttgcttaagaatttagatcaggtcaaaccagagtcagtgcgtgagaagattcttgcacacctcgaagacctcaaattaagccgtgaattgtcccgtgtacgcaccgatttgccgctcgaagttgatttccgtggccgccgcgaacctgactgggagggtcttaaagcgtttttagagcgtcttgaatttggttcgctcttgcatgaattcggccttttagaaagcccgttaccagccgaagaagcaccttggccaccgcccgaaggcgcgtttttaggttaccgtttgagtcgcccggaaccgatgtgggccgaattattggctcttgcagcgtctgcccagggacgtgtgtatcgcgcggaagaccctcatggtgcgctccgcggcctcaaagaagtccgtggactccttgccaaagacttagctgttgttgcattgcgcgaaggtcttgatttacctccgactgatgatccaatgcttcttgcgtacctcttggacccgtcaaacacgacgcccgaaggcgtagcccgtcgttacggcggcgagtggaccgaagatgcaggtgagcgcgcgttattggccgaacgtttgcacgccaatttattaggacgtttgcaaggcgaggaacgtctcctctggctttacgaagaagtggagaaaccattgagtcgcgtgctcgcgcatatggaagctaccggtgtcaaattagacgtggcgtatttggagaatctcagccttgaagttgctgccgaaatgcgccgcttggaggaagaagtattccgtttagcaggccactccttttatcttaattctcgcgatcagttagaacgtgtgttgttcgatgaacttggtctccctcctatcggcaagacagagaagaccggtaaacgtagcacttcagcggcggttttagaagctcttcgcgaagtccatcccattgtggacaagatcttgcagtaccgcgaactcgcgaaattgaaaggcacctatattgaccctcttccggcattagtccacccgaaaacgggacgcctccatacccgcttcaaccaaacagccacggcgaccggtcgtttgtcctcctctgatccaaaccttcagaatattccagtacgtaccccattgggccagaagatccgccgcgcgtttgtagctgaggagggttggcgtttagtggccctcgattatagccaaattgaattacgtgtccttgcccatctttctggcgatgagaacctcatccgcgtgtttcaggaaggcaaagacattcacactcaaacggcaagctggatgtttggagtgtcagctgaagcgatcgatcctttgatgcgtcgtgcagcgaagaccatcaatttcggtgttctctacggtatgagtgcccatcgtttgtcgcaggaattaggcattccctatgaggaagctgcggcgttcattcagcgctactttcaaagctatcccaaagttaaagcatggatcgagaagactctcgaagaaggccgcacacgtggttacgtagagaccttatttggacgtcgccgctatgttcccgatttaaacgctcgcgtgaaatctgtccgtgaagccgccgaacgcatggcgttcaacatgcctgtacagggcacggcagctgacctcatgaaacttgcaatggtgcgcctttttccacaattgcgtgaagttggtgcccgcatgctcttgcaggtccacgatgaactcttgttagaagcgccaaaagagcgtgcggaagaggtggcagccctcgcgaaagaggttatggaaggcgtgtggcccttagcggtgcctcttgaagtcgaagttggtattggcgaggattggttggctgccaaaggataatga

SEQ ID NO: 1676 - protein, 841 aa, synthetic construct
  REGION 1..841: note = Variant of DNA polymerase I from Thermus sp. strain 2.9
MHHHHHHGGSGMLPLFEPKGRVLLVDGHHLAYRNFFALKGLTTSRGEPVQGVYGFAKSLLKALKEDGDVVIVVFDAKAPSFRHEAYEAYKAGRAPTPEDFPRQLALMKELVDLLGLERLEVPGFEADDVLATLAKKAEREGYEVQILTADRDLFQLLSPRISVLHPEGHRITPEWLWEKYGLRPEQWVDFRALVGDPSDNIPGVKGIGEKTALKLLKEWGSLENLLKNLDQVKPESVREKILAHLEDLKLSRELSRVRTDLPLEVDFRGRREPDWEGLKAFLERLEFGSLLHEFGLLESPLPAEEAPWPPPEGAFLGYRLSRPEPMWAELLALAASAQGRVYRAEDPHGALRGLKEVRGLLAKDLAVVALREGLDLPPTDDPMLLAYLLDPSNTTPEGVARRYGGEWTEDAGERALLAERLHANLLGRLQGEERLLWLYEEVEKPLSRVLAHMEATGVKLDVAYLENLSLEVAAEMRRLEEEVFRLAGHSFYLNSRDQLERVLFDELGLPPIGKTEKTGKRSTSAAVLEALREVHPIVDKILQYRELAKLKGTYIDPLPALVHPKTGRLHTRFNQTATATGRLSSSDPNLQNIPVRTPLGQKIRRAFVAEEGWRLVALDYSQIELRVLAHLSGDENLIRVFQEGKDIHTQTASWMFGVSAEAIDPLMRRAAKTINFGVLYGMSAHRLSQELGIPYEEAAAFIQRYFQSYPKVKAWIEKTLEEGRTRGYVETLFGRRRYVPDLNARVKSVREAAERMAFNMPVQGTAADLMKLAMVRLFPQLREVGARMLLQVHDELLLEAPKERAEEVAALAKEVMEGVWPLAVPLEVEVGIGEDWLAAKG

SEQ ID NO: 1677 - DNA, 2529 bp, synthetic construct
  misc_feature 1..2529: note = Variant of DNA polymerase I from Thermus sp. strain 2.9
  source 1..2529: mol_type = other DNA
atgcaccatcatcatcatcatggcggtagcggcatgttaccgttgttcgaacctaaaggtcgcgtgcttctggttgatggccatcatctcgcgtatcgtaacttctttgccctgaaaggattaaccaccagccgtggcgagccggtacagggtgtctacggctttgcaaagtcgctcctgaaagctctgaaagaagacggtgatgtggtgattgttgtctttgatgcgaaagcgccaagttttcgccacgaagcgtacgaagcttacaaagccgggcgtgctccaacgccggaagactttcctcgccaattggcgcttatgaaggaattagtggatttgcttggcctcgaacgcttggaagttcccggtttcgaggcagacgacgtattagcgactctcgcaaagaaagccgaacgtgagggctatgaagtccagatcttgacagcagatcgcgatcttttccagcttttatctccgcgcatctcggtgttacacccggaagggcatcgtatcaccccggaatggctctgggagaaatatggtttgcgtcccgaacaatgggtggattttcgcgccttagtgggcgatccgagcgacaatattccgggagttaaaggtatcggcgagaagacggcgctcaagctccttaaagaatgggggtcgttggagaacttgcttaagaatttagatcaggtcaaaccagagtcagtgcgtgagaagattcttgcacacctcgaagacctcaaattaagcctggaattgtcccgtgtacgcaccgatttgccgctcgaagttgatttccgtggccgccgcgaacctgactgggagggtcttaaagcgtttttagagcgtcttgaatttggttcgctcttgcatgaattcggccttttagaaagcccgttaccagccgaagaagcaccttggccaccgcccgaaggcgcgtttttaggttaccgtttgagtcgcccggaaccgatgtgggccgaattattggctcttgcagcgtctgcccagggacgtgtgtatcgcgcggaagaccctcatggtgcgctccgcggcctcaaagaagtcaatggactccttgccaaagacttagctgttgttgcattgcgcgaaggtcttgatttacctccgactgatgatccaatgcttcttgcgtacctcttggacccgtcaaacacgacgcccgaaggcgtagcccgtcgttacggcggcgagtggaccgaagatgcagctgagcgcgcgttattggccgaacgtttgcacgccaatttattaggacgtttgcaaggcgaggaacgtctcctctggctttacgaagaagtggagaaaccattgagtcgcgtgctcgcgcatatggaagctaccggtgtcaaattagacgtggcgtatttggagaatctcagccttgaagttgctgccgaaatgcgccgcttggaggaagaagtattccgtttagcaggccactccttttatcttaattctcgcgatcagttagaacgtgtgttgttcgatgagcttggtctccctcctatcggcaagacagagaagaccggtaaacgtagcacttcagcggcggttttagaagctcttcgcgaagtccatcccattgtggacaagatcttgcagtaccgcgaactcgcgaaattgaaaggcacctatattgaccctcttccggcattagtccacccgaaaacgggacgcctccatacccgcttcaaccaaacagccacggcgaccggtcgtttgtcctcctctgatccaaaccttcagaatattccagtacgtaccccattgggccagaagatccgccgcgcgtttgtagctgaggagggttggcgtttagtggccctcgattatagccaaattgaattacgtgtccttgcccatctttctggcgatgagaacctcatccgcgtgtttcaggaaggcaaagacattcacactcaaacggcaagctggatgtttggagtgtcagctgaagcgatcgatcctttgatgcgtcgtgcagcgaagaccatcaatttcggtgttctctacggtatgagtgcccatcgtttgtcgcaggaattaggcattccctatacggaagctgcggcgttcattcagcgctactttcaaagctatcccaaagttaaagcatggatcgagaagactctcgaagaaggccgcacacgtggttacgtagagaccttatttggacgtcgccgctatgttcccgatttaaccgctcgcgtgaaatctgtccgtgaagccgccgaacgcatggcgttcaacatgcctgtacagggcacggcagctgacctcatgaaacttgcaatggtgcgcctttttccacaattgcgtgaagttggtgcccgcatgctcttgcaggtccacgatgaactcttgttagaagcgccaaaagagcgtgcggaagaggtggcagccctcgcgaaagaggttatggaaggcgtgtggcccttagcggtgcctcttgaagtcgaagttggtattggcgaggattggttggctgccaaaggataatga

SEQ ID NO: 1678 - protein, 841 aa, synthetic construct
  REGION 1..841: note = Variant of DNA polymerase I from Thermus sp. strain 2.9
MHHHHHHGGSGMLPLFEPKGRVLLVDGHHLAYRNFFALKGLTTSRGEPVQGVYGFAKSLLKALKEDGDVVIVVFDAKAPSFRHEAYEAYKAGRAPTPEDFPRQLALMKELVDLLGLERLEVPGFEADDVLATLAKKAEREGYEVQILTADRDLFQLLSPRISVLHPEGHRITPEWLWEKYGLRPEQWVDFRALVGDPSDNIPGVKGIGEKTALKLLKEWGSLENLLKNLDQVKPESVREKILAHLEDLKLSLELSRVRTDLPLEVDFRGRREPDWEGLKAFLERLEFGSLLHEFGLLESPLPAEEAPWPPPEGAFLGYRLSRPEPMWAELLALAASAQGRVYRAEDPHGALRGLKEVNGLLAKDLAVVALREGLDLPPTDDPMLLAYLLDPSNTTPEGVARRYGGEWTEDAAERALLAERLHANLLGRLQGEERLLWLYEEVEKPLSRVLAHMEATGVKLDVAYLENLSLEVAAEMRRLEEEVFRLAGHSFYLNSRDQLERVLFDELGLPPIGKTEKTGKRSTSAAVLEALREVHPIVDKILQYRELAKLKGTYIDPLPALVHPKTGRLHTRFNQTATATGRLSSSDPNLQNIPVRTPLGQKIRRAFVAEEGWRLVALDYSQIELRVLAHLSGDENLIRVFQEGKDIHTQTASWMFGVSAEAIDPLMRRAAKTINFGVLYGMSAHRLSQELGIPYTEAAAFIQRYFQSYPKVKAWIEKTLEEGRTRGYVETLFGRRRYVPDLTARVKSVREAAERMAFNMPVQGTAADLMKLAMVRLFPQLREVGARMLLQVHDELLLEAPKERAEEVAALAKEVMEGVWPLAVPLEVEVGIGEDWLAAKG

SEQ ID NO: 1679 - DNA, 2529 bp, synthetic construct
  misc_feature 1..2529: note = Variant of DNA polymerase I from Thermus sp. strain 2.9
  source 1..2529: mol_type = other DNA
atgcaccatcatcatcatcatggcggtagcggcatgttaccgttgttcgaacctaaaggtcgcgtgcttctggttgatggccatcatctcgcgtatcgtaacttctttgccctgaaaggattaaccaccagccgtggcgagccggtacagggtgtctacggctttgcaaagtcgctcctgaaagctctgaaagaagacggtgatgtggtgattgttgtctttgatgcgaaagcgccaagttttcgccacgaagcgtacgaagcttacaaagccgggcgtgctccaacgccggaagactttcctcgccaattggcgcttatgaaggaattagtggatttgcttggcctcgaacgcttggaagttcccggtttcgaggcagacgacgtattagcgactctcgcaaagaaagccgaacgtgagggctatgaagtccagatcttgacagcagatcgcgatcttttccagcttttatctccgcgcatctcggtgttacacccggaagggcatcgtatcaccccggaatggctctgggagaaatatggtttgcgtcccgaacaatgggtggattttcgcgccttagtgggcgatccgagcgacaatattccgggagttaaaggtatcggcgagaagacggcgctcaagctccttaaagaatgggggtcgttggagaacttgcttaagaatttagatcaggtcaaaccagagtcagtgcgtgagaagattcttgcacacctcgaagacctcaaattaagccgcgaattgtcccgtgtacgcaccgatttgccgctcgaagttgatttccgtggccgccgcgaacctgactgggagggtcttaaagcgtttttagagcgtcttgaatttggttcgctcttgcatgaattcggccttttagaaagcccgttaccagccgaagaagcaccttggccaccgcccgaaggcgcgtttttaggttaccgtttgagtcgcccggaaccgatgtgggccgaattattggctcttgcagcgtctgcccagggacgtgtgtatcgcgcggaagaccctcatggtgcgctccgcggcctcaaagaagtccgtggactccttgccaaagacttagctgttgttgcattgcgcgaaggtcttgatttacctccgactgatgatccaatgcttcttgcgtacctcttggacccgtcaaacacgacgcccgaaggcgtagcccgtcgttacggcggcgagtggaccgaagatgcagctgagcgcgcgttattggccgaacgtttgcacgccaatttattaggacgtttgcaaggcgaggaacgtctcctctggctttacgaagaagtggagaaaccattgagtcgcgtgctcgcgcatatggaagctaccggtgtcaaattagacgtggcgtatttggaggcgctcagccttgaagttgctgccgaaatgcgccgcttggaggaagaagtattccgtttagcaggccactccttttatcttaattctcgcgatcagttagaacgtgtgttgttcgatgaacttggtctccctcctatcggcaagacagagaagaccggtaaacgtagcacttcagcggcggttttagaagctcttcgcgaagtccatcccattgtggacaagatcttgcagtaccgcgaactcgcgaaattgaaaggcacctatattgaccctcttccggcattagtccacccgaaaacgggacgcctccatacccgcttcaaccaaacagccacggcgaccggtcgtttgtcctcctctgatccaaaccttcagaatattccagtacgtaccccattgggccagaagatccgccgcgcgtttgtagctgaggagggttggcgtttagtggccctcgattatagccaaattgaattacgtgtccttgcccatctttctggcgatgagaacctcatccgcgtgtttcaggaaggcaaagacattcacactcaaacggcaagctggatgtttggattatcagctgaagcgatcgatcctttgatgcgtcgtgcagcgaagaccatcaatttcggtgttctctacggtatgagtgcccatcgtttgtcgcaggaattaggcattccctatgaagaagctgcggcgttcattcagcgctactttcaaagctatcccaaagttaaagcatggatcgagaagactctcgaagaaggccgcacacgtggttacgtagagaccttatttggacgtcgccgctatgttcccgatttaaacgctcgcgtgaaatctgtccgtgaagccgccgaacgcatggcgttcaacatgcctgtacagggcacggcagctgacctcatgaaacttgcaatggtgcgcctttttccacaattgcgtgaagttggtgcccgcatgctcttgcaggtccacgatgaactcttgttagaagcgccaaaagagcgtgcggaagaggtggcagccctcgcgaaagaggttatggaaggcgtgtggcccttagcggtgcctcttgaagtcgaagttggtattggcgaggattggttggctgccaaaggataatga

SEQ ID NO: 1680 - protein, 841 aa, synthetic construct
  REGION 1..841: note = Variant of DNA polymerase I from Thermus sp. strain 2.9
MHHHHHHGGSGMLPLFEPKGRVLLVDGHHLAYRNFFALKGLTTSRGEPVQGVYGFAKSLLKALKEDGDVVIVVFDAKAPSFRHEAYEAYKAGRAPTPEDFPRQLALMKELVDLLGLERLEVPGFEADDVLATLAKKAEREGYEVQILTADRDLFQLLSPRISVLHPEGHRITPEWLWEKYGLRPEQWVDFRALVGDPSDNIPGVKGIGEKTALKLLKEWGSLENLLKNLDQVKPESVREKILAHLEDLKLSRELSRVRTDLPLEVDFRGRREPDWEGLKAFLERLEFGSLLHEFGLLESPLPAEEAPWPPPEGAFLGYRLSRPEPMWAELLALAASAQGRVYRAEDPHGALRGLKEVRGLLAKDLAVVALREGLDLPPTDDPMLLAYLLDPSNTTPEGVARRYGGEWTEDAAERALLAERLHANLLGRLQGEERLLWLYEEVEKPLSRVLAHMEATGVKLDVAYLEALSLEVAAEMRRLEEEVFRLAGHSFYLNSRDQLERVLFDELGLPPIGKTEKTGKRSTSAAVLEALREVHPIVDKILQYRELAKLKGTYIDPLPALVHPKTGRLHTRFNQTATATGRLSSSDPNLQNIPVRTPLGQKIRRAFVAEEGWRLVALDYSQIELRVLAHLSGDENLIRVFQEGKDIHTQTASWMFGLSAEAIDPLMRRAAKTINFGVLYGMSAHRLSQELGIPYEEAAAFIQRYFQSYPKVKAWIEKTLEEGRTRGYVETLFGRRRYVPDLNARVKSVREAAERMAFNMPVQGTAADLMKLAMVRLFPQLREVGARMLLQVHDELLLEAPKERAEEVAALAKEVMEGVWPLAVPLEVEVGIGEDWLAAKG

SEQ ID NO: 1681 - DNA, 2529 bp, synthetic construct
  misc_feature 1..2529: note = Variant of DNA polymerase I from Thermus sp. strain 2.9
  source 1..2529: mol_type = other DNA
atgcaccatcatcatcatcatggcggtagcggcatgttaccgttgttcgaacctaaaggtcgcgtgcttctggttgatggccatcatctcgcgtatcgtaacttctttgccctgaaaggattaaccaccagccgtggcgagccggtacagggtgtctacggctttgcaaagtcgctcctgaaagctctgaaagaagacggtgatgtggtgattgttgtctttgatgcgaaagcgccaagttttcgccacgaagcgtacgaagcttacaaagccgggcgtgctccaacgccggaagactttcctcgccaattggcgcttatgaaggaattagtggatttgcttggcctcgaacgcttggaagttcccggtttcgaggcagacgacgtattagcgactctcgcaaagaaagccgaacgtgagggctatgaagtccagatcttgacagcagatcgcgatcttttccagcttttatctccgcgcatctcggtgttacacccggaagggcatcgtatcaccccggaatggctctgggagaaatatggtttgcgtcccgaacaatgggtggattttcgcgccttagtgggcgatccgagcgacaatattccgggagttaaaggtatcggcgagaagacggcgctcaagctccttaaagaatgggggtcgttggagaacttgcttaagaatttagatcaggtcaaaccagagtcagtgcgtgagaagattcttgcacacctcgaagacctcaaattaagccgtgaattgtcccgtgtacgcaccgatttgccgctcgaagttgatttccgtggccgccgcgaacctgactgggagggtcttaaagcgtttttagagcgtcttgaatttggttcgctcttgcatgaattcggccttttagaaagcccgttaccagccgaagaagcaccttggccaccgcccgaaggcgcgtttttaggttaccgtttgagtcgcccggaaccgatgtgggccgaattattggctcttgcagcgtctgcccagggacgtgtgtatcgcgcggaagaccctcatggtgcgctccgcggcctcaaagaagtccgtggactccttgccaaagacttagctgttgttgcattgcgcgaaggtcttgatttacctccgactgatgatccaatgcttcttgcgtacctcttggacccgtcaaacacgacgcccgaaggcgtagcccgtcgttacggcggcgagtggaccgaagatgcaggtgagcgcgcgttattggccgaacgtttgcacgccaatttattaggacgtttgcaaggcgaggaacgtctcctctggctttacgaagaagtggagaaaccattgagtcgcgtgctcgcgcatatggaagctaccggtgtcaaattagacgtggcgtatttggagaatctcagccttgaagttgctgccgaaatgcgccgcttggaggaagaagtattccgtttagcaggccactccttttatcttaattctcgcgatcagttagaacgtgtgttgttcgatgagcttggtctccctcctatcggcaagacagagaagaccggtaaacgtagcacttcagcggcggttttagaagctcttcgcgaagtccatcccattgtggacaagatcttgcagtaccgcgaactcgcgaaattgaaaggcacctatattgaccctcttccggcattagtccacccgaaaacgggacgcctccatacccgcttcaaccaaacagccacggcgaccggtcgtttgtcctcctctgatccaaaccttcagaatattccagtacgtaccccattgggccagaagatccgccgcgcgtttgtagctgaggagggttggcgtttagtggccctcgattatagccaaattgaattacgtgtccttgcccatctttctggcgatgagaacctcatccgcgtgtttcaggaaggcaaagacattcacactcaaacggcaagctggatgtttggattatcagctgaagcgatcgatcctttgatgcgtcgtgcagcgaagaccatcaatttcggtgttctctacggtatgagtgcccatcgtttgtcgcaggaattaggcattccctatgaggaagctgcggcgttcattcagcgctactttcaaagctatcccaaagttaaagcatggatcgagaagactctcgaagaaggccgcacacgtggttacgtagagaccttatttggacgtcgccgctatgttcccgatttaaccgctcgcgtgaaatctgtccgtgaagccgccgaacgcatggcgttcaacatgcctgtacagggcacggcagctgacctcatgaaacttgcaatggtgcgcctttttccacaattgcgtgaagttggtgcccgcatgctcttgcaggtccacgatgaactcttgttagaagcgccaaaagagcgtgcggaagaggtggcagccctcgcgaaagaggttatggaaggcgtgtggcccttagcggtgcctcttgaagtcgaagttggtattggcgaggattggttggctgccaaaggataatga

SEQ ID NO: 1682 - protein, 841 aa, synthetic construct
  REGION 1..841: note = Variant of DNA polymerase I from Thermus sp. strain 2.9
MHHHHHHGGSGMLPLFEPKGRVLLVDGHHLAYRNFFALKGLTTSRGEPVQGVYGFAKSLLKALKEDGDVVIVVFDAKAPSFRHEAYEAYKAGRAPTPEDFPRQLALMKELVDLLGLERLEVPGFEADDVLATLAKKAEREGYEVQILTADRDLFQLLSPRISVLHPEGHRITPEWLWEKYGLRPEQWVDFRALVGDPSDNIPGVKGIGEKTALKLLKEWGSLENLLKNLDQVKPESVREKILAHLEDLKLSRELSRVRTDLPLEVDFRGRREPDWEGLKAFLERLEFGSLLHEFGLLESPLPAEEAPWPPPEGAFLGYRLSRPEPMWAELLALAASAQGRVYRAEDPHGALRGLKEVRGLLAKDLAVVALREGLDLPPTDDPMLLAYLLDPSNTTPEGVARRYGGEWTEDAGERALLAERLHANLLGRLQGEERLLWLYEEVEKPLSRVLAHMEATGVKLDVAYLENLSLEVAAEMRRLEEEVFRLAGHSFYLNSRDQLERVLFDELGLPPIGKTEKTGKRSTSAAVLEALREVHPIVDKILQYRELAKLKGTYIDPLPALVHPKTGRLHTRFNQTATATGRLSSSDPNLQNIPVRTPLGQKIRRAFVAEEGWRLVALDYSQIELRVLAHLSGDENLIRVFQEGKDIHTQTASWMFGLSAEAIDPLMRRAAKTINFGVLYGMSAHRLSQELGIPYEEAAAFIQRYFQSYPKVKAWIEKTLEEGRTRGYVETLFGRRRYVPDLTARVKSVREAAERMAFNMPVQGTAADLMKLAMVRLFPQLREVGARMLLQVHDELLLEAPKERAEEVAALAKEVMEGVWPLAVPLEVEVGIGEDWLAAKG

SEQ ID NO: 1683 - DNA, 2529 bp, synthetic construct
  misc_feature 1..2529: note = Variant of DNA polymerase I from Thermus sp. strain 2.9
  source 1..2529: mol_type = other DNA
atgcaccatcatcatcatcatggcggtagcggcatgttaccgttgttcgaacctaaaggtcgcgtgcttctggttgatggccatcatctcgcgtatcgtaacttctttgccctgaaaggattaaccaccagccgtggcgagccggtacagggtgtctacggctttgcaaagtcgctcctgaaagctctgaaagaagacggtgatgtggtgattgttgtctttgatgcgaaagcgccaagttttcgccacgaagcgtacgaagcttacaaagccgggcgtgctccaacgccggaagactttcctcgccaattggcgcttatgaaggaattagtggatttgcttggcctcgaacgcttggaagttcccggtttcgaggcagacgacgtattagcgactctcgcaaagaaagccgaacgtgagggctatgaagtccagatcttgacagcagatcgcgatcttttccagcttttatctccgcgcatctcggtgttacacccggaagggcatcgtatcaccccggaatggctctgggagaaatatggtttgcgtcccgaacaatgggtggattttcgcgccttagcgggcgatccgagcgacaatattccgggagttaaaggtatcggcgagaagacggcgctcaagctccttaaagaatgggggtcgttggagaacttgcttaagaatttagatcaggtcaaaccagagtcagtgcgtgagaagattcttgcacacctcgaagacctcaaattaagcctggaattgtcccgtgtacgcaccgatttgccgctcgaagttgatttccgtggccgccgcgaacctgactgggagggtcttaaagcgtttttagagcgtcttgaatttggttcgctcttgcatgaattcggccttttagaaagcccgttaccagccgaagaagcaccttggccaccgcccgaaggcgcgtttttaggttaccgtttgagtcgcccggaaccgatgtgggccgaattattggctcttgcagcgtctgcccagggacgtgtgtatcgcgcggaagaccctcatggtgcgctccgcggcctcaaagaagtccgtggactccttgccaaagacttagctgttgttgcattgcgcgaaggtcttgatttacctccgactgatgatccaatgcttcttgcgtacctcttggacccgtcaaacacgacgcccgaaggcgtagcccgtcgttacggcggcgagtggaccgaagatgcaggtgagcgcgcgttattggccgaacgtttgcacgccaatttattaggacgtttgcaaggcgaggaacgtctcctctggctttacgaagaagtggagaaaccattgagtcgcgtgctcgcgcatatggaagctaccggtgtcaaattagacgtggcgtatttggaggcgctcagccttgaagttgctgccgaaatgcgccgcttggaggaagaagtattccgtttagcaggccactccttttatcttaattctcgcgatcagttagaacgtgtgttgttcgatgagcttggtctccctccgatcggcaagacagagaagaccggtaaacgtagcacttcagcggcggttttagaagctcttcgcgaagtccatcccattgtggacaagatcttgcagtaccgcgaactcgcgaaattgaaaggcacctatattgaccctcttccggcattagtccacccgaaaacgggacgcctccatacccgcttcaaccaaacagccacggcgaccggtcgtttgtcctcctctgatccaaaccttcagaatattccagtacgtaccccattgggccagaagatccgccgcgcgtttgtagctgaggagggttggcgtttagtggccctcgattatagccaaattgaattacgtgtccttgcccatctttctggcgatgagaacctcatccgcgtgtttcaggaaggcaaagacattcacactcaaacggcaagctggatgtttggactgtcagctgaagcgatcgatcctttgatgcgtcgtgcagcgaagaccatcaatttcggtgttctctacggtatgagtgcccatcgtttgtcgcaggaattaggcattccctatgaggaagctgcggcgttcattcagcgctactttcaaagctatcccaaagttaaagcatggatcgagaagactctcgaagaaggccgcacacgtggttacgtagagaccttatttggacgtcgccgctatgttcccgatttaaacgctcgcgtgaaatctgtccgtgaagccgccgaacgcatggcgttcaacatgcctgtacagggcacggcagctgacctcatgaaacttgcaatggtgcgcctttttccacaattgcgtgaagttggtgcccgcatgctcttgcaggtccacgatgaactcttgttagaagcgccaaaagagcgtgcggaagaggtggcagccctcgcgaaagaggttatggaaggcgtgtggcccttagcggtgcctcttgaagtcgaagttggtattggcgaggattggttggctgccaaaggataatga

SEQ ID NO: 1684 - protein, 841 aa, synthetic construct
  REGION 1..841: note = Variant of DNA polymerase I from Thermus sp. strain 2.9
MHHHHHHGGSGMLPLFEPKGRVLLVDGHHLAYRNFFALKGLTTSRGEPVQGVYGFAKSLLKALKEDGDVVIVVFDAKAPSFRHEAYEAYKAGRAPTPEDFPRQLALMKELVDLLGLERLEVPGFEADDVLATLAKKAEREGYEVQILTADRDLFQLLSPRISVLHPEGHRITPEWLWEKYGLRPEQWVDFRALAGDPSDNIPGVKGIGEKTALKLLKEWGSLENLLKNLDQVKPESVREKILAHLEDLKLSLELSRVRTDLPLEVDFRGRREPDWEGLKAFLERLEFGSLLHEFGLLESPLPAEEAPWPPPEGAFLGYRLSRPEPMWAELLALAASAQGRVYRAEDPHGALRGLKEVRGLLAKDLAVVALREGLDLPPTDDPMLLAYLLDPSNTTPEGVARRYGGEWTEDAGERALLAERLHANLLGRLQGEERLLWLYEEVEKPLSRVLAHMEATGVKLDVAYLEALSLEVAAEMRRLEEEVFRLAGHSFYLNSRDQLERVLFDELGLPPIGKTEKTGKRSTSAAVLEALREVHPIVDKILQYRELAKLKGTYIDPLPALVHPKTGRLHTRFNQTATATGRLSSSDPNLQNIPVRTPLGQKIRRAFVAEEGWRLVALDYSQIELRVLAHLSGDENLIRVFQEGKDIHTQTASWMFGLSAEAIDPLMRRAAKTINFGVLYGMSAHRLSQELGIPYEEAAAFIQRYFQSYPKVKAWIEKTLEEGRTRGYVETLFGRRRYVPDLNARVKSVREAAERMAFNMPVQGTAADLMKLAMVRLFPQLREVGARMLLQVHDELLLEAPKERAEEVAALAKEVMEGVWPLAVPLEVEVGIGEDWLAAKG

SEQ ID NO: 1685 - DNA, 2529 bp, synthetic construct
  misc_feature 1..2529: note = Variant of DNA polymerase I from Thermus sp. strain 2.9
  source 1..2529: mol_type = other DNA
atgcaccatcatcatcatcatggcggtagcggcatgttaccgttgttcgaacctaaaggtcgcgtgcttctggttgatggccatcatctcgcgtatcgtaacttctttgccctgaaaggattaaccaccagccgtggcgagccggtacagggtgtctacggctttgcaaagtcgctcctgaaagctctgaaagaagacggtgatgtggtgattgttgtctttgatgcgaaagcgccaagttttcgccacgaagcgtacgaagcttacaaagccgggcgtgctccaacgccggaagactttcctcgccaattggcgcttatgaaggaattagtggatttgcttggcctcgaacgcttggaagttcccggtttcgaggcagacgacgtattagcgactctcgcaaagaaagccgaacgtgagggctatgaagtccagatcttgacagcagatcgcgatcttttccagcttttatctccgcgcatctcggtgttacacccggaagggcatcgtatcaccccggaatggctctgggagaaatatggtttgcgtcccgaacaatgggtggattttcgcgccttagtgggcgatccgagcgacaatattccgggagttaaaggtatcggcgagaagacggcgctcaagctccttaaagaatgggggtcgttggagaacttgcttaagaatttagatcaggtcaaaccagagtcagtgcgtgagaagattcttgcacacctcgaagacctcaaattaagcctggaattgtcccgtgtacgcaccgatttgccgctcgaagttgatttccgtggccgccgcgaacctgactgggagggtcttaaagcgtttttagagcgtcttgaatttggttcgctcttgcatgaattcggccttttagaaagcccgttaccagccgaagaagcaccttggccaccgcccgaaggcgcgtttttaggttaccgtttgagtcgcccggaaccgatgtgggccgaattattggctcttgcagcgtctgcccagggacgtgtgtatcgcgcggaagaccctcatggtgcgctccgcggcctcaaagaagtccgtggactccttgccaaagacttagctgttgttgcattgcgcgaaggtcttgatttacctccgactgatgatccaatgcttcttgcgtacctcttggacccgtcaaacacgacgcccgaaggcgtagcccgtcgttacggcggcgagtggaccgaagatgcaggtgagcgcgcgttattggccgaacgtttgcacgccaatttattaggacgtttgcaaggcgaggaacgtctcctctggctttacgaagaagtggagaaaccattgagtcgcgtgctcgcgcatatggaagctaccggtgtcaaattagacgtggcgtatttggaggcgctcagccttgaagttgctgccgaaatgcgccgcttggaggaagaagtattccgtttagcaggccactccttttatcttaattctcgcgatcagttagaacgtgtgttgttcgatgaacttggtctccctcctatcggcaagacagagaagaccggtaaacgtagcacttcagcggcggttttagaagctcttcgcgaagtccatcccattgtggacaagatcttgcagtaccgcgaactcgcgaaattgaaaggcacctatattgaccctcttccggcattagtccacccgaaaacgggacgcctccatacccgcttcaaccaaacagccacggcgaccggtcgtttgtcctcctctgatccaaaccttcagaatattccagtacgtaccccattgggccagaagatccgccgcgcgtttgtagctgaggagggttggcgtttagtggccctcgattatagccaaattgaattacgtgtccttgcccatctttctggcgatgagaacctcatccgcgtgtttcaggaaggcaaagacattcacactcaaacggcaagctggatgtttggattatcagctgaagcgatcgatcctttgatgcgtcgtgcagcgaagaccatcaatttcggtgttctctacggtatgagtgcccatcgtttgtcgcaggaattaggcattccctatgaggaagctgcggcgttcattcagcgctactttcaaagctatcccaaagttaaagcatggatcgagaagactctcgaagaaggccgcacacgtggttacgtagagaccttatttggacgtcgccgctatgttcccgatttaaacgctcgcgtgaaatctgtccgtgaagccgccgaacgcatggcgttcaacatgcctgtacagggcacggcagctgacctcatgaaacttgcaatggtgcgcctttttccacaattgcgtgaagttggtgcccgcatgctcttgcaggtccacgatgaactcttgttagaagcgccaaaagagcgtgcggaagaggtggcagccctcgcgaaagaggttatggaaggcgtgtggcccttagcggtgcctcttgaagtcgaagttggtattggcgaggattggttggctgccaaaggataatga

SEQ ID NO: 1686 - protein, 841 aa, synthetic construct
  REGION 1..841: note = Variant of DNA polymerase I from Thermus sp. strain 2.9
MHHHHHHGGSGMLPLFEPKGRVLLVDGHHLAYRNFFALKGLTTSRGEPVQGVYGFAKSLLKALKEDGDVVIVVFDAKAPSFRHEAYEAYKAGRAPTPEDFPRQLALMKELVDLLGLERLEVPGFEADDVLATLAKKAEREGYEVQILTADRDLFQLLSPRISVLHPEGHRITPEWLWEKYGLRPEQWVDFRALVGDPSDNIPGVKGIGEKTALKLLKEWGSLENLLKNLDQVKPESVREKILAHLEDLKLSLELSRVRTDLPLEVDFRGRREPDWEGLKAFLERLEFGSLLHEFGLLESPLPAEEAPWPPPEGAFLGYRLSRPEPMWAELLALAASAQGRVYRAEDPHGALRGLKEVRGLLAKDLAVVALREGLDLPPTDDPMLLAYLLDPSNTTPEGVARRYGGEWTEDAGERALLAERLHANLLGRLQGEERLLWLYEEVEKPLSRVLAHMEATGVKLDVAYLEALSLEVAAEMRRLEEEVFRLAGHSFYLNSRDQLERVLFDELGLPPIGKTEKTGKRSTSAAVLEALREVHPIVDKILQYRELAKLKGTYIDPLPALVHPKTGRLHTRFNQTATATGRLSSSDPNLQNIPVRTPLGQKIRRAFVAEEGWRLVALDYSQIELRVLAHLSGDENLIRVFQEGKDIHTQTASWMFGLSAEAIDPLMRRAAKTINFGVLYGMSAHRLSQELGIPYEEAAAFIQRYFQSYPKVKAWIEKTLEEGRTRGYVETLFGRRRYVPDLNARVKSVREAAERMAFNMPVQGTAADLMKLAMVRLFPQLREVGARMLLQVHDELLLEAPKERAEEVAALAKEVMEGVWPLAVPLEVEVGIGEDWLAAKG

SEQ ID NO: 1687 - DNA, 2529 bp, synthetic construct
  misc_feature 1..2529: note = Variant of DNA polymerase I from Thermus sp. strain 2.9
  source 1..2529: mol_type = other DNA
atgcaccatcatcatcatcatggcggtagcggcatgttaccgttgttcgaacctaaaggtcgcgtgcttctggttgatggccatcatctcgcgtatcgtaacttctttgccctgaaaggattaaccaccagccgtggcgagccggtacagggtgtctacggctttgcaaagtcgctcctgaaagctctgaaagaagacggtgatgtggtgattgttgtctttgatgcgaaagcgccaagttttcgccacgaagcgtacgaagcttacaaagccgggcgtgctccaacgccggaagactttcctcgccaattggcgcttatgaaggaattagtggatttgcttggcctcgaacgcttggaagttcccggtttcgaggcagacgacgtattagcgactctcgcaaagaaagccgaacgtgagggctatgaagtccagatcttgacagcagatcgcgatcttttccagcttttatctccgcgcatctcggtgttacacccggaagggcatcgtatcaccccggaatggctctgggagaaatatggtttgcgtcccgaacaatgggtggattttcgcgccttagtgggcgatccgagcgacaatattccgggagttaaaggtatcggcgagaagacggcgctcaagctccttaaagaatgggggtcgttggagaacttgcttaagaatttagatcaggtcaaaccagagtcagtgcgtgagaagattcttgcacacctcgaagacctcaaattaagcctggaattgtcccgtgtacgcaccgatttgccgctcgaagttgatttccgtggccgccgcgaacctgactgggagggtcttaaagcgtttttagagcgtcttgaatttggttcgctcttgcatgaattcggccttttagaaagcccgttaccagccgaagaagcaccttggccaccgcccgaaggcgcgtttttaggttaccgtttgagtcgcccggaaccgatgtgggccgaattattggctcttgcagcgtctgcccagggacgtgtgtatcgcgcggaagaccctcatggtgcgctccgcggcctcaaagaagtccgtggactccttgccaaagacttagctgttgttgcattgcgcgaaggtcttgatttacctccgactgatgatccaatgcttcttgcgtacctcttggacccgtcaaacacgacgcccgaaggcgtagcccgtcgttacggcggcgagtggaccgaagatgcaggtgagcgcgcgttattggccgaacgtttgcacgccaatttattaggacgtttgcaaggcgaggaacgtctcctctggctttacgaagaagtggagaaaccattgagtcgcgtgctcgcgcatatggaagctaccggtgtcaaattagacgtggcgtatttggaggcactcagccttgaagttgctgccgaaatgcgccgcttggaggaagaagtattccgtttagcaggccactccttttatcttaattctcgcgatcagttagaacgtgtgttgttcgatgaacttggtctccctcctatcggcaagacagagaagaccggtaaacgtagcacttcagcggcggttttagaagctcttcgcgaagtccatcccattgtggacaagatcttgcagtaccgcgaactcgcgaaattgaaaggcacctatattgaccctcttccggcattagtccacccgaaaacgggacgcctccatacccgcttcaaccaaacagccacggcgaccggtcgtttgtcctcctctgatccaaaccttcagaatattccagtacgtaccccattgggccagaagatccgccgcgcgtttgtagctgaggagggttggcgtttagtggccctcgattatagccaaattgaattacgtgtccttgcccatctttctggcgatgagaacctcatccgcgtgtttcaggaaggcaaagacattcacactcaaacggcaagctggatgtttggattatcagctgaagcgatcgatcctttgatgcgtcgtgcagcgaagaccatcaatttcggtgttctctacggtatgagtgcccatcgtttgtcgcaggaattaggcattccctatgaagaagctgcggcgttcattcagcgctactttcaaagctatcccaaagttaaagcatggatcgagaagactctcgaagaaggccgcacacgtggttacgtagagaccttatttggacgtcgccgctatgttcccgatttaaccgctcgcgtgaaatctgtccgtgaagccgccgaacgcatggcgttcaacatgcctgtacagggcacggcagctgacctcatgaaacttgcaatggtgcgcctttttccacaattgcgtgaagttggtgcccgcatgctcttgcaggtccacgatgaactcttgttagaagcgccaaaagagcgtgcggaagaggtggcagccctcgcgaaagaggttatggaaggcgtgtggcccttagcggtgcctcttgaagtcgaagttggtattggcgaggattggttggctgccaaaggataatga

SEQ ID NO: 1688 - protein, 841 aa, synthetic construct
  REGION 1..841: note = Variant of DNA polymerase I from Thermus sp. strain 2.9
MHHHHHHGGSGMLPLFEPKGRVLLVDGHHLAYRNFFALKGLTTSRGEPVQGVYGFAKSLLKALKEDGDVVIVVFDAKAPSFRHEAYEAYKAGRAPTPEDFPRQLALMKELVDLLGLERLEVPGFEADDVLATLAKKAEREGYEVQILTADRDLFQLLSPRISVLHPEGHRITPEWLWEKYGLRPEQWVDFRALVGDPSDNIPGVKGIGEKTALKLLKEWGSLENLLKNLDQVKPESVREKILAHLEDLKLSLELSRVRTDLPLEVDFRGRREPDWEGLKAFLERLEFGSLLHEFGLLESPLPAEEAPWPPPEGAFLGYRLSRPEPMWAELLALAASAQGRVYRAEDPHGALRGLKEVRGLLAKDLAVVALREGLDLPPTDDPMLLAYLLDPSNTTPEGVARRYGGEWTEDAGERALLAERLHANLLGRLQGEERLLWLYEEVEKPLSRVLAHMEATGVKLDVAYLEALSLEVAAEMRRLEEEVFRLAGHSFYLNSRDQLERVLFDELGLPPIGKTEKTGKRSTSAAVLEALREVHPIVDKILQYRELAKLKGTYIDPLPALVHPKTGRLHTRFNQTATATGRLSSSDPNLQNIPVRTPLGQKIRRAFVAEEGWRLVALDYSQIELRVLAHLSGDENLIRVFQEGKDIHTQTASWMFGLSAEAIDPLMRRAAKTINFGVLYGMSAHRLSQELGIPYEEAAAFIQRYFQSYPKVKAWIEKTLEEGRTRGYVETLFGRRRYVPDLTARVKSVREAAERMAFNMPVQGTAADLMKLAMVRLFPQLREVGARMLLQVHDELLLEAPKERAEEVAALAKEVMEGVWPLAVPLEVEVGIGEDWLAAKG

SEQ ID NO: 1689 - DNA, 2529 bp, synthetic construct
  misc_feature 1..2529: note = Variant of DNA polymerase I from Thermus sp. strain 2.9
  source 1..2529: mol_type = other DNA
atgcaccatcatcatcatcatggcggtagcggcatgttaccgttgttcgaacctaaaggtcgcgtgcttctggttgatggccatcatctcgcgtatcgtaacttctttgccctgaaaggattaaccaccagccgtggcgagccggtacagggtgtctacggctttgcaaagtcgctcctgaaagctctgaaagaagacggtgatgtggtgattgttgtctttgatgcgaaagcgccaagttttcgccacgaagcgtacgaagcttacaaagccgggcgtgctccaacgccggaagactttcctcgccaattggcgcttatgaaggaattagtggatttgcttggcctcgaacgcttggaagttcccggtttcgaggcagacgacgtattagcgactctcgcaaagaaagccgaacgtgagggctatgaagtccagatcttgacagcagatcgcgatcttttccagcttttatctccgcgcatctcggtgttacacccggaagggcatcgtatcaccccggaatggctctgggagaaatatggtttgcgtcccgaacaatgggtggattttcgcgccttagtgggcgatccgagcgacaatattccgggagttaaaggtatcggcgagaagacggcgctcaagctccttaaagaatgggggtcgttggagaacttgcttaagaatttagatcaggtcaaaccagagtcagtgcgtgagaagattcttgcacacctcgaagacctcaaattaagccgtgaattgtcccgtgtacgcaccgatttgccgctcgaagttgatttccgtggccgccgcgaacctgactgggagggtcttaaagcgtttttagagcgtcttgaatttggttcgctcttgcatgaattcggccttttagaaagcccgttaccagccgaagaagcaccttggccaccgcccgaaggcgcgtttttaggttaccgtttgagtcgcccggaaccgatgtgggccgaattattggctcttgcagcgtctgcccagggacgtgtgtatcgcgcggaagaccctcatggtgcgctccgcggcctcaaagaagtccgtggactccttgccaaagacttagctgttgttgcattgcgcgaaggtcttgatttacctccgactgatgatccaatgcttcttgcgtacctcttggacccgtcaaacacgacgcccgaaggcgtagcccgtcgttacggcggcgagtggaccgaagatgcaggcgagcgcgcgttattggccgaacgtttgcacgccaatttattaggacgtttgcaaggcgaggaacgtctcctctggctttacgaagaagtggagaaaccattgagtcgcgtgctcgcgcatatggaagctaccggtgtcaaattagacgtggcgtatttggagaatctcagccttgaagttgctgccgaaatgcgccgcttggaggaagaagtattccgtttagcaggccactccttttatcttaattctcgcgatcagttagaacgtgtgttgttcgatgagcttggtctcccttgcatcggcaagacagagaagaccggtaaacgtagcacttcagcggcggttttagaagctcttcgcgaagtccatcccattgtggacaagatcttgcagtaccgcgaactcgcgaaattgaaaggcacctatattgaccctcttccggcattagtccacccgaaaacgggacgcctccatacccgcttcaaccaaacagccacggcgaccggtcgtttgtcctcctctgatccaaaccttcagaatattccagtacgtaccccattgggccagaagatccgccgcgcgtttgtagctgaggagggttggcgtttagtggccctcgattatagccaaattgaattacgtgtccttgcccatctttctggcgatgagaacctcatccgcgtgtttcaggaaggcaaagacattcacactcaaacggcaagctggatgtttggagtgtcagctgaagcgatcgatcctttgatgcgtcgtgcagcgaagaccatcaatttcggtgttctctacggtatgagtgcccatcgtttgtcgcaggaattaggcattccctatgaagaagctgcggcgttcattcagcgctactttcaaagctatcccaaagttaaagcatggatcgagaagactctcgaagaaggccgcacacgtggttacgtagagaccttatttggacgtcgccgctatgttcccgatttaaacgctcgcgtgaaatctgtccgtgaagccgccgaacgcatggcgttcaacatgcctgtacagggcacggcagctgacctcatgaaacttgcaatggtgcgcctttttccacaattgcgtgaagttggtgcccgcatgctcttgcaggtccacgatgaactcttgttagaagcgccaaaagagcgtgcggaagaggtggcagccctcgcgaaagaggttatggaaggcgtgtggcccttagcggtgcctcttgaagtcgaagttggtattggcgaggattggttggctgccaaaggataatga

SEQ ID NO: 1690 - protein, 841 aa, synthetic construct
  REGION 1..841: note = Variant of DNA polymerase I from Thermus sp. strain 2.9
MHHHHHHGGSGMLPLFEPKGRVLLVDGHHLAYRNFFALKGLTTSRGEPVQGVYGFAKSLLKALKEDGDVVIVVFDAKAPSFRHEAYEAYKAGRAPTPEDFPRQLALMKELVDLLGLERLEVPGFEADDVLATLAKKAEREGYEVQILTADRDLFQLLSPRISVLHPEGHRITPEWLWEKYGLRPEQWVDFRALVGDPSDNIPGVKGIGEKTALKLLKEWGSLENLLKNLDQVKPESVREKILAHLEDLKLSRELSRVRTDLPLEVDFRGRREPDWEGLKAFLERLEFGSLLHEFGLLESPLPAEEAPWPPPEGAFLGYRLSRPEPMWAELLALAASAQGRVYRAEDPHGALRGLKEVRGLLAKDLAVVALREGLDLPPTDDPMLLAYLLDPSNTTPEGVARRYGGEWTEDAGERALLAERLHANLLGRLQGEERLLWLYEEVEKPLSRVLAHMEATGVKLDVAYLENLSLEVAAEMRRLEEEVFRLAGHSFYLNSRDQLERVLFDELGLPCIGKTEKTGKRSTSAAVLEALREVHPIVDKILQYRELAKLKGTYIDPLPALVHPKTGRLHTRFNQTATATGRLSSSDPNLQNIPVRTPLGQKIRRAFVAEEGWRLVALDYSQIELRVLAHLSGDENLIRVFQEGKDIHTQTASWMFGVSAEAIDPLMRRAAKTINFGVLYGMSAHRLSQELGIPYEEAAAFIQRYFQSYPKVKAWIEKTLEEGRTRGYVETLFGRRRYVPDLNARVKSVREAAERMAFNMPVQGTAADLMKLAMVRLFPQLREVGARMLLQVHDELLLEAPKERAEEVAALAKEVMEGVWPLAVPLEVEVGIGEDWLAAKG

SEQ ID NO: 1691 - DNA, 2529 bp, synthetic construct
  misc_feature 1..2529: note = Variant of DNA polymerase I from Thermus sp. strain 2.9
  source 1..2529: mol_type = other DNA
atgcaccatcatcatcatcatggcggtagcggcatgttaccgttgttcgaacctaaaggtcgcgtgcttctggttgatggccatcatctcgcgtatcgtaacttctttgccctgaaaggattaaccaccagccgtggcgagccggtacagggtgtctacggctttgcaaagtcgctcctgaaagctctgaaagaagacggtgatgtggtgattgttgtctttgatgcgaaagcgccaagttttcgccacgaagcgtacgaagcttacaaagccgggcgtgctccaacgccggaagactttcctcgccaattggcgcttatgaaggaattagtggatttgcttggcctcgaacgcttggaagttcccggtttcgaggcagacgacgtattagcgactctcgcaaagaaagccgaacgtgagggctatgaagtccagatcttgacagcagatcgcgatcttttccagcttttatctccgcgcatctcggtgttacacccggaagggcatcgtatcaccccggaatggctctgggagaaatatggtttgcgtcccgaacaatgggtggattttcgcgccttagcaggcgatccgagcgacaatattccgggagttaaaggtatcggcgagaagacggcgctcaagctccttaaagaatgggggtcgttggagaacttgcttaagaatttagatcaggtcaaaccagagtcagtgcgtgagaagattcttgcacacctcgaagacctcaaattaagccgcgaattgtcccgtgtacgcaccgatttgccgctcgaagttgatttccgtggccgccgcgaacctgactgggagggtcttaaagcgtttttagagcgtcttgaatttggttcgctcttgcatgaattcggccttttagaaagcccgttaccagccgaagaagcaccttggccaccgcccgaaggcgcgtttttaggttaccgtttgagtcgcccggaaccgatgtgggccgaattattggctcttgcagcgtctgcccagggacgtgtgtatcgcgcggaagaccctcatggtgcgctccgcggcctcaaagaagtccgtggactccttgccaaagacttagctgttgttgcattgcgcgaaggtcttgatttacctccgactgatgatccaatgcttcttgcgtacctcttggacccgtcaaacacgacgcccgaaggcgtagcccgtcgttacggcggcgagtggaccgaagatgcaggcgagcgcgcgttattggccgaacgtttgcacgccaatttattaggacgtttgcaaggcgaggaacgtctcctctggctttacgaagaagtggagaaaccattgagtcgcgtgctcgcgcatatggaagctaccggtgtcaaattagacgtggcgtatttggaggcactcagccttgaagttgctgccgaaatgcgccgcttggaggaagaagtattccgtttagcaggccactccttttatcttaattctcgcgatcagttagaacgtgtgttgttcgatgaacttggtctccctcctatcggcaagacagagaagaccggtaaacgtagcacttcagcggcggttttagaagctcttcgcgaagtccatcccattgtggacaagatcttgcagtaccgcgaactcgcgaaattgaaaggcacctatattgaccctcttccggcattagtccacccgaaaacgggacgcctccatacccgcttcaaccaaacagccacggcgaccggtcgtttgtcctcctctgatccaaaccttcagaatattccagtacgtaccccattgggccagaagatccgccgcgcgtttgtagctgaggagggttggcgtttagtggccctcgattatagccaaattgaattacgtgtccttgcccatctttctggcgatgagaacctcatccgcgtgtttcaggaaggcaaagacattcacactcaaacggcaagctggatgtttggattatcagctgaagcgatcgatcctacgatgcgtcgtgcagcgaagaccatcaatttcggtgttctctacggtatgagtgcccatcgtttgtcgcaggaattaggcattccctatgaagaagctgcggcgttcattcagcgctactttcaaagctatcccaaagttaaagcatggatcgagaagactctcgaagaaggccgcacacgtggttacgtagagaccttatttggacgtcgccgctatgttcccgatttaaacgctcgcgtgaaatctgtccgtgaagccgccgaacgcatggcgttcaacatgcctgtacagggcacggcagctgacctcatgaaacttgcaatggtgcgcctttttccacaattgcgtgaagttggtgcccgcatgctcttgcaggtccacgatgaactcttgttagaagcgccaaaagagcgtgcggaagaggtggcagccctcgcgaaagaggttatggaaggcgtgtggcccttagcggtgcctcttgaagtcgaagttggtattggcgaggattggttggctgccaaaggataatga

SEQ ID NO: 1692 - protein, 841 aa, synthetic construct
  REGION 1..841: note = Variant of DNA polymerase I from Thermus sp. strain 2.9
MHHHHHHGGSGMLPLFEPKGRVLLVDGHHLAYRNFFALKGLTTSRGEPVQGVYGFAKSLLKALKEDGDVVIVVFDAKAPSFRHEAYEAYKAGRAPTPEDFPRQLALMKELVDLLGLERLEVPGFEADDVLATLAKKAEREGYEVQILTADRDLFQLLSPRISVLHPEGHRITPEWLWEKYGLRPEQWVDFRALAGDPSDNIPGVKGIGEKTALKLLKEWGSLENLLKNLDQVKPESVREKILAHLEDLKLSRELSRVRTDLPLEVDFRGRREPDWEGLKAFLERLEFGSLLHEFGLLESPLPAEEAPWPPPEGAFLGYRLSRPEPMWAELLALAASAQGRVYRAEDPHGALRGLKEVRGLLAKDLAVVALREGLDLPPTDDPMLLAYLLDPSNTTPEGVARRYGGEWTEDAGERALLAERLHANLLGRLQGEERLLWLYEEVEKPLSRVLAHMEATGVKLDVAYLEALSLEVAAEMRRLEEEVFRLAGHSFYLNSRDQLERVLFDELGLPPIGKTEKTGKRSTSAAVLEALREVHPIVDKILQYRELAKLKGTYIDPLPALVHPKTGRLHTRFNQTATATGRLSSSDPNLQNIPVRTPLGQKIRRAFVAEEGWRLVALDYSQIELRVLAHLSGDENLIRVFQEGKDIHTQTASWMFGLSAEAIDPTMRRAAKTINFGVLYGMSAHRLSQELGIPYEEAAAFIQRYFQSYPKVKAWIEKTLEEGRTRGYVETLFGRRRYVPDLNARVKSVREAAERMAFNMPVQGTAADLMKLAMVRLFPQLREVGARMLLQVHDELLLEAPKERAEEVAALAKEVMEGVWPLAVPLEVEVGIGEDWLAAKG

SEQ ID NO: 1693 - DNA, 2529 bp, synthetic construct
  misc_feature 1..2529: note = Variant of DNA polymerase I from Thermus sp. strain 2.9
  source 1..2529: mol_type = other DNA
atgcaccatcatcatcatcatggcggtagcggcatgttaccgttgttcgaacctaaaggtcgcgtgcttctggttgatggccatcatctcgcgtatcgtaacttctttgcccggaaaggattaaccaccagccgtggcgagccggtacagggtgtctacggctttgcaaagtcgctcctgaaagctctgaaagaagacggtgatgtggtgattgttgtctttgatgcgaaagcgccaagttttcgccacgaagcgtacgaagcttacaaagccgggcgtgctccaacgccggaagactttcctcgccaattggcgcttatgaaggaattagtggatttgcttggcctcgaacgcttggaagttcccggtttcgaggcagacgacgtattagcgactctcgcaaagaaagccgaacgtgagggctatgaagtccagatcttgacagcagatcgcgatcttttccagcttttatctccgcgcatctcggtgttacacccggaagggcatcgtatcaccccggaatggctctgggagaaatatggtttgcgtcccgaacaatgggtggattttcgcgccttagcaggcgatccgagcgacaatattccgggagttaaaggtatcggcgagaagacggcgctcaagctccttaaagaatgggggtcgttggagaacttgcttaagaatttagatcaggtcaaaccagagtcagtgcgtgagaagattcttgcacacctcgaagacctcaaattaagccgcgaattgtcccgtgtacgcaccgatttgccgctcgaagttgatttccgtggccgccgcgaacctgactgggagggtcttaaagcgtttttagagcgtcttgaatttggttcgctcttgcatgaattcggccttttagaaagcccgttaccagccgaagaagcaccttggccaccgcccgaaggcgcgtttttaggttaccgtttgagtcgcccggaaccgatgtgggccgaattattggctcttgcagcgtctgcccagggacgtgtgtatcgcgcggaagaccctcatggtgcgctccgcggcctcaaagaagtccgtggactccttgccaaagacttagctgttgttgcattgcgcgaaggtcttgatttacctccgactgatgatccaatgcttcttgcgtacctcttggacccgtcaaacacgacgcccgaaggcgtagcccgtcgttacggcggcgagtggaccgaagatgcaggcgagcgcgcgttattggccgaacgtttgcacgccaatttattaggacgtttgcaaggcgaggaacgtctcctctggctttacgaagaagtggagaaaccattgagtcgcgtgctcgcgcatatggaagctaccggtgtcaaattagacgtggcgtatttggaggcactcagccttgaagttgctgccgaaatgcgccgcttggaggaagaagtattccgtttagcaggccactccttttatcttaattctcgcgatcagttagaacgtgtgttgttcgatgaacttggtctccctcctatcggcaagacagagaagaccggtaaacgtagcacttcagcggcggttttagaagctcttcgcgaagtccatcccattgtggacaagatcttgcagtaccgcgaactcgcgaaattgaaaggcacctatattgaccctcttccggcattagtccacccgaaaacgggacgcctccatacccgcttcaaccaaacagccacggcgaccggtcgtttgtcctcctctgatccaaaccttcagaatattccagtacgtaccccattgggccagaagatccgccgcgcgtttgtagctgaggagggttggcgtttagtggccctcgattatagccaaattgaattacgtgtccttgcccatctttctggcgatgagaacctcatccgcgtgtttcaggaaggcaaagacattcacactcaaacggcaagctggatgtttggattatcagctgaagcgatcgatcctttgatgcgtcgtgcagcgaagaccatcaatttcggtgttctctacggtatgagtgcccatcgtttgtcgcaggaattaggcattccctatgaagaagctgcggcgttcattcagcgctactttcaaagctatcccaaagttaaagcatggatcgagaagactctcgaagaaggccgcacacgtggttacgtagagaccttatttggacgtcgccgctatgttcccgatttaaacgctcgcgtgaaatctgtccgtgaagccgccgaacgcatggcgttcaacatgcctgtacagggcacggcagctgacctcatgaaacttgcaatggtgcgcctttttccacaattgcgtgaagttggtgcccgcatgctcttgcaggtccacgatgaactcttgttagaagcgccaaaagagcgtgcggaagaggtggcagccctcgcgaaagaggttatggaaggcgtgtggcccttagcggtgcctcttgaagtcgaagttggtattggcgaggattggttggctgccaaaggataatga

SEQ ID NO: 1694 - protein, 841 aa, synthetic construct
  REGION 1..841: note = Variant of DNA polymerase I from Thermus sp. strain 2.9
MHHHHHHGGSGMLPLFEPKGRVLLVDGHHLAYRNFFARKGLTTSRGEPVQGVYGFAKSLLKALKEDGDVVIVVFDAKAPSFRHEAYEAYKAGRAPTPEDFPRQLALMKELVDLLGLERLEVPGFEADDVLATLAKKAEREGYEVQILTADRDLFQLLSPRISVLHPEGHRITPEWLWEKYGLRPEQWVDFRALAGDPSDNIPGVKGIGEKTALKLLKEWGSLENLLKNLDQVKPESVREKILAHLEDLKLSRELSRVRTDLPLEVDFRGRREPDWEGLKAFLERLEFGSLLHEFGLLESPLPAEEAPWPPPEGAFLGYRLSRPEPMWAELLALAASAQGRVYRAEDPHGALRGLKEVRGLLAKDLAVVALREGLDLPPTDDPMLLAYLLDPSNTTPEGVARRYGGEWTEDAGERALLAERLHANLLGRLQGEERLLWLYEEVEKPLSRVLAHMEATGVKLDVAYLEALSLEVAAEMRRLEEEVFRLAGHSFYLNSRDQLERVLFDELGLPPIGKTEKTGKRSTSAAVLEALREVHPIVDKILQYRELAKLKGTYIDPLPALVHPKTGRLHTRFNQTATATGRLSSSDPNLQNIPVRTPLGQKIRRAFVAEEGWRLVALDYSQIELRVLAHLSGDENLIRVFQEGKDIHTQTASWMFGLSAEAIDPLMRRAAKTINFGVLYGMSAHRLSQELGIPYEEAAAFIQRYFQSYPKVKAWIEKTLEEGRTRGYVETLFGRRRYVPDLNARVKSVREAAERMAFNMPVQGTAADLMKLAMVRLFPQLREVGARMLLQVHDELLLEAPKERAEEVAALAKEVMEGVWPLAVPLEVEVGIGEDWLAAKG

SEQ ID NO: 1695 - DNA, 2529 bp, synthetic construct
  misc_feature 1..2529: note = Variant of DNA polymerase I from Thermus sp. strain 2.9
  source 1..2529: mol_type = other DNA
atgcaccatcatcatcatcatggcggtagcggcatgttaccgttgttcgaacctaaaggtcgcgtgcttctggttgatggccatcatctcgcgtatcgtaacttctttgccgggaaaggattaaccaccagccgtggcgagccggtacagggtgtctacggctttgcaaagtcgctcctgaaagctctgaaagaagacggtgatgtggtgattgttgtctttgatgcgaaagcgccaagttttcgccacgaagcgtacgaagcttacaaagccgggcgtgctccaacgccggaagactttcctcgccaattggcgcttatgaaggaattagtggatttgcttggcctcgaacgcttggaagttcccggtttcgaggcagacgacgtattagcgactctcgcaaagaaagccgaacgtgagggctatgaagtccagatcttgacagcagatcgcgatcttttccagcttttatctccgcgcatctcggtgttacacccggaagggcatcgtatcaccccggaatggctctgggagaaatatggtttgcgtcccgaacaatgggtggattttcgcgccttagcaggcgatccgagcgacaatattccgggagttaaaggtatcggcgagaagacggcgctcaagctccttaaagaatgggggtcgttggagaacttgcttaagaatttagatcaggtcaaaccagagtcagtgcgtgagaagattcttgcacacctcgaagacctcaaattaagccgcgaattgtcccgtgtacgcaccgatttgccgctcgaagttgatttccgtggccgccgcgaacctgactgggagggtcttaaagcgtttttagagcgtcttgaatttggttcgctcttgcatgaattcggccttttagaaagcccgttaccagccgaagaagcaccttggccaccgcccgaaggcgcgtttttaggttaccgtttgagtcgcccggaaccgatgtgggccgaattattggctcttgcagcgtctgcccagggacgtgtgtatcgcgcggaagaccctcatggtgcgctccgcggcctcaaagaagtccgtggactccttgccaaagacttagctgttgttgcattgcgcgaaggtcttgatttacctccgactgatgatccaatgcttcttgcgtacctcttggacccgtcaaacacgacgcccgaaggcgtagcccgtcgttacggcggcgagtggaccgaagatgcaggcgagcgcgcgttattggccgaacgtttgcacgccaatttattaggacgtttgcaaggcgaggaacgtctcctctggctttacgaagaagtggagaaaccattgagtcgcgtgctcgcgcatatggaagctaccggtgtcaaattagacgtggcgtatttggaggcactcagccttgaagttgctgccgaaatgcgccgcttggaggaagaagtattccgtttagcaggccactccttttatcttaattctcgcgatcagttagaacgtgtgttgttcgatgaacttggtctccctcctatcggcaagacagagaagaccggtaaacgtagcacttcagcggcggttttagaagctcttcgcgaagtccatcccattgtggacaagatcttgcagtaccgcgaactcgcgaaattgaaaggcacctatattgaccctcttccggcattagtccacccgaaaacgggacgcctccatacccgcttcaaccaaacagccacggcgaccggtcgtttgtcctcctctgatccaaaccttcagaatattccagtacgtaccccattgggccagaagatccgccgcgcgtttgtagctgaggagggttggcgtttagtggccctcgattatagccaaattgaattacgtgtccttgcccatctttctggcgatgagaacctcatccgcgtgtttcaggaaggcaaagacattcacactcaaacggcaagctggatgtttggattatcagctgaagcgatcgatcctttgatgcgtcgtgcagcgaagaccatcaatttcggtgttctctacggtatgagtgcccatcgtttgtcgcaggaattaggcattccctatgaagaagctgcggcgttcattcagcgctactttcaaagctatcccaaagttaaagcatggatcgagaagactctcgaagaaggccgcacacgtggttacgtagagaccttatttggacgtcgccgctatgttcccgatttaaacgctcgcgtgaaatctgtccgtgaagccgccgaacgcatggcgttcaacatgcctgtacagggcacggcagctgacctcatgaaacttgcaatggtgcgcctttttccacaattgcgtgaagttggtgcccgcatgctcttgcaggtccacgatgaactcttgttagaagcgccaaaagagcgtgcggaagaggtggcagccctcgcgaaagaggttatggaaggcgtgtggcccttagcggtgcctcttgaagtcgaagttggtattggcgaggattggttggctgccaaaggataatga

SEQ ID NO: 1696 - protein, 841 aa, synthetic construct
  REGION 1..841: note = Variant of DNA polymerase I from Thermus sp. strain 2.9
MHHHHHHGGSGMLPLFEPKGRVLLVDGHHLAYRNFFAGKGLTTSRGEPVQGVYGFAKSLLKALKEDGDVVIVVFDAKAPSFRHEAYEAYKAGRAPTPEDFPRQLALMKELVDLLGLERLEVPGFEADDVLATLAKKAEREGYEVQILTADRDLFQLLSPRISVLHPEGHRITPEWLWEKYGLRPEQWVDFRALAGDPSDNIPGVKGIGEKTALKLLKEWGSLENLLKNLDQVKPESVREKILAHLEDLKLSRELSRVRTDLPLEVDFRGRREPDWEGLKAFLERLEFGSLLHEFGLLESPLPAEEAPWPPPEGAFLGYRLSRPEPMWAELLALAASAQGRVYRAEDPHGALRGLKEVRGLLAKDLAVVALREGLDLPPTDDPMLLAYLLDPSNTTPEGVARRYGGEWTEDAGERALLAERLHANLLGRLQGEERLLWLYEEVEKPLSRVLAHMEATGVKLDVAYLEALSLEVAAEMRRLEEEVFRLAGHSFYLNSRDQLERVLFDELGLPPIGKTEKTGKRSTSAAVLEALREVHPIVDKILQYRELAKLKGTYIDPLPALVHPKTGRLHTRFNQTATATGRLSSSDPNLQNIPVRTPLGQKIRRAFVAEEGWRLVALDYSQIELRVLAHLSGDENLIRVFQEGKDIHTQTASWMFGLSAEAIDPLMRRAAKTINFGVLYGMSAHRLSQELGIPYEEAAAFIQRYFQSYPKVKAWIEKTLEEGRTRGYVETLFGRRRYVPDLNARVKSVREAAERMAFNMPVQGTAADLMKLAMVRLFPQLREVGARMLLQVHDELLLEAPKERAEEVAALAKEVMEGVWPLAVPLEVEVGIGEDWLAAKG

SEQ ID NO: 1697 - DNA, 2529 bp, synthetic construct
  misc_feature 1..2529: note = Variant of DNA polymerase I from Thermus sp. strain 2.9
  source 1..2529: mol_type = other DNA
atgcaccatcatcatcatcatggcggtagcggcatgttaccgttgttcgaacctaaaggtcgcgtgcttctggttgatggccatcatctcgcgtatcgtaacttctttgccctgaaaggattaaccaccagccgtggcgagccggtacagggtgtctacggctttgcaaagtcgctcctgaaagctctgaaagaagacggtgatgtggtgattgttgtctttgatgcgaaagcgccaagttttcgccacgaagcgtacgaagcttacaaagccgggcgtgctccaacgccggaagactttcctcgccaattggcgcttatgaaggaattagtggatttgcttggcctcgaacgcttggaagttcccggtttcgaggcagacgacgtattagcgactctcgcaaagaaagccgaacgtgagggctatgaagtccagatcttgacagcagatcgcgatcttttccagcttttatctccgcgcatctcggtgttacacccggaagggcatcgtatcaccccggaatggctctgggagaaatatggtttgcgtcccgaacaatgggtggattttcgcgccttagcaggcgatccgagcgacaatattccgggagttaaaggtatcggcgagaagacggcgctcaagctccttaaagaatgggggtcgttggagaacttgcttaagaatttagatcaggtcaaaccagagtcagtgcgtgagaagattcttgcacacctcgaagacctcaaattaagccgcgaattgtcccgtgtacgcaccgatttgccgctcgaagttgatttccgtggccgccgcgaacctgactgggagggtcttaaagcgtttttagagcgtcttgaatttggttcgctcttgcatgaattcggccttttagaaagcccgttaccagccgaagaagcaccttggccaccgcccgaaggcgcgtttttaggttaccgtttgagtcgcccggaaccgatgtgggccgaattattggctcttgcagcgtctgcccagggacgtgtgtatcgcgcggaagaccctcatggtgcgctccgcggcctcaaagaagtccgtggactccttgccaaagacttagctgttgttgcattgcgcgaaggtcttgatttacctccgactgatgatccaatgcttcttgcgtacctcttggacccgtcaaacacgacgcccgaaggcgtagcccgtcgttacggcggcgagtggaccgaagatgcaggcgagcgcgcgttattggccgaacgtttgcacgccaatttattaggacgtttgcaaggcgaggaacgtctcctctggctttacgaagaagtggagaaaccattgagtcgcgtgctcgcgcatatggaagctaccggtgtcaaattagacgtggcgtatttggaggcactcagccttgaagttgctgccgaaatgcgccgcttggaggaagaagtattccgtttagcaggccactccttttatcttaattctcgcgatcagttagaacgtgtgttgttcgatgaacttggtctccctcctatcggcaagacagagaagaggggtaaacgtagcacttcagcggcggttttagaagctcttcgcgaagtccatcccattgtggacaagatcttgcagtaccgcgaactcgcgaaattgaaaggcacctatattgaccctcttccggcattagtccacccgaaaacgggacgcctccatacccgcttcaaccaaacagccacggcgaccggtcgtttgtcctcctctgatccaaaccttcagaatattccagtacgtaccccattgggccagaagatccgccgcgcgtttgtagctgaggagggttggcgtttagtggccctcgattatagccaaattgaattacgtgtccttgcccatctttctggcgatgagaacctcatccgcgtgtttcaggaaggcaaagacattcacactcaaacggcaagctggatgtttggattatcagctgaagcgatcgatcctttgatgcgtcgtgcagcgaagaccatcaatttcggtgttctctacggtatgagtgcccatcgtttgtcgcaggaattaggcattccctatgaagaagctgcggcgttcattcagcgctactttcaaagctatcccaaagttaaagcatggatcgagaagactctcgaagaaggccgcacacgtggttacgtagagaccttatttggacgtcgccgctatgttcccgatttaaacgctcgcgtgaaatctgtccgtgaagccgccgaacgcatggcgttcaacatgcctgtacagggcacggcagctgacctcatgaaacttgcaatggtgcgcctttttccacaattgcgtgaagttggtgcccgcatgctcttgcaggtccacgatgaactcttgttagaagcgccaaaagagcgtgcggaagaggtggcagccctcgcgaaagaggttatggaaggcgtgtggcccttagcggtgcctcttgaagtcgaagttggtattggcgaggattggttggctgccaaaggataatga

SEQ ID NO: 1698 - protein, 841 aa, synthetic construct
  REGION 1..841: note = Variant of DNA polymerase I from Thermus sp. strain 2.9
MHHHHHHGGSGMLPLFEPKGRVLLVDGHHLAYRNFFALKGLTTSRGEPVQGVYGFAKSLLKALKEDGDVVIVVFDAKAPSFRHEAYEAYKAGRAPTPEDFPRQLALMKELVDLLGLERLEVPGFEADDVLATLAKKAEREGYEVQILTADRDLFQLLSPRISVLHPEGHRITPEWLWEKYGLRPEQWVDFRALAGDPSDNIPGVKGIGEKTALKLLKEWGSLENLLKNLDQVKPESVREKILAHLEDLKLSRELSRVRTDLPLEVDFRGRREPDWEGLKAFLERLEFGSLLHEFGLLESPLPAEEAPWPPPEGAFLGYRLSRPEPMWAELLALAASAQGRVYRAEDPHGALRGLKEVRGLLAKDLAVVALREGLDLPPTDDPMLLAYLLDPSNTTPEGVARRYGGEWTEDAGERALLAERLHANLLGRLQGEERLLWLYEEVEKPLSRVLAHMEATGVKLDVAYLEALSLEVAAEMRRLEEEVFRLAGHSFYLNSRDQLERVLFDELGLPPIGKTEKRGKRSTSAAVLEALREVHPIVDKILQYRELAKLKGTYIDPLPALVHPKTGRLHTRFNQTATATGRLSSSDPNLQNIPVRTPLGQKIRRAFVAEEGWRLVALDYSQIELRVLAHLSGDENLIRVFQEGKDIHTQTASWMFGLSAEAIDPLMRRAAKTINFGVLYGMSAHRLSQELGIPYEEAAAFIQRYFQSYPKVKAWIEKTLEEGRTRGYVETLFGRRRYVPDLNARVKSVREAAERMAFNMPVQGTAADLMKLAMVRLFPQLREVGARMLLQVHDELLLEAPKERAEEVAALAKEVMEGVWPLAVPLEVEVGIGEDWLAAKG

SEQ ID NO: 1699 - DNA, 2529 bp, synthetic construct
  misc_feature 1..2529: note = Variant of DNA polymerase I from Thermus sp. strain 2.9
  source 1..2529: mol_type = other DNA
atgcaccatcatcatcatcatggcggtagcggcatgttaccgttgttcgaacctaaaggtcgcgtgcttctggttgatggccatcatctcgcgtatcgtaacttctttgccctgaaaggattaaccaccagccgtggcgagccggtacagggtgtctacggctttgcaaagtcgctcctgaaagctctgaaagaagacggtgatgtggtgattgttgtctttgatgcgaaagcgccaagttttcgccacgaagcgtacgaagcttacaaagccgggcgtgctccaacgccggaagactttcctcgccaattggcgcttatgaaggaattagtggatttgcttggcctcgaacgcttggaagttcccggtttcgaggcagacgacgtattagcgactctcgcaaagaaagccgaacgtgagggctatgaagtccagatcttgacagcagatcgcgatcttttccagcttttatctccgcgcatctcggtgttacacccggaagggcatcgtatcaccccggaatggctctgggagaaatatggtttgcgtcccgaacaatgggtggattttcgcgccttagcaggcgatccgagcgacaatattccgggagttaaaggtatcggcgagaagacggcgctcaagctccttaaagaatgggggtcgttggagaacttgcttaagaatttagatcaggtcaaaccagagtcagtgcgtgagaagattcttgcacacctcgaagacctcaaattaagccgcgaattgtcccgtgtacgcaccgatttgccgctcgaagttgatttccgtggccgccgcgaacctgactgggagggtcttaaagcgtttttagagcgtcttgaatttggttcgctcttgcatgaattcggccttttagaaagcccgttaccagccgaagaagcaccttggccaccgtgtgaaggcgcgtttttaggttaccgtttgagtcgcccggaaccgatgtgggccgaattattggctcttgcagcgtctgcccagggacgtgtgtatcgcgcggaagaccctcatggtgcgctccgcggcctcaaagaagtccgtggactccttgccaaagacttagctgttgttgcattgcgcgaaggtcttgatttacctccgactgatgatccaatgcttcttgcgtacctcttggacccgtcaaacacgacgcccgaaggcgtagcccgtcgttacggcggcgagtggaccgaagatgcaggcgagcgcgcgttattggccgaacgtttgcacgccaatttattaggacgtttgcaaggcgaggaacgtctcctctggctttacgaagaagtggagaaaccattgagtcgcgtgctcgcgcatatggaagctaccggtgtcaaattagacgtggcgtatttggaggcactcagccttgaagttgctgccgaaatgcgccgcttggaggaagaagtattccgtttagcaggccactccttttatcttaattctcgcgatcagttagaacgtgtgttgttcgatgaacttggtctccctcctatcggcaagacagagaagaccggtaaacgtagcacttcagcggcggttttagaagctcttcgcgaagtccatcccattgtggacaagatcttgcagtaccgcgaactcgcgaaattgaaaggcacctatattgaccctcttccggcattagtccacccgaaaacgggacgcctccatacccgcttcaaccaaacagccacggcgaccggtcgtttgtcctcctctgatccaaaccttcagaatattccagtacgtaccccattgggccagaagatccgccgcgcgtttgtagctgaggagggttggcgtttagtggccctcgattatagccaaattgaattacgtgtccttgcccatctttctggcgatgagaacctcatccgcgtgtttcaggaaggcaaagacattcacactcaaacggcaagctggatgtttggattatcagctgaagcgatcgatcctttgatgcgtcgtgcagcgaagaccatcaatttcggtgttctctacggtatgagtgcccatcgtttgtcgcaggaattaggcattccctatgaagaagctgcggcgttcattcagcgctactttcaaagctatcccaaagttaaagcatggatcgagaagactctcgaagaaggccgcacacgtggttacgtagagaccttatttggacgtcgccgctatgttcccgatttaaacgctcgcgtgaaatctgtccgtgaagccgccgaacgcatggcgttcaacatgcctgtacagggcacggcagctgacctcatgaaacttgcaatggtgcgcctttttccacaattgcgtgaagttggtgcccgcatgctcttgcaggtccacgatgaactcttgttagaagcgccaaaagagcgtgcggaagaggtggcagccctcgcgaaagaggttatggaaggcgtgtggcccttagcggtgcctcttgaagtcgaagttggtattggcgaggattggttggctgccaaaggataatga

SEQ ID NO: 1700 - protein, 841 aa, synthetic construct
  REGION 1..841: note = Variant of DNA polymerase I from Thermus sp. strain 2.9
MHHHHHHGGSGMLPLFEPKGRVLLVDGHHLAYRNFFALKGLTTSRGEPVQGVYGFAKSLLKALKEDGDVVIVVFDAKAPSFRHEAYEAYKAGRAPTPEDFPRQLALMKELVDLLGLERLEVPGFEADDVLATLAKKAEREGYEVQILTADRDLFQLLSPRISVLHPEGHRITPEWLWEKYGLRPEQWVDFRALAGDPSDNIPGVKGIGEKTALKLLKEWGSLENLLKNLDQVKPESVREKILAHLEDLKLSRELSRVRTDLPLEVDFRGRREPDWEGLKAFLERLEFGSLLHEFGLLESPLPAEEAPWPPCEGAFLGYRLSRPEPMWAELLALAASAQGRVYRAEDPHGALRGLKEVRGLLAKDLAVVALREGLDLPPTDDPMLLAYLLDPSNTTPEGVARRYGGEWTEDAGERALLAERLHANLLGRLQGEERLLWLYEEVEKPLSRVLAHMEATGVKLDVAYLEALSLEVAAEMRRLEEEVFRLAGHSFYLNSRDQLERVLFDELGLPPIGKTEKTGKRSTSAAVLEALREVHPIVDKILQYRELAKLKGTYIDPLPALVHPKTGRLHTRFNQTATATGRLSSSDPNLQNIPVRTPLGQKIRRAFVAEEGWRLVALDYSQIELRVLAHLSGDENLIRVFQEGKDIHTQTASWMFGLSAEAIDPLMRRAAKTINFGVLYGMSAHRLSQELGIPYEEAAAFIQRYFQSYPKVKAWIEKTLEEGRTRGYVETLFGRRRYVPDLNARVKSVREAAERMAFNMPVQGTAADLMKLAMVRLFPQLREVGARMLLQVHDELLLEAPKERAEEVAALAKEVMEGVWPLAVPLEVEVGIGEDWLAAKG

SEQ ID NO: 1701 - DNA, 2529 bp, synthetic construct
  misc_feature 1..2529: note = Variant of DNA polymerase I from Thermus sp. strain 2.9
  source 1..2529: mol_type = other DNA
atgcaccatcatcatcatcatggcggtagcggcatgttaccgttgttcgaacctaaaggtcgcgtgcttctggttgatggccatcatctcgcgtatcgtaacttctttgccctgaaaggattaaccaccagccgtggcgagccggtacagggtgtctacggctttgcaaagtcgctcctgaaagctctgaaagaagacggtgatgtggtgattgttgtctttgatgcgaaagcgccaagttttcgccacgaagcgtacgaagcttacaaagccgggcgtgctccaacgccggaagactttcctcgccaattggcgcttatgaaggaattagtggatttgcttggcctcgaacgcttggaagttcccggtttcgaggcagacgacgtattagcgactctcgcaaagaaagccgaacgtgagggctatgaagtccagatcttgacagcagatcgcgatcttttccagcttttatctccgcgcatctcggtgttacacccggaagggcatcgtatcaccccggaatggctctgggagaaatatggtttgcgtcccgaacaatgggtggattttcgcgccttagcaggcgatccgagcgacaatattccgggagttaaaggtatcggcgagaagacggcgctcaagctccttaaagaatgggggtcgttggagaacttgcttaagaatttagatcaggtcaaaccagagtcagtgcgtgagaagattcttgcacacctcgaagacctcaaattaagccgcgaattgtcccgtgtacgcaccgatttgccgctcgaagttgatttccgtggccgccgcgaacctgactgggagggtcttaaagcgtttttagagcgtcttgaatttggttcgctcttgcatgaattcggccttttagaaagcaggttaccagccgaagaagcaccttggccaccgcccgaaggcgcgtttttaggttaccgtttgagtcgcccggaaccgatgtgggccgaattattggctcttgcagcgtctgcccagggacgtgtgtatcgcgcggaagaccctcatggtgcgctccgcggcctcaaagaagtccgtggactccttgccaaagacttagctgttgttgcattgcgcgaaggtcttgatttacctccgactgatgatccaatgcttcttgcgtacctcttggacccgtcaaacacgacgcccgaaggcgtagcccgtcgttacggcggcgagtggaccgaagatgcaggcgagcgcgcgttattggccgaacgtttgcacgccaatttattaggacgtttgcaaggcgaggaacgtctcctctggctttacgaagaagtggagaaaccattgagtcgcgtgctcgcgcatatggaagctaccggtgtcaaattagacgtggcgtatttggaggcactcagccttgaagttgctgccgaaatgcgccgcttggaggaagaagtattccgtttagcaggccactccttttatcttaattctcgcgatcagttagaacgtgtgttgttcgatgaacttggtctccctcctatcggcaagacagagaagaccggtaaacgtagcacttcagcggcggttttagaagctcttcgcgaagtccatcccattgtggacaagatcttgcagtaccgcgaactcgcgaaattgaaaggcacctatattgaccctcttccggcattagtccacccgaaaacgggacgcctccatacccgcttcaaccaaacagccacggcgaccggtcgtttgtcctcctctgatccaaaccttcagaatattccagtacgtaccccattgggccagaagatccgccgcgcgtttgtagctgaggagggttggcgtttagtggccctcgattatagccaaattgaattacgtgtccttgcccatctttctggcgatgagaacctcatccgcgtgtttcaggaaggcaaagacattcacactcaaacggcaagctggatgtttggattatcagctgaagcgatcgatcctttgatgcgtcgtgcagcgaagaccatcaatttcggtgttctctacggtatgagtgcccatcgtttgtcgcaggaattaggcattccctatgaagaagctgcggcgttcattcagcgctactttcaaagctatcccaaagttaaagcatggatcgagaagactctcgaagaaggccgcacacgtggttacgtagagaccttatttggacgtcgccgctatgttcccgatttaaacgctcgcgtgaaatctgtccgtgaagccgccgaacgcatggcgttcaacatgcctgtacagggcacggcagctgacctcatgaaacttgcaatggtgcgcctttttccacaattgcgtgaagttggtgcccgcatgctcttgcaggtccacgatgaactcttgttagaagcgccaaaagagcgtgcggaagaggtggcagccctcgcgaaagaggttatggaaggcgtgtggcccttagcggtgcctcttgaagtcgaagttggtattggcgaggattggttggctgccaaaggataatga

SEQ ID NO: 1702 - protein, 841 aa, synthetic construct
  REGION 1..841: note = Variant of DNA polymerase I from Thermus sp. strain 2.9
MHHHHHHGGSGMLPLFEPKGRVLLVDGHHLAYRNFFALKGLTTSRGEPVQGVYGFAKSLLKALKEDGDVVIVVFDAKAPSFRHEAYEAYKAGRAPTPEDFPRQLALMKELVDLLGLERLEVPGFEADDVLATLAKKAEREGYEVQILTADRDLFQLLSPRISVLHPEGHRITPEWLWEKYGLRPEQWVDFRALAGDPSDNIPGVKGIGEKTALKLLKEWGSLENLLKNLDQVKPESVREKILAHLEDLKLSRELSRVRTDLPLEVDFRGRREPDWEGLKAFLERLEFGSLLHEFGLLESRLPAEEAPWPPPEGAFLGYRLSRPEPMWAELLALAASAQGRVYRAEDPHGALRGLKEVRGLLAKDLAVVALREGLDLPPTDDPMLLAYLLDPSNTTPEGVARRYGGEWTEDAGERALLAERLHANLLGRLQGEERLLWLYEEVEKPLSRVLAHMEATGVKLDVAYLEALSLEVAAEMRRLEEEVFRLAGHSFYLNSRDQLERVLFDELGLPPIGKTEKTGKRSTSAAVLEALREVHPIVDKILQYRELAKLKGTYIDPLPALVHPKTGRLHTRFNQTATATGRLSSSDPNLQNIPVRTPLGQKIRRAFVAEEGWRLVALDYSQIELRVLAHLSGDENLIRVFQEGKDIHTQTASWMFGLSAEAIDPLMRRAAKTINFGVLYGMSAHRLSQELGIPYEEAAAFIQRYFQSYPKVKAWIEKTLEEGRTRGYVETLFGRRRYVPDLNARVKSVREAAERMAFNMPVQGTAADLMKLAMVRLFPQLREVGARMLLQVHDELLLEAPKERAEEVAALAKEVMEGVWPLAVPLEVEVGIGEDWLAAKG

SEQ ID NO: 1703 - DNA, 2529 bp, synthetic construct
  misc_feature 1..2529: note = Variant of DNA polymerase I from Thermus sp. strain 2.9
  source 1..2529: mol_type = other DNA
atgcaccatcatcatcatcatggcggtagcggcatgttaccgttgttcgaacctaaaggtcgcgtgcttctggttgatggccatcatctcgcgtatcgtaacttctttgccctgaaaggattaaccaccagccgtggcgagccggtacagggtgtctacggctttgcaaagtcgctcctgaaagctctgaaagaagacggtgatgtggtgattgttgtctttgatgcgaaagcgccaagttttcgccacgaagcgtacgaagcttacaaagccgggcgtgctccaacgccggaagactttcctcgccaattggcgcttatgaaggaattagtggatttgcttggcctcgaacgcttggaagttcccggtttcgaggcagacgacgtattagcgactctcgcaaagaaagccgaacgtgagggctatgaagtccagatcttgacagcagataaggatcttttccagcttttatctccgcgcatctcggtgttacacccggaagggcatcgtatcaccccggaatggctctgggagaaatatggtttgcgtcccgaacaatgggtggattttcgcgccttagcaggcgatccgagcgacaatattccgggagttaaaggtatcggcgagaagacggcgctcaagctccttaaagaatgggggtcgttggagaacttgcttaagaatttagatcaggtcaaaccagagtcagtgcgtgagaagattcttgcacacctcgaagacctcaaattaagccgcgaattgtcccgtgtacgcaccgatttgccgctcgaagttgatttccgtggccgccgcgaacctgactgggagggtcttaaagcgtttttagagcgtcttgaatttggttcgctcttgcatgaattcggccttttagaaagcccgttaccagccgaagaagcaccttggccaccgcccgaaggcgcgtttttaggttaccgtttgagtcgcccggaaccgatgtgggccgaattattggctcttgcagcgtctgcccagggacgtgtgtatcgcgcggaagaccctcatggtgcgctccgcggcctcaaagaagtccgtggactccttgccaaagacttagctgttgttgcattgcgcgaaggtcttgatttacctccgactgatgatccaatgcttcttgcgtacctcttggacccgtcaaacacgacgcccgaaggcgtagcccgtcgttacggcggcgagtggaccgaagatgcaggcgagcgcgcgttattggccgaacgtttgcacgccaatttattaggacgtttgcaaggcgaggaacgtctcctctggctttacgaagaagtggagaaaccattgagtcgcgtgctcgcgcatatggaagctaccggtgtcaaattagacgtggcgtatttggaggcactcagccttgaagttgctgccgaaatgcgccgcttggaggaagaagtattccgtttagcaggccactccttttatcttaattctcgcgatcagttagaacgtgtgttgttcgatgaacttggtctccctcctatcggcaagacagagaagaccggtaaacgtagcacttcagcggcggttttagaagctcttcgcgaagtccatcccattgtggacaagatcttgcagtaccgcgaactcgcgaaattgaaaggcacctatattgaccctcttccggcattagtccacccgaaaacgggacgcctccatacccgcttcaaccaaacagccacggcgaccggtcgtttgtcctcctctgatccaaaccttcagaatattccagtacgtaccccattgggccagaagatccgccgcgcgtttgtagctgaggagggttggcgtttagtggccctcgattatagccaaattgaattacgtgtccttgcccatctttctggcgatgagaacctcatccgcgtgtttcaggaaggcaaagacattcacactcaaacggcaagctggatgtttggattatcagctgaagcgatcgatcctttgatgcgtcgtgcagcgaagaccatcaatttcggtgttctctacggtatgagtgcccatcgtttgtcgcaggaattaggcattccctatgaagaagctgcggcgttcattcagcgctactttcaaagctatcccaaagttaaagcatggatcgagaagactctcgaagaaggccgcacacgtggttacgtagagaccttatttggacgtcgccgctatgttcccgatttaaacgctcgcgtgaaatctgtccgtgaagccgccgaacgcatggcgttcaacatgcctgtacagggcacggcagctgacctcatgaaacttgcaatggtgcgcctttttccacaattgcgtgaagttggtgcccgcatgctcttgcaggtccacgatgaactcttgttagaagcgccaaaagagcgtgcggaagaggtggcagccctcgcgaaagaggttatggaaggcgtgtggcccttagcggtgcctcttgaagtcgaagttggtattggcgaggattggttggctgccaaaggataatga

SEQ ID NO: 1704 - protein, 841 aa, synthetic construct
  REGION 1..841: note = Variant of DNA polymerase I from Thermus sp. strain 2.9
MHHHHHHGGSGMLPLFEPKGRVLLVDGHHLAYRNFFALKGLTTSRGEPVQGVYGFAKSLLKALKEDGDVVIVVFDAKAPSFRHEAYEAYKAGRAPTPEDFPRQLALMKELVDLLGLERLEVPGFEADDVLATLAKKAEREGYEVQILTADKDLFQLLSPRISVLHPEGHRITPEWLWEKYGLRPEQWVDFRALAGDPSDNIPGVKGIGEKTALKLLKEWGSLENLLKNLDQVKPESVREKILAHLEDLKLSRELSRVRTDLPLEVDFRGRREPDWEGLKAFLERLEFGSLLHEFGLLESPLPAEEAPWPPPEGAFLGYRLSRPEPMWAELLALAASAQGRVYRAEDPHGALRGLKEVRGLLAKDLAVVALREGLDLPPTDDPMLLAYLLDPSNTTPEGVARRYGGEWTEDAGERALLAERLHANLLGRLQGEERLLWLYEEVEKPLSRVLAHMEATGVKLDVAYLEALSLEVAAEMRRLEEEVFRLAGHSFYLNSRDQLERVLFDELGLPPIGKTEKTGKRSTSAAVLEALREVHPIVDKILQYRELAKLKGTYIDPLPALVHPKTGRLHTRFNQTATATGRLSSSDPNLQNIPVRTPLGQKIRRAFVAEEGWRLVALDYSQIELRVLAHLSGDENLIRVFQEGKDIHTQTASWMFGLSAEAIDPLMRRAAKTINFGVLYGMSAHRLSQELGIPYEEAAAFIQRYFQSYPKVKAWIEKTLEEGRTRGYVETLFGRRRYVPDLNARVKSVREAAERMAFNMPVQGTAADLMKLAMVRLFPQLREVGARMLLQVHDELLLEAPKERAEEVAALAKEVMEGVWPLAVPLEVEVGIGEDWLAAKG

SEQ ID NO: 1705 - DNA, 2529 bp, synthetic construct
  misc_feature 1..2529: note = Variant of DNA polymerase I from Thermus sp. strain 2.9
  source 1..2529: mol_type = other DNA
atgcaccatcatgggcatcatggcggtagcggcatgttaccgttgttcgaacctaaaggtcgcgtgcttctggttgatggccatcatctcgcgtatcgtaacttctttgccctgaaaggattaaccaccagccgtggcgagccggtacagggtgtctacggctttgcaaagtcgctcctgaaagctctgaaagaagacggtgatgtggtgattgttgtctttgatgcgaaagcgccaagttttcgccacgaagcgtacgaagcttacaaagccgggcgtgctccaacgccggaagactttcctcgccaattggcgcttatgaaggaattagtggatttgcttggcctcgaacgcttggaagttcccggtttcgaggcagacgacgtattagcgactctcgcaaagaaagccgaacgtgagggctatgaagtccagatcttgacagcagatcgcgatcttttccagcttttatctccgcgcatctcggtgttacacccggaagggcatcgtatcaccccggaatggctctgggagaaatatggtttgcgtcccgaacaatgggtggattttcgcgccttagcaggcgatccgagcgacaatattccgggagttaaaggtatcggcgagaagacggcgctcaagctccttaaagaatgggggtcgttggagaacttgcttaagaatttagatcaggtcaaaccagagtcagtgcgtgagaagattcttgcacacctcgaagacctcaaattaagccgcgaattgtcccgtgtacgcaccgatttgccgctcgaagttgatttccgtggccgccgcgaacctgactgggagggtcttaaagcgtttttagagcgtcttgaatttggttcgctcttgcatgaattcggccttttagaaagcccgttaccagccgaagaagcaccttggccaccgcccgaaggcgcgtttttaggttaccgtttgagtcgcccggaaccgatgtgggccgaattattggctcttgcagcgtctgcccagggacgtgtgtatcgcgcggaagaccctcatggtgcgctccgcggcctcaaagaagtccgtggactccttgccaaagacttagctgttgttgcattgcgcgaaggtcttgatttacctccgactgatgatccaatgcttcttgcgtacctcttggacccgtcaaacacgacgcccgaaggcgtagcccgtcgttacggcggcgagtggaccgaagatgcaggcgagcgcgcgttattggccgaacgtttgcacgccaatttattaggacgtttgcaaggcgaggaacgtctcctctggctttacgaagaagtggagaaaccattgagtcgcgtgctcgcgcatatggaagctaccggtgtcaaattagacgtggcgtatttggaggcactcagccttgaagttgctgccgaaatgcgccgcttggaggaagaagtattccgtttagcaggccactccttttatcttaattctcgcgatcagttagaacgtgtgttgttcgatgaacttggtctccctcctatcggcaagacagagaagaccggtaaacgtagcacttcagcggcggttttagaagctcttcgcgaagtccatcccattgtggacaagatcttgcagtaccgcgaactcgcgaaattgaaaggcacctatattgaccctcttccggcattagtccacccgaaaacgggacgcctccatacccgcttcaaccaaacagccacggcgaccggtcgtttgtcctcctctgatccaaaccttcagaatattccagtacgtaccccattgggccagaagatccgccgcgcgtttgtagctgaggagggttggcgtttagtggccctcgattatagccaaattgaattacgtgtccttgcccatctttctggcgatgagaacctcatccgcgtgtttcaggaaggcaaagacattcacactcaaacggcaagctggatgtttggattatcagctgaagcgatcgatcctttgatgcgtcgtgcagcgaagaccatcaatttcggtgttctctacggtatgagtgcccatcgtttgtcgcaggaattaggcattccctatgaagaagctgcggcgttcattcagcgctactttcaaagctatcccaaagttaaagcatggatcgagaagactctcgaagaaggccgcacacgtggttacgtagagaccttatttggacgtcgccgctatgttcccgatttaaacgctcgcgtgaaatctgtccgtgaagccgccgaacgcatggcgttcaacatgcctgtacagggcacggcagctgacctcatgaaacttgcaatggtgcgcctttttccacaattgcgtgaagttggtgcccgcatgctcttgcaggtccacgatgaactcttgttagaagcgccaaaagagcgtgcggaagaggtggcagccctcgcgaaagaggttatggaaggcgtgtggcccttagcggtgcctcttgaagtcgaagttggtattggcgaggattggttggctgccaaaggataatga

SEQ ID NO: 1706 - protein, 841 aa, synthetic construct
  REGION 1..841: note = Variant of DNA polymerase I from Thermus sp. strain 2.9
MHHHGHHGGSGMLPLFEPKGRVLLVDGHHLAYRNFFALKGLTTSRGEPVQGVYGFAKSLLKALKEDGDVVIVVFDAKAPSFRHEAYEAYKAGRAPTPEDFPRQLALMKELVDLLGLERLEVPGFEADDVLATLAKKAEREGYEVQILTADRDLFQLLSPRISVLHPEGHRITPEWLWEKYGLRPEQWVDFRALAGDPSDNIPGVKGIGEKTALKLLKEWGSLENLLKNLDQVKPESVREKILAHLEDLKLSRELSRVRTDLPLEVDFRGRREPDWEGLKAFLERLEFGSLLHEFGLLESPLPAEEAPWPPPEGAFLGYRLSRPEPMWAELLALAASAQGRVYRAEDPHGALRGLKEVRGLLAKDLAVVALREGLDLPPTDDPMLLAYLLDPSNTTPEGVARRYGGEWTEDAGERALLAERLHANLLGRLQGEERLLWLYEEVEKPLSRVLAHMEATGVKLDVAYLEALSLEVAAEMRRLEEEVFRLAGHSFYLNSRDQLERVLFDELGLPPIGKTEKTGKRSTSAAVLEALREVHPIVDKILQYRELAKLKGTYIDPLPALVHPKTGRLHTRFNQTATATGRLSSSDPNLQNIPVRTPLGQKIRRAFVAEEGWRLVALDYSQIELRVLAHLSGDENLIRVFQEGKDIHTQTASWMFGLSAEAIDPLMRRAAKTINFGVLYGMSAHRLSQELGIPYEEAAAFIQRYFQSYPKVKAWIEKTLEEGRTRGYVETLFGRRRYVPDLNARVKSVREAAERMAFNMPVQGTAADLMKLAMVRLFPQLREVGARMLLQVHDELLLEAPKERAEEVAALAKEVMEGVWPLAVPLEVEVGIGEDWLAAKG

SEQ ID NO: 1707 - DNA, 2529 bp, synthetic construct
  misc_feature 1..2529: note = Variant of DNA polymerase I from Thermus sp. strain 2.9
  source 1..2529: mol_type = other DNA
atgcaccatcatcatcatcatggcggtagcggcatgttaccgttgttcgaacctaaaggtcgcgtgcttctggttgatggccatcatctcgcgtatcgtaacttctttgccctgaaaggattaaccaccagccgtggcgagccggtacagggtgtctacggctttgcaaagtcgctcctgaaagctctgaaagaagacggtgatgtggtgattgttgtctttgatgcgaaagcgccaagttttcgccacgaagcgtacgaagcttacaaagccgggcgtgctccaacgccggaagactttcctcgccaattggcgcttatgaaggaattagtggatttgcttggcctcgaacgcttggaagttcccggtttcgaggcagacgacgtattagcgactctcgcaaagaaagccgaacgtgagggctatgaagtccagatcttgacagcagatcgcgatcttttccagcttttatctccgcgcatctcggtgttacacccggaagggcatcgtatcaccccggaatggctctgggagaaatatggtttgcgtcccgaacaatgggtggattttcgcgccttagcaggcgatccgagcgacaatattccgggagttaaaggtatcggcgagaagacggcgctcaagctccttaaagaatgggggtcgttggagaacttgcttaagaatttagatcaggtcaaaccagagtcagtgcgtgagaagattcttgcacacctcgaagacctcaaattaagccgcgaattgtcccgtgtacgcaccgatttgccgctcgaagttgatttccgtggccgccgcgaacctgactgggagggtcttaaagcgtttttagagcgtcttgaatttggttcgctcttgcatgaattcggccttttagaaagcccgttaccagccgaagaagcaccttggccaccgcccgaaggcgcgtttttaggttaccgtttgagtcgcccggaaccgatgtgggccgaattattggctcttgcagcgtctgcccagggacgtgtgtatcgcgcggaagaccctcatggtgcgctccgcggcctcaaagaagtccgtggactccttgccaaagacttagctgttgttgcattgcgcgaaggtcttgatttacctccgactgatgatccaatgcttcttgcgtacctcttggacccgtcaaacacgacgcccgaaggcgtagcccgtcgttacggcggcgagtggaccgaagatgcaggcgagcgcgcgttattggccgaacgtttgcacgccaatttattaggacgtttgcaaggcgaggaacgtctcctctggctttacaatgaagtggagaaaccattgagtcgcgtgctcgcgcatatggaagctaccggtgtcaaattagacgtggcgtatttggaggcactcagccttgaagttgctgccgaaatgcgccgcttggaggaagaagtattccgtttagcaggccactccttttatcttaattctcgcgatcagttagaacgtgtgttgttcgatgaacttggtctccctcctatcggcaagacagagaagaccggtaaacgtagcacttcagcggcggttttagaagctcttcgcgaagtccatcccattgtggacaagatcttgcagtaccgcgaactcgcgaaattgaaaggcacctatattgaccctcttccggcattagtccacccgaaaacgggacgcctccatacccgcttcaaccaaacagccacggcgaccggtcgtttgtcctcctctgatccaaaccttcagaatattccagtacgtaccccattgggccagaagatccgccgcgcgtttgtagctgaggagggttggcgtttagtggccctcgattatagccaaattgaattacgtgtccttgcccatctttctggcgatgagaacctcatccgcgtgtttcaggaaggcaaagacattcacactcaaacggcaagctggatgtttggattatcagctgaagcgatcgatcctttgatgcgtcgtgcagcgaagaccatcaatttcggtgttctctacggtatgagtgcccatcgtttgtcgcaggaattaggcattccctatgaagaagctgcggcgttcattcagcgctactttcaaagctatcccaaagttaaagcatggatcgagaagactctcgaagaaggccgcacacgtggttacgtagagaccttatttggacgtcgccgctatgttcccgatttaaacgctcgcgtgaaatctgtccgtgaagccgccgaacgcatggcgttcaacatgcctgtacagggcacggcagctgacctcatgaaacttgcaatggtgcgcctttttccacaattgcgtgaagttggtgcccgcatgctcttgcaggtccacgatgaactcttgttagaagcgccaaaagagcgtgcggaagaggtggcagccctcgcgaaagaggttatggaaggcgtgtggcccttagcggtgcctcttgaagtcgaagttggtattggcgaggattggttggctgccaaaggataatga

SEQ ID NO: 1708 - protein, 841 aa, synthetic construct
  REGION 1..841: note = Variant of DNA polymerase I from Thermus sp. strain 2.9
MHHHHHHGGSGMLPLFEPKGRVLLVDGHHLAYRNFFALKGLTTSRGEPVQGVYGFAKSLLKALKEDGDVVIVVFDAKAPSFRHEAYEAYKAGRAPTPEDFPRQLALMKELVDLLGLERLEVPGFEADDVLATLAKKAEREGYEVQILTADRDLFQLLSPRISVLHPEGHRITPEWLWEKYGLRPEQWVDFRALAGDPSDNIPGVKGIGEKTALKLLKEWGSLENLLKNLDQVKPESVREKILAHLEDLKLSRELSRVRTDLPLEVDFRGRREPDWEGLKAFLERLEFGSLLHEFGLLESPLPAEEAPWPPPEGAFLGYRLSRPEPMWAELLALAASAQGRVYRAEDPHGALRGLKEVRGLLAKDLAVVALREGLDLPPTDDPMLLAYLLDPSNTTPEGVARRYGGEWTEDAGERALLAERLHANLLGRLQGEERLLWLYNEVEKPLSRVLAHMEATGVKLDVAYLEALSLEVAAEMRRLEEEVFRLAGHSFYLNSRDQLERVLFDELGLPPIGKTEKTGKRSTSAAVLEALREVHPIVDKILQYRELAKLKGTYIDPLPALVHPKTGRLHTRFNQTATATGRLSSSDPNLQNIPVRTPLGQKIRRAFVAEEGWRLVALDYSQIELRVLAHLSGDENLIRVFQEGKDIHTQTASWMFGLSAEAIDPLMRRAAKTINFGVLYGMSAHRLSQELGIPYEEAAAFIQRYFQSYPKVKAWIEKTLEEGRTRGYVETLFGRRRYVPDLNARVKSVREAAERMAFNMPVQGTAADLMKLAMVRLFPQLREVGARMLLQVHDELLLEAPKERAEEVAALAKEVMEGVWPLAVPLEVEVGIGEDWLAAKG

SEQ ID NO: 1709 - DNA, 2529 bp, synthetic construct
  misc_feature 1..2529: note = Variant of DNA polymerase I from Thermus sp. strain 2.9
  source 1..2529: mol_type = other DNA
atgcaccatcatcatcatcatggcggtagcggcatgttaccgttgttcgaacctaaaggtcgcgtgcttctggttgatggccatcatctcgcgtatcgtaacttctttgccctgaaaggattaaccaccagccgtggcgagccggtacagggtgtctacggctttgcaaagtcgctcctgaaagctctgaaagaagacggtgatgtggtgattgttgtctttgatgcgaaagcgccaagttttcgccacgaagcgtacgaagcttacaaagccgggcgtgctccaacgccggaagactttcctcgccaattggcgcttatgaaggaattagtggatttgcttggcctcgaacgcttggaagttcccggtttcgaggcagacgacgtattagcgactctcgcaaagaaagccgaacgtgagggctatgaagtccagatcttgacagcagatcgcgatcttttccagcttttatctccgcgcatctcggtgttacacccggaagggcatcgtatcaccccggaatggctctgggagaaatatggtttgcgtcccgaacaatgggtggattttcgcgccttagtgggcgatccgagcgacaatattccgggagttaaaggtatcggcgagaagacggcgctcaagctccttaaagaatgggggtcgttggagaacttgcttaagaatttagatcaggtcaaaccagagtcagtgcgtgagaagattcttgcacacctcgaagacctcaaattaagccgtgaattgtcccgtgtacgcaccgatttgccgctcgaagttgatttccgtggccgccgcgaacctgactgggagggtcttaaagcgtttttagagcgtcttgaatttggttcgctcttgcatgaattcggccttttagaaagcccgttaccagccgaagaagcaccttggccaccgcccgaaggcgcgtttttaggttaccgtttgagtcgcccggaaccgatgtgggccgaattattggctcttgcagcgtctgcccagggacgtgtgtatcgcgcggaagaccctcatggtgcgctccgcggcctcaaagaagtcaatggactccttgccaaagacttagctgttgttgcattgcgcgaaggtcttgatttacctccgactgatgatccaatgcttcttgcgtacctcttggacccgtcaaacacgacgcccgaaggcgtagcccgtcgttacggcggcgagtggaccgaagatgcaggtgagcgcgcgttattggccgaacgtttgcacgccaatttattaggacgtttgcaaggcgaggaacgtctcctctggctttacgaagaagtggagaaaccattgagtcgcgtgctcgcgcatatggaagctaccggtgtcaaattagacgtggcgtatttggaggcactcagccttgaagttgctgccgaaatgcgccgcttggaggaagaagtattccgtttagcaggccactccttttatcttaattctcgcgatcagttagaacgtgtgttgttcgatgaacttggtctccctcctatcggcaagacagagaagaccggtaaacgtagcacttcagcggcggttttagaagctcttcgcgaagtccatcccattgtggacaagatcttgcagtaccgcgaactcgcgaaattgaaaggcacctatattgaccctcttccggcattagtccacccgaaaacgggacgcctccatacccgcttcaaccaaacagccacggcgaccggtcgtttgtcctcctctgatccaaaccttcagaatattccagtacgtaccccattgggccagaagatccgccgcgcgtttgtagctgaggagggttggcgtttagtggccctcgattatagccaaattgaattacgtgtccttgcccatctttctggcgatgagaacctcatccgcgtgtttcaggaaggcaaagacattcacactcaaacggcaagctggatgtttggagtgtcagctgaagcgatcgatcctttgatgcgtcgtgcagcgaagaccatcaatttcggtgttctctacggtatgagtgcccatcgtttgtcgcaggaattaggcattccctatgaagaagctgcggcgttcattcagcgctactttcaaagctatcccaaagttaaagcatggatcgagaagactctcgaagaaggccgcacacgtggttacgtagagaccttatttggacgtcgccgctatgttcccgatttaaacgctcgcgtgaaatctgtccgtgaagccgccgaacgcatggcgttcaacatgcctgtacagggcacggcagctgacctcatgaaacttgcaatggtgcgcctttttccacaattgcgtgaagttggtgcccgcatgctcttgcaggtccacgatgaactcttgttagaagcgccaaaagagcgtgcggaagaggtggcagccctcgcgaaagaggttatggaaggcgtgtggcccttagcggtgcctcttgaagtcgaagttggtattggcgaggattggttggctgccaaaggataatga

SEQ ID NO: 1710 - protein, 841 aa, synthetic construct
  REGION 1..841: note = Variant of DNA polymerase I from Thermus sp. strain 2.9
MHHHHHHGGSGMLPLFEPKGRVLLVDGHHLAYRNFFALKGLTTSRGEPVQGVYGFAKSLLKALKEDGDVVIVVFDAKAPSFRHEAYEAYKAGRAPTPEDFPRQLALMKELVDLLGLERLEVPGFEADDVLATLAKKAEREGYEVQILTADRDLFQLLSPRISVLHPEGHRITPEWLWEKYGLRPEQWVDFRALVGDPSDNIPGVKGIGEKTALKLLKEWGSLENLLKNLDQVKPESVREKILAHLEDLKLSRELSRVRTDLPLEVDFRGRREPDWEGLKAFLERLEFGSLLHEFGLLESPLPAEEAPWPPPEGAFLGYRLSRPEPMWAELLALAASAQGRVYRAEDPHGALRGLKEVNGLLAKDLAVVALREGLDLPPTDDPMLLAYLLDPSNTTPEGVARRYGGEWTEDAGERALLAERLHANLLGRLQGEERLLWLYEEVEKPLSRVLAHMEATGVKLDVAYLEALSLEVAAEMRRLEEEVFRLAGHSFYLNSRDQLERVLFDELGLPPIGKTEKTGKRSTSAAVLEALREVHPIVDKILQYRELAKLKGTYIDPLPALVHPKTGRLHTRFNQTATATGRLSSSDPNLQNIPVRTPLGQKIRRAFVAEEGWRLVALDYSQIELRVLAHLSGDENLIRVFQEGKDIHTQTASWMFGVSAEAIDPLMRRAAKTINFGVLYGMSAHRLSQELGIPYEEAAAFIQRYFQSYPKVKAWIEKTLEEGRTRGYVETLFGRRRYVPDLNARVKSVREAAERMAFNMPVQGTAADLMKLAMVRLFPQLREVGARMLLQVHDELLLEAPKERAEEVAALAKEVMEGVWPLAVPLEVEVGIGEDWLAAKG

SEQ ID NO: 1711 - DNA, 2529 bp, synthetic construct
  misc_feature 1..2529: note = Variant of DNA polymerase I from Thermus sp. strain 2.9
  source 1..2529: mol_type = other DNA
atgcaccatcatcatcatcatggcggtagcggcatgttaccgttgttcgaacctaaaggtcgcgtgcttctggttgatggccatcatctcgcgtatcgtaacttctttgccctgaaaggattaaccaccagccgtggcgagccggtacagggtgtctacggctttgcaaagtcgctcctgaaagctctgaaagaagacggtgatgtggtgattgttgtctttgatgcgaaagcgccaagttttcgccacgaagcgtacgaagcttacaaagccgggcgtgctccaacgccggaagactttcctcgccaattggcgcttatgaaggaattagtggatttgcttggcctcgaacgcttggaagttcccggtttcgaggcagacgacgtattagcgactctcgcaaagaaagccgaacgtgagggctatgaagtccagatcttgacagcagatcgcgatcttttccagcttttatctccgcgcatctcggtgttacacccggaagggcatcgtatcaccccggaatggctctgggagaaatatggtttgcgtcccgaacaatgggtggattttcgcgccttagcaggcgatccgagcgacaatattccgggagttaaaggtatcggcgagaagacggcgctcaagctccttaaagaatgggggtcgttggagaacttgcttaagaatttagatcaggtcaaaccagagtcagtgcgtgagaagattcttgcacacctcgaagacctcaaattaagccgcgaattgtcccgtgtacgcaccgatttgccgctcgaagttgatttccgtggccgccgcgaacctgactgggagggtcttaaagcgtttttagagcgtcttgaatttggttcgctcttgcatgaattcggccttttagaaagcaatttaccagccgaagaagcaccttggccaccgcccgaaggcgcgtttttaggttaccgtttgagtcgcccggaaccgatgtgggccgaattattggctcttgcagcgtctgcccagggacgtgtgtatcgcgcggaagaccctcatggtgcgctccgcggcctcaaagaagtccgtggactccttgccaaagacttagctgttgttgcattgcgcgaaggtcttgatttacctccgactgatgatccaatgcttcttgcgtacctcttggacccgtcaaacacgacgcccgaaggcgtagcccgtcgttacggcggcgagtggaccgaagatgcaggcgagcgcgcgttattggccgaacgtttgcacgccaatttattaggacgtttgcaaggcgaggaacgtctcctctggctttacgaagaagtggagaaaccattgagtcgcgtgctcgcgcatatggaagctaccggtgtcaaattagacgtggcgtatttggaggcactcagccttgaagttgctgccgaaatgcgccgcttggaggaagaagtattccgtttagcaggccactccttttatcttaattctcgcgatcagttagaacgtgtgttgttcgatgaacttggtctccctcctatcggcaagacagagaagaccggtaaacgtagcacttcagcggcggttttagaagctcttcgcgaagtccatcccattgtggacaagatcttgcagtaccgcgaactcgcgaaattgaaaggcacctatattgaccctcttccggcattagtccacccgaaaacgggacgcctccatacccgcttcaaccaaacagccacggcgaccggtcgtttgtcctcctctgatccaaaccttcagaatattccagtacgtaccccattgggccagaagatccgccgcgcgtttgtagctgaggagggttggcgtttagtggccctcgattatagccaaattgaattacgtgtccttgcccatctttctggcgatgagaacctcatccgcgtgtttcaggaaggcaaagacattcacactcaaacggcaagctggatgtttggattatcagctgaagcgatcgatcctttgatgcgtcgtgcagcgaagaccatcaatttcggtgttctctacggtatgagtgcccatcgtttgtcgcaggaattaggcattccctatgaagaagctgcggcgttcattcagcgctactttcaaagctatcccaaagttaaagcatggatcgagaagactctcgaagaaggccgcacacgtggttacgtagagaccttatttggacgtcgccgctatgttcccgatttaaacgctcgcgtgaaatctgtccgtgaagccgccgaacgcatggcgttcaacatgcctgtacagggcacggcagctgacctcatgaaacttgcaatggtgcgcctttttccacaattgcgtgaagttggtgcccgcatgctcttgcaggtccacgatgaactcttgttagaagcgccaaaagagcgtgcggaagaggtggcagccctcgcgaaagaggttatggaaggcgtgtggcccttagcggtgcctcttgaagtcgaagttggtattggcgaggattggttggctgccaaaggataatga

SEQ ID NO: 1712 - protein, 841 aa, synthetic construct
  REGION 1..841: note = Variant of DNA polymerase I from Thermus sp. strain 2.9
MHHHHHHGGSGMLPLFEPKGRVLLVDGHHLAYRNFFALKGLTTSRGEPVQGVYGFAKSLLKALKEDGDVVIVVFDAKAPSFRHEAYEAYKAGRAPTPEDFPRQLALMKELVDLLGLERLEVPGFEADDVLATLAKKAEREGYEVQILTADRDLFQLLSPRISVLHPEGHRITPEWLWEKYGLRPEQWVDFRALAGDPSDNIPGVKGIGEKTALKLLKEWGSLENLLKNLDQVKPESVREKILAHLEDLKLSRELSRVRTDLPLEVDFRGRREPDWEGLKAFLERLEFGSLLHEFGLLESNLPAEEAPWPPPEGAFLGYRLSRPEPMWAELLALAASAQGRVYRAEDPHGALRGLKEVRGLLAKDLAVVALREGLDLPPTDDPMLLAYLLDPSNTTPEGVARRYGGEWTEDAGERALLAERLHANLLGRLQGEERLLWLYEEVEKPLSRVLAHMEATGVKLDVAYLEALSLEVAAEMRRLEEEVFRLAGHSFYLNSRDQLERVLFDELGLPPIGKTEKTGKRSTSAAVLEALREVHPIVDKILQYRELAKLKGTYIDPLPALVHPKTGRLHTRFNQTATATGRLSSSDPNLQNIPVRTPLGQKIRRAFVAEEGWRLVALDYSQIELRVLAHLSGDENLIRVFQEGKDIHTQTASWMFGLSAEAIDPLMRRAAKTINFGVLYGMSAHRLSQELGIPYEEAAAFIQRYFQSYPKVKAWIEKTLEEGRTRGYVETLFGRRRYVPDLNARVKSVREAAERMAFNMPVQGTAADLMKLAMVRLFPQLREVGARMLLQVHDELLLEAPKERAEEVAALAKEVMEGVWPLAVPLEVEVGIGEDWLAAKG

SEQ ID NO: 1713 - DNA, 2529 bp, synthetic construct
  misc_feature 1..2529: note = Variant of DNA polymerase I from Thermus sp. strain 2.9
  source 1..2529: mol_type = other DNA
atgcaccatcatcatcatcatggcggtagcggcatgttaccgttgttcgaacctaaaggtcgcgtgcttctggttgatggccatcatctcgcgtatcgtaacttctttgccctgaaaggattaaccaccagccgtggcgagccggtacagggtgtctacggctttgcaaagtcgctcctgaaagctctgaaagaagacggtgatgtggtgattgttgtctttgatgcgaaagcgccaagttttcgccacgaagcgtacgaagcttacaaagccgggcgtgctccaacgccggaagactttcctcgccaattggcgcttatgaaggaattagtggatttgcttggcctcgaacgcttggaagttcccggtttcgaggcagacgacgtattagcgactctcgcaaagaaagccgaacgtgagggctatgaagtccagatcttgacagcagatcgcgatcttttccagcttttatctccgcgcatctcggtgttacacccggaagggcatcgtatcaccccggaatggctctgggagaaatatggtttgcgtcccgaacaatgggtggattttcgcgccttagtgggcgatccgagcgacaatattccgggagttaaaggtatcggcgagaagacggcgctcaagctccttaaagaatgggggtcgttggagaacttgcttaagaatttagatcaggtcaaaccagagtcagtgcgtgagaagattcttgcacacctcgaagacctcaaattaagcctggaattgtcccgtgtacgcaccgatttgccgctcgaagttgatttccgtggccgccgcgaacctgactgggagggtcttaaagcgtttttagagcgtcttgaatttggttcgctcttgcatgaattcggccttttagaaagcccgttaccagccgaagaagcaccttggccaccgcccgaaggcgcgtttttaggttaccgtttgagtcgcccggaaccgatgtgggccgaattattggctcttgcagcgtctgcccagggacgtgtgtatcgcgcggaagaccctcatggtgcgctccgcggcctcaaagaagtcaatggactccttgccaaagacttagctgttgttgcattgcgcgaaggtcttgatttacctccgactgatgatccaatgcttcttgcgtacctcttggacccgtcaaacacgacgcccgaaggcgtagcccgtcgttacggcggcgagtggaccgaagatgcagctgagcgcgcgttattggccgaacgtttgcacgccaatttattaggacgtttgcaaggcgaggaacgtctcctctggctttacgaagaagtggagaaaccattgagtcgcgtgctcgcgcatatggaagctaccggtgtcaaattagacgtggcgtatttggagaatctcagccttgaagttgctgccgaaatgcgccgcttggaggaagaagtattccgtttagcaggccactccttttatcttaattctcgcgatcagttagaacgtgtgttgttcgatgagcttggtctccctcctatcggcaagacagagaagaccggtaaacgtagcacttcagcggcggttttagaagctcttcgcgaagtccatcccattgtggacaagatcttgcagtaccgcgaactcgcgaaattgaaaggcacctatattgaccctcttccggcattagtccacccgaaaacgggacgcctccatacccgcttcaaccaaacagccacggcgaccggtcgtttgtcctcctctgatccaaaccttcagaatattccagtacgtaccccattgggccagaagatccgccgcgcgtttgtagctgaggagggttggcgtttagtggccctcgattatagccaaattgaattacgtgtccttgcccatctttctggcgatgagaacctcatccgcgtgtttcaggaaggcaaagacattcacactcaaacggcaagctggatgtttggattatcagctgaagcgatcgatcctttgatgcgtcgtgcagcgaagaccatcaatttcggtgttctctacggtatgagtgcccatcgtttgtcgcaggaattaggcattccctatgaggaagctgcggcgttcattcagcgctactttcaaagctatcccaaagttaaagcatggatcgagaagactctcgaagaaggccgcacacgtggttacgtagagaccttatttggacgtcgccgctatgttcccgatttaaacgctcgcgtgaaatctgtccgtgaagccgccgaacgcatggcgttcaacatgcctgtacagggcacggcagctgacctcatgaaacttgcaatggtgcgcctttttccacaattgcgtgaagttggtgcccgcatgctcttgcaggtccacgatgaactcttgttagaagcgccaaaagagcgtgcggaagaggtggcagccctcgcgaaagaggttatggaaggcgtgtggcccttagcggtgcctcttgaagtcgaagttggtattggcgaggattggttggctgccaaaggataatga

SEQ ID NO: 1714 - protein, 841 aa, synthetic construct
  REGION 1..841: note = Variant of DNA polymerase I from Thermus sp. strain 2.9
MHHHHHHGGSGMLPLFEPKGRVLLVDGHHLAYRNFFALKGLTTSRGEPVQGVYGFAKSLLKALKEDGDVVIVVFDAKAPSFRHEAYEAYKAGRAPTPEDFPRQLALMKELVDLLGLERLEVPGFEADDVLATLAKKAEREGYEVQILTADRDLFQLLSPRISVLHPEGHRITPEWLWEKYGLRPEQWVDFRALVGDPSDNIPGVKGIGEKTALKLLKEWGSLENLLKNLDQVKPESVREKILAHLEDLKLSLELSRVRTDLPLEVDFRGRREPDWEGLKAFLERLEFGSLLHEFGLLESPLPAEEAPWPPPEGAFLGYRLSRPEPMWAELLALAASAQGRVYRAEDPHGALRGLKEVNGLLAKDLAVVALREGLDLPPTDDPMLLAYLLDPSNTTPEGVARRYGGEWTEDAAERALLAERLHANLLGRLQGEERLLWLYEEVEKPLSRVLAHMEATGVKLDVAYLENLSLEVAAEMRRLEEEVFRLAGHSFYLNSRDQLERVLFDELGLPPIGKTEKTGKRSTSAAVLEALREVHPIVDKILQYRELAKLKGTYIDPLPALVHPKTGRLHTRFNQTATATGRLSSSDPNLQNIPVRTPLGQKIRRAFVAEEGWRLVALDYSQIELRVLAHLSGDENLIRVFQEGKDIHTQTASWMFGLSAEAIDPLMRRAAKTINFGVLYGMSAHRLSQELGIPYEEAAAFIQRYFQSYPKVKAWIEKTLEEGRTRGYVETLFGRRRYVPDLNARVKSVREAAERMAFNMPVQGTAADLMKLAMVRLFPQLREVGARMLLQVHDELLLEAPKERAEEVAALAKEVMEGVWPLAVPLEVEVGIGEDWLAAKG

SEQ ID NO: 1715 - DNA, 2529 bp, synthetic construct
  misc_feature 1..2529: note = Variant of DNA polymerase I from Thermus sp. strain 2.9
  source 1..2529: mol_type = other DNA
atgcaccatcatcatcatcatggcggtagcggcatgttaccgttgttcgaacctaaaggtcgcgtgcttctggttgatggccatcatctcgcgtatcgtaacttctttgccctgaaaggattaaccaccagccgtggcgagccggtacagggtgtctacggctttgcaaagtcgctcctgaaagctctgaaagaagacggtgatgtggtgattgttgtctttgatgcgaaagcgccaagttttcgccacgaagcgtacgaagcttacaaagccgggcgtgctccaacgccggaagactttcctcgccaattggcgcttatgaaggaattagtggatttgcttggcctcgaacgcttggaagttcccggtttcgaggcagacgacgtattagcgactctcgcaaagaaagccgaacgtgagggctatgaagtccagatcttgacagcagatcgcgatcttttccagcttttatctccgcgcatctcggtgttacacccggaagggcatcgtatcaccccggaatggctctgggagaaatatggtttgcgtcccgaacaatgggtggattttcgcgccttagcaggcgatccgagcgacaatattccgggagttaaaggtatcggcgagaagacggcgctcaagctccttaaagaatgggggtcgttggagaacttgcttaagaatttagatcaggtcaaaccagagtcagtgcgtgagaagattcttgcacacctcgaagacctcaaattaagccgcgaattgtcccgtgtacgcaccgatttgccgctcgaagttgatttccgtggccgccgcgaacctgactgggagggtcttaaagcgtttttagagcgtcttgaatttggttcgctcttgcatgaattcggccttttagaaagcccgttaccagccgaagaagcaccttggccaccgcccgaaggcgcgtttttaggttaccgtttgagtcgcccggaaccgatgtgggccgaattattggctcttgcagcgtctgcccagggacgtgtgtatcgcgcggaagaccctcatggtgcgctccgcggcctcaaagaagtccgtggactccttgccaaagacttagctgttgttgcattgcgcgaaggtcttgatttacctccgactgatgatccaatgcttcttgcgtacctcttggacccgtcaaacacgacgcccgaaggcgtagcccgtcgttacggcggcgagtggaccgaagatgcaggcgagcgcgcgttattggccgaacgtttgcacgccaatttattaggacgtttgcaaggcgaggaacgtctcctctggctttacgaagaagtggagaaaccattgagtcgcgtgctcgcgcatatggaagctaccggtgtcaaattagacgtggcgtatttggaggcactcagccttgaagttgctgccgaaatgcgccgcttggaggaagaagtattccgtttagcaggccactccttttatcttaattctcgcgatcagttagaacgtgtgttgttcgatgaacttggtctccctcctatcggcaagacagagaagaccggtaaacgtagcacttcagcggcggttttagaagctcttcgcgaagtccatcccattgtggacaagatcttgcagtaccgcgaactcgcgaaattgaaaggcacctatattgaccctcttccggcattagtccacccgaaaacgggacgcctccatacccgcttcaaccaaacagccacggcgaccggtcgtttgtcctcctctgatccaaaccttcagaatattccagtacgtaccccattgggccagaagatccgccgcgcgtttgtagctgaggagggttggcgtttagtggccctcgattatagccaaattgaattacgtgtccttgcccatctttctggcgatgagaacctcatccgcgtgtttcaggaaggcaaagacattcacactcaaacggcaagctggatgtttggagcgtcagctgaagcgatcgatcctttgatgcgtcgtgcagcgaagaccatcaatttcggtgttctctacggtatgagtgcccatcgtttgtcgcaggaattaggcattccctatgaagaagctgcggcgttcattcagcgctactttcaaagctatcccaaagttaaagcatggatcgagaagactctcgaagaaggccgcacacgtggttacgtagagaccttatttggacgtcgccgctatgttcccgatttaaacgctcgcgtgaaatctgtccgtgaagccgccgaacgcatggcgttcaacatgcctgtacagggcacggcagctgacctcatgaaacttgcaatggtgcgcctttttccacaattgcgtgaagttggtgcccgcatgctcttgcaggtccacgatgaactcttgttagaagcgccaaaagagcgtgcggaagaggtggcagccctcgcgaaagaggttatggaaggcgtgtggcccttagcggtgcctcttgaagtcgaagttggtattggcgaggattggttggctgccaaaggataatga

SEQ ID NO: 1716 - protein, 841 aa, synthetic construct
  REGION 1..841: note = Variant of DNA polymerase I from Thermus sp. strain 2.9
MHHHHHHGGSGMLPLFEPKGRVLLVDGHHLAYRNFFALKGLTTSRGEPVQGVYGFAKSLLKALKEDGDVVIVVFDAKAPSFRHEAYEAYKAGRAPTPEDFPRQLALMKELVDLLGLERLEVPGFEADDVLATLAKKAEREGYEVQILTADRDLFQLLSPRISVLHPEGHRITPEWLWEKYGLRPEQWVDFRALAGDPSDNIPGVKGIGEKTALKLLKEWGSLENLLKNLDQVKPESVREKILAHLEDLKLSRELSRVRTDLPLEVDFRGRREPDWEGLKAFLERLEFGSLLHEFGLLESPLPAEEAPWPPPEGAFLGYRLSRPEPMWAELLALAASAQGRVYRAEDPHGALRGLKEVRGLLAKDLAVVALREGLDLPPTDDPMLLAYLLDPSNTTPEGVARRYGGEWTEDAGERALLAERLHANLLGRLQGEERLLWLYEEVEKPLSRVLAHMEATGVKLDVAYLEALSLEVAAEMRRLEEEVFRLAGHSFYLNSRDQLERVLFDELGLPPIGKTEKTGKRSTSAAVLEALREVHPIVDKILQYRELAKLKGTYIDPLPALVHPKTGRLHTRFNQTATATGRLSSSDPNLQNIPVRTPLGQKIRRAFVAEEGWRLVALDYSQIELRVLAHLSGDENLIRVFQEGKDIHTQTASWMFGASAEAIDPLMRRAAKTINFGVLYGMSAHRLSQELGIPYEEAAAFIQRYFQSYPKVKAWIEKTLEEGRTRGYVETLFGRRRYVPDLNARVKSVREAAERMAFNMPVQGTAADLMKLAMVRLFPQLREVGARMLLQVHDELLLEAPKERAEEVAALAKEVMEGVWPLAVPLEVEVGIGEDWLAAKG

SEQ ID NO: 1717 - DNA, 2529 bp, synthetic construct
  misc_feature 1..2529: note = Variant of DNA polymerase I from Thermus sp. strain 2.9
  source 1..2529: mol_type = other DNA
atgcaccatcatcatcatcatggcggtagcggcatgttaccgttgttcgaacctaaaggtcgcgtgcttctggttgatggccatcatctcgcgtatcgtaacttctttgccctgaaaggattaaccaccagccgtggcgagccggtacagggtgtctacggctttgcaaagtcgctcctgaaagctctgaaagaagacggtgatgtggtgattgttgtctttgatgcgaaagcgccaagttttcgccacgaagcgtacgaagcttacaaagccgggcgtgctccaacgccggaagactttcctcgccaattggcgcttatgaaggaattagtggatttgcttggcctcgaacgcttggaagttcccggtttcgaggcagacgacgtattagcgactctcgcaaagaaagccgaacgtgagggctatgaagtccagatcttgacagcagatcgcgatcttttccagcttttatctccgcgcatctcggtgttacacccggaagggcatcgtatcaccccggaatggctctgggagaaatatggtttgcgtcccgaacaatgggtggattttcgcgccttagtgggcgatccgagcgacaatattccgggagttaaaggtatcggcgagaagacggcgctcaagctccttaaagaatgggggtcgttggagaacttgcttaagaatttagatcaggtcaaaccagagtcagtgcgtgagaagattcttgcacacctcgaagacctcaaattaagccgcgaattgtcccgtgtacgcaccgatttgccgctcgaagttgatttccgtggccgccgcgaacctgactgggagggtcttaaagcgtttttagagcgtcttgaatttggttcgctcttgcatgaattcggccttttagaaagcccgttaccagccgaagaagcaccttggccaccgcccgaaggcgcgtttttaggttaccgtttgagtcgcccggaaccgatgtgggccgaattattggctcttgcagcgtctgcccagggacgtgtgtatcgcgcggaagaccctcatggtgcgctccgcggcctcaaagaagtccgtggactccttgccaaagacttagctgttgttgcattgcgcgaaggtcttgatttacctccgactgatgatccaatgcttcttgcgtacctcttggacccgtcaaacacgacgcccgaaggcgtagcccgtcgttacggcggcgagtggaccgaagatgcaggtgagcgcgcgttattggccgaacgtttgcacgccaatttattaggacgtttgcaaggcgaggaacgtctcctctggctttacgaagaagtggagaaaccattgagtcgcgtgctcgcgcatatggaagctaccggtgtcaaattagacgtggcgtatttggaggcgctcagccttgaagttgctgccgaaatgcgccgcttggaggaagaagtattccgtttagcaggccactccttttatcttaattctcgcgatcagttagaacgtgtgttgttcgatgaacttggtctccctcctatcggcaagacagagaagaccggtaaacgtagcacttcagcggcggttttagaagctcttcgcgaagtccatcccattgtggacaagatcttgcagtaccgcgaactcgcgaaattgaaaggcacctatattgaccctcttccggcattagtccacccgaaaacgggacgcctccatacccgcttcaaccaaacagccacggcgaccggtcgtttgtcctcctctgatccaaaccttcagaatattccagtacgtaccccattgggccagaagatccgccgcgcgtttgtagctgaggagggttggcgtttagtggccctcgattatagccaaattgaattacgtgtccttgcccatctttctggcgatgagaacctcatccgcgtgtttcaggaaggcaaagacattcacactcaaacggcaagctggatgtttggactgtcagctgaagcgatcgatcctttgatgcgtcgtgcagcgaagaccatcaatttcggtgttctctacggtatgagtgcccatcgtttgtcgcaggaattaggcattccctatgaggaagctgcggcgttcattcagcgctactttcaaagctatcccaaagttaaagcatggatcgagaagactctcgaagaaggccgcacacgtggttacgtagagaccttatttggacgtcgccgctatgttcccgatttaaccgctcgcgtgaaatctgtccgtgaagccgccgaacgcatggcgttcaacatgcctgtacagggcacggcagctgacctcatgaaacttgcaatggtgcgcctttttccacaattgcgtgaagttggtgcccgcatgctcttgcaggtccacgatgaactcttgttagaagcgccaaaagagcgtgcggaagaggtggcagccctcgcgaaagaggttatggaaggcgtgtggcccttagcggtgcctcttgaagtcgaagttggtattggcgaggattggttggctgccaaaggataatga

SEQ ID NO: 1718 - protein, 841 aa, synthetic construct
  REGION 1..841: note = Variant of DNA polymerase I from Thermus sp. strain 2.9
MHHHHHHGGSGMLPLFEPKGRVLLVDGHHLAYRNFFALKGLTTSRGEPVQGVYGFAKSLLKALKEDGDVVIVVFDAKAPSFRHEAYEAYKAGRAPTPEDFPRQLALMKELVDLLGLERLEVPGFEADDVLATLAKKAEREGYEVQILTADRDLFQLLSPRISVLHPEGHRITPEWLWEKYGLRPEQWVDFRALVGDPSDNIPGVKGIGEKTALKLLKEWGSLENLLKNLDQVKPESVREKILAHLEDLKLSRELSRVRTDLPLEVDFRGRREPDWEGLKAFLERLEFGSLLHEFGLLESPLPAEEAPWPPPEGAFLGYRLSRPEPMWAELLALAASAQGRVYRAEDPHGALRGLKEVRGLLAKDLAVVALREGLDLPPTDDPMLLAYLLDPSNTTPEGVARRYGGEWTEDAGERALLAERLHANLLGRLQGEERLLWLYEEVEKPLSRVLAHMEATGVKLDVAYLEALSLEVAAEMRRLEEEVFRLAGHSFYLNSRDQLERVLFDELGLPPIGKTEKTGKRSTSAAVLEALREVHPIVDKILQYRELAKLKGTYIDPLPALVHPKTGRLHTRFNQTATATGRLSSSDPNLQNIPVRTPLGQKIRRAFVAEEGWRLVALDYSQIELRVLAHLSGDENLIRVFQEGKDIHTQTASWMFGLSAEAIDPLMRRAAKTINFGVLYGMSAHRLSQELGIPYEEAAAFIQRYFQSYPKVKAWIEKTLEEGRTRGYVETLFGRRRYVPDLTARVKSVREAAERMAFNMPVQGTAADLMKLAMVRLFPQLREVGARMLLQVHDELLLEAPKERAEEVAALAKEVMEGVWPLAVPLEVEVGIGEDWLAAKG

SEQ ID NO: 1719 - DNA, 2529 bp, synthetic construct
  misc_feature 1..2529: note = Variant of DNA polymerase I from Thermus sp. strain 2.9
  source 1..2529: mol_type = other DNA
atgcaccatcatcatcatcatggcggtagcggcatgttaccgttgttcgaacctaaaggtcgcgtgcttctggttgatggccatcatctcgcgtatcgtaacttctttgccctgaaaggattaaccaccagccgtggcgagccggtacagggtgtctacggctttgcaaagtcgctcctgaaagctctgaaagaagacggtgatgtggtgattgttgtctttgatgcgaaagcgccaagttttcgccacgaagcgtacgaagcttacaaagccgggcgtgctccaacgccggaagactttcctcgccaattggcgcttatgaaggaattagtggatttgcttggcctcgaacgcttggaagttcccggtttcgaggcagacgacgtattagcgactctcgcaaagaaagccgaacgtgagggctatgaagtccagatcttgacagcagatcgcgatcttttccagcttttatctccgcgcatctcggtgttacacccggaagggcatcgtatcaccccggaatggctctgggagaaatatggtttgcgtcccgaacaatgggtggattttcgcgccttagcaggcgatccgagcgacaatattccgggagttaaaggtatcggcgagaagacggcgctcaagctccttaaagaatgggggtcgttggagaacttgcttaagaatttagatcaggtcaaaccagagtcagtgcgtgagaagattcttgcacacctcgaagacctcaaattaagccgcgaattgtcccgtgtacgcaccgatttgccgctcgaagttgatttccgtggccgccgcgaacctgactgggagggtcttaaagcgtttttagagcgtcttgaatttggttcgctcttgcatgaattcggccttttagaaagcccgttaccagccgaagaagcaccttggccaccgcccgaaggcgcgtttttaggttaccgtttgagtcgcccggaaccgatgtgggccgaattattggctcttgcagcgtctgcccagggacgtgtgtatcgcgcggaagaccctcatggtgcgctccgcggcctcaaagaagtccgtggactccttgccaaagacttagctgttgttgcattgcgcgaaggtcttgatttacctccgactgatgatccaatgcttcttgcgtacctcttggacccgtcaaacacgacgcccgaaggcgtagcccgtcgttacggcggcgagtggaccgaagatgcaggcgagcgcgcgttattggccgaacgtttgcacgccaatttattaggacgtttgcaaggcgaggaacgtctcctctggctttacgaagaagtggagaaaccattgagtcgcgtgctcgcgcatatggaagctaccggtgtcaaattagacgtggcgtatttggaggcactcagccttgaagttgctgccgaaatgcgccgcttggaggaagaagtattccgtttagcaggccactccttttatcttaattctcgcgatcagttagaacgtgtgttgttcgatgaacttggtctccctcctatcggcaagacagagaagaccggtaaacgtagcacttcagcggcggttttagaagctcttcgcgaagtccatcccattgtggacaagatcttgcagtaccgcgaactcgcgaaattgaaaggcacctatattgaccctcttccggcattagtccacccgaaaacgggacgcctccatacccgcttcaaccaaacagccacggcgaccggtcgtttgtcctcctctgatccaaaccttcagaatattccagtacgtaccccattgggccagaagatccgccgcgcgtttgtagctgaggagggttggcgtttagtggccctcgattatagccaaattgaattacgtgtccttgcccatctttctggcgatgagaacctcatccgcgtgtttcaggaaggcaaagacattcacactcaaacggcaagctggatgtttggattatcagctgaagcgatcgatcctggtatgcgtcgtgcagcgaagaccatcaatttcggtgttctctacggtatgagtgcccatcgtttgtcgcaggaattaggcattccctatgaagaagctgcggcgttcattcagcgctactttcaaagctatcccaaagttaaagcatggatcgagaagactctcgaagaaggccgcacacgtggttacgtagagaccttatttggacgtcgccgctatgttcccgatttaaacgctcgcgtgaaatctgtccgtgaagccgccgaacgcatggcgttcaacatgcctgtacagggcacggcagctgacctcatgaaacttgcaatggtgcgcctttttccacaattgcgtgaagttggtgcccgcatgctcttgcaggtccacgatgaactcttgttagaagcgccaaaagagcgtgcggaagaggtggcagccctcgcgaaagaggttatggaaggcgtgtggcccttagcggtgcctcttgaagtcgaagttggtattggcgaggattggttggctgccaaaggataatga

SEQ ID NO: 1720 - protein, 841 aa, synthetic construct
  REGION 1..841: note = Variant of DNA polymerase I from Thermus sp. strain 2.9
MHHHHHHGGSGMLPLFEPKGRVLLVDGHHLAYRNFFALKGLTTSRGEPVQGVYGFAKSLLKALKEDGDVVIVVFDAKAPSFRHEAYEAYKAGRAPTPEDFPRQLALMKELVDLLGLERLEVPGFEADDVLATLAKKAEREGYEVQILTADRDLFQLLSPRISVLHPEGHRITPEWLWEKYGLRPEQWVDFRALAGDPSDNIPGVKGIGEKTALKLLKEWGSLENLLKNLDQVKPESVREKILAHLEDLKLSRELSRVRTDLPLEVDFRGRREPDWEGLKAFLERLEFGSLLHEFGLLESPLPAEEAPWPPPEGAFLGYRLSRPEPMWAELLALAASAQGRVYRAEDPHGALRGLKEVRGLLAKDLAVVALREGLDLPPTDDPMLLAYLLDPSNTTPEGVARRYGGEWTEDAGERALLAERLHANLLGRLQGEERLLWLYEEVEKPLSRVLAHMEATGVKLDVAYLEALSLEVAAEMRRLEEEVFRLAGHSFYLNSRDQLERVLFDELGLPPIGKTEKTGKRSTSAAVLEALREVHPIVDKILQYRELAKLKGTYIDPLPALVHPKTGRLHTRFNQTATATGRLSSSDPNLQNIPVRTPLGQKIRRAFVAEEGWRLVALDYSQIELRVLAHLSGDENLIRVFQEGKDIHTQTASWMFGLSAEAIDPGMRRAAKTINFGVLYGMSAHRLSQELGIPYEEAAAFIQRYFQSYPKVKAWIEKTLEEGRTRGYVETLFGRRRYVPDLNARVKSVREAAERMAFNMPVQGTAADLMKLAMVRLFPQLREVGARMLLQVHDELLLEAPKERAEEVAALAKEVMEGVWPLAVPLEVEVGIGEDWLAAKG

SEQ ID NO: 1721 - DNA, 2529 bp, synthetic construct
  misc_feature 1..2529: note = Variant of DNA polymerase I from Thermus sp. strain 2.9
  source 1..2529: mol_type = other DNA
atgcaccatcatcatcatcatggcggtagcggcatgttaccgttgttcgaacctaaaggtcgcgtgcttctggttgatggccatcatctcgcgtatcgtaacttctttgccctgaaaggattaaccaccagccgtggcgagccggtacagggtgtctacggctttgcaaagtcgctcctgaaagctctgaaagaagacggtgatgtggtgattgttgtctttgatgcgaaagcgccaagttttcgccacgaagcgtacgaagcttacaaagccgggcgtgctccaacgccggaagactttcctcgccaattggcgcttatgaaggaattagtggatttgcttggcctcgaacgcttggaagttcccggtttcgaggcagacgacgtattagcgactctcgcaaagaaagccgaacgtgagggctatgaagtccagatcttgacagcagatcgcgatcttttccagcttttatctccgcgcatctcggtgttacacccggaagggcatcgtatcaccccggaatggctctgggagaaatatggtttgcgtcccgaacaatgggtggattttcgcgccttagtgggcgatccgagcgacaatattccgggagttaaaggtatcggcgagaagacggcgctcaagctccttaaagaatgggggtcgttggagaacttgcttaagaatttagatcaggtcaaaccagagtcagtgcgtgagaagattcttgcacacctcgaagacctcaaattaagcctggaattgtcccgtgtacgcaccgatttgccgctcgaagttgatttccgtggccgccgcgaacctgactgggagggtcttaaagcgtttttagagcgtcttgaatttggttcgctcttgcatgaattcggccttttagaaagcccgttaccagccgaagaagcaccttggccaccgcccgaaggcgcgtttttaggttaccgtttgagtcgcccggaaccgatgtgggccgaattattggctcttgcagcgtctgcccagggacgtgtgtatcgcgcggaagaccctcatggtgcgctccgcggcctcaaagaagtcaatggactccttgccaaagacttagctgttgttgcattgcgcgaaggtcttgatttacctccgactgatgatccaatgcttcttgcgtacctcttggacccgtcaaacacgacgcccgaaggcgtagcccgtcgttacggcggcgagtggaccgaagatgcaggtgagcgcgcgttattggccgaacgtttgcacgccaatttattaggacgtttgcaaggcgaggaacgtctcctctggctttacgaagaagtggagaaaccattgagtcgcgtgctcgcgcatatggaagctaccggtgtcaaattagacgtggcgtatttggaggcactcagccttgaagttgctgccgaaatgcgccgcttggaggaagaagtattccgtttagcaggccactccttttatcttaattctcgcgatcagttagaacgtgtgttgttcgatgaacttggtctccctcctatcggcaagacagagaagaccggtaaacgtagcacttcagcggcggttttagaagctcttcgcgaagtccatcccattgtggacaagatcttgcagtaccgcgaactcgcgaaattgaaaggcacctatattgaccctcttccggcattagtccacccgaaaacgggacgcctccatacccgcttcaaccaaacagccacggcgaccggtcgtttgtcctcctctgatccaaaccttcagaatattccagtacgtaccccattgggccagaagatccgccgcgcgtttgtagctgaggagggttggcgtttagtggccctcgattatagccaaattgaattacgtgtccttgcccatctttctggcgatgagaacctcatccgcgtgtttcaggaaggcaaagacattcacactcaaacggcaagctggatgtttggattatcagctgaagcgatcgatcctttgatgcgtcgtgcagcgaagaccatcaatttcggtgttctctacggtatgagtgcccatcgtttgtcgcaggaattaggcattccctatgaagaagctgcggcgttcattcagcgctactttcaaagctatcccaaagttaaagcatggatcgagaagactctcgaagaaggccgcacacgtggttacgtagagaccttatttggacgtcgccgctatgttcccgatttaaacgctcgcgtgaaatctgtccgtgaagccgccgaacgcatggcgttcaacatgcctgtacagggcacggcagctgacctcatgaaacttgcaatggtgcgcctttttccacaattgcgtgaagttggtgcccgcatgctcttgcaggtccacgatgaactcttgttagaagcgccaaaagagcgtgcggaagaggtggcagccctcgcgaaagaggttatggaaggcgtgtggcccttagcggtgcctcttgaagtcgaagttggtattggcgaggattggttggctgccaaaggataatga

SEQ ID NO: 1722 - protein, 841 aa, synthetic construct
  REGION 1..841: note = Variant of DNA polymerase I from Thermus sp. strain 2.9
MHHHHHHGGSGMLPLFEPKGRVLLVDGHHLAYRNFFALKGLTTSRGEPVQGVYGFAKSLLKALKEDGDVVIVVFDAKAPSFRHEAYEAYKAGRAPTPEDFPRQLALMKELVDLLGLERLEVPGFEADDVLATLAKKAEREGYEVQILTADRDLFQLLSPRISVLHPEGHRITPEWLWEKYGLRPEQWVDFRALVGDPSDNIPGVKGIGEKTALKLLKEWGSLENLLKNLDQVKPESVREKILAHLEDLKLSLELSRVRTDLPLEVDFRGRREPDWEGLKAFLERLEFGSLLHEFGLLESPLPAEEAPWPPPEGAFLGYRLSRPEPMWAELLALAASAQGRVYRAEDPHGALRGLKEVNGLLAKDLAVVALREGLDLPPTDDPMLLAYLLDPSNTTPEGVARRYGGEWTEDAGERALLAERLHANLLGRLQGEERLLWLYEEVEKPLSRVLAHMEATGVKLDVAYLEALSLEVAAEMRRLEEEVFRLAGHSFYLNSRDQLERVLFDELGLPPIGKTEKTGKRSTSAAVLEALREVHPIVDKILQYRELAKLKGTYIDPLPALVHPKTGRLHTRFNQTATATGRLSSSDPNLQNIPVRTPLGQKIRRAFVAEEGWRLVALDYSQIELRVLAHLSGDENLIRVFQEGKDIHTQTASWMFGLSAEAIDPLMRRAAKTINFGVLYGMSAHRLSQELGIPYEEAAAFIQRYFQSYPKVKAWIEKTLEEGRTRGYVETLFGRRRYVPDLNARVKSVREAAERMAFNMPVQGTAADLMKLAMVRLFPQLREVGARMLLQVHDELLLEAPKERAEEVAALAKEVMEGVWPLAVPLEVEVGIGEDWLAAKG

SEQ ID NO: 1723 - DNA, 2529 bp, synthetic construct
  misc_feature 1..2529: note = Variant of DNA polymerase I from Thermus sp. strain 2.9
  source 1..2529: mol_type = other DNA
atgcaccatcatcatcatcatggcggtagcggcatgttaccgttgttcgaacctaaaggtcgcgtgcttctggttgatggccatcatctcgcgtatcgtaacttctttgccctgaaaggattaaccaccagccgtggcgagccggtacagggtgtctacggctttgcaaagtcgctcctgaaagctctgaaagaagacggtgatgtggtgattgttgtctttgatgcgaaagcgccaagttttcgccacgaagcgtacgaagcttacaaagccgggcgtgctccaacgccggaagactttcctcgccaattggcgcttatgaaggaattagtggatttgcttggcctcgaacgcttggaagttcccggtttcgaggcagacgacgtattagcgactctcgcaaagaaagccgaacgtgagggctatgaagtccagatcttgacagcagatcgcgatcttttccagcttttatctccgcgcatctcggtgttacacccggaagggcatcgtatcaccccggaatggctctgggagaaatatggtttgcgtcccgaacaatgggtggattttcgcgccttagtgggcgatccgagcgacaatattccgggagttaaaggtatcggcgagaagacggcgctcaagctccttaaagaatgggggtcgttggagaacttgcttaagaatttagatcaggtcaaaccagagtcagtgcgtgagaagattcttgcacacctcgaagacctcaaattaagccgtgaattgtcccgtgtacgcaccgatttgccgctcgaagttgatttccgtggccgccgcgaacctgactgggagggtcttaaagcgtttttagagcgtcttgaatttggttcgctcttgcatgaattcggccttttagaaagcccgttaccagccgaagaagcaccttggccaccgcccgaaggcgcgtttttaggttaccgtttgagtcgcccggaaccgatgtgggccgaattattggctcttgcagcgtctgcccagggacgtgtgtatcgcgcggaagaccctcatggtgcgctccgcggcctcaaagaagtccgtggactccttgccaaagacttagctgttgttgcattgcgcgaaggtcttgatttacctccgactgatgatccaatgcttcttgcgtacctcttggacccgtcaaacacgacgcccgaaggcgtagcccgtcgttacggcggcgagtggaccgaagatgcaggtgagcgcgcgttattggccgaacgtttgcacgccaatttattaggacgtttgcaaggcgaggaacgtctcctctggctttacgaagaagtggagaaaccattgagtcgcgtgctcgcgcatatggaagctaccggtgtcaaattagacgtggcgtatttggagaatctcagccttgaagttgctgccgaaatgcgccgcttggaggaagaagtattccgtttagcaggccactccttttatcttaattctcgcgatcagttagaacgtgtgttgttcgatgaacttggtctccctcctatcggcaagacagagaagaccggtaaacgtagcacttcagcggcggttttagaagctcttcgcgaagtccatcccattgtggacaagatcttgcagtaccgcgaactcgcgaaattgaaaggcacctatattgaccctcttccggcattagtccacccgaaaacgggacgcctccatacccgcttcaaccaaacagccacggcgaccggtcgtttgtcctcctctgatccaaaccttcagaatattccagtacgtaccccattgggccagaagatccgccgcgcgtttgtagctgaggagggttggcgtttagtggccctcgattatagccaaattgaattacgtgtccttgcccatctttctggcgatgagaacctcatccgcgtgtttcaggaaggcaaagacattcacactcaaacggcaagctggatgtttggattatcagctgaagcgatcgatcctttgatgcgtcgtgcagcgaagaccatcaatttcggtgttctctacggtatgagtgcccatcgtttgtcgcaggaattaggcattccctatgaggaagctgcggcgttcattcagaagtactttcaaagctatcccaaagttaaagcatggatcgagaagactctcgaagaaggccgcacacgtggttacgtagagaccttatttggacgtcgccgctatgttcccgatttaaacgctcgcgtgaaatctgtccgtgaagccgccgaacgcatggcgttcaacatgcctgtacagggcacggcagctgacctcatgaaacttgcaatggtgcgcctttttccacaattgcgtgaagttggtgcccgcatgctcttgcaggtccacgatgaactcttgttagaagcgccaaaagagcgtgcggaagaggtggcagccctcgcgaaagaggttatggaaggcgtgtggcccttagcggtgcctcttgaagtcgaagttggtattggcgaggattggttggctgccaaaggataatga

SEQ ID NO: 1724 - protein, 841 aa, synthetic construct
  REGION 1..841: note = Variant of DNA polymerase I from Thermus sp. strain 2.9
MHHHHHHGGSGMLPLFEPKGRVLLVDGHHLAYRNFFALKGLTTSRGEPVQGVYGFAKSLLKALKEDGDVVIVVFDAKAPSFRHEAYEAYKAGRAPTPEDFPRQLALMKELVDLLGLERLEVPGFEADDVLATLAKKAEREGYEVQILTADRDLFQLLSPRISVLHPEGHRITPEWLWEKYGLRPEQWVDFRALVGDPSDNIPGVKGIGEKTALKLLKEWGSLENLLKNLDQVKPESVREKILAHLEDLKLSRELSRVRTDLPLEVDFRGRREPDWEGLKAFLERLEFGSLLHEFGLLESPLPAEEAPWPPPEGAFLGYRLSRPEPMWAELLALAASAQGRVYRAEDPHGALRGLKEVRGLLAKDLAVVALREGLDLPPTDDPMLLAYLLDPSNTTPEGVARRYGGEWTEDAGERALLAERLHANLLGRLQGEERLLWLYEEVEKPLSRVLAHMEATGVKLDVAYLENLSLEVAAEMRRLEEEVFRLAGHSFYLNSRDQLERVLFDELGLPPIGKTEKTGKRSTSAAVLEALREVHPIVDKILQYRELAKLKGTYIDPLPALVHPKTGRLHTRFNQTATATGRLSSSDPNLQNIPVRTPLGQKIRRAFVAEEGWRLVALDYSQIELRVLAHLSGDENLIRVFQEGKDIHTQTASWMFGLSAEAIDPLMRRAAKTINFGVLYGMSAHRLSQELGIPYEEAAAFIQKYFQSYPKVKAWIEKTLEEGRTRGYVETLFGRRRYVPDLNARVKSVREAAERMAFNMPVQGTAADLMKLAMVRLFPQLREVGARMLLQVHDELLLEAPKERAEEVAALAKEVMEGVWPLAVPLEVEVGIGEDWLAAKG

SEQ ID NO: 1725 - DNA, 2529 bp, synthetic construct
  misc_feature 1..2529: note = Variant of DNA polymerase I from Thermus sp. strain 2.9
  source 1..2529: mol_type = other DNA
atgcaccatcatcatcatcatggcggtagcggcatgttaccgttgttcgaacctaaaggtcgcgtgcttctggttgatggccatcatctcgcgtatcgtaacttctttgccctgaaaggattaaccaccagccgtggcgagccggtacagggtgtctacggctttgcaaagtcgctcctgaaagctctgaaagaagacggtgatgtggtgattgttgtctttgatgcgaaagcgccaagttttcgccacgaagcgtacgaagcttacaaagccgggcgtgctccaacgccggaagactttcctcgccaattggcgcttatgaaggaattagtggatttgcttggcctcgaacgcttggaagttcccggtttcgaggcagacgacgtattagcgactctcgcaaagaaagccgaacgtgagggctatgaagtccagatcttgacagcagatcgcgatcttttccagcttttatctccgcgcatctcggtgttacacccggaagggcatcgtatcaccccggaatggctctgggagaaatatggtttgcgtcccgaacaatgggtggattttcgcgccttagtgggcgatccgagcgacaatattccgggagttaaaggtatcggcgagaagacggcgctcaagctccttaaagaatgggggtcgttggagaacttgcttaagaatttagatcaggtcaaaccagagtcagtgcgtgagaagattcttgcacacctcgaagacctcaaattaagccgtgaattgtcccgtgtacgcaccgatttgccgctcgaagttgatttccgtggccgccgcgaacctgactgggagggtcttaaagcgtttttagagcgtcttgaatttggttcgctcttgcatgaattcggccttttagaaagcccgttaccagccgaagaagcaccttggccaccgcccgaaggcgcgtttttaggttaccgtttgagtcgcccggaaccgatgtgggccgaattattggctcttgcagcgtctgcccagggacgtgtgtatcgcgcggaagaccctcatggtgcgctccgcggcctcaaagaagtccgtggactccttgccaaagacttagctgttgttgcattgcgcgaaggtcttgatttacctccgactgatgatccaatgcttcttgcgtacctcttggacccgtcaaacacgacgcccgaaggcgtagcccgtcgttacggcggcgagtggaccgaagatgcaggcgagcgcgcgttattggccgaacgtttgcacgccaatttattaggacgtttgcaaggcgaggaacgtctcctctggctttacgaagaagtggagaaaccattgagtcgcgtgctcgcgcatatggaagctaccggtgtcaaattagacgtggcgtatttggaggcgctcagccttgaagttgctgccgaaatgcgccgcttggaggaagaagtattccgtttagcaggccactccttttatcttaattctcgcgatcagttagaacgtgtgttgttcgatgaacttggtctccctcctatcggcaagacagagaagaccggtaaacgtagcacttcagcggcggttttagaagctcttcgcgaagtccatcccattgtggacaagatcttgcagtaccgcgaactcgcgaaattgaaaggcacctatattgaccctcttccggcattagtccacccgaaaacgggacgcctccatacccgcttcaaccaaacagccacggcgaccggtcgtttgtcctcctctgatccaaaccttcagaatattccagtacgtaccccattgggccagaagatccgccgcgcgtttgtagctgaggagggttggcgtttagtggccctcgattatagccaaattgaattacgtgtccttgcccatctttctggcgatgagaacctcatccgcgtgtttcaggaaggcaaagacattcacactcaaacggcaagctggatgtttggattatcagctgaagcgatcgatcctttgatgcgtcgtgcagcgaagaccatcaatttcggtgttctctacggtatgagtgcccatcgtttgtcgcaggaattaggcattccctatgaagaagctgcggcgttcattcagcgctactttcaaagctatcccaaagttaaagcatggatcgagaagactctcgaagaaggccgcacacgtggttacgtagagaccttatttggacgtcgccgctatgttcccgatttaaacgctcgcgtgaaatctgtccgtgaagccgccgaacgcatggcgttcaacatgcctgtacagggcacggcagctgacctcatgaaacttgcaatggtgcgcctttttccacaattgcgtgaagttggtgcccgcatgctcttgcaggtccacgatgaactcttgttagaagcgccaaaagagcgtgcggaagaggtggcagccctcgcgaaagaggttatggaaggcgtgtggcccttagcggtgcctcttgaagtcgaagttggtattggcgaggattggttggctgccaaaggataatga

SEQ ID NO: 1726 - protein, 841 aa, synthetic construct
  REGION 1..841: note = Variant of DNA polymerase I from Thermus sp. strain 2.9
MHHHHHHGGSGMLPLFEPKGRVLLVDGHHLAYRNFFALKGLTTSRGEPVQGVYGFAKSLLKALKEDGDVVIVVFDAKAPSFRHEAYEAYKAGRAPTPEDFPRQLALMKELVDLLGLERLEVPGFEADDVLATLAKKAEREGYEVQILTADRDLFQLLSPRISVLHPEGHRITPEWLWEKYGLRPEQWVDFRALVGDPSDNIPGVKGIGEKTALKLLKEWGSLENLLKNLDQVKPESVREKILAHLEDLKLSRELSRVRTDLPLEVDFRGRREPDWEGLKAFLERLEFGSLLHEFGLLESPLPAEEAPWPPPEGAFLGYRLSRPEPMWAELLALAASAQGRVYRAEDPHGALRGLKEVRGLLAKDLAVVALREGLDLPPTDDPMLLAYLLDPSNTTPEGVARRYGGEWTEDAGERALLAERLHANLLGRLQGEERLLWLYEEVEKPLSRVLAHMEATGVKLDVAYLEALSLEVAAEMRRLEEEVFRLAGHSFYLNSRDQLERVLFDELGLPPIGKTEKTGKRSTSAAVLEALREVHPIVDKILQYRELAKLKGTYIDPLPALVHPKTGRLHTRFNQTATATGRLSSSDPNLQNIPVRTPLGQKIRRAFVAEEGWRLVALDYSQIELRVLAHLSGDENLIRVFQEGKDIHTQTASWMFGLSAEAIDPLMRRAAKTINFGVLYGMSAHRLSQELGIPYEEAAAFIQRYFQSYPKVKAWIEKTLEEGRTRGYVETLFGRRRYVPDLNARVKSVREAAERMAFNMPVQGTAADLMKLAMVRLFPQLREVGARMLLQVHDELLLEAPKERAEEVAALAKEVMEGVWPLAVPLEVEVGIGEDWLAAKG

SEQ ID NO: 1727 - DNA, 2529 bp, synthetic construct
  misc_feature 1..2529: note = Variant of DNA polymerase I from Thermus sp. strain 2.9
  source 1..2529: mol_type = other DNA
atgcaccatcatcatcatcatggcggtagcggcatgttaccgttgttcgaacctaaaggtcgcgtgcttctggttgatggccatcatctcgcgtatcgtaacttctttgccctgaaaggattaaccaccagccgtggcgagccggtacagggtgtctacggctttgcaaagtcgctcctgaaagctctgaaagaagacggtgatgtggtgattgttgtctttgatgcgaaagcgccaagttttcgccacgaagcgtacgaagcttacaaagccgggcgtgctccaacgccggaagactttcctcgccaattggcgcttatgaaggaattagtggatttgcttggcctcgaacgcttggaagttcccggtttcgaggcagacgacgtattagcgactctcgcaaagaaagccgaacgtgagggctatgaagtccagatcttgacagcagatcgcgatcttttccagcttttatctccgcgcatctcggtgttacacccggaagggcatcgtatcaccccggaatggctctgggagaaatatggtttgcgtcccgaacaatgggtggattttcgcgccttagtgggcgatccgagcgacaatattccgggagttaaaggtatcggcgagaagacggcgctcaagctccttaaagaatgggggtcgttggagaacttgcttaagaatttagatcaggtcaaaccagagtcagtgcgtgagaagattcttgcacacctcgaagacctcaaattaagcctggaattgtcccgtgtacgcaccgatttgccgctcgaagttgatttccgtggccgccgcgaacctgactgggagggtcttaaagcgtttttagagcgtcttgaatttggttcgctcttgcatgaattcggccttttagaaagcccgttaccagccgaagaagcaccttggccaccgcccgaaggcgcgtttttaggttaccgtttgagtcgcccggaaccgatgtgggccgaattattggctcttgcagcgtctgcccagggacgtgtgtatcgcgcggaagaccctcatggtgcgctccgcggcctcaaagaagtccgtggactccttgccaaagacttagctgttgttgcattgcgcgaaggtcttgatttacctccgactgatgatccaatgcttcttgcgtacctcttggacccgtcaaacacgacgcccgaaggcgtagcccgtcgttacggcggcgagtggaccgaagatgcagctgagcgcgcgttattggccgaacgtttgcacgccaatttattaggacgtttgcaaggcgaggaacgtctcctctggctttacgaagaagtggagaaaccattgagtcgcgtgctcgcgcatatggaagctaccggtgtcaaattagacgtggcgtatttggaggcgctcagccttgaagttgctgccgaaatgcgccgcttggaggaagaagtattccgtttagcaggccactccttttatcttaattctcgcgatcagttagaacgtgtgttgttcgatgaacttggtctccctccgatcggcaagacagagaagaccggtaaacgtagcacttcagcggcggttttagaagctcttcgcgaagtccatcccattgtggacaagatcttgcagtaccgcgaactcgcgaaattgaaaggcacctatattgaccctcttccggcattagtccacccgaaaacgggacgcctccatacccgcttcaaccaaacagccacggcgaccggtcgtttgtcctcctctgatccaaaccttcagaatattccagtacgtaccccattgggccagaagatccgccgcgcgtttgtagctgaggagggttggcgtttagtggccctcgattatagccaaattgaattacgtgtccttgcccatctttctggcgatgagaacctcatccgcgtgtttcaggaaggcaaagacattcacactcaaacggcaagctggatgtttggactgtcagctgaagcgatcgatcctttgatgcgtcgtgcagcgaagaccatcaatttcggtgttctctacggtatgagtgcccatcgtttgtcgcaggaattaggcattccctatacggaagctgcggcgttcattcagcgctactttcaaagctatcccaaagttaaagcatggatcgagaagactctcgaagaaggccgcacacgtggttacgtagagaccttatttggacgtcgccgctatgttcccgatttaaacgctcgcgtgaaatctgtccgtgaagccgccgaacgcatggcgttcaacatgcctgtacagggcacggcagctgacctcatgaaacttgcaatggtgcgcctttttccacaattgcgtgaagttggtgcccgcatgctcttgcaggtccacgatgaactcttgttagaagcgccaaaagagcgtgcggaagaggtggcagccctcgcgaaagaggttatggaaggcgtgtggcccttagcggtgcctcttgaagtcgaagttggtattggcgaggattggttggctgccaaaggataatga

SEQ ID NO: 1728 - protein, 841 aa, synthetic construct
  REGION 1..841: note = Variant of DNA polymerase I from Thermus sp. strain 2.9
MHHHHHHGGSGMLPLFEPKGRVLLVDGHHLAYRNFFALKGLTTSRGEPVQGVYGFAKSLLKALKEDGDVVIVVFDAKAPSFRHEAYEAYKAGRAPTPEDFPRQLALMKELVDLLGLERLEVPGFEADDVLATLAKKAEREGYEVQILTADRDLFQLLSPRISVLHPEGHRITPEWLWEKYGLRPEQWVDFRALVGDPSDNIPGVKGIGEKTALKLLKEWGSLENLLKNLDQVKPESVREKILAHLEDLKLSLELSRVRTDLPLEVDFRGRREPDWEGLKAFLERLEFGSLLHEFGLLESPLPAEEAPWPPPEGAFLGYRLSRPEPMWAELLALAASAQGRVYRAEDPHGALRGLKEVRGLLAKDLAVVALREGLDLPPTDDPMLLAYLLDPSNTTPEGVARRYGGEWTEDAAERALLAERLHANLLGRLQGEERLLWLYEEVEKPLSRVLAHMEATGVKLDVAYLEALSLEVAAEMRRLEEEVFRLAGHSFYLNSRDQLERVLFDELGLPPIGKTEKTGKRSTSAAVLEALREVHPIVDKILQYRELAKLKGTYIDPLPALVHPKTGRLHTRFNQTATATGRLSSSDPNLQNIPVRTPLGQKIRRAFVAEEGWRLVALDYSQIELRVLAHLSGDENLIRVFQEGKDIHTQTASWMFGLSAEAIDPLMRRAAKTINFGVLYGMSAHRLSQELGIPYTEAAAFIQRYFQSYPKVKAWIEKTLEEGRTRGYVETLFGRRRYVPDLNARVKSVREAAERMAFNMPVQGTAADLMKLAMVRLFPQLREVGARMLLQVHDELLLEAPKERAEEVAALAKEVMEGVWPLAVPLEVEVGIGEDWLAAKG

SEQ ID NO: 1729 - DNA, 2529 bp, synthetic construct
  misc_feature 1..2529: note = Variant of DNA polymerase I from Thermus sp. strain 2.9
  source 1..2529: mol_type = other DNA
atgcaccatcatcatcatcatggcggtagcggcatgttaccgttgttcgaacctaaaggtcgcgtgcttctggttgatggccatcatctcgcgtatcgtaacttctttgccctgaaaggattaaccaccagccgtggcgagccggtacagggtgtctacggctttgcaaagtcgctcctgaaagctctgaaagaagacggtgatgtggtgattgttgtctttgatgcgaaagcgccaagttttcgccacgaagcgtacgaagcttacaaagccgggcgtgctccaacgccggaagactttcctcgccaattggcgcttatgaaggaattagtggatttgcttggcctcgaacgcttggaagttcccggtttcgaggcagacgacgtattagcgactctcgcaaagaaagccgaacgtgagggctatgaagtccagatcttgacagcagatcgcgatcttttccagcttttatctccgcgcatctcggtgttacacccggaagggcatcgtatcaccccggaatggctctgggagaaatatggtttgcgtcccgaacaatgggtggattttcgcgccttagcaggcgatccgagcgacaatattccgggagttaaaggtatcggcgagaagacggcgctcaagctccttaaagaatgggggtcgttggagaacttgcttaagaatttagatcaggtcaaaccagagtcagtgcgtgagaagattcttgcacacctcgaagacctcaaattaagccgcgaattgtcccgtgtacgcaccgatttgccgctcgaagttgatttccgtggccgccgcgaacctgactgggagggtcttaaagcgtttttagagcgtcttgaatttggttcgctcttgcatgaattcggccttttagaaagcccgttaccagccgaagaagcaccttggccaccgcccgaaggcgcgtttttaggttaccgtttgagtcgcccggaaccgatgtgggccgaattattggctcttgcagcgtctgcccagggacgtgtgtatcgcgcggaagaccctcatggtgcgctccgcggcctcaaagaagtccgtggactccttgccaaagacttagctgttgttgcattgcgcgaaggtcttattttacctccgactgatgatccaatgcttcttgcgtacctcttggacccgtcaaacacgacgcccgaaggcgtagcccgtcgttacggcggcgagtggaccgaagatgcaggcgagcgcgcgttattggccgaacgtttgcacgccaatttattaggacgtttgcaaggcgaggaacgtctcctctggctttacgaagaagtggagaaaccattgagtcgcgtgctcgcgcatatggaagctaccggtgtcaaattagacgtggcgtatttggaggcactcagccttgaagttgctgccgaaatgcgccgcttggaggaagaagtattccgtttagcaggccactccttttatcttaattctcgcgatcagttagaacgtgtgttgttcgatgaacttggtctccctcctatcggcaagacagagaagaccggtaaacgtagcacttcagcggcggttttagaagctcttcgcgaagtccatcccattgtggacaagatcttgcagtaccgcgaactcgcgaaattgaaaggcacctatattgaccctcttccggcattagtccacccgaaaacgggacgcctccatacccgcttcaaccaaacagccacggcgaccggtcgtttgtcctcctctgatccaaaccttcagaatattccagtacgtaccccattgggccagaagatccgccgcgcgtttgtagctgaggagggttggcgtttagtggccctcgattatagccaaattgaattacgtgtccttgcccatctttctggcgatgagaacctcatccgcgtgtttcaggaaggcaaagacattcacactcaaacggcaagctggatgtttggattatcagctgaagcgatcgatcctttgatgcgtcgtgcagcgaagaccatcaatttcggtgttctctacggtatgagtgcccatcgtttgtcgcaggaattaggcattccctatgaagaagctgcggcgttcattcagcgctactttcaaagctatcccaaagttaaagcatggatcgagaagactctcgaagaaggccgcacacgtggttacgtagagaccttatttggacgtcgccgctatgttcccgatttaaacgctcgcgtgaaatctgtccgtgaagccgccgaacgcatggcgttcaacatgcctgtacagggcacggcagctgacctcatgaaacttgcaatggtgcgcctttttccacaattgcgtgaagttggtgcccgcatgctcttgcaggtccacgatgaactcttgttagaagcgccaaaagagcgtgcggaagaggtggcagccctcgcgaaagaggttatggaaggcgtgtggcccttagcggtgcctcttgaagtcgaagttggtattggcgaggattggttggctgccaaaggataatga

SEQ ID NO: 1730 - protein, 841 aa, synthetic construct
  REGION 1..841: note = Variant of DNA polymerase I from Thermus sp. strain 2.9
MHHHHHHGGSGMLPLFEPKGRVLLVDGHHLAYRNFFALKGLTTSRGEPVQGVYGFAKSLLKALKEDGDVVIVVFDAKAPSFRHEAYEAYKAGRAPTPEDFPRQLALMKELVDLLGLERLEVPGFEADDVLATLAKKAEREGYEVQILTADRDLFQLLSPRISVLHPEGHRITPEWLWEKYGLRPEQWVDFRALAGDPSDNIPGVKGIGEKTALKLLKEWGSLENLLKNLDQVKPESVREKILAHLEDLKLSRELSRVRTDLPLEVDFRGRREPDWEGLKAFLERLEFGSLLHEFGLLESPLPAEEAPWPPPEGAFLGYRLSRPEPMWAELLALAASAQGRVYRAEDPHGALRGLKEVRGLLAKDLAVVALREGLILPPTDDPMLLAYLLDPSNTTPEGVARRYGGEWTEDAGERALLAERLHANLLGRLQGEERLLWLYEEVEKPLSRVLAHMEATGVKLDVAYLEALSLEVAAEMRRLEEEVFRLAGHSFYLNSRDQLERVLFDELGLPPIGKTEKTGKRSTSAAVLEALREVHPIVDKILQYRELAKLKGTYIDPLPALVHPKTGRLHTRFNQTATATGRLSSSDPNLQNIPVRTPLGQKIRRAFVAEEGWRLVALDYSQIELRVLAHLSGDENLIRVFQEGKDIHTQTASWMFGLSAEAIDPLMRRAAKTINFGVLYGMSAHRLSQELGIPYEEAAAFIQRYFQSYPKVKAWIEKTLEEGRTRGYVETLFGRRRYVPDLNARVKSVREAAERMAFNMPVQGTAADLMKLAMVRLFPQLREVGARMLLQVHDELLLEAPKERAEEVAALAKEVMEGVWPLAVPLEVEVGIGEDWLAAKG

SEQ ID NO: 1731 - DNA, 2529 bp, synthetic construct
  misc_feature 1..2529: note = Variant of DNA polymerase I from Thermus sp. strain 2.9
  source 1..2529: mol_type = other DNA
atgcaccatcatcatcatcatggcggtagcggcatgttaccgttgttcgaacctaaaggtcgcgtgcttctggttgatggccatcatctcgcgtatcgtaacttctttgccctgaaaggattaaccaccagccgtggcgagccggtacagggtgtctacggctttgcaaagtcgctcctgaaagctctgaaagaagacggtgatgtggtgattgttgtctttgatgcgaaagcgccaagttttcgccacgaagcgtacgaagcttacaaagccgggcgtgctccaacgccggaagactttcctcgccaattggcgcttatgaaggaattagtggatttgcttggcctcgaacgcttggaagttcccggtttcgaggcagacgacgtattagcgactctcgcaaagaaagccgaacgtgagggctatgaagtccagatcttgacagcagatcgcgatcttttccagcttttatctccgcgcatctcggtgttacacccggaagggcatcgtatcaccccggaatggctctgggagaaatatggtttgcgtcccgaacaatgggtggattttcgcgccttagtgggcgatccgagcgacaatattccgggagttaaaggtatcggcgagaagacggcgctcaagctccttaaagaatgggggtcgttggagaacttgcttaagaatttagatcaggtcaaaccagagtcagtgcgtgagaagattcttgcacacctcgaagacctcaaattaagccgcgaattgtcccgtgtacgcaccgatttgccgctcgaagttgatttccgtggccgccgcgaacctgactgggagggtcttaaagcgtttttagagcgtcttgaatttggttcgctcttgcatgaattcggccttttagaaagcccgttaccagccgaagaagcaccttggccaccgcccgaaggcgcgtttttaggttaccgtttgagtcgcccggaaccgatgtgggccgaattattggctcttgcagcgtctgcccagggacgtgtgtatcgcgcggaagaccctcatggtgcgctccgcggcctcaaagaagtcaatggactccttgccaaagacttagctgttgttgcattgcgcgaaggtcttgatttacctccgactgatgatccaatgcttcttgcgtacctcttggacccgtcaaacacgacgcccgaaggcgtagcccgtcgttacggcggcgagtggaccgaagatgcaggcgagcgcgcgttattggccgaacgtttgcacgccaatttattaggacgtttgcaaggcgaggaacgtctcctctggctttacgaagaagtggagaaaccattgagtcgcgtgctcgcgcatatggaagctaccggtgtcaaattagacgtggcgtatttggaggcactcagccttgaagttgctgccgaaatgcgccgcttggaggaagaagtattccgtttagcaggccactccttttatcttaattctcgcgatcagttagaacgtgtgttgttcgatgaacttggtctccctccgatcggcaagacagagaagaccggtaaacgtagcacttcagcggcggttttagaagctcttcgcgaagtccatcccattgtggacaagatcttgcagtaccgcgaactcgcgaaattgaaaggcacctatattgaccctcttccggcattagtccacccgaaaacgggacgcctccatacccgcttcaaccaaacagccacggcgaccggtcgtttgtcctcctctgatccaaaccttcagaatattccagtacgtaccccattgggccagaagatccgccgcgcgtttgtagctgaggagggttggcgtttagtggccctcgattatagccaaattgaattacgtgtccttgcccatctttctggcgatgagaacctcatccgcgtgtttcaggaaggcaaagacattcacactcaaacggcaagctggatgtttggattatcagctgaagcgatcgatcctttgatgcgtcgtgcagcgaagaccatcaatttcggtgttctctacggtatgagtgcccatcgtttgtcgcaggaattaggcattccctatgaagaagctgcggcgttcattcagcgctactttcaaagctatcccaaagttaaagcatggatcgagaagactctcgaagaaggccgcacacgtggttacgtagagaccttatttggacgtcgccgctatgttcccgatttaaacgctcgcgtgaaatctgtccgtgaagccgccgaacgcatggcgttcaacatgcctgtacagggcacggcagctgacctcatgaaacttgcaatggtgcgcctttttccacaattgcgtgaagttggtgcccgcatgctcttgcaggtccacgatgaactcttgttagaagcgccaaaagagcgtgcggaagaggtggcagccctcgcgaaagaggttatggaaggcgtgtggcccttagcggtgcctcttgaagtcgaagttggtattggcgaggattggttggctgccaaaggataatga

SEQ ID NO: 1732 - protein, 841 aa, synthetic construct
  REGION 1..841: note = Variant of DNA polymerase I from Thermus sp. strain 2.9
MHHHHHHGGSGMLPLFEPKGRVLLVDGHHLAYRNFFALKGLTTSRGEPVQGVYGFAKSLLKALKEDGDVVIVVFDAKAPSFRHEAYEAYKAGRAPTPEDFPRQLALMKELVDLLGLERLEVPGFEADDVLATLAKKAEREGYEVQILTADRDLFQLLSPRISVLHPEGHRITPEWLWEKYGLRPEQWVDFRALVGDPSDNIPGVKGIGEKTALKLLKEWGSLENLLKNLDQVKPESVREKILAHLEDLKLSRELSRVRTDLPLEVDFRGRREPDWEGLKAFLERLEFGSLLHEFGLLESPLPAEEAPWPPPEGAFLGYRLSRPEPMWAELLALAASAQGRVYRAEDPHGALRGLKEVNGLLAKDLAVVALREGLDLPPTDDPMLLAYLLDPSNTTPEGVARRYGGEWTEDAGERALLAERLHANLLGRLQGEERLLWLYEEVEKPLSRVLAHMEATGVKLDVAYLEALSLEVAAEMRRLEEEVFRLAGHSFYLNSRDQLERVLFDELGLPPIGKTEKTGKRSTSAAVLEALREVHPIVDKILQYRELAKLKGTYIDPLPALVHPKTGRLHTRFNQTATATGRLSSSDPNLQNIPVRTPLGQKIRRAFVAEEGWRLVALDYSQIELRVLAHLSGDENLIRVFQEGKDIHTQTASWMFGLSAEAIDPLMRRAAKTINFGVLYGMSAHRLSQELGIPYEEAAAFIQRYFQSYPKVKAWIEKTLEEGRTRGYVETLFGRRRYVPDLNARVKSVREAAERMAFNMPVQGTAADLMKLAMVRLFPQLREVGARMLLQVHDELLLEAPKERAEEVAALAKEVMEGVWPLAVPLEVEVGIGEDWLAAKG

SEQ ID NO: 1733 - DNA, 2529 bp, synthetic construct
  misc_feature 1..2529: note = Variant of DNA polymerase I from Thermus sp. strain 2.9
  source 1..2529: mol_type = other DNA
atgcaccatcatcatcatcatggcggtagcggcatgttaccgttgttcgaacctaaaggtcgcgtgcttctggttgatggccatcatctcgcgtatcgtaacttctttgccctgaaaggattaaccaccagccgtggcgagccggtacagggtgtctacggctttgcaaagtcgctcctgaaagctctgaaagaagacggtgatgtggtgattgttgtctttgatgcgaaagcgccaagttttcgccacgaagcgtacgaagcttacaaagccgggcgtgctccaacgccggaagactttcctcgccaattggcgcttatgaaggaattagtggatttgcttggcctcgaacgcttggaagttcccggtttcgaggcagacgacgtattagcgactctcgcaaagaaagccgaacgtgagggctatgaagtccagatcttgacagcagatcgcgatcttttccagcttttatctccgcgcatctcggtgttacacccggaagggcatcgtatcaccccggaatggctctgggagaaatatggtttgcgtcccgaacaatgggtggattttcgcgccttagtgggcgatccgagcgacaatattccgggagttaaaggtatcggcgagaagacggcgctcaagctccttaaagaatgggggtcgttggagaacttgcttaagaatttagatcaggtcaaaccagagtcagtgcgtgagaagattcttgcacacctcgaagacctcaaattaagccgtgaattgtcccgtgtacgcaccgatttgccgctcgaagttgatttccgtggccgccgcgaacctgactgggagggtcttaaagcgtttttagagcgtcttgaatttggttcgctcttgcatgaattcggccttttagaaagcccgttaccagccgaagaagcaccttggccaccgcccgaaggcgcgtttttaggttaccgtttgagtcgcccggaaccgatgtgggccgaattattggctcttgcagcgtctgcccagggacgtgtgtatcgcgcggaagaccctcatggtgcgctccgcggcctcaaagaagtccgtggactccttgccaaagacttagctgttgttgcattgcgcgaaggtcttgatttacctccgactgatgatccaatgcttcttgcgtacctcttggacccgtcaaacacgacgcccgaaggcgtagcccgtcgttacggcggcgagtggaccgaagatgcagctgagcgcgcgttattggccgaacgtttgcacgccaatttattaggacgtttgcaaggcgaggaacgtctcctctggctttacgaagaagtggagaaaccattgagtcgcgtgctcgcgcatatggaagctaccggtgtcaaattagacgtggcgtatttggagaatctcagccttgaagttgctgccgaaatgcgccgcttggaggaagaagtattccgtttagcaggccactccttttatcttaattctcgcgatcagttagaacgtgtgttgttcgatgaacttggtctccctcctatcggcaagacagagaagaccggtaaacgtagcacttcagcggcggttttagaagctcttcgcgaagtccatcccattgtggacaagatcttgcagtaccgcgaactcgcgaaattgaaaggcacctatattgaccctcttccggcattagtccacccgaaaacgggacgcctccatacccgcttcaaccaaacagccacggcgaccggtcgtttgtcctcctctgatccaaaccttcagaatattccagtacgtaccccattgggccagaagatccgccgcgcgtttgtagctgaggagggttggcgtttagtggccctcgattatagccaaattgaattacgtgtccttgcccatctttctggcgatgagaacctcatccgcgtgtttcaggaaggcaaagacattcacactcaaacggcaagctggatgtttggattatcagctgaagcgatcgatcctttgatgcgtcgtgcagcgaagaccatcaatttcggtgttctctacggtatgagtgcccatcgtttgtcgcaggaattaggcattccctatgaggaagctgcggcgttcattcagcgctactttcaaagctatcccaaagttaaagcatggatcgagaagactctcgaagaaggccgcacacgtggttacgtagagaccttatttggacgtcgccgctatgttcccgatttaaacgctcgcgtgaaatctgtccgtgaagccgccgaacgcatggcgttcaacatgcctgtacagggcacggcagctgacctcatgaaacttgcaatggtgcgcctttttccacaattgcgtgaagttggtgcccgcatgctcttgcaggtccacgatgaactcttgttagaagcgccaaaagagcgtgcggaagaggtggcagccctcgcgaaagaggttatggaaggcgtgtggcccttagcggtgcctcttgaagtcgaagttggtattggcgaggattggttggctgccaaaggataatga

SEQ ID NO: 1734 - protein, 841 aa, synthetic construct
  REGION 1..841: note = Variant of DNA polymerase I from Thermus sp. strain 2.9
MHHHHHHGGSGMLPLFEPKGRVLLVDGHHLAYRNFFALKGLTTSRGEPVQGVYGFAKSLLKALKEDGDVVIVVFDAKAPSFRHEAYEAYKAGRAPTPEDFPRQLALMKELVDLLGLERLEVPGFEADDVLATLAKKAEREGYEVQILTADRDLFQLLSPRISVLHPEGHRITPEWLWEKYGLRPEQWVDFRALVGDPSDNIPGVKGIGEKTALKLLKEWGSLENLLKNLDQVKPESVREKILAHLEDLKLSRELSRVRTDLPLEVDFRGRREPDWEGLKAFLERLEFGSLLHEFGLLESPLPAEEAPWPPPEGAFLGYRLSRPEPMWAELLALAASAQGRVYRAEDPHGALRGLKEVRGLLAKDLAVVALREGLDLPPTDDPMLLAYLLDPSNTTPEGVARRYGGEWTEDAAERALLAERLHANLLGRLQGEERLLWLYEEVEKPLSRVLAHMEATGVKLDVAYLENLSLEVAAEMRRLEEEVFRLAGHSFYLNSRDQLERVLFDELGLPPIGKTEKTGKRSTSAAVLEALREVHPIVDKILQYRELAKLKGTYIDPLPALVHPKTGRLHTRFNQTATATGRLSSSDPNLQNIPVRTPLGQKIRRAFVAEEGWRLVALDYSQIELRVLAHLSGDENLIRVFQEGKDIHTQTASWMFGLSAEAIDPLMRRAAKTINFGVLYGMSAHRLSQELGIPYEEAAAFIQRYFQSYPKVKAWIEKTLEEGRTRGYVETLFGRRRYVPDLNARVKSVREAAERMAFNMPVQGTAADLMKLAMVRLFPQLREVGARMLLQVHDELLLEAPKERAEEVAALAKEVMEGVWPLAVPLEVEVGIGEDWLAAKG

SEQ ID NO: 1735 - DNA, 2529 bp, synthetic construct
  misc_feature 1..2529: note = Variant of DNA polymerase I from Thermus sp. strain 2.9
  source 1..2529: mol_type = other DNA
atgcaccatcatcatcatcatggcggtagcggcatgttaccgttgttcgaacctaaaggtcgcgtgcttctggttgatggccatcatctcgcgtatcgtaacttctttgccctgaaaggattaaccaccagccgtggcgagccggtacagggtgtctacggctttgcaaagtcgctcctgaaagctctgaaagaagacggtgatgtggtgattgttgtctttgatgcgaaagcgccaagttttcgccacgaagcgtacgaagcttacaaagccgggcgtgctccaacgccggaagactttcctcgccaattggcgcttatgaaggaattagtggatttgcttggcctcgaacgcttggaagttcccggtttcgaggcagacgacgtattagcgactctcgcaaagaaagccgaacgtgagggctatgaagtccagatcttgacagcagatcgcgatcttttccagcttttatctccgcgcatctcggtgttacacccggaagggcatcgtatcaccccggaatggctctgggagaaatatggtttgcgtcccgaacaatgggtggattttcgcgccttagcaggcgatccgagcgacaatattccgggagttaaaggtatcggcgagaagacggcgctcaagctccttaaagaatgggggtcgttggagaacttgcttaagaatttagatcaggtcaaaccagagtcagtgcgtgagaagattcttgcacacctcgaagacctcaaattaagccgtgaattgtcccgtgtacgcaccgatttgccgctcgaagttgatttccgtggccgccgcgaacctgactgggagggtcttaaagcgtttttagagcgtcttgaatttggttcgctcttgcatgaattcggccttttagaaagcccgttaccagccgaagaagcaccttggccaccgcccgaaggcgcgtttttaggttaccgtttgagtcgcccggaaccgatgtgggccgaattattggctcttgcagcgtctgcccagggacgtgtgtatcgcgcggaagaccctcatggtgcgctccgcggcctcaaagaagtccgtggactccttgccaaagacttagctgttgttgcattgcgcgaaggtcttgatttacctccgactgatgatccaatgcttcttgcgtacctcttggacccgtcaaacacgacgcccgaaggcgtagcccgtcgttacggcggcgagtggaccgaagatgcaggcgagcgcgcgttattggccgaacgtttgcacgccaatttattaggacgtttgcaaggcgaggaacgtctcctctggctttacgaagaagtggagaaaccattgagtcgcgtgctcgcgcatatggaagctaccggtgtcaaattagacgtggcgtatttggaggcgctcagccttgaagttgctgccgaaatgcgccgcttggaggaagaagtattccgtttagcaggccactccttttatcttaattctcgcgatcagttagaacgtgtgttgttcgatgaacttggtctccctcctatcggcaagacagagaagaccggtaaacgtagcacttcagcggcggttttagaagctcttcgcgaagtccatcccattgtggacaagatcttgcagtaccgcgaactcgcgaaattgaaaggcacctatattgaccctcttccggcattagtccacccgaaaacgggacgcctccatacccgcttcaaccaaacagccacggcgaccggtcgtttgtcctcctctgatccaaaccttcagaatattccagtacgtaccccattgggccagaagatccgccgcgcgtttgtagctgaggagggttggcgtttagtggccctcgattatagccaaattgaattacgtgtccttgcccatctttctggcgatgagaacctcatccgcgtgtttcaggaaggcaaagacattcacactcaaacggcaagctggatgtttggagtgtcagctgaagcgatcgatcctttgatgcgtcgtgcagcgaagaccatcaatttcggtgttctctacggtatgagtgcccatcgtttgtcgcaggaattaggcattccctatgaggaagctgcggcgttcattcagaagtactttcaaagctatcccaaagttaaagcatggatcgagaagactctcgaagaaggccgcacacgtggttacgtagagaccttatttggacgtcgccgctatgttcccgatttaaacgctcgcgtgaaatctgtccgtgaagccgccgaacgcatggcgttcaacatgcctgtacagggcacggcagctgacctcatgaaacttgcaatggtgcgcctttttccacaattgcgtgaagttggtgcccgcatgctcttgcaggtccacgatgaactcttgttagaagcgccaaaagagcgtgcggaagaggtggcagccctcgcgaaagaggttatggaaggcgtgtggcccttagcggtgcctcttgaagtcgaagttggtattggcgaggattggttggctgccaaaggataatga

SEQ ID NO: 1736 - protein, 841 aa, synthetic construct
  REGION 1..841: note = Variant of DNA polymerase I from Thermus sp. strain 2.9
MHHHHHHGGSGMLPLFEPKGRVLLVDGHHLAYRNFFALKGLTTSRGEPVQGVYGFAKSLLKALKEDGDVVIVVFDAKAPSFRHEAYEAYKAGRAPTPEDFPRQLALMKELVDLLGLERLEVPGFEADDVLATLAKKAEREGYEVQILTADRDLFQLLSPRISVLHPEGHRITPEWLWEKYGLRPEQWVDFRALAGDPSDNIPGVKGIGEKTALKLLKEWGSLENLLKNLDQVKPESVREKILAHLEDLKLSRELSRVRTDLPLEVDFRGRREPDWEGLKAFLERLEFGSLLHEFGLLESPLPAEEAPWPPPEGAFLGYRLSRPEPMWAELLALAASAQGRVYRAEDPHGALRGLKEVRGLLAKDLAVVALREGLDLPPTDDPMLLAYLLDPSNTTPEGVARRYGGEWTEDAGERALLAERLHANLLGRLQGEERLLWLYEEVEKPLSRVLAHMEATGVKLDVAYLEALSLEVAAEMRRLEEEVFRLAGHSFYLNSRDQLERVLFDELGLPPIGKTEKTGKRSTSAAVLEALREVHPIVDKILQYRELAKLKGTYIDPLPALVHPKTGRLHTRFNQTATATGRLSSSDPNLQNIPVRTPLGQKIRRAFVAEEGWRLVALDYSQIELRVLAHLSGDENLIRVFQEGKDIHTQTASWMFGVSAEAIDPLMRRAAKTINFGVLYGMSAHRLSQELGIPYEEAAAFIQKYFQSYPKVKAWIEKTLEEGRTRGYVETLFGRRRYVPDLNARVKSVREAAERMAFNMPVQGTAADLMKLAMVRLFPQLREVGARMLLQVHDELLLEAPKERAEEVAALAKEVMEGVWPLAVPLEVEVGIGEDWLAAKG

SEQ ID NO: 1737 - DNA, 2529 bp, synthetic construct
  misc_feature 1..2529: note = Variant of DNA polymerase I from Thermus sp. strain 2.9
  source 1..2529: mol_type = other DNA
atgcaccatcatcatcatcatggcggtagcggcatgttaccgttgttcgaacctaaaggtcgcgtgcttctggttgatggccatcatctcgcgtatcgtaacttctttgccctgaaaggattaaccaccagccgtggcgagccggtacagggtgtctacggctttgcaaagtcgctcctgaaagctctgaaagaagacggtgatgtggtgattgttgtctttgatgcgaaagcgccaagttttcgccacgaagcgtacgaagcttacaaagccgggcgtgctccaacgccggaagactttcctcgccaattggcgcttatgaaggaattagtggatttgcttggcctcgaacgcttggaagttcccggtttcgaggcagacgacgtattagcgactctcgcaaagaaagccgaacgtgagggctatgaagtccagatcttgacagcagatcgcgatcttttccagcttttatctccgcgcatctcggtgttacacccggaagggcatcgtatcaccccggaatggctctgggagaaatatggtttgcgtcccgaacaatgggtggattttcgcgccttagtgggcgatccgagcgacaatattccgggagttaaaggtatcggcgagaagacggcgctcaagctccttaaagaatgggggtcgttggagaacttgcttaagaatttagatcaggtcaaaccagagtcagtgcgtgagaagattcttgcacacctcgaagacctcaaattaagcctggaattgtcccgtgtacgcaccgatttgccgctcgaagttgatttccgtggccgccgcgaacctgactgggagggtcttaaagcgtttttagagcgtcttgaatttggttcgctcttgcatgaattcggccttttagaaagcccgttaccagccgaagaagcaccttggccaccgcccgaaggcgcgtttttaggttaccgtttgagtcgcccggaaccgatgtgggccgaattattggctcttgcagcgtctgcccagggacgtgtgtatcgcgcggaagaccctcatggtgcgctccgcggcctcaaagaagtccgtggactccttgccaaagacttagctgttgttgcattgcgcgaaggtcttgatttacctccgactgatgatccaatgcttcttgcgtacctcttggacccgtcaaacacgacgcccgaaggcgtagcccgtcgttacggcggcgagtggaccgaagatgcaggtgagcgcgcgttattggccgaacgtttgcacgccaatttattaggacgtttgcaaggcgaggaacgtctcctctggctttacgaagaagtggagaaaccattgagtcgcgtgctcgcgcatatggaagctaccggtgtcaaattagacgtggcgtatttggagaatctcagccttgaagttgctgccgaaatgcgccgcttggaggaagaagtattccgtttagcaggccactccttttatcttaattctcgcgatcagttagaacgtgtgttgttcgatgagcttggtctccctcctatcggcaagacagagaagaccggtaaacgtagcacttcagcggcggttttagaagctcttcgcgaagtccatcccattgtggacaagatcttgcagtaccgcgaactcgcgaaattgaaaggcacctatattgaccctcttccggcattagtccacccgaaaacgggacgcctccatacccgcttcaaccaaacagccacggcgaccggtcgtttgtcctcctctgatccaaaccttcagaatattccagtacgtaccccattgggccagaagatccgccgcgcgtttgtagctgaggagggttggcgtttagtggccctcgattatagccaaattgaattacgtgtccttgcccatctttctggcgatgagaacctcatccgcgtgtttcaggaaggcaaagacattcacactcaaacggcaagctggatgtttggattatcagctgaagcgatcgatcctttgatgcgtcgtgcagcgaagaccatcaatttcggtgttctctacggtatgagtgcccatcgtttgtcgcaggaattaggcattccctatacggaagctgcggcgttcattcagcgctactttcaaagctatcccaaagttaaagcatggatcgagaagactctcgaagaaggccgcacacgtggttacgtagagaccttatttggacgtcgccgctatgttcccgatttaaccgctcgcgtgaaatctgtccgtgaagccgccgaacgcatggcgttcaacatgcctgtacagggcacggcagctgacctcatgaaacttgcaatggtgcgcctttttccacaattgcgtgaagttggtgcccgcatgctcttgcaggtccacgatgaactcttgttagaagcgccaaaagagcgtgcggaagaggtggcagccctcgcgaaagaggttatggaaggcgtgtggcccttagcggtgcctcttgaagtcgaagttggtattggcgaggattggttggctgccaaaggataatga

SEQ ID NO: 1738 - protein, 841 aa, synthetic construct
  REGION 1..841: note = Variant of DNA polymerase I from Thermus sp. strain 2.9
MHHHHHHGGSGMLPLFEPKGRVLLVDGHHLAYRNFFALKGLTTSRGEPVQGVYGFAKSLLKALKEDGDVVIVVFDAKAPSFRHEAYEAYKAGRAPTPEDFPRQLALMKELVDLLGLERLEVPGFEADDVLATLAKKAEREGYEVQILTADRDLFQLLSPRISVLHPEGHRITPEWLWEKYGLRPEQWVDFRALVGDPSDNIPGVKGIGEKTALKLLKEWGSLENLLKNLDQVKPESVREKILAHLEDLKLSLELSRVRTDLPLEVDFRGRREPDWEGLKAFLERLEFGSLLHEFGLLESPLPAEEAPWPPPEGAFLGYRLSRPEPMWAELLALAASAQGRVYRAEDPHGALRGLKEVRGLLAKDLAVVALREGLDLPPTDDPMLLAYLLDPSNTTPEGVARRYGGEWTEDAGERALLAERLHANLLGRLQGEERLLWLYEEVEKPLSRVLAHMEATGVKLDVAYLENLSLEVAAEMRRLEEEVFRLAGHSFYLNSRDQLERVLFDELGLPPIGKTEKTGKRSTSAAVLEALREVHPIVDKILQYRELAKLKGTYIDPLPALVHPKTGRLHTRFNQTATATGRLSSSDPNLQNIPVRTPLGQKIRRAFVAEEGWRLVALDYSQIELRVLAHLSGDENLIRVFQEGKDIHTQTASWMFGLSAEAIDPLMRRAAKTINFGVLYGMSAHRLSQELGIPYTEAAAFIQRYFQSYPKVKAWIEKTLEEGRTRGYVETLFGRRRYVPDLTARVKSVREAAERMAFNMPVQGTAADLMKLAMVRLFPQLREVGARMLLQVHDELLLEAPKERAEEVAALAKEVMEGVWPLAVPLEVEVGIGEDWLAAKG

SEQ ID NO: 1739 - DNA, 2529 bp, synthetic construct
  misc_feature 1..2529: note = Variant of DNA polymerase I from Thermus sp. strain 2.9
  source 1..2529: mol_type = other DNA
atgcaccatcatcatcatcatggcggtagcggcatgttaccgttgttcgaacctaaaggtcgcgtgcttctggttgatggccatcatctcgcgtatcgtaacttctttgccctgaaaggattaaccaccagccgtggcgagccggtacagggtgtctacggctttgcaaagtcgctcctgaaagctctgaaagaagacggtgatgtggtgattgttgtctttgatgcgaaagcgccaagttttcgccacgaagcgtacgaagcttacaaagccgggcgtgctccaacgccggaagactttcctcgccaattggcgcttatgaaggaattagtggatttgcttggcctcgaacgcttggaagttcccggtttcgaggcagacgacgtattagcgactctcgcaaagaaagccgaacgtgagggctatgaagtccagatcttgacagcagatcgcgatcttttccagcttttatctccgcgcatctcggtgttacacccggaagggcatcgtatcaccccggaatggctctgggagaaatatggtttgcgtcccgaacaatgggtggattttcgcgccttagcaggcgatccgagcgacaatattccgggagttaaaggtatcggcgagaagacggcgctcaagctccttaaagaatgggggtcgttggagaacttgcttaagaatttagatcaggtcaaaccagagtcagtgcgtgagaagattcttgcacacctcgaagacctcaaattaagccgcgaattgtcccgtgtacgcaccgatttgccgctcgaagttgatttccgtggccgccgcgaacctgactgggagggtcttaaagcgtttttagagcgtcttgaatttggttcgctcttgcatgaattcggccttttagaaagcccgttaccagccgaagaagcaccttggccaccgcccgaaggcgcgtttttaggttaccgtttgagtcgcccggaaccgatgtgggccgaattattggctcttgcagcgtctgcccagggacgtgtgtatcgcgcggaagaccctcatggtgcgctccgcggcctcaaagaagtccgtggactccttgccaaagacttagctgttgttgcattgcgcgaaggtcttgatttacctccgactgatgatccaatgcttcttgcgtacctcttggacccgtcaaacacgacgcccgaaggcgtagcccgtcgttacggcggcgagtggaccgaagatgcaggcgagcgcgcgttattggccgaacgtttgcacgccaatttattaggacgtttgcaaggcgaggaacgtctcctctggctttacgaagaagtggagaaaccattgagtcgcgtgctcgcgcatatggaagctaccggtgtcaaattagacgtggcgtatttggaggcactcagccttgaagttgctgccgaaatgcgccgcttggaggaagaagtattccgtttagcaggccactccttttatcttaattctcgcgatcagttagaacgtgtgttgttcgatgaacttggtctccctcctatcggcaagacagagaagaccggtaaacgtagcacttcagcggcggttttagaagctcttcgcgaagtccatcccattgtggacaagatcttgcagtaccgcgaactcgcgaaattgaaaggcacctatattgaccctcttccggcattagtccacccgaaaacgggacgcctccatacccgcttcaaccaaacagccacggcgaccggtcgtttgtcctcctctgatccaaaccttcagaatattccagtacgtaccccattgggccagaagatccgccgcgcgtttgtagctgaggagggttggcgtttagtggccctcgattatagccaaattgaattacgtgtccttgcccatctttctggcgatgagaacctcatccgcgtgtttcaggaaggcaaagacattcacactcaaacggcaagctggatgtttggattatcagctgaagcgatcgatcctttgatgcgtcgtgcagcgaagaccatcaatttcggtgttctctacggtatgagtgcccatcgtttgtcgcaggaattaggcattccctatgaagaagctgcggcgttcattcagcgctactttcaaagctatcccaaagttaaagcatggatcgagaagactctcgaagaaggccgcacacgtggttacgtagagaccttatttggacgtcgccgctatgttcccgatttaaacgctcgcgtgaaatctgtccgtgaagccgccgaacgcatggcgttcaacatgcctgtacagggcacggcagctgacctcatgaaacttgcaatggtgcgcctttttccacaattgcgtgaagttggtgcccgcatgctcttgcaggtccacgatgaactcttgttagaagcgccaaaagagcgtgcggaacatgtggcagccctcgcgaaagaggttatggaaggcgtgtggcccttagcggtgcctcttgaagtcgaagttggtattggcgaggattggttggctgccaaaggataatga

SEQ ID NO: 1740 - protein, 841 aa, synthetic construct
  REGION 1..841: note = Variant of DNA polymerase I from Thermus sp. strain 2.9
MHHHHHHGGSGMLPLFEPKGRVLLVDGHHLAYRNFFALKGLTTSRGEPVQGVYGFAKSLLKALKEDGDVVIVVFDAKAPSFRHEAYEAYKAGRAPTPEDFPRQLALMKELVDLLGLERLEVPGFEADDVLATLAKKAEREGYEVQILTADRDLFQLLSPRISVLHPEGHRITPEWLWEKYGLRPEQWVDFRALAGDPSDNIPGVKGIGEKTALKLLKEWGSLENLLKNLDQVKPESVREKILAHLEDLKLSRELSRVRTDLPLEVDFRGRREPDWEGLKAFLERLEFGSLLHEFGLLESPLPAEEAPWPPPEGAFLGYRLSRPEPMWAELLALAASAQGRVYRAEDPHGALRGLKEVRGLLAKDLAVVALREGLDLPPTDDPMLLAYLLDPSNTTPEGVARRYGGEWTEDAGERALLAERLHANLLGRLQGEERLLWLYEEVEKPLSRVLAHMEATGVKLDVAYLEALSLEVAAEMRRLEEEVFRLAGHSFYLNSRDQLERVLFDELGLPPIGKTEKTGKRSTSAAVLEALREVHPIVDKILQYRELAKLKGTYIDPLPALVHPKTGRLHTRFNQTATATGRLSSSDPNLQNIPVRTPLGQKIRRAFVAEEGWRLVALDYSQIELRVLAHLSGDENLIRVFQEGKDIHTQTASWMFGLSAEAIDPLMRRAAKTINFGVLYGMSAHRLSQELGIPYEEAAAFIQRYFQSYPKVKAWIEKTLEEGRTRGYVETLFGRRRYVPDLNARVKSVREAAERMAFNMPVQGTAADLMKLAMVRLFPQLREVGARMLLQVHDELLLEAPKERAEHVAALAKEVMEGVWPLAVPLEVEVGIGEDWLAAKG

SEQ ID NO: 1741 - DNA, 2529 bp, synthetic construct
  misc_feature 1..2529: note = Variant of DNA polymerase I from Thermus sp. strain 2.9
  source 1..2529: mol_type = other DNA
atgcaccatcatcatcatcatggcggtagcggcatgttaccgttgttcgaacctaaaggtcgcgtgcttctggttgatggccatcatctcgcgtatcgtaacttctttgccctgaaaggattaaccaccagccgtggcgagccggtacagggtgtctacggctttgcaaagtcgctcctgaaagctctgaaagaagacggtgatgtggtgattgttgtctttgatgcgaaagcgccaagttttcgccacgaagcgtacgaagcttacaaagccgggcgtgctccaacgccggaagactttcctcgccaattggcgcttatgaaggaattagtggatttgcttggcctcgaacgcttggaagttcccggtttcgaggcagacgacgtattagcgactctcgcaaagaaagccgaacgtgagggctatgaagtccagatcttgacagcagatcgcgatcttttccagcttttatctccgcgcatctcggtgttacacccggaagggcatcgtatcaccccggaatggctctgggagaaatatggtttgcgtcccgaacaatgggtggattttcgcgccttagcgggcgatccgagcgacaatattccgggagttaaaggtatcggcgagaagacggcgctcaagctccttaaagaatgggggtcgttggagaacttgcttaagaatttagatcaggtcaaaccagagtcagtgcgtgagaagattcttgcacacctcgaagacctcaaattaagcctggaattgtcccgtgtacgcaccgatttgccgctcgaagttgatttccgtggccgccgcgaacctgactgggagggtcttaaagcgtttttagagcgtcttgaatttggttcgctcttgcatgaattcggccttttagaaagcccgttaccagccgaagaagcaccttggccaccgcccgaaggcgcgtttttaggttaccgtttgagtcgcccggaaccgatgtgggccgaattattggctcttgcagcgtctgcccagggacgtgtgtatcgcgcggaagaccctcatggtgcgctccgcggcctcaaagaagtccgtggactccttgccaaagacttagctgttgttgcattgcgcgaaggtcttgatttacctccgactgatgatccaatgcttcttgcgtacctcttggacccgtcaaacacgacgcccgaaggcgtagcccgtcgttacggcggcgagtggaccgaagatgcaggtgagcgcgcgttattggccgaacgtttgcacgccaatttattaggacgtttgcaaggcgaggaacgtctcctctggctttacgaagaagtggagaaaccattgagtcgcgtgctcgcgcatatggaagctaccggtgtcaaattagacgtggcgtatttggagaatctcagccttgaagttgctgccgaaatgcgccgcttggaggaagaagtattccgtttagcaggccactccttttatcttaattctcgcgatcagttagaacgtgtgttgttcgatgaacttggtctccctcctatcggcaagacagagaagaccggtaaacgtagcacttcagcggcggttttagaagctcttcgcgaagtccatcccattgtggacaagatcttgcagtaccgcgaactcgcgaaattgaaaggcacctatattgaccctcttccggcattagtccacccgaaaacgggacgcctccatacccgcttcaaccaaacagccacggcgaccggtcgtttgtcctcctctgatccaaaccttcagaatattccagtacgtaccccattgggccagaagatccgccgcgcgtttgtagctgaggagggttggcgtttagtggccctcgattatagccaaattgaattacgtgtccttgcccatctttctggcgatgagaacctcatccgcgtgtttcaggaaggcaaagacattcacactcaaacggcaagctggatgtttggattatcagctgaagcgatcgatcctttgatgcgtcgtgcagcgaagaccatcaatttcggtgttctctacggtatgagtgcccatcgtttgtcgcaggaattaggcattccctatacggaagctgcggcgttcattcagcgctactttcaaagctatcccaaagttaaagcatggatcgagaagactctcgaagaaggccgcacacgtggttacgtagagaccttatttggacgtcgccgctatgttcccgatttaaacgctcgcgtgaaatctgtccgtgaagccgccgaacgcatggcgttcaacatgcctgtacagggcacggcagctgacctcatgaaacttgcaatggtgcgcctttttccacaattgcgtgaagttggtgcccgcatgctcttgcaggtccacgatgaactcttgttagaagcgccaaaagagcgtgcggaagaggtggcagccctcgcgaaagaggttatggaaggcgtgtggcccttagcggtgcctcttgaagtcgaagttggtattggcgaggattggttggctgccaaaggataatga

SEQ ID NO: 1742 - protein, 841 aa, synthetic construct
  REGION 1..841: note = Variant of DNA polymerase I from Thermus sp. strain 2.9
MHHHHHHGGSGMLPLFEPKGRVLLVDGHHLAYRNFFALKGLTTSRGEPVQGVYGFAKSLLKALKEDGDVVIVVFDAKAPSFRHEAYEAYKAGRAPTPEDFPRQLALMKELVDLLGLERLEVPGFEADDVLATLAKKAEREGYEVQILTADRDLFQLLSPRISVLHPEGHRITPEWLWEKYGLRPEQWVDFRALAGDPSDNIPGVKGIGEKTALKLLKEWGSLENLLKNLDQVKPESVREKILAHLEDLKLSLELSRVRTDLPLEVDFRGRREPDWEGLKAFLERLEFGSLLHEFGLLESPLPAEEAPWPPPEGAFLGYRLSRPEPMWAELLALAASAQGRVYRAEDPHGALRGLKEVRGLLAKDLAVVALREGLDLPPTDDPMLLAYLLDPSNTTPEGVARRYGGEWTEDAGERALLAERLHANLLGRLQGEERLLWLYEEVEKPLSRVLAHMEATGVKLDVAYLENLSLEVAAEMRRLEEEVFRLAGHSFYLNSRDQLERVLFDELGLPPIGKTEKTGKRSTSAAVLEALREVHPIVDKILQYRELAKLKGTYIDPLPALVHPKTGRLHTRFNQTATATGRLSSSDPNLQNIPVRTPLGQKIRRAFVAEEGWRLVALDYSQIELRVLAHLSGDENLIRVFQEGKDIHTQTASWMFGLSAEAIDPLMRRAAKTINFGVLYGMSAHRLSQELGIPYTEAAAFIQRYFQSYPKVKAWIEKTLEEGRTRGYVETLFGRRRYVPDLNARVKSVREAAERMAFNMPVQGTAADLMKLAMVRLFPQLREVGARMLLQVHDELLLEAPKERAEEVAALAKEVMEGVWPLAVPLEVEVGIGEDWLAAKG

SEQ ID NO: 1743 - DNA, 2529 bp, synthetic construct
  misc_feature 1..2529: note = Variant of DNA polymerase I from Thermus sp. strain 2.9
  source 1..2529: mol_type = other DNA
atgcaccatcatcatcatcatggcggtagcggcatgttaccgttgttcgaacctaaaggtcgcgtgcttctggttgatggccatcatctcgcgtatcgtaacttctttgccctgaaaggattaaccaccagccgtggcgagccggtacagggtgtctacggctttgcaaagtcgctcctgaaagctctgaaagaagacggtgatgtggtgattgttgtctttgatgcgaaagcgccaagttttcgccacgaagcgtacgaagcttacaaagccgggcgtgctccaacgccggaagactttcctcgccaattggcgcttatgaaggaattagtggatttgcttggcctcgaacgcttggaagttcccggtttcgaggcagacgacgtattagcgactctcgcaaagaaagccgaacgtgagggctatgaagtccagatcttgacagcagatcgcgatcttttccagcttttatctccgcgcatctcggtgttacacccggaagggcatcgtatcaccccggaatggctctgggagaaatatggtttgcgtcccgaacaatgggtggattttcgcgccttagcgggcgatccgagcgacaatattccgggagttaaaggtatcggcgagaagacggcgctcaagctccttaaagaatgggggtcgttggagaacttgcttaagaatttagatcaggtcaaaccagagtcagtgcgtgagaagattcttgcacacctcgaagacctcaaattaagcctggaattgtcccgtgtacgcaccgatttgccgctcgaagttgatttccgtggccgccgcgaacctgactgggagggtcttaaagcgtttttagagcgtcttgaatttggttcgctcttgcatgaattcggccttttagaaagcccgttaccagccgaagaagcaccttggccaccgcccgaaggcgcgtttttaggttaccgtttgagtcgcccggaaccgatgtgggccgaattattggctcttgcagcgtctgcccagggacgtgtgtatcgcgcggaagaccctcatggtgcgctccgcggcctcaaagaagtccgtggactccttgccaaagacttagctgttgttgcattgcgcgaaggtcttgatttacctccgactgatgatccaatgcttcttgcgtacctcttggacccgtcaaacacgacgcccgaaggcgtagcccgtcgttacggcggcgagtggaccgaagatgcagctgagcgcgcgttattggccgaacgtttgcacgccaatttattaggacgtttgcaaggcgaggaacgtctcctctggctttacgaagaagtggagaaaccattgagtcgcgtgctcgcgcatatggaagctaccggtgtcaaattagacgtggcgtatttggaggcgctcagccttgaagttgctgccgaaatgcgccgcttggaggaagaagtattccgtttagcaggccactccttttatcttaattctcgcgatcagttagaacgtgtgttgttcgatgaacttggtctccctccgatcggcaagacagagaagaccggtaaacgtagcacttcagcggcggttttagaagctcttcgcgaagtccatcccattgtggacaagatcttgcagtaccgcgaactcgcgaaattgaaaggcacctatattgaccctcttccggcattagtccacccgaaaacgggacgcctccatacccgcttcaaccaaacagccacggcgaccggtcgtttgtcctcctctgatccaaaccttcagaatattccagtacgtaccccattgggccagaagatccgccgcgcgtttgtagctgaggagggttggcgtttagtggccctcgattatagccaaattgaattacgtgtccttgcccatctttctggcgatgagaacctcatccgcgtgtttcaggaaggcaaagacattcacactcaaacggcaagctggatgtttggagtgtcagctgaagcgatcgatcctttgatgcgtcgtgcagcgaagaccatcaatttcggtgttctctacggtatgagtgcccatcgtttgtcgcaggaattaggcattccctatgaagaagctgcggcgttcattcagcgctactttcaaagctatcccaaagttaaagcatggatcgagaagactctcgaagaaggccgcacacgtggttacgtagagaccttatttggacgtcgccgctatgttcccgatttaaacgctcgcgtgaaatctgtccgtgaagccgccgaacgcatggcgttcaacatgcctgtacagggcacggcagctgacctcatgaaacttgcaatggtgcgcctttttccacaattgcgtgaagttggtgcccgcatgctcttgcaggtccacgatgaactcttgttagaagcgccaaaagagcgtgcggaagaggtggcagccctcgcgaaagaggttatggaaggcgtgtggcccttagcggtgcctcttgaagtcgaagttggtattggcgaggattggttggctgccaaaggataatga

SEQ ID NO: 1744 - protein, 841 aa, synthetic construct
  REGION 1..841: note = Variant of DNA polymerase I from Thermus sp. strain 2.9
MHHHHHHGGSGMLPLFEPKGRVLLVDGHHLAYRNFFALKGLTTSRGEPVQGVYGFAKSLLKALKEDGDVVIVVFDAKAPSFRHEAYEAYKAGRAPTPEDFPRQLALMKELVDLLGLERLEVPGFEADDVLATLAKKAEREGYEVQILTADRDLFQLLSPRISVLHPEGHRITPEWLWEKYGLRPEQWVDFRALAGDPSDNIPGVKGIGEKTALKLLKEWGSLENLLKNLDQVKPESVREKILAHLEDLKLSLELSRVRTDLPLEVDFRGRREPDWEGLKAFLERLEFGSLLHEFGLLESPLPAEEAPWPPPEGAFLGYRLSRPEPMWAELLALAASAQGRVYRAEDPHGALRGLKEVRGLLAKDLAVVALREGLDLPPTDDPMLLAYLLDPSNTTPEGVARRYGGEWTEDAAERALLAERLHANLLGRLQGEERLLWLYEEVEKPLSRVLAHMEATGVKLDVAYLEALSLEVAAEMRRLEEEVFRLAGHSFYLNSRDQLERVLFDELGLPPIGKTEKTGKRSTSAAVLEALREVHPIVDKILQYRELAKLKGTYIDPLPALVHPKTGRLHTRFNQTATATGRLSSSDPNLQNIPVRTPLGQKIRRAFVAEEGWRLVALDYSQIELRVLAHLSGDENLIRVFQEGKDIHTQTASWMFGVSAEAIDPLMRRAAKTINFGVLYGMSAHRLSQELGIPYEEAAAFIQRYFQSYPKVKAWIEKTLEEGRTRGYVETLFGRRRYVPDLNARVKSVREAAERMAFNMPVQGTAADLMKLAMVRLFPQLREVGARMLLQVHDELLLEAPKERAEEVAALAKEVMEGVWPLAVPLEVEVGIGEDWLAAKG

SEQ ID NO: 1745 - DNA, 2529 bp, synthetic construct
  misc_feature 1..2529: note = Variant of DNA polymerase I from Thermus sp. strain 2.9
  source 1..2529: mol_type = other DNA
atgcaccatcatcatcatcatggcggtagcggcatgttaccgttgttcgaacctaaaggtcgcgtgcttctggttgatggccatcatctcgcgtatcgtaacttctttgccctgaaaggattaaccaccagccgtggcgagccggtacagggtgtctacggctttgcaaagtcgctcctgaaagctctgaaagaagacggtgatgtggtgattgttgtctttgatgcgaaagcgccaagttttcgccacgaagcgtacgaagcttacaaagccgggcgtgctccaacgccggaagactttcctcgccaattggcgcttatgaaggaattagtggatttgcttggcctcgaacgcttggaagttcccggtttcgaggcagacgacgtattagcgactctcgcaaagaaagccgaacgtgagggctatgaagtccagatcttgacagcagatcgcgatcttttccagcttttatctccgcgcatctcggtgttacacccggaagggcatcgtatcaccccggaatggctctgggagaaatatggtttgcgtcccgaacaatgggtggattttcgcgccttagtgggcgatccgagcgacaatattccgggagttaaaggtatcggcgagaagacggcgctcaagctccttaaagaatgggggtcgttggagaacttgcttaagaatttagatcaggtcaaaccagagtcagtgcgtgagaagattcttgcacacctcgaagacctcaaattaagccgtgaattgtcccgtgtacgcaccgatttgccgctcgaagttgatttccgtggccgccgcgaacctgactgggagggtcttaaagcgtttttagagcgtcttgaatttggttcgctcttgcatgaattcggccttttagaaagcccgttaccagccgaagaagcaccttggccaccgcccgaaggcgcgtttttaggttaccgtttgagtcgcccggaaccgatgtgggccgaattattggctcttgcagcgtctgcccagggacgtgtgtatcgcgcggaagaccctcatggtgcgctccgcggcctcaaagaagtcaatggactccttgccaaagacttagctgttgttgcattgcgcgaaggtcttgatttacctccgactgatgatccaatgcttcttgcgtacctcttggacccgtcaaacacgacgcccgaaggcgtagcccgtcgttacggcggcgagtggaccgaagatgcagctgagcgcgcgttattggccgaacgtttgcacgccaatttattaggacgtttgcaaggcgaggaacgtctcctctggctttacgaagaagtggagaaaccattgagtcgcgtgctcgcgcatatggaagctaccggtgtcaaattagacgtggcgtatttggaggcactcagccttgaagttgctgccgaaatgcgccgcttggaggaagaagtattccgtttagcaggccactccttttatcttaattctcgcgatcagttagaacgtgtgttgttcgatgagcttggtctccctcctatcggcaagacagagaagaccggtaaacgtagcacttcagcggcggttttagaagctcttcgcgaagtccatcccattgtggacaagatcttgcagtaccgcgaactcgcgaaattgaaaggcacctatattgaccctcttccggcattagtccacccgaaaacgggacgcctccatacccgcttcaaccaaacagccacggcgaccggtcgtttgtcctcctctgatccaaaccttcagaatattccagtacgtaccccattgggccagaagatccgccgcgcgtttgtagctgaggagggttggcgtttagtggccctcgattatagccaaattgaattacgtgtccttgcccatctttctggcgatgagaacctcatccgcgtgtttcaggaaggcaaagacattcacactcaaacggcaagctggatgtttggattatcagctgaagcgatcgatcctttgatgcgtcgtgcagcgaagaccatcaatttcggtgttctctacggtatgagtgcccatcgtttgtcgcaggaattaggcattccctatgaggaagctgcggcgttcattcagcgctactttcaaagctatcccaaagttaaagcatggatcgagaagactctcgaagaaggccgcacacgtggttacgtagagaccttatttggacgtcgccgctatgttcccgatttaaacgctcgcgtgaaatctgtccgtgaagccgccgaacgcatggcgttcaacatgcctgtacagggcacggcagctgacctcatgaaacttgcaatggtgcgcctttttccacaattgcgtgaagttggtgcccgcatgctcttgcaggtccacgatgaactcttgttagaagcgccaaaagagcgtgcggaagaggtggcagccctcgcgaaagaggttatggaaggcgtgtggcccttagcggtgcctcttgaagtcgaagttggtattggcgaggattggttggctgccaaaggataatga

SEQ ID NO: 1746 - protein, 841 aa, synthetic construct
  REGION 1..841: note = Variant of DNA polymerase I from Thermus sp. strain 2.9
MHHHHHHGGSGMLPLFEPKGRVLLVDGHHLAYRNFFALKGLTTSRGEPVQGVYGFAKSLLKALKEDGDVVIVVFDAKAPSFRHEAYEAYKAGRAPTPEDFPRQLALMKELVDLLGLERLEVPGFEADDVLATLAKKAEREGYEVQILTADRDLFQLLSPRISVLHPEGHRITPEWLWEKYGLRPEQWVDFRALVGDPSDNIPGVKGIGEKTALKLLKEWGSLENLLKNLDQVKPESVREKILAHLEDLKLSRELSRVRTDLPLEVDFRGRREPDWEGLKAFLERLEFGSLLHEFGLLESPLPAEEAPWPPPEGAFLGYRLSRPEPMWAELLALAASAQGRVYRAEDPHGALRGLKEVNGLLAKDLAVVALREGLDLPPTDDPMLLAYLLDPSNTTPEGVARRYGGEWTEDAAERALLAERLHANLLGRLQGEERLLWLYEEVEKPLSRVLAHMEATGVKLDVAYLEALSLEVAAEMRRLEEEVFRLAGHSFYLNSRDQLERVLFDELGLPPIGKTEKTGKRSTSAAVLEALREVHPIVDKILQYRELAKLKGTYIDPLPALVHPKTGRLHTRFNQTATATGRLSSSDPNLQNIPVRTPLGQKIRRAFVAEEGWRLVALDYSQIELRVLAHLSGDENLIRVFQEGKDIHTQTASWMFGLSAEAIDPLMRRAAKTINFGVLYGMSAHRLSQELGIPYEEAAAFIQRYFQSYPKVKAWIEKTLEEGRTRGYVETLFGRRRYVPDLNARVKSVREAAERMAFNMPVQGTAADLMKLAMVRLFPQLREVGARMLLQVHDELLLEAPKERAEEVAALAKEVMEGVWPLAVPLEVEVGIGEDWLAAKG

SEQ ID NO: 1747 - DNA, 2529 bp, synthetic construct
  misc_feature 1..2529: note = Variant of DNA polymerase I from Thermus sp. strain 2.9
  source 1..2529: mol_type = other DNA
atgcaccatcatcatcatcatggcggtagcggcatgttaccgttgttcgaacctaaaggtcgcgtgcttctggttgatggccatcatctcgcgtatcgtaacttctttgccctgaaaggattaaccaccagccgtggcgagccggtacagggtgtctacggctttgcaaagtcgctcctgaaagctctgaaagaagacggtgatgtggtgattgttgtctttgatgcgaaagcgccaagttttcgccacgaagcgtacgaagcttacaaagccgggcgtgctccaacgccggaagactttcctcgccaattggcgcttatgaaggaattagtggatttgcttggcctcgaacgcttggaagttcccggtttcgaggcagacgacgtattagcgactctcgcaaagaaagccgaacgtgagggctatgaagtccagatcttgacagcagatcgcgatcttttccagcttttatctccgcgcatctcggtgttacacccggaagggcatcgtatcaccccggaatggctctgggagaaatatggtttgcgtcccgaacaatgggtggattttcgcgccttagcgggcgatccgagcgacaatattccgggagttaaaggtatcggcgagaagacggcgctcaagctccttaaagaatgggggtcgttggagaacttgcttaagaatttagatcaggtcaaaccagagtcagtgcgtgagaagattcttgcacacctcgaagacctcaaattaagccgtgaattgtcccgtgtacgcaccgatttgccgctcgaagttgatttccgtggccgccgcgaacctgactgggagggtcttaaagcgtttttagagcgtcttgaatttggttcgctcttgcatgaattcggccttttagaaagcccgttaccagccgaagaagcaccttggccaccgcccgaaggcgcgtttttaggttaccgtttgagtcgcccggaaccgatgtgggccgaattattggctcttgcagcgtctgcccagggacgtgtgtatcgcgcggaagaccctcatggtgcgctccgcggcctcaaagaagtcaatggactccttgccaaagacttagctgttgttgcattgcgcgaaggtcttgatttacctccgactgatgatccaatgcttcttgcgtacctcttggacccgtcaaacacgacgcccgaaggcgtagcccgtcgttacggcggcgagtggaccgaagatgcaggtgagcgcgcgttattggccgaacgtttgcacgccaatttattaggacgtttgcaaggcgaggaacgtctcctctggctttacgaagaagtggagaaaccattgagtcgcgtgctcgcgcatatggaagctaccggtgtcaaattagacgtggcgtatttggaggcactcagccttgaagttgctgccgaaatgcgccgcttggaggaagaagtattccgtttagcaggccactccttttatcttaattctcgcgatcagttagaacgtgtgttgttcgatgaacttggtctccctcctatcggcaagacagagaagaccggtaaacgtagcacttcagcggcggttttagaagctcttcgcgaagtccatcccattgtggacaagatcttgcagtaccgcgaactcgcgaaattgaaaggcacctatattgaccctcttccggcattagtccacccgaaaacgggacgcctccatacccgcttcaaccaaacagccacggcgaccggtcgtttgtcctcctctgatccaaaccttcagaatattccagtacgtaccccattgggccagaagatccgccgcgcgtttgtagctgaggagggttggcgtttagtggccctcgattatagccaaattgaattacgtgtccttgcccatctttctggcgatgagaacctcatccgcgtgtttcaggaaggcaaagacattcacactcaaacggcaagctggatgtttggattatcagctgaagcgatcgatcctttgatgcgtcgtgcagcgaagaccatcaatttcggtgttctctacggtatgagtgcccatcgtttgtcgcaggaattaggcattccctatgaagaagctgcggcgttcattcagcgctactttcaaagctatcccaaagttaaagcatggatcgagaagactctcgaagaaggccgcacacgtggttacgtagagaccttatttggacgtcgccgctatgttcccgatttaaacgctcgcgtgaaatctgtccgtgaagccgccgaacgcatggcgttcaacatgcctgtacagggcacggcagctgacctcatgaaacttgcaatggtgcgcctttttccacaattgcgtgaagttggtgcccgcatgctcttgcaggtccacgatgaactcttgttagaagcgccaaaagagcgtgcggaagaggtggcagccctcgcgaaagaggttatggaaggcgtgtggcccttagcggtgcctcttgaagtcgaagttggtattggcgaggattggttggctgccaaaggataatga

SEQ ID NO: 1748 - protein, 841 aa, synthetic construct
  REGION 1..841: note = Variant of DNA polymerase I from Thermus sp. strain 2.9
MHHHHHHGGSGMLPLFEPKGRVLLVDGHHLAYRNFFALKGLTTSRGEPVQGVYGFAKSLLKALKEDGDVVIVVFDAKAPSFRHEAYEAYKAGRAPTPEDFPRQLALMKELVDLLGLERLEVPGFEADDVLATLAKKAEREGYEVQILTADRDLFQLLSPRISVLHPEGHRITPEWLWEKYGLRPEQWVDFRALAGDPSDNIPGVKGIGEKTALKLLKEWGSLENLLKNLDQVKPESVREKILAHLEDLKLSRELSRVRTDLPLEVDFRGRREPDWEGLKAFLERLEFGSLLHEFGLLESPLPAEEAPWPPPEGAFLGYRLSRPEPMWAELLALAASAQGRVYRAEDPHGALRGLKEVNGLLAKDLAVVALREGLDLPPTDDPMLLAYLLDPSNTTPEGVARRYGGEWTEDAGERALLAERLHANLLGRLQGEERLLWLYEEVEKPLSRVLAHMEATGVKLDVAYLEALSLEVAAEMRRLEEEVFRLAGHSFYLNSRDQLERVLFDELGLPPIGKTEKTGKRSTSAAVLEALREVHPIVDKILQYRELAKLKGTYIDPLPALVHPKTGRLHTRFNQTATATGRLSSSDPNLQNIPVRTPLGQKIRRAFVAEEGWRLVALDYSQIELRVLAHLSGDENLIRVFQEGKDIHTQTASWMFGLSAEAIDPLMRRAAKTINFGVLYGMSAHRLSQELGIPYEEAAAFIQRYFQSYPKVKAWIEKTLEEGRTRGYVETLFGRRRYVPDLNARVKSVREAAERMAFNMPVQGTAADLMKLAMVRLFPQLREVGARMLLQVHDELLLEAPKERAEEVAALAKEVMEGVWPLAVPLEVEVGIGEDWLAAKG

SEQ ID NO: 1749 - DNA, 2529 bp, synthetic construct
  misc_feature 1..2529: note = Variant of DNA polymerase I from Thermus sp. strain 2.9
  source 1..2529: mol_type = other DNA
atgcaccatcatcatcatcatggcggtagcggcatgttaccgttgttcgaacctaaaggtcgcgtgcttctggttgatggccatcatctcgcgtatcgtaacttctttgccctgaaaggattaaccaccagccgtggcgagccggtacagggtgtctacggctttgcaaagtcgctcctgaaagctctgaaagaagacggtgatgtggtgattgttgtctttgatgcgaaagcgccaagttttcgccacgaagcgtacgaagcttacaaagccgggcgtgctccaacgccggaagactttcctcgccaattggcgcttatgaaggaattagtggatttgcttggcctcgaacgcttggaagttcccggtttcgaggcagacgacgtattagcgactctcgcaaagaaagccgaacgtgagggctatgaagtccagatcttgacagcagatcgcgatcttttccagcttttatctccgcgcatctcggtgttacacccggaagggcatcgtatcaccccggaatggctctgggagaaatatggtttgcgtcccgaacaatgggtggattttcgcgccttagcaggcgatccgagcgacaatattccgggagttaaaggtatcggcgagaagacggcgctcaagctccttaaagaatgggggtcgttggagaacttgcttaagaatttagatcaggtcaaaccagagtcagtgcgtgagaagattcttgcacacctcgaagacctcaaattaagccgcgaattgtcccgtgtacgcaccgatttgccgctcgaagttgatttccgtggccgccgcgaacctgactgggagggtcttaaagcgtttttagagcgtcttgaatttggttcgctcttgcatgaattcggccttttagaaagcccgttaccagccgaagaagcaccttggccaccgcccgaaggcgcgtttttaggttaccgtttgagtcgcccggaaccgatgtgggccgaattattggctcttgcagcgtctgcccagggacgtgtgtatcgcgcggaagaccctcatggtgcgctccgcggcctcaaagaagtccgtggactccttgccaaagacttagctgttgttgcattgcgcgaaggtcttgatttacctccgactgatgatccaatgcttcttgcgtacctcttggacccgtcaaacacgacgcccgaaggcgtagcccgtcgttacggcggcgagtggaccgaagatgcaggcgagcgcgcgttattggccgaacgtttgcacgccaatttattaggacgtttgcaaggcgaggaacgtctcctctggctttacgaagaagtggagaaaccattgagtcgcgtgctcgcgcatatggaagctaccggtgtcaaattagacgtggcgtatttggaggcactcagccttgaagttgctgccgaaatgcgccgcttggaggaagaagtattccgtttagcaggccactccttttatcttaattctcgcgatcagttagaacgtgtgttgttcgatgaacttggtctccctcctatcggcaagacagagaagaccggtaaacgtagcacttcagcggcggttttagaagctcttcgcgaagtccatcccattgtggacaagatcttgcagtaccgcgaactcgcgaaattgaaaggcacctatattgaccctcttccggcattagtccacccgaaaacgggacgcctccatacccgcttcaaccaaacagccacggcgaccggtcgtttgtcctcctctgatccaaaccttcagaatattccagtacgtaccccattgggccagaagatccgccgcgcgtttgtagctgaggagggttggcgtttagtggccctcgattatagccaaattgaattacgtgtccttgcccatctttctggcgatgagaacctcatccgcgtgtttcaggaaggcaaagacattcacactcaaacggcaagctggatgtttggattatcagctgaagcgatcgatcctttgatgcgtcgtgcagcgaagaccatcaatttcggtgttctctacggtatgagtgcccatcgtttgtcgcaggaattaggcattccctatgaagaagctgcggcgttcattcagcgctactttcaaagctatcccaaagttaaagcatggatcgagcggactctcgaagaaggccgcacacgtggttacgtagagaccttatttggacgtcgccgctatgttcccgatttaaacgctcgcgtgaaatctgtccgtgaagccgccgaacgcatggcgttcaacatgcctgtacagggcacggcagctgacctcatgaaacttgcaatggtgcgcctttttccacaattgcgtgaagttggtgcccgcatgctcttgcaggtccacgatgaactcttgttagaagcgccaaaagagcgtgcggaagaggtggcagccctcgcgaaagaggttatggaaggcgtgtggcccttagcggtgcctcttgaagtcgaagttggtattggcgaggattggttggctgccaaaggataatga

SEQ ID NO: 1750 - protein, 841 aa, synthetic construct
  REGION 1..841: note = Variant of DNA polymerase I from Thermus sp. strain 2.9
MHHHHHHGGSGMLPLFEPKGRVLLVDGHHLAYRNFFALKGLTTSRGEPVQGVYGFAKSLLKALKEDGDVVIVVFDAKAPSFRHEAYEAYKAGRAPTPEDFPRQLALMKELVDLLGLERLEVPGFEADDVLATLAKKAEREGYEVQILTADRDLFQLLSPRISVLHPEGHRITPEWLWEKYGLRPEQWVDFRALAGDPSDNIPGVKGIGEKTALKLLKEWGSLENLLKNLDQVKPESVREKILAHLEDLKLSRELSRVRTDLPLEVDFRGRREPDWEGLKAFLERLEFGSLLHEFGLLESPLPAEEAPWPPPEGAFLGYRLSRPEPMWAELLALAASAQGRVYRAEDPHGALRGLKEVRGLLAKDLAVVALREGLDLPPTDDPMLLAYLLDPSNTTPEGVARRYGGEWTEDAGERALLAERLHANLLGRLQGEERLLWLYEEVEKPLSRVLAHMEATGVKLDVAYLEALSLEVAAEMRRLEEEVFRLAGHSFYLNSRDQLERVLFDELGLPPIGKTEKTGKRSTSAAVLEALREVHPIVDKILQYRELAKLKGTYIDPLPALVHPKTGRLHTRFNQTATATGRLSSSDPNLQNIPVRTPLGQKIRRAFVAEEGWRLVALDYSQIELRVLAHLSGDENLIRVFQEGKDIHTQTASWMFGLSAEAIDPLMRRAAKTINFGVLYGMSAHRLSQELGIPYEEAAAFIQRYFQSYPKVKAWIERTLEEGRTRGYVETLFGRRRYVPDLNARVKSVREAAERMAFNMPVQGTAADLMKLAMVRLFPQLREVGARMLLQVHDELLLEAPKERAEEVAALAKEVMEGVWPLAVPLEVEVGIGEDWLAAKG

SEQ ID NO: 1751 - DNA, 2529 bp, synthetic construct
  misc_feature 1..2529: note = Variant of DNA polymerase I from Thermus sp. strain 2.9
  source 1..2529: mol_type = other DNA
atgcaccatcatcatcatcatggcggtagcggcatgttaccgttgttcgaacctaaaggtcgcgtgcttctggttgatggccatcatctcgcgtatcgtaacttctttgccctgaaaggattaaccaccagccgtggcgagccggtacagggtgtctacggctttgcaaagtcgctcctgaaagctctgaaagaagacggtgatgtggtgattgttgtctttgatgcgaaagcgccaagttttcgccacgaagcgtacgaagcttacaaagccgggcgtgctccaacgccggaagactttcctcgccaattggcgcttatgaaggaattagtggatttgcttggcctcgaacgcttggaagttcccggtttcgaggcagacgacgtattagcgactctcgcaaagaaagccgaacgtgagggctatgaagtccagatcttgacagcagatcgcgatcttttccagcttttatctccgcgcatctcggtgttacacccggaagggcatcgtatcaccccggaatggctctgggagaaatatggtttgcgtcccgaacaatgggtggattttcgcgccttagcaggcgatccgagcgacaatattccgggagttaaaggtatcggcgagaagacggcgctcaagctccttaaaacttgggggtcgttggagaacttgcttaagaatttagatcaggtcaaaccagagtcagtgcgtgagaagattcttgcacacctcgaagacctcaaattaagccgcgaattgtcccgtgtacgcaccgatttgccgctcgaagttgatttccgtggccgccgcgaacctgactgggagggtcttaaagcgtttttagagcgtcttgaatttggttcgctcttgcatgaattcggccttttagaaagcccgttaccagccgaagaagcaccttggccaccgcccgaaggcgcgtttttaggttaccgtttgagtcgcccggaaccgatgtgggccgaattattggctcttgcagcgtctgcccagggacgtgtgtatcgcgcggaagaccctcatggtgcgctccgcggcctcaaagaagtccgtggactccttgccaaagacttagctgttgttgcattgcgcgaaggtcttgatttacctccgactgatgatccaatgcttcttgcgtacctcttggacccgtcaaacacgacgcccgaaggcgtagcccgtcgttacggcggcgagtggaccgaagatgcaggcgagcgcgcgttattggccgaacgtttgcacgccaatttattaggacgtttgcaaggcgaggaacgtctcctctggctttacgaagaagtggagaaaccattgagtcgcgtgctcgcgcatatggaagctaccggtgtcaaattagacgtggcgtatttggaggcactcagccttgaagttgctgccgaaatgcgccgcttggaggaagaagtattccgtttagcaggccactccttttatcttaattctcgcgatcagttagaacgtgtgttgttcgatgaacttggtctccctcctatcggcaagacagagaagaccggtaaacgtagcacttcagcggcggttttagaagctcttcgcgaagtccatcccattgtggacaagatcttgcagtaccgcgaactcgcgaaattgaaaggcacctatattgaccctcttccggcattagtccacccgaaaacgggacgcctccatacccgcttcaaccaaacagccacggcgaccggtcgtttgtcctcctctgatccaaaccttcagaatattccagtacgtaccccattgggccagaagatccgccgcgcgtttgtagctgaggagggttggcgtttagtggccctcgattatagccaaattgaattacgtgtccttgcccatctttctggcgatgagaacctcatccgcgtgtttcaggaaggcaaagacattcacactcaaacggcaagctggatgtttggattatcagctgaagcgatcgatcctttgatgcgtcgtgcagcgaagaccatcaatttcggtgttctctacggtatgagtgcccatcgtttgtcgcaggaattaggcattccctatgaagaagctgcggcgttcattcagcgctactttcaaagctatcccaaagttaaagcatggatcgagaagactctcgaagaaggccgcacacgtggttacgtagagaccttatttggacgtcgccgctatgttcccgatttaaacgctcgcgtgaaatctgtccgtgaagccgccgaacgcatggcgttcaacatgcctgtacagggcacggcagctgacctcatgaaacttgcaatggtgcgcctttttccacaattgcgtgaagttggtgcccgcatgctcttgcaggtccacgatgaactcttgttagaagcgccaaaagagcgtgcggaagaggtggcagccctcgcgaaagaggttatggaaggcgtgtggcccttagcggtgcctcttgaagtcgaagttggtattggcgaggattggttggctgccaaaggataatga

SEQ ID NO: 1752 - protein, 841 aa, synthetic construct
  REGION 1..841: note = Variant of DNA polymerase I from Thermus sp. strain 2.9
MHHHHHHGGSGMLPLFEPKGRVLLVDGHHLAYRNFFALKGLTTSRGEPVQGVYGFAKSLLKALKEDGDVVIVVFDAKAPSFRHEAYEAYKAGRAPTPEDFPRQLALMKELVDLLGLERLEVPGFEADDVLATLAKKAEREGYEVQILTADRDLFQLLSPRISVLHPEGHRITPEWLWEKYGLRPEQWVDFRALAGDPSDNIPGVKGIGEKTALKLLKTWGSLENLLKNLDQVKPESVREKILAHLEDLKLSRELSRVRTDLPLEVDFRGRREPDWEGLKAFLERLEFGSLLHEFGLLESPLPAEEAPWPPPEGAFLGYRLSRPEPMWAELLALAASAQGRVYRAEDPHGALRGLKEVRGLLAKDLAVVALREGLDLPPTDDPMLLAYLLDPSNTTPEGVARRYGGEWTEDAGERALLAERLHANLLGRLQGEERLLWLYEEVEKPLSRVLAHMEATGVKLDVAYLEALSLEVAAEMRRLEEEVFRLAGHSFYLNSRDQLERVLFDELGLPPIGKTEKTGKRSTSAAVLEALREVHPIVDKILQYRELAKLKGTYIDPLPALVHPKTGRLHTRFNQTATATGRLSSSDPNLQNIPVRTPLGQKIRRAFVAEEGWRLVALDYSQIELRVLAHLSGDENLIRVFQEGKDIHTQTASWMFGLSAEAIDPLMRRAAKTINFGVLYGMSAHRLSQELGIPYEEAAAFIQRYFQSYPKVKAWIEKTLEEGRTRGYVETLFGRRRYVPDLNARVKSVREAAERMAFNMPVQGTAADLMKLAMVRLFPQLREVGARMLLQVHDELLLEAPKERAEEVAALAKEVMEGVWPLAVPLEVEVGIGEDWLAAKG

SEQ ID NO: 1753 - DNA, 2529 bp, synthetic construct
  misc_feature 1..2529: note = Variant of DNA polymerase I from Thermus sp. strain 2.9
  source 1..2529: mol_type = other DNA
atgcaccatcatcatcatcatggcggtagcggcatgttaccgttgttcgaacctaaaggtcgcgtgcttctggttgatggccatcatctcgcgtatcgtaacttctttgccctgaaaggattaaccaccagccgtggcgagccggtacagggtgtctacggctttgcaaagtcgctcctgaaagctctgaaagaagacggtgatgtggtgattgttgtctttgatgcgaaagcgccaagttttcgccacgaagcgtacgaagcttacaaagccgggcgtgctccaacgccggaagactttcctcgccaattggcgcttatgaaggaattagtggatttgcttggcctcgaacgcttggaagttcccggtttcgaggcagacgacgtattagcgactctcgcaaagaaagccgaacgtgagggctatgaagtccagatcttgacagcagatcgcgatcttttccagcttttatctccgcgcatctcggtgttacacccggaagggcatcgtatcaccccggaatggctctgggagaaatatggtttgcgtcccgaacaatgggtggattttcgcgccttagtgggcgatccgagcgacaatattccgggagttaaaggtatcggcgagaagacggcgctcaagctccttaaagaatgggggtcgttggagaacttgcttaagaatttagatcaggtcaaaccagagtcagtgcgtgagaagattcttgcacacctcgaagacctcaaattaagccgtgaattgtcccgtgtacgcaccgatttgccgctcgaagttgatttccgtggccgccgcgaacctgactgggagggtcttaaagcgtttttagagcgtcttgaatttggttcgctcttgcatgaattcggccttttagaaagcccgttaccagccgaagaagcaccttggccaccgcccgaaggcgcgtttttaggttaccgtttgagtcgcccggaaccgatgtgggccgaattattggctcttgcagcgtctgcccagggacgtgtgtatcgcgcggaagaccctcatggtgcgctccgcggcctcaaagaagtccgtggactccttgccaaagacttagctgttgttgcattgcgcgaaggtcttgatttacctccgactgatgatccaatgcttcttgcgtacctcttggacccgtcaaacacgacgcccgaaggcgtagcccgtcgttacggcggcgagtggaccgaagatgcagctgagcgcgcgttattggccgaacgtttgcacgccaatttattaggacgtttgcaaggcgaggaacgtctcctctggctttacgaagaagtggagaaaccattgagtcgcgtgctcgcgcatatggaagctaccggtgtcaaattagacgtggcgtatttggagaatctcagccttgaagttgctgccgaaatgcgccgcttggaggaagaagtattccgtttagcaggccactccttttatcttaattctcgcgatcagttagaacgtgtgttgttcgatgagcttggtctccctcctatcggcaagacagagaagaccggtaaacgtagcacttcagcggcggttttagaagctcttcgcgaagtccatcccattgtggacaagatcttgcagtaccgcgaactcgcgaaattgaaaggcacctatattgaccctcttccggcattagtccacccgaaaacgggacgcctccatacccgcttcaaccaaacagccacggcgaccggtcgtttgtcctcctctgatccaaaccttcagaatattccagtacgtaccccattgggccagaagatccgccgcgcgtttgtagctgaggagggttggcgtttagtggccctcgattatagccaaattgaattacgtgtccttgcccatctttctggcgatgagaacctcatccgcgtgtttcaggaaggcaaagacattcacactcaaacggcaagctggatgtttggactgtcagctgaagcgatcgatcctttgatgcgtcgtgcagcgaagaccatcaatttcggtgttctctacggtatgagtgcccatcgtttgtcgcaggaattaggcattccctatgaggaagctgcggcgttcattcagcgctactttcaaagctatcccaaagttaaagcatggatcgagaagactctcgaagaaggccgcacacgtggttacgtagagaccttatttggacgtcgccgctatgttcccgatttaaccgctcgcgtgaaatctgtccgtgaagccgccgaacgcatggcgttcaacatgcctgtacagggcacggcagctgacctcatgaaacttgcaatggtgcgcctttttccacaattgcgtgaagttggtgcccgcatgctcttgcaggtccacgatgaactcttgttagaagcgccaaaagagcgtgcggaagaggtggcagccctcgcgaaagaggttatggaaggcgtgtggcccttagcggtgcctcttgaagtcgaagttggtattggcgaggattggttggctgccaaaggataatga

SEQ ID NO: 1754 - protein, 841 aa, synthetic construct
  REGION 1..841: note = Variant of DNA polymerase I from Thermus sp. strain 2.9
MHHHHHHGGSGMLPLFEPKGRVLLVDGHHLAYRNFFALKGLTTSRGEPVQGVYGFAKSLLKALKEDGDVVIVVFDAKAPSFRHEAYEAYKAGRAPTPEDFPRQLALMKELVDLLGLERLEVPGFEADDVLATLAKKAEREGYEVQILTADRDLFQLLSPRISVLHPEGHRITPEWLWEKYGLRPEQWVDFRALVGDPSDNIPGVKGIGEKTALKLLKEWGSLENLLKNLDQVKPESVREKILAHLEDLKLSRELSRVRTDLPLEVDFRGRREPDWEGLKAFLERLEFGSLLHEFGLLESPLPAEEAPWPPPEGAFLGYRLSRPEPMWAELLALAASAQGRVYRAEDPHGALRGLKEVRGLLAKDLAVVALREGLDLPPTDDPMLLAYLLDPSNTTPEGVARRYGGEWTEDAAERALLAERLHANLLGRLQGEERLLWLYEEVEKPLSRVLAHMEATGVKLDVAYLENLSLEVAAEMRRLEEEVFRLAGHSFYLNSRDQLERVLFDELGLPPIGKTEKTGKRSTSAAVLEALREVHPIVDKILQYRELAKLKGTYIDPLPALVHPKTGRLHTRFNQTATATGRLSSSDPNLQNIPVRTPLGQKIRRAFVAEEGWRLVALDYSQIELRVLAHLSGDENLIRVFQEGKDIHTQTASWMFGLSAEAIDPLMRRAAKTINFGVLYGMSAHRLSQELGIPYEEAAAFIQRYFQSYPKVKAWIEKTLEEGRTRGYVETLFGRRRYVPDLTARVKSVREAAERMAFNMPVQGTAADLMKLAMVRLFPQLREVGARMLLQVHDELLLEAPKERAEEVAALAKEVMEGVWPLAVPLEVEVGIGEDWLAAKG

SEQ ID NO: 1755 - DNA, 2529 bp, synthetic construct
  misc_feature 1..2529: note = Variant of DNA polymerase I from Thermus sp. strain 2.9
  source 1..2529: mol_type = other DNA
atgcaccatcatcatcatcatggcggtagcggcatgttaccgttgttcgaacctaaaggtcgcgtgcttctggttgatggccatcatctcgcgttgcgtaacttctttgccctgaaaggattaaccaccagccgtggcgagccggtacagggtgtctacggctttgcaaagtcgctcctgaaagctctgaaagaagacggtgatgtggtgattgttgtctttgatgcgaaagcgccaagttttcgccacgaagcgtacgaagcttacaaagccgggcgtgctccaacgccggaagactttcctcgccaattggcgcttatgaaggaattagtggatttgcttggcctcgaacgcttggaagttcccggtttcgaggcagacgacgtattagcgactctcgcaaagaaagccgaacgtgagggctatgaagtccagatcttgacagcagatcgcgatcttttccagcttttatctccgcgcatctcggtgttacacccggaagggcatcgtatcaccccggaatggctctgggagaaatatggtttgcgtcccgaacaatgggtggattttcgcgccttagcaggcgatccgagcgacaatattccgggagttaaaggtatcggcgagaagacggcgctcaagctccttaaagaatgggggtcgttggagaacttgcttaagaatttagatcaggtcaaaccagagtcagtgcgtgagaagattcttgcacacctcgaagacctcaaattaagccgcgaattgtcccgtgtacgcaccgatttgccgctcgaagttgatttccgtggccgccgcgaacctgactgggagggtcttaaagcgtttttagagcgtcttgaatttggttcgctcttgcatgaattcggccttttagaaagcccgttaccagccgaagaagcaccttggccaccgcccgaaggcgcgtttttaggttaccgtttgagtcgcccggaaccgatgtgggccgaattattggctcttgcagcgtctgcccagggacgtgtgtatcgcgcggaagaccctcatggtgcgctccgcggcctcaaagaagtccgtggactccttgccaaagacttagctgttgttgcattgcgcgaaggtcttgatttacctccgactgatgatccaatgcttcttgcgtacctcttggacccgtcaaacacgacgcccgaaggcgtagcccgtcgttacggcggcgagtggaccgaagatgcaggcgagcgcgcgttattggccgaacgtttgcacgccaatttattaggacgtttgcaaggcgaggaacgtctcctctggctttacgaagaagtggagaaaccattgagtcgcgtgctcgcgcatatggaagctaccggtgtcaaattagacgtggcgtatttggaggcactcagccttgaagttgctgccgaaatgcgccgcttggaggaagaagtattccgtttagcaggccactccttttatcttaattctcgcgatcagttagaacgtgtgttgttcgatgaacttggtctccctcctatcggcaagacagagaagaccggtaaacgtagcacttcagcggcggttttagaagctcttcgcgaagtccatcccattgtggacaagatcttgcagtaccgcgaactcgcgaaattgaaaggcacctatattgaccctcttccggcattagtccacccgaaaacgggacgcctccatacccgcttcaaccaaacagccacggcgaccggtcgtttgtcctcctctgatccaaaccttcagaatattccagtacgtaccccattgggccagaagatccgccgcgcgtttgtagctgaggagggttggcgtttagtggccctcgattatagccaaattgaattacgtgtccttgcccatctttctggcgatgagaacctcatccgcgtgtttcaggaaggcaaagacattcacactcaaacggcaagctggatgtttggattatcagctgaagcgatcgatcctttgatgcgtcgtgcagcgaagaccatcaatttcggtgttctctacggtatgagtgcccatcgtttgtcgcaggaattaggcattccctatgaagaagctgcggcgttcattcagcgctactttcaaagctatcccaaagttaaagcatggatcgagaagactctcgaagaaggccgcacacgtggttacgtagagaccttatttggacgtcgccgctatgttcccgatttaaacgctcgcgtgaaatctgtccgtgaagccgccgaacgcatggcgttcaacatgcctgtacagggcacggcagctgacctcatgaaacttgcaatggtgcgcctttttccacaattgcgtgaagttggtgcccgcatgctcttgcaggtccacgatgaactcttgttagaagcgccaaaagagcgtgcggaagaggtggcagccctcgcgaaagaggttatggaaggcgtgtggcccttagcggtgcctcttgaagtcgaagttggtattggcgaggattggttggctgccaaaggataatga

SEQ ID NO: 1756 - protein, 841 aa, synthetic construct
  REGION 1..841: note = Variant of DNA polymerase I from Thermus sp. strain 2.9
MHHHHHHGGSGMLPLFEPKGRVLLVDGHHLALRNFFALKGLTTSRGEPVQGVYGFAKSLLKALKEDGDVVIVVFDAKAPSFRHEAYEAYKAGRAPTPEDFPRQLALMKELVDLLGLERLEVPGFEADDVLATLAKKAEREGYEVQILTADRDLFQLLSPRISVLHPEGHRITPEWLWEKYGLRPEQWVDFRALAGDPSDNIPGVKGIGEKTALKLLKEWGSLENLLKNLDQVKPESVREKILAHLEDLKLSRELSRVRTDLPLEVDFRGRREPDWEGLKAFLERLEFGSLLHEFGLLESPLPAEEAPWPPPEGAFLGYRLSRPEPMWAELLALAASAQGRVYRAEDPHGALRGLKEVRGLLAKDLAVVALREGLDLPPTDDPMLLAYLLDPSNTTPEGVARRYGGEWTEDAGERALLAERLHANLLGRLQGEERLLWLYEEVEKPLSRVLAHMEATGVKLDVAYLEALSLEVAAEMRRLEEEVFRLAGHSFYLNSRDQLERVLFDELGLPPIGKTEKTGKRSTSAAVLEALREVHPIVDKILQYRELAKLKGTYIDPLPALVHPKTGRLHTRFNQTATATGRLSSSDPNLQNIPVRTPLGQKIRRAFVAEEGWRLVALDYSQIELRVLAHLSGDENLIRVFQEGKDIHTQTASWMFGLSAEAIDPLMRRAAKTINFGVLYGMSAHRLSQELGIPYEEAAAFIQRYFQSYPKVKAWIEKTLEEGRTRGYVETLFGRRRYVPDLNARVKSVREAAERMAFNMPVQGTAADLMKLAMVRLFPQLREVGARMLLQVHDELLLEAPKERAEEVAALAKEVMEGVWPLAVPLEVEVGIGEDWLAAKG

SEQ ID NO: 1757 - DNA, 2529 bp, synthetic construct
  misc_feature 1..2529: note = Variant of DNA polymerase I from Thermus sp. strain 2.9
  source 1..2529: mol_type = other DNA
atgcaccatcatcatcatcatggcggtagcggcgtgttaccgctgttcgagcctaaaggtcgcgtgcttctggttgatggccatcatctcgcgtatcgtaacttctttgccctgaaaggattaaccaccagccgtggcgagccggtacagggtgtctacggctttgcaaagtcgctcctgaaagctctgaaagaagacggtgatgtggtgattgttgtctttgatgcgaaagcgccaagttttcgccacgaagcgtacgaagcttacaaagccgggcgtgctccaacgccggaagactttcctcgccaattggcgcttatgaaggaattagtggatttgcttggcctcgaacgcttggaagttcccggtttcgaggcagacgacgtattagcgactctcgcaaagaaagccgaacgtgagggctatgaagtccagatcttgacagcagatcgcgatcttttccagcttttatctccgcgcatctcggtgttacacccggaagggcatcgtatcaccccggaatggctctgggagaaatatggtttgcgtcccgaacaatgggtggattttcgcgccttagcaggcgatccgagcgacaatattccgggagttaaaggtatcggcgagaagacggcgctcaagctccttaaagaatgggggtcgttggagaacttgcttaagaatttagatcaggtcaaaccagagtcagtgcgtgagaagattcttgcacacctcgaagacctcaaattaagcctggaattgtcccgtgtacgcaccgatttgccgctcgaagttgatttccgtggccgccgcgaacctgactgggagggtcttaaagcgtttttagagcgtcttgaatttggttcgctcttgcatgaattcggccttttagaaagcccgttaccagccgaagaagcaccttggccaccgcccgaaggcgcgtttttaggttaccgtttgagtcgcccggaaccgatgtgggccgaattattggctcttgcagcgtctgcccagggacgtgtgtatcgcgcggaagaccctcatggtgcgctccgcggcctcaaagaagtccgtggactccttgccaaagacttagctgttgttgcattgcgcgaaggtcttgatttacctccgactgatgatccaatgcttcttgcgtacctcttggacccgtcaaacacgacgcccgaaggcgtagcccgtcgttacggcggcgagtggaccgaagatgcagggaaacgcgcgttattggccgaacgtttgcacgccaatttattaggacgtttgcaaggcgaggaacgtctcctctggctttacgaagaagtggagaaaccattgagtcgcgtgctcgcgcatatggaagctaccggtgtcaaattagacgtggcgtatttggaggcactcagccttgaagttgctgccgaaatgcgccgcttggaggaagaagtattccgtttagcaggccactcctttcgccttaattctcgcgatcagttagaacgtgtgttgttcgatgaacttggtctccctcctatcggcaagacagagaagaccggtaaacgtagcacttcagcggcggttttagaagctcttcgcgaagtccatcccattgtggacaagatcttgcagtaccgcgaactcgcgaaattgaaaggcacctatattgaccctcttccggcattagtccacccgaaaacgggacgcctccatacccgcttcaaccaaacagccacggcgaccggtcgtttgtcctcctctgatccaaaccttcagaatattccagtacgtaccccattgggccagaagatccgccgcgcgtttgtagctgaggagggttggcgtttagtggccctcgattatagccaaattgaattacgtgtccttgcccatctttctggcgatgagaacctcatccgcgtgtttcaggaaggcaaagacattcacactcaaacggcaagctggatgtttggattatcagctgaagcgatcgatcctttgatgcgtcgtgcagcgaagaccatcaatttcggtgttctctacggtatgagtgcccatcgtttgtcgcaggaattaggcattccctatgaagaagctgcggcgttcattcagcgttactttcaaagctatcccaaagttaaagcatggatcgagaagactctcgaagaaggccgcacacgtggttacgtagagaccttatttggacgtcgccgctatgttcccgatttaaacgctcgcgtgaaatctgtccgtgaagccgccgaacgcatggcgttcaacatgcctgtacagggcacggcagctgacctcatgaaacttgcaatggtgcgcctttttccacaattgcgtgaagttggtgcccgcatgctcttgcaggtccacgatgaactcttgttagaagcgccaaaagagcgtgcggaagaggtggcagccctcgcgaaagaggttatggaaggcgtgtggcccttagcggtgcctcttgaagtcgaagttggtattggcgaggattggttggctgccaaaggataatga

SEQ ID NO: 1758 - protein, 841 aa, synthetic construct
  REGION 1..841: note = Variant of DNA polymerase I from Thermus sp. strain 2.9
MHHHHHHGGSGVLPLFEPKGRVLLVDGHHLAYRNFFALKGLTTSRGEPVQGVYGFAKSLLKALKEDGDVVIVVFDAKAPSFRHEAYEAYKAGRAPTPEDFPRQLALMKELVDLLGLERLEVPGFEADDVLATLAKKAEREGYEVQILTADRDLFQLLSPRISVLHPEGHRITPEWLWEKYGLRPEQWVDFRALAGDPSDNIPGVKGIGEKTALKLLKEWGSLENLLKNLDQVKPESVREKILAHLEDLKLSLELSRVRTDLPLEVDFRGRREPDWEGLKAFLERLEFGSLLHEFGLLESPLPAEEAPWPPPEGAFLGYRLSRPEPMWAELLALAASAQGRVYRAEDPHGALRGLKEVRGLLAKDLAVVALREGLDLPPTDDPMLLAYLLDPSNTTPEGVARRYGGEWTEDAGKRALLAERLHANLLGRLQGEERLLWLYEEVEKPLSRVLAHMEATGVKLDVAYLEALSLEVAAEMRRLEEEVFRLAGHSFRLNSRDQLERVLFDELGLPPIGKTEKTGKRSTSAAVLEALREVHPIVDKILQYRELAKLKGTYIDPLPALVHPKTGRLHTRFNQTATATGRLSSSDPNLQNIPVRTPLGQKIRRAFVAEEGWRLVALDYSQIELRVLAHLSGDENLIRVFQEGKDIHTQTASWMFGLSAEAIDPLMRRAAKTINFGVLYGMSAHRLSQELGIPYEEAAAFIQRYFQSYPKVKAWIEKTLEEGRTRGYVETLFGRRRYVPDLNARVKSVREAAERMAFNMPVQGTAADLMKLAMVRLFPQLREVGARMLLQVHDELLLEAPKERAEEVAALAKEVMEGVWPLAVPLEVEVGIGEDWLAAKG

SEQ ID NO: 1759 - DNA, 2529 bp, synthetic construct
  misc_feature 1..2529: note = Variant of DNA polymerase I from Thermus sp. strain 2.9
  source 1..2529: mol_type = other DNA
atgcaccatcatcatcatcatggcggtagcggcatgttaccgttgttcgaacctaaaggtcgcgtgcttctggttgatggccatcatctcgcgtatcgtaacttctttgccctgaaaggattaaccaccagccgtggcgagccggtacagggtgtctacggctttgcaaagtcgctcctgaaagctctgaaagaagacggtgatgtggtgattgttgtctttgatgcgaaagcgccaagttttcgccacgaagcgtacgaagcttacaaagccgggcgtgctccaacgccggaagactttcctcgccaattggcgcttatgaaggaattagtggatttgcttggcctcgaacgcttggaagttcccggtttcgaggcagacgacgtattagcgactctcgcaaagaaagccgaacgtgagggctatgaagtccagatcttgacagcagatcgcgatcttttccagcttttatctccgcgcatctcggtgttacacccggaagggcatcgtatcaccccggaatggctctgggagaaatatggtttgcgtcccgaacaatgggtggattttcgcgccttagcaggcgatccgagcgacaatattccgggagttaaaggtatcggcgagaagacggcgctcaagctccttaaagaatgggggtcgttggagaacttgcttaagaatttagatcaggtcaaaccagagtcagtgcgtgagaagattcttgcacacctcgaagacctcaaattaagccgcgaattgtcccgtgtacgcaccgatttgccgctcgaagttgatttccgtggccgccgcgaacctgactgggagggtcttaaagcgtttttagagcgtcttgaatttggttcgctcttgcatgaattcggccttttagaaagcccgttaccagccgaagaagcaccttggccaccgcccgaaggcgcgtttttaggttaccgtttgagtcgcccggaaccgatgtgggccgaattattggctcttgcagcgtctgcccagggacgtgtgtatcgcgcggaagaccctcatggtgcgctccgcggcctcaaagaagtccgtggactccttgccaaagacttagctgttgttgcattgcgcgaaggtcttgatttacctccgactgatgatccaatgcttcttgcgtacctcttggacccgtcaaacacgacgcccgaaggcgtagcccgtcgttacggcggcgagtggaccgaagatgcaggcgagcgcgcgttattggccgaacgtttgcacgccaatttattaggacgtttgcaaggcgaggaacgtctcctctggctttacgaagaagtggagaaaccattgagtcgcgtgctcgcgcatatggaagctaccggtgtcaaattagacgtggcgtatttggaggcactcagccttgaagttgctgccgaaatgcgccgcttggaggaagaagtattccgtttagcaggccactccttttatcttaattctcgcgatcagttagaacgtgtgttgttcgatgaacttggtctccctcctatcggcaagacagagaagaccggtaaacgtagcacttcagcggcggttttagaagctcttcgcgaagtccatcccattgtggacaagatcttgcagtaccgcgaactcgcgaaattgaaaggcacctatattgaccctcttccggcattagtccacccgaaaacgggacgcctccatacccgcttcaaccaaacagccacggcgaccggtcgtttgtcctcctctgatccaaaccttcagaatattccagtacgtaccccattgggccagaagatccgccgcgcgtttgtagctgaggagggttggcgtttagtggccctcgattatagccaaattgaattacgtgtccttgcccatctttctggcgatgagaacctcatccgcgtgtttcaggaaggcaaagacattcacactcaaacggcaagctggatgtttggattatcagctgaagcgatcgatcctttgatgcgtcgtgcagcgaagaccatcaatttcggtgttctctacggtatgagtgcccatcgtttgtcgcaggaattaggcattccctatgaagaagctgcggcgttcattcagcagtactttcaaagctatcccaaagttaaagcatggatcgagaagactctcgaagaaggccgcacacgtggttacgtagagaccttatttggacgtcgccgctatgttcccgatttaaacgctcgcgtgaaatctgtccgtgaagccgccgaacgcatggcgttcaacatgcctgtacagggcacggcagctgacctcatgaaacttgcaatggtgcgcctttttccacaattgcgtgaagttggtgcccgcatgctcttgcaggtccacgatgaactcttgttagaagcgccaaaagagcgtgcggaagaggtggcagccctcgcgaaagaggttatggaaggcgtgtggcccttagcggtgcctcttgaagtcgaagttggtattggcgaggattggttggctgccaaaggataatga

SEQ ID NO: 1760 - protein, 841 aa, synthetic construct
  REGION 1..841: note = Variant of DNA polymerase I from Thermus sp. strain 2.9
MHHHHHHGGSGMLPLFEPKGRVLLVDGHHLAYRNFFALKGLTTSRGEPVQGVYGFAKSLLKALKEDGDVVIVVFDAKAPSFRHEAYEAYKAGRAPTPEDFPRQLALMKELVDLLGLERLEVPGFEADDVLATLAKKAEREGYEVQILTADRDLFQLLSPRISVLHPEGHRITPEWLWEKYGLRPEQWVDFRALAGDPSDNIPGVKGIGEKTALKLLKEWGSLENLLKNLDQVKPESVREKILAHLEDLKLSRELSRVRTDLPLEVDFRGRREPDWEGLKAFLERLEFGSLLHEFGLLESPLPAEEAPWPPPEGAFLGYRLSRPEPMWAELLALAASAQGRVYRAEDPHGALRGLKEVRGLLAKDLAVVALREGLDLPPTDDPMLLAYLLDPSNTTPEGVARRYGGEWTEDAGERALLAERLHANLLGRLQGEERLLWLYEEVEKPLSRVLAHMEATGVKLDVAYLEALSLEVAAEMRRLEEEVFRLAGHSFYLNSRDQLERVLFDELGLPPIGKTEKTGKRSTSAAVLEALREVHPIVDKILQYRELAKLKGTYIDPLPALVHPKTGRLHTRFNQTATATGRLSSSDPNLQNIPVRTPLGQKIRRAFVAEEGWRLVALDYSQIELRVLAHLSGDENLIRVFQEGKDIHTQTASWMFGLSAEAIDPLMRRAAKTINFGVLYGMSAHRLSQELGIPYEEAAAFIQQYFQSYPKVKAWIEKTLEEGRTRGYVETLFGRRRYVPDLNARVKSVREAAERMAFNMPVQGTAADLMKLAMVRLFPQLREVGARMLLQVHDELLLEAPKERAEEVAALAKEVMEGVWPLAVPLEVEVGIGEDWLAAKG

SEQ ID NO: 1761 - DNA, 2529 bp, synthetic construct
  misc_feature 1..2529: note = Variant of DNA polymerase I from Thermus sp. strain 2.9
  source 1..2529: mol_type = other DNA
atgcaccatcatcatcatcatggcggtagcggcatgttaccgttgttcgaacctaaaggtcgcgtgcttctggttgatggccatcatctcgcgtatcgtaacttctttgccctgaaaggattaaccaccagccgtggcgagccggtacagggtgtctacggctttgcaaagtcgctcctgaaagctctgaaagaagacggtgatgtggtgattgttgtctttgatgcgaaagcgccaagttttcgccacgaagcgtacgaagcttacaaagccgggcgtgctccaacgccggaagactttcctcgccaattggcgcttatgaaggaattagtggatttgcttggcctcgaacgcttggaagttcccggtttcgaggcagacgacgtattagcgactctcgcaaagaaagccgaacgtgagggctatgaagtccagatcttgacagcagatcgcgatcttttccagcttttatctccgcgcatctcggtgttacacccggaagggcatcgtatcaccccggaatggctctgggagaaatatggtttgcgtcccgaacaatgggtggattttcgcgccttagcaggcgatccgagcgacaatattccgggagttaaaggtatcggcgagaagacggcgctcaagctccttaaagaatgggggtcgttggagaacttgcttaagaatttagatcaggtcaaaccagagtcagtgcgtgagaagattcttgcacacctcgaagacctcaaattaagccgcgaattgtcccgtgtacgcaccgatttgccgctcgaagttgatttccgtggccgccgcgaacctgactgggagggtcttaaagcgtttttagagcgtcttgaatttggttcgctcttgcatgaattcggccttttagaaagcccgttaccagccgaagaagcaccttggccaccgcccgaaggcgcgtttttaggttaccgtttgagtcgcccggaaccgatgtgggccgaattattggctcttgcagcgtctgcccagggacgtgtgtatcgcgcggaagaccctcatggtgcgctccgcggcctcaaagaagtccgtggactccttgccaaagacttagctgttgttgcattgcgcgaaggtcttgatttacctccgactgatgatccaatgcttcttgcgtacctcttggacccgtcaaacacgacgcccgaaggcgtagcccgtcgttacggcggcgagtggaccgaagatgcaggcgagcgcgcgttattggccgaacgtttgcacgccaatttattaggacgtttgcaaggcgaggaacgtctcctctggctttacgaagaagtggagaaaccattgagtcgcgtgctcgcgcatatggaagctaccggtgtcaaattagacgtggcgtatttggaggcactcagccttgaagttgctgccgaaatgcgccgcttggaggaagaagtattccgtttagcaggccactccttttatcttaattctcgcgatcagttagaacgtgtgttgttcgatgaacttggtctccctcctatcggcaagacagagaagaccggtaaacgtagcacttcagcggcggttttagaagctcttcgcgaagtccatcccattgtggacaagatcttgcagtaccgcgaactcgcgaaattgaaaggcacctatattgaccctcttccggcattagtccacccgaaaacgggacgcctccatacccgcttcaaccaaacagccacggcgaccggtcgtttgtcctcctctgatccaaaccttcagaatattccagtacgtaccccattgggccagaagatccgccgcgcgtttgtagctgaggagggttggcgtttagtggccctcgattatagccaaattgaattacgtgtccttgcccatctttctggcgatgagaacctcatccgcgtgtttcaggaaggcaaagacattcacactcaaacggcaagctggatgtttggattatcagctgaagcgatcgatcctttgatgcgtcgtgcagcgaagaccatcaatttcggtgttctctacggtatgagtgcccatcgtttgtcgcaggaattaggcattccctatgaagaagctgcggcgttcattcagcgctactttcaaagctatcccaaagttaaagcatggatcgagaagactctcgaagaaggccgcacacgtggttacgtagagaccttatttggacgtcgccgctatgttcccgatttaaacgctcgcgtgaaatctgtccgtgaagccgccgaacgcatggcgttcaacatgcctgtacagggcacggcagctgacctcatgaaacttgcaatggtgcgcctttttccacaattgcgtgaagttggtgcccgcatgctcttgcaggtccacgatgaactcttgttagaagcgccaaaagagcaggcggaagaggtggcagccctcgcgaaagaggttatggaaggcgtgtggcccttagcggtgcctcttgaagtcgaagttggtattggcgaggattggttggctgccaaaggataatga

SEQ ID NO: 1762 - protein, 841 aa, synthetic construct
  REGION 1..841: note = Variant of DNA polymerase I from Thermus sp. strain 2.9
MHHHHHHGGSGMLPLFEPKGRVLLVDGHHLAYRNFFALKGLTTSRGEPVQGVYGFAKSLLKALKEDGDVVIVVFDAKAPSFRHEAYEAYKAGRAPTPEDFPRQLALMKELVDLLGLERLEVPGFEADDVLATLAKKAEREGYEVQILTADRDLFQLLSPRISVLHPEGHRITPEWLWEKYGLRPEQWVDFRALAGDPSDNIPGVKGIGEKTALKLLKEWGSLENLLKNLDQVKPESVREKILAHLEDLKLSRELSRVRTDLPLEVDFRGRREPDWEGLKAFLERLEFGSLLHEFGLLESPLPAEEAPWPPPEGAFLGYRLSRPEPMWAELLALAASAQGRVYRAEDPHGALRGLKEVRGLLAKDLAVVALREGLDLPPTDDPMLLAYLLDPSNTTPEGVARRYGGEWTEDAGERALLAERLHANLLGRLQGEERLLWLYEEVEKPLSRVLAHMEATGVKLDVAYLEALSLEVAAEMRRLEEEVFRLAGHSFYLNSRDQLERVLFDELGLPPIGKTEKTGKRSTSAAVLEALREVHPIVDKILQYRELAKLKGTYIDPLPALVHPKTGRLHTRFNQTATATGRLSSSDPNLQNIPVRTPLGQKIRRAFVAEEGWRLVALDYSQIELRVLAHLSGDENLIRVFQEGKDIHTQTASWMFGLSAEAIDPLMRRAAKTINFGVLYGMSAHRLSQELGIPYEEAAAFIQRYFQSYPKVKAWIEKTLEEGRTRGYVETLFGRRRYVPDLNARVKSVREAAERMAFNMPVQGTAADLMKLAMVRLFPQLREVGARMLLQVHDELLLEAPKEQAEEVAALAKEVMEGVWPLAVPLEVEVGIGEDWLAAKG

SEQ ID NO: 1763 - DNA, 2529 bp, synthetic construct
  misc_feature 1..2529: note = Variant of DNA polymerase I from Thermus sp. strain 2.9
  source 1..2529: mol_type = other DNA
atgcaccatcatcatcatcatggcggtagcggcatgttaccgttgttcgaacctaaaggtcgcgtgcttctggttgatggccatcatctcgcgtatcgtaacttctttgccctgaaaggattaaccaccagccgtggcgagccggtacagggtgtctacggctttgcaaagtcgctcctgaaagctctgaaagaagacggtgatgtggtgattgttgtctttgatgcgaaagcgccaagttttcgccacgaagcgtacgaagcttacaaagccgggcgtgctccaacgccggaagactttcctcgccaattggcgcttatgaaggaattagtggatttgcttggcctcgaacgcttggaagttcccggtttcgaggcagacgacgtattagcgactctcgcaaagaaagccgaacgtgagggctatgaagtccagatcttgacagcagatcgcgatcttttccagcttttatctccgcgcatctcggtgttacacccggaagggcatcgtatcaccccggaatggctctgggagaaatatggtttgcgtcccgaacaatgggtggattttcgcgccttagcaggcgatccgagcgacaatattccgggagttaaaggtatcggcgagaagacggcgctcaagctccttaaagaatgggggtcgttggagaacttgcttaagaatttagatcaggtcaaaccagagtcagtgcgtgagaagattcttgcacacctcgaagacctcaaattaagccgcgaattgtcccgtgtacgcaccgatttgccgctcgaagttgatttccgtggccgccgcgaacctgactgggagggtcttaaagcgtttttagagcgtcttgaatttggttcgctcttgcatgaattcggccttttagaaagcccgttaccagccgaagaagcaccttggccaccgcccgaaggcgcgtttttaggttaccgtttgagtcgcccggaaccgatgtgggccgaattattggctcttgcagcgtctgcccagggacgtgtgtatcgcgcggaagaccctcatggtgcgctccgcggcctcaaagaagtccgtggactccttgccaaagacttagctgttgttgcattgcgcgaaggtcttgatttacctccgactgatgatccaatgcttcttgcgtacctcttggacccgtcaaacacgacgcccgaaggcgtagcccgtcgttacggcggcgagtggaccgaagatgcaggcgagcgcgcgttattggccgaacgtttgcacgccaatttattaggacgtttgcaaggcgaggaacgtctcctctggctttacgaagaagtggagaaaccattgagtcgcgtgctcgcgcatatggaagctaccggtgtcaaattagacgtggcgtatttggaggcactcagccttgaagttgctgccgaaatgcgccgcttggaggaagaagtattccgtttagcaggccactccttttatcttaattctcgcgatcagttagaacgtgtgttgttcgatgaacttggtctccctcctatcggcaagacagagaagaccggtaaacgtagcacttcagcggcggttttaactgctcttcgcgaagtccatcccattgtggacaagatcttgcagtaccgcgaactcgcgaaattgaaaggcacctatattgaccctcttccggcattagtccacccgaaaacgggacgcctccatacccgcttcaaccaaacagccacggcgaccggtcgtttgtcctcctctgatccaaaccttcagaatattccagtacgtaccccattgggccagaagatccgccgcgcgtttgtagctgaggagggttggcgtttagtggccctcgattatagccaaattgaattacgtgtccttgcccatctttctggcgatgagaacctcatccgcgtgtttcaggaaggcaaagacattcacactcaaacggcaagctggatgtttggattatcagctgaagcgatcgatcctttgatgcgtcgtgcagcgaagaccatcaatttcggtgttctctacggtatgagtgcccatcgtttgtcgcaggaattaggcattccctatgaagaagctgcggcgttcattcagcgctactttcaaagctatcccaaagttaaagcatggatcgagaagactctcgaagaaggccgcacacgtggttacgtagagaccttatttggacgtcgccgctatgttcccgatttaaacgctcgcgtgaaatctgtccgtgaagccgccgaacgcatggcgttcaacatgcctgtacagggcacggcagctgacctcatgaaacttgcaatggtgcgcctttttccacaattgcgtgaagttggtgcccgcatgctcttgcaggtccacgatgaactcttgttagaagcgccaaaagagcgtgcggaagaggtggcagccctcgcgaaagaggttatggaaggcgtgtggcccttagcggtgcctcttgaagtcgaagttggtattggcgaggattggttggctgccaaaggataatga

SEQ ID NO: 1764 - protein, 841 aa, synthetic construct
  REGION 1..841: note = Variant of DNA polymerase I from Thermus sp. strain 2.9
MHHHHHHGGSGMLPLFEPKGRVLLVDGHHLAYRNFFALKGLTTSRGEPVQGVYGFAKSLLKALKEDGDVVIVVFDAKAPSFRHEAYEAYKAGRAPTPEDFPRQLALMKELVDLLGLERLEVPGFEADDVLATLAKKAEREGYEVQILTADRDLFQLLSPRISVLHPEGHRITPEWLWEKYGLRPEQWVDFRALAGDPSDNIPGVKGIGEKTALKLLKEWGSLENLLKNLDQVKPESVREKILAHLEDLKLSRELSRVRTDLPLEVDFRGRREPDWEGLKAFLERLEFGSLLHEFGLLESPLPAEEAPWPPPEGAFLGYRLSRPEPMWAELLALAASAQGRVYRAEDPHGALRGLKEVRGLLAKDLAVVALREGLDLPPTDDPMLLAYLLDPSNTTPEGVARRYGGEWTEDAGERALLAERLHANLLGRLQGEERLLWLYEEVEKPLSRVLAHMEATGVKLDVAYLEALSLEVAAEMRRLEEEVFRLAGHSFYLNSRDQLERVLFDELGLPPIGKTEKTGKRSTSAAVLTALREVHPIVDKILQYRELAKLKGTYIDPLPALVHPKTGRLHTRFNQTATATGRLSSSDPNLQNIPVRTPLGQKIRRAFVAEEGWRLVALDYSQIELRVLAHLSGDENLIRVFQEGKDIHTQTASWMFGLSAEAIDPLMRRAAKTINFGVLYGMSAHRLSQELGIPYEEAAAFIQRYFQSYPKVKAWIEKTLEEGRTRGYVETLFGRRRYVPDLNARVKSVREAAERMAFNMPVQGTAADLMKLAMVRLFPQLREVGARMLLQVHDELLLEAPKERAEEVAALAKEVMEGVWPLAVPLEVEVGIGEDWLAAKG

SEQ ID NO: 1765 - DNA, 2529 bp, synthetic construct
  misc_feature 1..2529: note = Variant of DNA polymerase I from Thermus sp. strain 2.9
  source 1..2529: mol_type = other DNA
atgcaccatcatcatcatcatggcggtagcggcatgttaccgttgttcgaacctaaaggtcgcgtgcttctggttgatggccatcatctcgcgtatcgtaacttctttgccctgaaaaatttaaccaccagccgtggcgagccggtacagggtgtctacggctttgcaaagtcgctcctgaaagctctgaaagaagacggtgatgtggtgattgttgtctttgatgcgaaagcgccaagttttcgccacgaagcgtacgaagcttacaaagccgggcgtgctccaacgccggaagactttcctcgccaattggcgcttatgaaggaattagtggatttgcttggcctcgaacgcttggaagttcccggtttcgaggcagacgacgtattagcgactctcgcaaagaaagccgaacgtgagggctatgaagtccagatcttgacagcagatcgcgatcttttccagcttttatctccgcgcatctcggtgttacacccggaagggcatcgtatcaccccggaatggctctgggagaaatatggtttgcgtcccgaacaatgggtggattttcgcgccttagcaggcgatccgagcgacaatattccgggagttaaaggtatcggcgagaagacggcgctcaagctccttaaagaatgggggtcgttggagaacttgcttaagaatttagatcaggtcaaaccagagtcagtgcgtgagaagattcttgcacacctcgaagacctcaaattaagccgcgaattgtcccgtgtacgcaccgatttgccgctcgaagttgatttccgtggccgccgcgaacctgactgggagggtcttaaagcgtttttagagcgtcttgaatttggttcgctcttgcatgaattcggccttttagaaagcccgttaccagccgaagaagcaccttggccaccgcccgaaggcgcgtttttaggttaccgtttgagtcgcccggaaccgatgtgggccgaattattggctcttgcagcgtctgcccagggacgtgtgtatcgcgcggaagaccctcatggtgcgctccgcggcctcaaagaagtccgtggactccttgccaaagacttagctgttgttgcattgcgcgaaggtcttgatttacctccgactgatgatccaatgcttcttgcgtacctcttggacccgtcaaacacgacgcccgaaggcgtagcccgtcgttacggcggcgagtggaccgaagatgcaggcgagcgcgcgttattggccgaacgtttgcacgccaatttattaggacgtttgcaaggcgaggaacgtctcctctggctttacgaagaagtggagaaaccattgagtcgcgtgctcgcgcatatggaagctaccggtgtcaaattagacgtggcgtatttggaggcactcagccttgaagttgctgccgaaatgcgccgcttggaggaagaagtattccgtttagcaggccactccttttatcttaattctcgcgatcagttagaacgtgtgttgttcgatgaacttggtctccctcctatcggcaagacagagaagaccggtaaacgtagcacttcagcggcggttttagaagctcttcgcgaagtccatcccattgtggacaagatcttgcagtaccgcgaactcgcgaaattgaaaggcacctatattgaccctcttccggcattagtccacccgaaaacgggacgcctccatacccgcttcaaccaaacagccacggcgaccggtcgtttgtcctcctctgatccaaaccttcagaatattccagtacgtaccccattgggccagaagatccgccgcgcgtttgtagctgaggagggttggcgtttagtggccctcgattatagccaaattgaattacgtgtccttgcccatctttctggcgatgagaacctcatccgcgtgtttcaggaaggcaaagacattcacactcaaacggcaagctggatgtttggattatcagctgaagcgatcgatcctttgatgcgtcgtgcagcgaagaccatcaatttcggtgttctctacggtatgagtgcccatcgtttgtcgcaggaattaggcattccctatgaagaagctgcggcgttcattcagcgctactttcaaagctatcccaaagttaaagcatggatcgagaagactctcgaagaaggccgcacacgtggttacgtagagaccttatttggacgtcgccgctatgttcccgatttaaacgctcgcgtgaaatctgtccgtgaagccgccgaacgcatggcgttcaacatgcctgtacagggcacggcagctgacctcatgaaacttgcaatggtgcgcctttttccacaattgcgtgaagttggtgcccgcatgctcttgcaggtccacgatgaactcttgttagaagcgccaaaagagcgtgcggaagaggtggcagccctcgcgaaagaggttatggaaggcgtgtggcccttagcggtgcctcttgaagtcgaagttggtattggcgaggattggttggctgccaaaggataatga

SEQ ID NO: 1766 - protein, 841 aa, synthetic construct
  REGION 1..841: note = Variant of DNA polymerase I from Thermus sp. strain 2.9
MHHHHHHGGSGMLPLFEPKGRVLLVDGHHLAYRNFFALKNLTTSRGEPVQGVYGFAKSLLKALKEDGDVVIVVFDAKAPSFRHEAYEAYKAGRAPTPEDFPRQLALMKELVDLLGLERLEVPGFEADDVLATLAKKAEREGYEVQILTADRDLFQLLSPRISVLHPEGHRITPEWLWEKYGLRPEQWVDFRALAGDPSDNIPGVKGIGEKTALKLLKEWGSLENLLKNLDQVKPESVREKILAHLEDLKLSRELSRVRTDLPLEVDFRGRREPDWEGLKAFLERLEFGSLLHEFGLLESPLPAEEAPWPPPEGAFLGYRLSRPEPMWAELLALAASAQGRVYRAEDPHGALRGLKEVRGLLAKDLAVVALREGLDLPPTDDPMLLAYLLDPSNTTPEGVARRYGGEWTEDAGERALLAERLHANLLGRLQGEERLLWLYEEVEKPLSRVLAHMEATGVKLDVAYLEALSLEVAAEMRRLEEEVFRLAGHSFYLNSRDQLERVLFDELGLPPIGKTEKTGKRSTSAAVLEALREVHPIVDKILQYRELAKLKGTYIDPLPALVHPKTGRLHTRFNQTATATGRLSSSDPNLQNIPVRTPLGQKIRRAFVAEEGWRLVALDYSQIELRVLAHLSGDENLIRVFQEGKDIHTQTASWMFGLSAEAIDPLMRRAAKTINFGVLYGMSAHRLSQELGIPYEEAAAFIQRYFQSYPKVKAWIEKTLEEGRTRGYVETLFGRRRYVPDLNARVKSVREAAERMAFNMPVQGTAADLMKLAMVRLFPQLREVGARMLLQVHDELLLEAPKERAEEVAALAKEVMEGVWPLAVPLEVEVGIGEDWLAAKG

SEQ ID NO: 1767 - DNA, 2529 bp, synthetic construct
  misc_feature 1..2529: note = Variant of DNA polymerase I from Thermus sp. strain 2.9
  source 1..2529: mol_type = other DNA
atgcaccatcatcatcatcatggcggtagcggcatgttaccgttgttcgaacctaaaggtcgcgtgcttctggttgatggccatcatctcgcgtatcgtaacttctttgccctgaaaggattaaccaccagccgtggcgagccggtacagggtgtctacggctttgcaaagtcgctcctgaaagctctgaaagaagacggtgatgtggtgattgttgtctttgatgcgaaagcgccaagttttcgccacgaagcgtacgaagcttacaaagccgggcgtgctccaacgccggaagactttcctcgccaattggcgcttatgaaggaattagtggatttgcttggcctcgaacgcttggaagttcccggtttcgaggcagacgacgtattagcgactctcgcaaagaaagccgaacgtgagggctatgaagtccagatcttgacagcagatcgcgatcttttccagcttttatctccgcgcatctcggtgttacacccggaagggcatcgtatcaccccggaatggctctgggagaaatatggtttgcgtcccgaacaatgggtggattttcgcgccttagcaggcgatccgagcgacaatattccgggagttaaaggtatcggcgagaagacggcgctcaagctccttaaagaatgggggtcgttggagaacttgcttaagaatttagatcaggtcaaaccagagtcagtgcgtgagaagattcttgcacacctcgaagacctcaaattaagccgcgaattgtcccgtgtacgcaccgatttgccgctcgaagttgatttccgtggccgccgcgaacctgactgggagggtcttaaagcgtttttagagcgtcttgaatttggttcgctcttgcatgaattcggccttttagaaagcccgttaccagccgaagaagcaccttggccaccgcccgaaggcgcgtttttaggttaccgtttgagtcgcccggaaccgatgtgggccgaattattggctcttgcagcgtctgcccagggacgtgtgtatcgcgcggaagaccctcatggtgcgctccgcggcctcaaagaagtccgtggactccttgccaaagacttagctgttgttgcattgcgcgaaggtcttgatttacctccgactgatgatccaatgcttcttgcgtacctcttggacccgtcaaacacgacgcccgaaggcgtagcccgtcgttacggcggcgagtggaccgaagatgcaggcgagcgcgcgttattggccgaacgtttgcacgccaatttattaggacgtttgcaaggcgaggaacgtctcctctggctttacgaagaagtggagaaaccattgagtcgcgtgctcgcgcatatggaagctaccggtgtcaaattagacgtggcgtatttggaggcactcagccttgaagttgctgccgaaatgcgccgcttggaggaagaagtattccgtttagcaggccactccttttatcttaattctcgcgatcagttagaacgtgtgttgttcgatgaacttggtctccctcctatcggcaagacagagaagaccggtaaacgtagcacttcagcggcggttttacgggctcttcgcgaagtccatcccattgtggacaagatcttgcagtaccgcgaactcgcgaaattgaaaggcacctatattgaccctcttccggcattagtccacccgaaaacgggacgcctccatacccgcttcaaccaaacagccacggcgaccggtcgtttgtcctcctctgatccaaaccttcagaatattccagtacgtaccccattgggccagaagatccgccgcgcgtttgtagctgaggagggttggcgtttagtggccctcgattatagccaaattgaattacgtgtccttgcccatctttctggcgatgagaacctcatccgcgtgtttcaggaaggcaaagacattcacactcaaacggcaagctggatgtttggattatcagctgaagcgatcgatcctttgatgcgtcgtgcagcgaagaccatcaatttcggtgttctctacggtatgagtgcccatcgtttgtcgcaggaattaggcattccctatgaagaagctgcggcgttcattcagcgctactttcaaagctatcccaaagttaaagcatggatcgagaagactctcgaagaaggccgcacacgtggttacgtagagaccttatttggacgtcgccgctatgttcccgatttaaacgctcgcgtgaaatctgtccgtgaagccgccgaacgcatggcgttcaacatgcctgtacagggcacggcagctgacctcatgaaacttgcaatggtgcgcctttttccacaattgcgtgaagttggtgcccgcatgctcttgcaggtccacgatgaactcttgttagaagcgccaaaagagcgtgcggaagaggtggcagccctcgcgaaagaggttatggaaggcgtgtggcccttagcggtgcctcttgaagtcgaagttggtattggcgaggattggttggctgccaaaggataatga

SEQ ID NO: 1768 - protein, 841 aa, synthetic construct
  REGION 1..841: note = Variant of DNA polymerase I from Thermus sp. strain 2.9
MHHHHHHGGSGMLPLFEPKGRVLLVDGHHLAYRNFFALKGLTTSRGEPVQGVYGFAKSLLKALKEDGDVVIVVFDAKAPSFRHEAYEAYKAGRAPTPEDFPRQLALMKELVDLLGLERLEVPGFEADDVLATLAKKAEREGYEVQILTADRDLFQLLSPRISVLHPEGHRITPEWLWEKYGLRPEQWVDFRALAGDPSDNIPGVKGIGEKTALKLLKEWGSLENLLKNLDQVKPESVREKILAHLEDLKLSRELSRVRTDLPLEVDFRGRREPDWEGLKAFLERLEFGSLLHEFGLLESPLPAEEAPWPPPEGAFLGYRLSRPEPMWAELLALAASAQGRVYRAEDPHGALRGLKEVRGLLAKDLAVVALREGLDLPPTDDPMLLAYLLDPSNTTPEGVARRYGGEWTEDAGERALLAERLHANLLGRLQGEERLLWLYEEVEKPLSRVLAHMEATGVKLDVAYLEALSLEVAAEMRRLEEEVFRLAGHSFYLNSRDQLERVLFDELGLPPIGKTEKTGKRSTSAAVLRALREVHPIVDKILQYRELAKLKGTYIDPLPALVHPKTGRLHTRFNQTATATGRLSSSDPNLQNIPVRTPLGQKIRRAFVAEEGWRLVALDYSQIELRVLAHLSGDENLIRVFQEGKDIHTQTASWMFGLSAEAIDPLMRRAAKTINFGVLYGMSAHRLSQELGIPYEEAAAFIQRYFQSYPKVKAWIEKTLEEGRTRGYVETLFGRRRYVPDLNARVKSVREAAERMAFNMPVQGTAADLMKLAMVRLFPQLREVGARMLLQVHDELLLEAPKERAEEVAALAKEVMEGVWPLAVPLEVEVGIGEDWLAAKG

SEQ ID NO: 1769 - DNA, 2529 bp, synthetic construct
  misc_feature 1..2529: note = Variant of DNA polymerase I from Thermus sp. strain 2.9
  source 1..2529: mol_type = other DNA
atgcaccatcatcatcatcatggcggtagcggcatgttaccgttgttcgaacctaaaggtcgcgtgcttctggttgatggccatcatctcgcgtatcgtaacttctttgccctgaaaggattaaccaccagccgtggcgagccggtacagggtgtctacggctttgcaaagtcgctcctgaaagctctgaaagaagacggtgatgtggtgattgttgtctttgatgcgaaagcgccaagttttcgccacgaagcgtacgaagcttacaaagccgggcgtgctccaacgccggaagactttcctcgccaattggcgcttatgaaggaattagtggatttgcttggcctcgaacgcttggaagttcccggtttcgaggcagacgacgtattagcgactctcgcaaagaaagccgaacgtgagggctatgaagtccagatcttgacagcagatcgcgatcttttccagcttttatctccgcgcatctcggtgttacacccggaagggcatcgtatcaccccggaatggctctgggagaaatatggtttgcgtcccgaacaatgggtggattttcgcgccttagcaggcgatccgagcgacaatattccgggagttaaaggtatcggcgagaagacggcgctcaagctccttaaagaatgggggtcgttggagaacttgcttaagaatttagatcaggtcaaaccagagtcagtgcgtgagaagattcttgcacacctcgaagacctcaaattaagccgcgaattgtcccgtgtacgcaccgatttgccgctcgaagttgatttccgtggccgccgcgaacctgactgggagggtcttaaagcgtttttagagcgtcttgaatttggttcgctcttgcatgaattcggccttttagaaagctggttaccagccgaagaagcaccttggccaccgcccgaaggcgcgtttttaggttaccgtttgagtcgcccggaaccgatgtgggccgaattattggctcttgcagcgtctgcccagggacgtgtgtatcgcgcggaagaccctcatggtgcgctccgcggcctcaaagaagtccgtggactccttgccaaagacttagctgttgttgcattgcgcgaaggtcttgatttacctccgactgatgatccaatgcttcttgcgtacctcttggacccgtcaaacacgacgcccgaaggcgtagcccgtcgttacggcggcgagtggaccgaagatgcaggcgagcgcgcgttattggccgaacgtttgcacgccaatttattaggacgtttgcaaggcgaggaacgtctcctctggctttacgaagaagtggagaaaccattgagtcgcgtgctcgcgcatatggaagctaccggtgtcaaattagacgtggcgtatttggaggcactcagccttgaagttgctgccgaaatgcgccgcttggaggaagaagtattccgtttagcaggccactccttttatcttaattctcgcgatcagttagaacgtgtgttgttcgatgaacttggtctccctcctatcggcaagacagagaagaccggtaaacgtagcacttcagcggcggttttagaagctcttcgcgaagtccatcccattgtggacaagatcttgcagtaccgcgaactcgcgaaattgaaaggcacctatattgaccctcttccggcattagtccacccgaaaacgggacgcctccatacccgcttcaaccaaacagccacggcgaccggtcgtttgtcctcctctgatccaaaccttcagaatattccagtacgtaccccattgggccagaagatccgccgcgcgtttgtagctgaggagggttggcgtttagtggccctcgattatagccaaattgaattacgtgtccttgcccatctttctggcgatgagaacctcatccgcgtgtttcaggaaggcaaagacattcacactcaaacggcaagctggatgtttggattatcagctgaagcgatcgatcctttgatgcgtcgtgcagcgaagaccatcaatttcggtgttctctacggtatgagtgcccatcgtttgtcgcaggaattaggcattccctatgaagaagctgcggcgttcattcagcgctactttcaaagctatcccaaagttaaagcatggatcgagaagactctcgaagaaggccgcacacgtggttacgtagagaccttatttggacgtcgccgctatgttcccgatttaaacgctcgcgtgaaatctgtccgtgaagccgccgaacgcatggcgttcaacatgcctgtacagggcacggcagctgacctcatgaaacttgcaatggtgcgcctttttccacaattgcgtgaagttggtgcccgcatgctcttgcaggtccacgatgaactcttgttagaagcgccaaaagagcgtgcggaagaggtggcagccctcgcgaaagaggttatggaaggcgtgtggcccttagcggtgcctcttgaagtcgaagttggtattggcgaggattggttggctgccaaaggataatga

SEQ ID NO: 1770 - protein, 841 aa, synthetic construct
  REGION 1..841: note = Variant of DNA polymerase I from Thermus sp. strain 2.9
MHHHHHHGGSGMLPLFEPKGRVLLVDGHHLAYRNFFALKGLTTSRGEPVQGVYGFAKSLLKALKEDGDVVIVVFDAKAPSFRHEAYEAYKAGRAPTPEDFPRQLALMKELVDLLGLERLEVPGFEADDVLATLAKKAEREGYEVQILTADRDLFQLLSPRISVLHPEGHRITPEWLWEKYGLRPEQWVDFRALAGDPSDNIPGVKGIGEKTALKLLKEWGSLENLLKNLDQVKPESVREKILAHLEDLKLSRELSRVRTDLPLEVDFRGRREPDWEGLKAFLERLEFGSLLHEFGLLESWLPAEEAPWPPPEGAFLGYRLSRPEPMWAELLALAASAQGRVYRAEDPHGALRGLKEVRGLLAKDLAVVALREGLDLPPTDDPMLLAYLLDPSNTTPEGVARRYGGEWTEDAGERALLAERLHANLLGRLQGEERLLWLYEEVEKPLSRVLAHMEATGVKLDVAYLEALSLEVAAEMRRLEEEVFRLAGHSFYLNSRDQLERVLFDELGLPPIGKTEKTGKRSTSAAVLEALREVHPIVDKILQYRELAKLKGTYIDPLPALVHPKTGRLHTRFNQTATATGRLSSSDPNLQNIPVRTPLGQKIRRAFVAEEGWRLVALDYSQIELRVLAHLSGDENLIRVFQEGKDIHTQTASWMFGLSAEAIDPLMRRAAKTINFGVLYGMSAHRLSQELGIPYEEAAAFIQRYFQSYPKVKAWIEKTLEEGRTRGYVETLFGRRRYVPDLNARVKSVREAAERMAFNMPVQGTAADLMKLAMVRLFPQLREVGARMLLQVHDELLLEAPKERAEEVAALAKEVMEGVWPLAVPLEVEVGIGEDWLAAKG

SEQ ID NO: 1771 - DNA, 2529 bp, synthetic construct
  misc_feature 1..2529: note = Variant of DNA polymerase I from Thermus sp. strain 2.9
  source 1..2529: mol_type = other DNA
atgcaccatcatcatcatcatggcggtagcggcatgttaccgttgttcgaacctaaaggtcgcgtgcttctggttgatggccatcatctcgcgtatcgtaacttctttgccctgaaaggattaaccaccagccgtggcgagccggtacagggtgtctacggctttgcaaagtcgctcctgaaagctctgaaagaagacggtgatgtggtgattgttgtctttgatgcgaaagcgccaagttttcgccacgaagcgtacgaagcttacaaagccgggcgtgctccaacgccggaagactttcctcgccaattggcgcttatgaaggaattagtggatttgcttggcctcgaacgcttggaagttcccggtttcgaggcagacgacgtattagcgactctcgcaaagaaagccgaacgtgagggctatgaagtccagatcttgacagcagatcgcgatcttttccagcttttatctccgcgcatctcggtgttacacccggaagggcatcgtatcaccccggaatggctctgggagaaatatggtttgcgtcccgaacaatgggtggattttcgcgccttagcaggcgatccgagcgacaatattccgggagttaaaggtatcggcgagaagacggcgctcaagctccttaaagaatgggggtcgttggagaacttgcttaagaatttagatcaggtcaaaccagagtcagtgcgtgagaagattcttgcacacctcgaagacctcaaattaagccgcgaattgtcccgtgtacgcaccgatttgccgctcgaagttgatttccgtggccgccgcgaacctgactgggagggtcttaaagcgtttttagagcgtcttgaatttggttcgctcttgcatgaattcggccttttagaaagcccgttaccagccacggaagcaccttggccaccgcccgaaggcgcgtttttaggttaccgtttgagtcgcccggaaccgatgtgggccgaattattggctcttgcagcgtctgcccagggacgtgtgtatcgcgcggaagaccctcatggtgcgctccgcggcctcaaagaagtccgtggactccttgccaaagacttagctgttgttgcattgcgcgaaggtcttgatttacctccgactgatgatccaatgcttcttgcgtacctcttggacccgtcaaacacgacgcccgaaggcgtagcccgtcgttacggcggcgagtggaccgaagatgcaggcgagcgcgcgttattggccgaacgtttgcacgccaatttattaggacgtttgcaaggcgaggaacgtctcctctggctttacgaagaagtggagaaaccattgagtcgcgtgctcgcgcatatggaagctaccggtgtcaaattagacgtggcgtatttggaggcactcagccttgaagttgctgccgaaatgcgccgcttggaggaagaagtattccgtttagcaggccactccttttatcttaattctcgcgatcagttagaacgtgtgttgttcgatgaacttggtctccctcctatcggcaagacagagaagaccggtaaacgtagcacttcagcggcggttttagaagctcttcgcgaagtccatcccattgtggacaagatcttgcagtaccgcgaactcgcgaaattgaaaggcacctatattgaccctcttccggcattagtccacccgaaaacgggacgcctccatacccgcttcaaccaaacagccacggcgaccggtcgtttgtcctcctctgatccaaaccttcagaatattccagtacgtaccccattgggccagaagatccgccgcgcgtttgtagctgaggagggttggcgtttagtggccctcgattatagccaaattgaattacgtgtccttgcccatctttctggcgatgagaacctcatccgcgtgtttcaggaaggcaaagacattcacactcaaacggcaagctggatgtttggattatcagctgaagcgatcgatcctttgatgcgtcgtgcagcgaagaccatcaatttcggtgttctctacggtatgagtgcccatcgtttgtcgcaggaattaggcattccctatgaagaagctgcggcgttcattcagcgctactttcaaagctatcccaaagttaaagcatggatcgagaagactctcgaagaaggccgcacacgtggttacgtagagaccttatttggacgtcgccgctatgttcccgatttaaacgctcgcgtgaaatctgtccgtgaagccgccgaacgcatggcgttcaacatgcctgtacagggcacggcagctgacctcatgaaacttgcaatggtgcgcctttttccacaattgcgtgaagttggtgcccgcatgctcttgcaggtccacgatgaactcttgttagaagcgccaaaagagcgtgcggaagaggtggcagccctcgcgaaagaggttatggaaggcgtgtggcccttagcggtgcctcttgaagtcgaagttggtattggcgaggattggttggctgccaaaggataatga

SEQ ID NO: 1772 - protein, 841 aa, synthetic construct
  REGION 1..841: note = Variant of DNA polymerase I from Thermus sp. strain 2.9
MHHHHHHGGSGMLPLFEPKGRVLLVDGHHLAYRNFFALKGLTTSRGEPVQGVYGFAKSLLKALKEDGDVVIVVFDAKAPSFRHEAYEAYKAGRAPTPEDFPRQLALMKELVDLLGLERLEVPGFEADDVLATLAKKAEREGYEVQILTADRDLFQLLSPRISVLHPEGHRITPEWLWEKYGLRPEQWVDFRALAGDPSDNIPGVKGIGEKTALKLLKEWGSLENLLKNLDQVKPESVREKILAHLEDLKLSRELSRVRTDLPLEVDFRGRREPDWEGLKAFLERLEFGSLLHEFGLLESPLPATEAPWPPPEGAFLGYRLSRPEPMWAELLALAASAQGRVYRAEDPHGALRGLKEVRGLLAKDLAVVALREGLDLPPTDDPMLLAYLLDPSNTTPEGVARRYGGEWTEDAGERALLAERLHANLLGRLQGEERLLWLYEEVEKPLSRVLAHMEATGVKLDVAYLEALSLEVAAEMRRLEEEVFRLAGHSFYLNSRDQLERVLFDELGLPPIGKTEKTGKRSTSAAVLEALREVHPIVDKILQYRELAKLKGTYIDPLPALVHPKTGRLHTRFNQTATATGRLSSSDPNLQNIPVRTPLGQKIRRAFVAEEGWRLVALDYSQIELRVLAHLSGDENLIRVFQEGKDIHTQTASWMFGLSAEAIDPLMRRAAKTINFGVLYGMSAHRLSQELGIPYEEAAAFIQRYFQSYPKVKAWIEKTLEEGRTRGYVETLFGRRRYVPDLNARVKSVREAAERMAFNMPVQGTAADLMKLAMVRLFPQLREVGARMLLQVHDELLLEAPKERAEEVAALAKEVMEGVWPLAVPLEVEVGIGEDWLAAKG

SEQ ID NO: 1773 - DNA, 2529 bp, synthetic construct
  misc_feature 1..2529: note = Variant of DNA polymerase I from Thermus sp. strain 2.9
  source 1..2529: mol_type = other DNA
atgcaccatcatcatcatcatggcggtagcggcatgttaccgttgttcgaacctaaaggtcgcgtgcttctggttgatggccatcatctcgcgtatcgtaacttctttgccctgaaaggattaaccaccagccgtggcgagccggtacagggtgtctacggctttgcaaagtcgctcctgaaagctctgaaagaagacggtgatgtggtgattgttgtctttgatgcgaaagcgccaagttttcgccacgaagcgtacgaagcttacaaagccgggcgtgctccaacgccggaagactttcctcgccaattggcgcttatgaaggaattagtggatttgcttggcctcgaacgcttggaagttcccggtttcgaggcagacgacgtattagcgactctcgcaaagaaagccgaacgtgagggctatgaagtccagatcttgacagcagatcgcgatcttttccagcttttatctccgcgcatctcggtgttacacccggaagggcatcgtatcaccccggaatggctctgggagaaatatggtttgcgtcccgaacaatgggtggattttcgcgccttagcaggcgatccgagcgacaatattccgggagttaaaggtatcggcgagaagacggcgctcaagctccttaaagaatgggggtcgttggagaacttgcttaagaatttagatcaggtcaaaccagagtcagtgcgtgagaagattcttgcacacctcgaagacctcaaattaagccgcgaattgtcccgtgtacgcaccgatttgccgctcgaagttgatttccgtggccgccgcgaacctgactgggagggtcttaaagcgtttttagagcgtcttgaatttggttcgctcttgcatgaattcggccttttagaaagcccgttaccagccgaagaagcaccttggccaccgcccgaaggcgcgtttttaggttaccgtttgagtcgcccggaaccgatgtgggccgaattattggctcttgcagcgtctgcccagggacgtgtgtatcgcgcggaagaccctcatggtgcgctccgcggcctcaaagaagtccgtggactccttgccaaagacttagctgttgttgcattgcgcgaaggtcttgatttacctccgactgatgatccaatgcttcttgcgtacctcttggacccgtcaaacacgacgcccgaaggcgtagcccgtcgttacggcggcgagtggaccgaagatgcaggcgagcgcgcgttattggccgaacgtttgcacgccaatttattaggacgtttgcaaggcgaggaacgtctcctctggctttacgaagaagtggagaaaccattgagtcgcgtgctcgcgcatatggaagctaccggtgtcaaattagacgtggcgtatttggaggcactcagccttgaagttgctgccgaaatgcgccgcttggaggaagaagtattccgtttagcaggccactccttttatcttaattctcgcgatcagttagaacgtgtgttgttcgatgaacttggtctccctcctatcggcaagacagagaagaccggtaaacgtagcacttcagcggcggttttagaagctcttcgcgaagtccatcccattgtggacaagatcttgcagtaccgcgaactcgcgaaattgaaaggcacctatattgaccctcttccggcattagtccacccgaaaacgggacgcctccatacccgcttcaaccaaacagccacggcgaccggtcgtttgtcctcctctgatccaaaccttcagaatattccagtacgtaccccattgggccagaagatccgccgcgcgtttgtagctgaggagggttggcgtttagtggccctcgattatagccaaattgaattacgtgtccttgcccatctttctggcgatgagaacctcatccgcgtgtttcaggaaggcttggacattcacactcaaacggcaagctggatgtttggattatcagctgaagcgatcgatcctttgatgcgtcgtgcagcgaagaccatcaatttcggtgttctctacggtatgagtgcccatcgtttgtcgcaggaattaggcattccctatgaagaagctgcggcgttcattcagcgctactttcaaagctatcccaaagttaaagcatggatcgagaagactctcgaagaaggccgcacacgtggttacgtagagaccttatttggacgtcgccgctatgttcccgatttaaacgctcgcgtgaaatctgtccgtgaagccgccgaacgcatggcgttcaacatgcctgtacagggcacggcagctgacctcatgaaacttgcaatggtgcgcctttttccacaattgcgtgaagttggtgcccgcatgctcttgcaggtccacgatgaactcttgttagaagcgccaaaagagcgtgcggaagaggtggcagccctcgcgaaagaggttatggaaggcgtgtggcccttagcggtgcctcttgaagtcgaagttggtattggcgaggattggttggctgccaaaggataatga

SEQ ID NO: 1774 - protein, 841 aa, synthetic construct
  REGION 1..841: note = Variant of DNA polymerase I from Thermus sp. strain 2.9
MHHHHHHGGSGMLPLFEPKGRVLLVDGHHLAYRNFFALKGLTTSRGEPVQGVYGFAKSLLKALKEDGDVVIVVFDAKAPSFRHEAYEAYKAGRAPTPEDFPRQLALMKELVDLLGLERLEVPGFEADDVLATLAKKAEREGYEVQILTADRDLFQLLSPRISVLHPEGHRITPEWLWEKYGLRPEQWVDFRALAGDPSDNIPGVKGIGEKTALKLLKEWGSLENLLKNLDQVKPESVREKILAHLEDLKLSRELSRVRTDLPLEVDFRGRREPDWEGLKAFLERLEFGSLLHEFGLLESPLPAEEAPWPPPEGAFLGYRLSRPEPMWAELLALAASAQGRVYRAEDPHGALRGLKEVRGLLAKDLAVVALREGLDLPPTDDPMLLAYLLDPSNTTPEGVARRYGGEWTEDAGERALLAERLHANLLGRLQGEERLLWLYEEVEKPLSRVLAHMEATGVKLDVAYLEALSLEVAAEMRRLEEEVFRLAGHSFYLNSRDQLERVLFDELGLPPIGKTEKTGKRSTSAAVLEALREVHPIVDKILQYRELAKLKGTYIDPLPALVHPKTGRLHTRFNQTATATGRLSSSDPNLQNIPVRTPLGQKIRRAFVAEEGWRLVALDYSQIELRVLAHLSGDENLIRVFQEGLDIHTQTASWMFGLSAEAIDPLMRRAAKTINFGVLYGMSAHRLSQELGIPYEEAAAFIQRYFQSYPKVKAWIEKTLEEGRTRGYVETLFGRRRYVPDLNARVKSVREAAERMAFNMPVQGTAADLMKLAMVRLFPQLREVGARMLLQVHDELLLEAPKERAEEVAALAKEVMEGVWPLAVPLEVEVGIGEDWLAAKG

SEQ ID NO: 1775 - DNA, 2529 bp, synthetic construct
  misc_feature 1..2529: note = Variant of DNA polymerase I from Thermus sp. strain 2.9
  source 1..2529: mol_type = other DNA
atgcaccatcatcatcatcatggcggtagcggcatgttaccgttgttcgaacctaaaggtcgcgtgcttctggttgatggccatcatctcgcgtatcgtaacttctttgccctgaaaggattaaccaccagccgtggcgagccggtacagggtgtctacggctttgcaaagtcgctcctgaaagctctgaaagaagacggtgatgtggtgattgttgtctttgatgcgaaagcgccaagttttcgccacgaagcgtacgaagcttacaaagccgggcgtgctccaacgccggaagactttcctcgccaattggcgcttatgaaggaattagtggatttgcttggcctcgaacgcttggaagttcccggtttcgaggcagacgacgtattagcgactctcgcaaagaaagccgaacgtgagggctatgaagtccagatcttgacagcagatcgcgatcttttccagcttttatctccgcgcatctcggtgttacacccggaagggcatcgtatcaccccggaatggctctgggagaaatatggtttgcgtcccgaacaatgggtggattttcgcgccttagcaggcgatccgagcgacaatattccgggagttaaaggtatcggcgagaagacggcgctcaagctccttaaagaatgggggtcgttggagaacttgcttaagaatttagatcaggtcaaaccagagtcagtgcgtgagaagattcttgcacacctcgaagacctcaaattaagccgcgaattgtcccgtgtacgcaccgatttgccgctcgaagttgatttccgtggccgccgcgaacctgactgggagggtcttaaagcgtttttagagcgtcttgaatttggttcgctcttgcatgaattcggccttttagaaagcccgttaccagccgaagaagcaccttggccaccgcccgaaggcgcgtttttaggttaccgtttgagtcgcccggaaccgatgtgggccgaattattggctcttgcagcgtctgcccagggacgtgtgtatcgcgcggaagaccctcatggtgcgctccgcggcctcaaagaagtccgtggactccttgccaaagacttagctgttgttgcattgcgcgaaggtcttgatttacctccgactgatgatccaatgcttcttgcgtacctcttggacccgtcaaacacgacgcccgaaggcgtagcccgtcgttacggcggcgagtggaccgaagatgcaggcgagcgcgcgttattggccgaacgtttgcacgccaatttattaggacgtttgcaaggcgaggaacgtctcctctggctttacgaagaagtggagaaaccattgagtcgcgtgctcgcgcatatggaagctaccggtgtcaaattagacgtggcgtatttggaggcactcagccttgaagttgctgccgaaatgcgccgcttggaggaagaagtattccgtttagcaggccactccttttatcttaattctcgcgatcagttagaacgtgtgttgttcgatgaacttggtctccctcctatcggcaagacagagaagaccggtaaacgtagcacttcagcggcggttttagaagctcttcgcgaagtccatcccattgtggacaagatcttgcagtaccgcgaactcgcgaaattgaaaggcacctatattgaccctcttccgaagttagtccacccgaaaacgggacgcctccatacccgcttcaaccaaacagccacggcgaccggtcgtttgtcctcctctgatccaaaccttcagaatattccagtacgtaccccattgggccagaagatccgccgcgcgtttgtagctgaggagggttggcgtttagtggccctcgattatagccaaattgaattacgtgtccttgcccatctttctggcgatgagaacctcatccgcgtgtttcaggaaggcaaagacattcacactcaaacggcaagctggatgtttggattatcagctgaagcgatcgatcctttgatgcgtcgtgcagcgaagaccatcaatttcggtgttctctacggtatgagtgcccatcgtttgtcgcaggaattaggcattccctatgaagaagctgcggcgttcattcagcgctactttcaaagctatcccaaagttaaagcatggatcgagaagactctcgaagaaggccgcacacgtggttacgtagagaccttatttggacgtcgccgctatgttcccgatttaaacgctcgcgtgaaatctgtccgtgaagccgccgaacgcatggcgttcaacatgcctgtacagggcacggcagctgacctcatgaaacttgcaatggtgcgcctttttccacaattgcgtgaagttggtgcccgcatgctcttgcaggtccacgatgaactcttgttagaagcgccaaaagagcgtgcggaagaggtggcagccctcgcgaaagaggttatggaaggcgtgtggcccttagcggtgcctcttgaagtcgaagttggtattggcgaggattggttggctgccaaaggataatga

SEQ ID NO: 1776 - protein, 841 aa, synthetic construct
  REGION 1..841: note = Variant of DNA polymerase I from Thermus sp. strain 2.9
MHHHHHHGGSGMLPLFEPKGRVLLVDGHHLAYRNFFALKGLTTSRGEPVQGVYGFAKSLLKALKEDGDVVIVVFDAKAPSFRHEAYEAYKAGRAPTPEDFPRQLALMKELVDLLGLERLEVPGFEADDVLATLAKKAEREGYEVQILTADRDLFQLLSPRISVLHPEGHRITPEWLWEKYGLRPEQWVDFRALAGDPSDNIPGVKGIGEKTALKLLKEWGSLENLLKNLDQVKPESVREKILAHLEDLKLSRELSRVRTDLPLEVDFRGRREPDWEGLKAFLERLEFGSLLHEFGLLESPLPAEEAPWPPPEGAFLGYRLSRPEPMWAELLALAASAQGRVYRAEDPHGALRGLKEVRGLLAKDLAVVALREGLDLPPTDDPMLLAYLLDPSNTTPEGVARRYGGEWTEDAGERALLAERLHANLLGRLQGEERLLWLYEEVEKPLSRVLAHMEATGVKLDVAYLEALSLEVAAEMRRLEEEVFRLAGHSFYLNSRDQLERVLFDELGLPPIGKTEKTGKRSTSAAVLEALREVHPIVDKILQYRELAKLKGTYIDPLPKLVHPKTGRLHTRFNQTATATGRLSSSDPNLQNIPVRTPLGQKIRRAFVAEEGWRLVALDYSQIELRVLAHLSGDENLIRVFQEGKDIHTQTASWMFGLSAEAIDPLMRRAAKTINFGVLYGMSAHRLSQELGIPYEEAAAFIQRYFQSYPKVKAWIEKTLEEGRTRGYVETLFGRRRYVPDLNARVKSVREAAERMAFNMPVQGTAADLMKLAMVRLFPQLREVGARMLLQVHDELLLEAPKERAEEVAALAKEVMEGVWPLAVPLEVEVGIGEDWLAAKG

SEQ ID NO: 1777 - DNA, 2529 bp, synthetic construct
  misc_feature 1..2529: note = Variant of DNA polymerase I from Thermus sp. strain 2.9
  source 1..2529: mol_type = other DNA
atgcaccatcatcatcatcatggcggtagcggcatgttaccgttgttcgaacctaaaggtcgcgtgcttctggttgatggccatcatctcgcgtatcgtaacttctttgccctgaaaggattaaccaccagccgtggcgagccggtacagggtgtctacggctttgcaaagtcgctcctgaaagctctgaaagaagacggtgatgtggtgattgttgtctttgatgcgaaagcgccaagttttcgccacgaagcgtacgaagcttacaaagccgggcgtgctccaacgccggaagactttcctcgccaattggcgcttatgaaggaattagtggatttgcttggcctcgaacgcttggaagttcccggtttcgaggcagacgacgtattagcgactctcgcaaagaaagccgaacgtgagggctatgaagtccagatcttgacagcagatcgcgatcttttccagcttttatctccgcgcatctcggtgttacacccggaagggcatcgtatcaccccggaatggctctgggagaaatatggtttgcgtcccgaacaatgggtggattttcgcgccttagcaggcgatccgagcgacaatattccgggagttaaaggtatcggcgagaagacggcgctcaagctccttaaagaatgggggtcgttggagaacttgcttaagaatttagatcaggtcaaaccagagtcagtgcgtgagaagattcttgcacacctcgaagacctcaaattaagccgcgaattgtcccgtgtacgcaccgatttgccgctcgaagttgatttccgtggccgccgcgaacctgactgggagggtcttaaagcgtttttagagcgtcttgaatttggttcgctcttgcatgaattcggccttttagaaagcccgttaccagccgaagaagcaccttggccaccgcccgaaggcgcgtttttaggttaccgtttgagtcgcccggaaccgatgtgggccgaattattggctcttgcagcgtctgcccagggacgtgtgtatcgcgcggaagaccctcatggtgcgctccgcggcctcaaagaagtccgtggactccttgccaaagacttagctgttgttgcattgcgcgaaggtcttgatttacctccgactgatgatccaatgcttcttgcgtacctcttggacccgtcaaacacgacgcccgaaggcgtagcccgtcgttacggcggcgagtggaccgaagatgcaggcgagcgcgcgttattggccgaacgtttgcacgccaatttattaggacgtttgcaaggcgaggaacgtctcctctggctttacgaagaagtggagaaaccattgagtcgcgtgctcgcgcatatggaagctaccggtgtcaaattagacgtggcgtatttggaggcactcagccttgaagttgctgccgaaatgcgccgcttggaggaagaagtattccgtttagcaggccactccttttatcttaattctcgcgatcagttagaacgtgtgttgttcgatgaacttggtctccctcctatcggcaagacagagaagaccggtaaacgtagcacttcagcggcggttttagaagctcttcgcgaagtccatcccattgtggacaagatcttgcagtaccgcgaactcgcgaaattgaaaggcacctatattgaccctcttccggcattagtccacccgaaaacgggacgcctccatacccgcttcaaccaaacagccacggcgaccggtcgtttgtcctcctctgatccaaaccttcagaatattccagtacgtaccccattgggccagaagatccgccgcgcgtttgtagctgaggagggttggcgtttagtggccctcgattatagccaaattgaattacgtgtccttgcccatctttctggcgatgagaacctcatccgcgtgtttcaggaaggcaaagacattcacactcaaacggcaagctggatgtttggattatcagctgaagcgatcgatcctgatatgcgtcgtgcagcgaagaccatcaatttcggtgttctctacggtatgagtgcccatcgtttgtcgcaggaattaggcattccctatgaagaagctgcggcgttcattcagcgctactttcaaagctatcccaaagttaaagcatggatcgagaagactctcgaagaaggccgcacacgtggttacgtagagaccttatttggacgtcgccgctatgttcccgatttaaacgctcgcgtgaaatctgtccgtgaagccgccgaacgcatggcgttcaacatgcctgtacagggcacggcagctgacctcatgaaacttgcaatggtgcgcctttttccacaattgcgtgaagttggtgcccgcatgctcttgcaggtccacgatgaactcttgttagaagcgccaaaagagcgtgcggaagaggtggcagccctcgcgaaagaggttatggaaggcgtgtggcccttagcggtgcctcttgaagtcgaagttggtattggcgaggattggttggctgccaaaggataatga

SEQ ID NO: 1778 - protein, 841 aa, synthetic construct
  REGION 1..841: note = Variant of DNA polymerase I from Thermus sp. strain 2.9
MHHHHHHGGSGMLPLFEPKGRVLLVDGHHLAYRNFFALKGLTTSRGEPVQGVYGFAKSLLKALKEDGDVVIVVFDAKAPSFRHEAYEAYKAGRAPTPEDFPRQLALMKELVDLLGLERLEVPGFEADDVLATLAKKAEREGYEVQILTADRDLFQLLSPRISVLHPEGHRITPEWLWEKYGLRPEQWVDFRALAGDPSDNIPGVKGIGEKTALKLLKEWGSLENLLKNLDQVKPESVREKILAHLEDLKLSRELSRVRTDLPLEVDFRGRREPDWEGLKAFLERLEFGSLLHEFGLLESPLPAEEAPWPPPEGAFLGYRLSRPEPMWAELLALAASAQGRVYRAEDPHGALRGLKEVRGLLAKDLAVVALREGLDLPPTDDPMLLAYLLDPSNTTPEGVARRYGGEWTEDAGERALLAERLHANLLGRLQGEERLLWLYEEVEKPLSRVLAHMEATGVKLDVAYLEALSLEVAAEMRRLEEEVFRLAGHSFYLNSRDQLERVLFDELGLPPIGKTEKTGKRSTSAAVLEALREVHPIVDKILQYRELAKLKGTYIDPLPALVHPKTGRLHTRFNQTATATGRLSSSDPNLQNIPVRTPLGQKIRRAFVAEEGWRLVALDYSQIELRVLAHLSGDENLIRVFQEGKDIHTQTASWMFGLSAEAIDPDMRRAAKTINFGVLYGMSAHRLSQELGIPYEEAAAFIQRYFQSYPKVKAWIEKTLEEGRTRGYVETLFGRRRYVPDLNARVKSVREAAERMAFNMPVQGTAADLMKLAMVRLFPQLREVGARMLLQVHDELLLEAPKERAEEVAALAKEVMEGVWPLAVPLEVEVGIGEDWLAAKG

SEQ ID NO: 1779 - DNA, 2529 bp, synthetic construct
  misc_feature 1..2529: note = Variant of DNA polymerase I from Thermus sp. strain 2.9
  source 1..2529: mol_type = other DNA
atgcaccatcatcatcatcatggcggtagcggcatgttaccgttgttcgaacctaaaggtcgcgtgcttctggttgatggccatcatctcgcgtatcgtaacttctttgccctgaaaggattaaccaccagccgtggcgagccggtacagggtgtctacggctttgcaaagtcgctcctgaaagctctgaaagaagacggtgatgtggtgattgttgtctttgatgcgaaagcgccaagttttcgccacgaagcgtacgaagcttacaaagccgggcgtgctccaacgccggaagactttcctcgccaattggcgcttatgaaggaattagtggatttgcttggcctcgaacgcttggaagttcccggtttcgaggcagacgacgtattagcgactctcgcaaagaaagccgaacgtgagggctatgaagtccagatcttgacagcagatcgcgatcttttccagcttttatctccgcgcatctcggtgttacacccggaagggcatcgtatcaccccggaatggctctgggagaaatatggtttgcgtcccgaacaatgggtggattttcgcgccttagcaggcgatccgagcgacaatattccgggagttaaaggtatcggcgagaagacggcgctcaagctccttaaagaatgggggtcgttggagaacttgcttaagaatttagatcaggtcaaaccagagtcagtgcgtgagaagattcttgcacacctcgaagacctcaaattaagccgcgaattgtcccgtgtacgcaccgatttgccgctcgaagttgatttccgtggccgccgcgaacctgactgggagggtcttaaagcgtttttagagcgtcttgaatttggttcgctcttgcatgaattcggccttttagaaagcccgttaccagccgaagaagcaccttggccaccgcccgaaggcgcgtttttaggttaccgtttgagtcgcccggaaccgatgtgggccgaattattggctcttgcagcgtctgcccagggacgtgtgtatcgcgcggaagaccctcatggtgcgctccgcggcctcaaagaagtccgtggactccttgccaaagacttagctgttgttgcattgcgcgaaggtcttgatttacctccgactgatgatccaatgcttcttgcgtacctcttggacccgtcaaacacgacgcccgaaggcgtagcccgtcgttacggcggcgagtggaccgaagatgcaggcgagcgcgcgttattggccgaacgtttgcacgccaatttattaggacgtttgcaaggcgaggaacgtctcctctggctttacgaagaagtggagaaaccattgagtcgcgtgctcgcgcatatggaagctaccggtgtcaaattagacgtggcgtatttggaggcactcagccttgaagttgctgccgaaatgcgccgcttggaggaagaagtattccgtttagcaggccactccttttatcttaattctcgcgatcagttagaacgtgtgttgttcgatgaacttggtctccctcctatcggcaagacagagaagaccggtaaacgtagcacttcagcggcggttttagaagctcttcgcgaagtccatcccattgtggacaagatcttgcagtaccgcgaactcgcgaaattgaaaggcacctatattgaccctcttccggcattagtccacccgaaaacgggacgcctccatacccgcttcaaccaaacagccacggcgaccggtcgtttgtcctcctctgatccaaaccttcagaatattccagtacgtaccccattgggccagaagatccgccgcgcgtttgtagctgaggagggttggcgtttagtggccctcgattatagccaaattgaattacgtgtccttgcccatctttctggcgatgagaacctcatccgcgtgtttcaggaaggcaaagacattcacactcaaacggcaagctggatgtttggattatcagctgaagcgatcgatcctttgatgcgtcgtgcagcgaagaccatcaatttcggtgttctctacggtatgagtgcccatcgtttgtcgcaggaattaggcattccctatgaagaagctgcggcgttcattcagcgctactttcaaagctatcccaaagttaaagcatggatcgagaagactctcgaagaaggccgcacacgtggttacgtagagaccttatttggacgtcgccgctatgttggggatttaaacgctcgcgtgaaatctgtccgtgaagccgccgaacgcatggcgttcaacatgcctgtacagggcacggcagctgacctcatgaaacttgcaatggtgcgcctttttccacaattgcgtgaagttggtgcccgcatgctcttgcaggtccacgatgaactcttgttagaagcgccaaaagagcgtgcggaagaggtggcagccctcgcgaaagaggttatggaaggcgtgtggcccttagcggtgcctcttgaagtcgaagttggtattggcgaggattggttggctgccaaaggataatga

SEQ ID NO: 1780 - protein, 841 aa, synthetic construct
  REGION 1..841: note = Variant of DNA polymerase I from Thermus sp. strain 2.9
MHHHHHHGGSGMLPLFEPKGRVLLVDGHHLAYRNFFALKGLTTSRGEPVQGVYGFAKSLLKALKEDGDVVIVVFDAKAPSFRHEAYEAYKAGRAPTPEDFPRQLALMKELVDLLGLERLEVPGFEADDVLATLAKKAEREGYEVQILTADRDLFQLLSPRISVLHPEGHRITPEWLWEKYGLRPEQWVDFRALAGDPSDNIPGVKGIGEKTALKLLKEWGSLENLLKNLDQVKPESVREKILAHLEDLKLSRELSRVRTDLPLEVDFRGRREPDWEGLKAFLERLEFGSLLHEFGLLESPLPAEEAPWPPPEGAFLGYRLSRPEPMWAELLALAASAQGRVYRAEDPHGALRGLKEVRGLLAKDLAVVALREGLDLPPTDDPMLLAYLLDPSNTTPEGVARRYGGEWTEDAGERALLAERLHANLLGRLQGEERLLWLYEEVEKPLSRVLAHMEATGVKLDVAYLEALSLEVAAEMRRLEEEVFRLAGHSFYLNSRDQLERVLFDELGLPPIGKTEKTGKRSTSAAVLEALREVHPIVDKILQYRELAKLKGTYIDPLPALVHPKTGRLHTRFNQTATATGRLSSSDPNLQNIPVRTPLGQKIRRAFVAEEGWRLVALDYSQIELRVLAHLSGDENLIRVFQEGKDIHTQTASWMFGLSAEAIDPLMRRAAKTINFGVLYGMSAHRLSQELGIPYEEAAAFIQRYFQSYPKVKAWIEKTLEEGRTRGYVETLFGRRRYVGDLNARVKSVREAAERMAFNMPVQGTAADLMKLAMVRLFPQLREVGARMLLQVHDELLLEAPKERAEEVAALAKEVMEGVWPLAVPLEVEVGIGEDWLAAKG

SEQ ID NO: 1781 - DNA, 2529 bp, synthetic construct
  misc_feature 1..2529: note = Variant of DNA polymerase I from Thermus sp. strain 2.9
  source 1..2529: mol_type = other DNA
atgcaccatcatcatcatcatggcggtagcggcatgttaccgttgttcgaacctaaaggtcgcgtgcttctggttgatggccatcatctcgcgtatcgtaacttctttgccctgaaaggattaaccaccagccgtggcgagccggtacagggtgtctacggctttgcaaagtcgctcctgaaagctctgaaagaagacggtgatgtggtgattgttgtctttgatgcgaaagcgccaagttttcgccacgaagcgtacgaagcttacaaagccgggcgtgctccaacgccggaagactttcctcgccaattggcgcttatgaaggaattagtggatttgcttggcctcgaacgcttggaagttcccggtttcgaggcagacgacgtattagcgactctcgcaaagaaagccgaacgtgagggctatgaagtccagatcttgacagcagatcgcgatcttttccagcttttatctccgcgcatctcggtgttacacccggaagggcatcgtatcaccccggaatggctctgggagaaatatggtttgcgtcccgaacaatgggtggattttcgcgccttagcaggcgatccgagcgacaatattccgggagttaaaggtatcggcgagaagacggcgctcaagctccttaaagaatgggggtcgttggagaacttgcttaagaatttagatcaggtcaaaccagagtcagtgcgtgagaagattcttgcacacctcgaagacctcaaattaagccgcgaattgtcccgtgtacgcaccgatttgccgctcgaagttgatttccgtggccgccgcgaacctgactgggagggtcttaaagcgtttttagagcgtcttgaatttggttcgctcttgcatgaattcggccttttagaaagcccgttaccagccgaagaagcaccttggccaccgcccgaaggcgcgtttttaggttaccgtttgagtcgcccggaaccgatgtgggccgaattattggctcttgcagcgtctgcccagggacgtgtgtatcgcgcggaagaccctcatggtgcgctccgcggcctcaaagaagtccgtggactccttgccaaagacttagctgttgttgcattgcgcgaaggtcttgatttacctccgactgatgatccaatgcttcttgcgtacctcttggacccgtcaaacacgacgcccgaaggcgtagcccgtcgttacggcggcgagtggaccgaagatgcaggcgagcgcgcgttattggccgaacgtttgcacgccaatttattaggacgtttgcaaggcgaggaacgtctcctctggctttacgaagaagtggagaaaccattgagtcgcgtgctcgcgcatatggaagctaccggtgtcaaattagacgtggcgtatttggaggcactcagccttgaagttgctgccgaaatgcgccgcttggaggatgaagtattccgtttagcaggccactccttttatcttaattctcgcgatcagttagaacgtgtgttgttcgatgaacttggtctccctcctatcggcaagacagagaagaccggtaaacgtagcacttcagcggcggttttagaagctcttcgcgaagtccatcccattgtggacaagatcttgcagtaccgcgaactcgcgaaattgaaaggcacctatattgaccctcttccggcattagtccacccgaaaacgggacgcctccatacccgcttcaaccaaacagccacggcgaccggtcgtttgtcctcctctgatccaaaccttcagaatattccagtacgtaccccattgggccagaagatccgccgcgcgtttgtagctgaggagggttggcgtttagtggccctcgattatagccaaattgaattacgtgtccttgcccatctttctggcgatgagaacctcatccgcgtgtttcaggaaggcaaagacattcacactcaaacggcaagctggatgtttggattatcagctgaagcgatcgatcctttgatgcgtcgtgcagcgaagaccatcaatttcggtgttctctacggtatgagtgcccatcgtttgtcgcaggaattaggcattccctatgaagaagctgcggcgttcattcagcgctactttcaaagctatcccaaagttaaagcatggatcgagaagactctcgaagaaggccgcacacgtggttacgtagagaccttatttggacgtcgccgctatgttcccgatttaaacgctcgcgtgaaatctgtccgtgaagccgccgaacgcatggcgttcaacatgcctgtacagggcacggcagctgacctcatgaaacttgcaatggtgcgcctttttccacaattgcgtgaagttggtgcccgcatgctcttgcaggtccacgatgaactcttgttagaagcgccaaaagagcgtgcggaagaggtggcagccctcgcgaaagaggttatggaaggcgtgtggcccttagcggtgcctcttgaagtcgaagttggtattggcgaggattggttggctgccaaaggataatga

SEQ ID NO: 1782 - protein, 841 aa, synthetic construct
  REGION 1..841: note = Variant of DNA polymerase I from Thermus sp. strain 2.9
MHHHHHHGGSGMLPLFEPKGRVLLVDGHHLAYRNFFALKGLTTSRGEPVQGVYGFAKSLLKALKEDGDVVIVVFDAKAPSFRHEAYEAYKAGRAPTPEDFPRQLALMKELVDLLGLERLEVPGFEADDVLATLAKKAEREGYEVQILTADRDLFQLLSPRISVLHPEGHRITPEWLWEKYGLRPEQWVDFRALAGDPSDNIPGVKGIGEKTALKLLKEWGSLENLLKNLDQVKPESVREKILAHLEDLKLSRELSRVRTDLPLEVDFRGRREPDWEGLKAFLERLEFGSLLHEFGLLESPLPAEEAPWPPPEGAFLGYRLSRPEPMWAELLALAASAQGRVYRAEDPHGALRGLKEVRGLLAKDLAVVALREGLDLPPTDDPMLLAYLLDPSNTTPEGVARRYGGEWTEDAGERALLAERLHANLLGRLQGEERLLWLYEEVEKPLSRVLAHMEATGVKLDVAYLEALSLEVAAEMRRLEDEVFRLAGHSFYLNSRDQLERVLFDELGLPPIGKTEKTGKRSTSAAVLEALREVHPIVDKILQYRELAKLKGTYIDPLPALVHPKTGRLHTRFNQTATATGRLSSSDPNLQNIPVRTPLGQKIRRAFVAEEGWRLVALDYSQIELRVLAHLSGDENLIRVFQEGKDIHTQTASWMFGLSAEAIDPLMRRAAKTINFGVLYGMSAHRLSQELGIPYEEAAAFIQRYFQSYPKVKAWIEKTLEEGRTRGYVETLFGRRRYVPDLNARVKSVREAAERMAFNMPVQGTAADLMKLAMVRLFPQLREVGARMLLQVHDELLLEAPKERAEEVAALAKEVMEGVWPLAVPLEVEVGIGEDWLAAKG

SEQ ID NO: 1783 - DNA, 2529 bp, synthetic construct
  misc_feature 1..2529: note = Variant of DNA polymerase I from Thermus sp. strain 2.9
  source 1..2529: mol_type = other DNA
atgcaccatcatcatcatcatggcggtagcggcatgttaccgttgttcgaacctaaaggtcgcgtgcttctggttgatggccatcatctcgcgtatcgtaacttctttgccctgaaaggattaaccaccagccgtggcgagccggtacagggtgtctacggctttgcaaagtcgctcctgaaagctctgaaagaagacggtgatgtggtgattgttgtctttgatgcgaaagcgccaagttttcgccacgaagcgtacgaagcttacaaagccgggcgtgctccaacgccggaagactttcctcgccaattggcgcttatgaaggaattagtggatttgcttggcctcgaacgcttggaagttcccggtttcgaggcagacgacgtattagcgactctcgcaaagaaagccgaacgtgagggctatgaagtccagatcttgacagcagatcgcgatcttttccagcttttatctccgcgcatctcggtgttacacccggaagggcatcgtatcaccccggaatggctctgggagaaatatggtttgcgtcccgaacaatgggtggattttcgcgccttagcaggcgatccgagcgacaatattccgggagttaaaggtatcggcgagaagacggcgctcaagctccttaaagaatgggggtcgttggagaacttgcttaagaatttagatcaggtcaaaccagagtcagtgcgtgagaagattcttgcacacctcgaagacctcaaattaagccgcgaattgtcccgtgtacgcaccgatttgccgctcgaagttgatttccgtggccgccgcgaacctgactgggagggtcttaaagcgtttttagagcgtcttgaatttggttcgctcttgcatgaattcggccttttagaaagcccgttaccagccgaagaagcaccttggccaccgcccgaaggcgcgtttttaggttaccgtttgagtcgcccggaaccgatgtgggccgaattattggctcttgcagcgtctgcccagggacgtgtgtatcgcgcggaagaccctcatggtgcgctccgcggcctcaaagaagtccgtggactccttgccaaagacttagctgttgttgcattgcgcgaaggtcttgatttacctccgactgatgatccaatgcttcttgcgtacctcttggacccgtcaaacacgacgcccgaaggcgtagcccgtcgttacggcggcgagtggaccgaagatgcaggcgagcgcgcgttattggccgaacgtttgcacgccaatttattaggacgtttgcaaggcgaggaacgtctcctctggctttacgaagaagtggagaaaccattgagtcgcgtgctcgcgcatatggaagctaccggtgtcaaattagacgtggcgtatttggaggcactcagccttgaagttgctgccgaaatgcgccgcttggaggaagaagtattccgtttagcaggccactccttttatcttaattctcgcgatcagttagaacgtgtgttgttcgatgaacttggtctccctcctatcggcaagacagagaagaccggtaaacgtagcacttcagcggcggttttagaagctcttcgcgaagtccatcccattgtggacaagatcttgcagtaccgcgaactcgcgaaattgaaaggcacctatattgaccctcttccggcattagtccacccgaaaacgggacgcctccatacccgcttcaaccaaacagccacggcgaccggtcgtttgtcctcctctgatccaaaccttcagaatattccagtacgtaccccattgggccagaagatccgccgcgcgtttgtagctgaggagggttggcgtttagtggccctcgattatagccaaattgaattacgtgtccttgcccatctttctggcgatgagaacctcatccgcgtgtttcaggaaggcaaagacattcacactcaaacggcaagctggatgtttggattatcagctgaagcgatcgatcctgttatgcgtcgtgcagcgaagaccatcaatttcggtgttctctacggtatgagtgcccatcgtttgtcgcaggaattaggcattccctatgaagaagctgcggcgttcattcagcgctactttcaaagctatcccaaagttaaagcatggatcgagaagactctcgaagaaggccgcacacgtggttacgtagagaccttatttggacgtcgccgctatgttcccgatttaaacgctcgcgtgaaatctgtccgtgaagccgccgaacgcatggcgttcaacatgcctgtacagggcacggcagctgacctcatgaaacttgcaatggtgcgcctttttccacaattgcgtgaagttggtgcccgcatgctcttgcaggtccacgatgaactcttgttagaagcgccaaaagagcgtgcggaagaggtggcagccctcgcgaaagaggttatggaaggcgtgtggcccttagcggtgcctcttgaagtcgaagttggtattggcgaggattggttggctgccaaaggataatga

SEQ ID NO: 1784 - protein, 841 aa, synthetic construct
  REGION 1..841: note = Variant of DNA polymerase I from Thermus sp. strain 2.9
MHHHHHHGGSGMLPLFEPKGRVLLVDGHHLAYRNFFALKGLTTSRGEPVQGVYGFAKSLLKALKEDGDVVIVVFDAKAPSFRHEAYEAYKAGRAPTPEDFPRQLALMKELVDLLGLERLEVPGFEADDVLATLAKKAEREGYEVQILTADRDLFQLLSPRISVLHPEGHRITPEWLWEKYGLRPEQWVDFRALAGDPSDNIPGVKGIGEKTALKLLKEWGSLENLLKNLDQVKPESVREKILAHLEDLKLSRELSRVRTDLPLEVDFRGRREPDWEGLKAFLERLEFGSLLHEFGLLESPLPAEEAPWPPPEGAFLGYRLSRPEPMWAELLALAASAQGRVYRAEDPHGALRGLKEVRGLLAKDLAVVALREGLDLPPTDDPMLLAYLLDPSNTTPEGVARRYGGEWTEDAGERALLAERLHANLLGRLQGEERLLWLYEEVEKPLSRVLAHMEATGVKLDVAYLEALSLEVAAEMRRLEEEVFRLAGHSFYLNSRDQLERVLFDELGLPPIGKTEKTGKRSTSAAVLEALREVHPIVDKILQYRELAKLKGTYIDPLPALVHPKTGRLHTRFNQTATATGRLSSSDPNLQNIPVRTPLGQKIRRAFVAEEGWRLVALDYSQIELRVLAHLSGDENLIRVFQEGKDIHTQTASWMFGLSAEAIDPVMRRAAKTINFGVLYGMSAHRLSQELGIPYEEAAAFIQRYFQSYPKVKAWIEKTLEEGRTRGYVETLFGRRRYVPDLNARVKSVREAAERMAFNMPVQGTAADLMKLAMVRLFPQLREVGARMLLQVHDELLLEAPKERAEEVAALAKEVMEGVWPLAVPLEVEVGIGEDWLAAKG

SEQ ID NO: 1785 - DNA, 2529 bp, synthetic construct
  misc_feature 1..2529: note = Variant of DNA polymerase I from Thermus sp. strain 2.9
  source 1..2529: mol_type = other DNA
atgcaccatcatcatcatcatggcggtagcggcatgttaccgttgttcgaacctaaaggtcgcgtgcttctggttgatggccatcatctcgcgtatcgtaacttctttgccctgaaaggattaaccaccagccgtggcgagccggtacagggtgtctacggctttgcaaagtcgctcctgaaagctctgaaagaagacggtgatgtggtgattgttgtctttgatgcgaaagcgccaagttttcgccacgaagcgtacgaagcttacaaagccgggcgtgctccaacgccggaagactttcctcgccaattggcgcttatgaaggaattagtggatttgcttggcctcgaacgcttggaagttcccggtttcgaggcagacgacgtattagcgactctcgcaaagaaagccgaacgtgagggctatgaagtccagatcttgacagcagatcgcgatcttttccagcttttatctccgcgcatctcggtgttacacccggaagggcatcgtatcaccccggaatggctctgggagaaatatggtttgcgtcccgaacaatgggtggattttcgcgccttagcaggcgatccgagcgacaatattccgggagttaaaggtatcggcgagaagacggcgctcaagctccttaaagaatgggggtcgttggagaacttgcttaagaatttagatcaggtcaaaccagagtcagtgcgtgagaagattcttgcacacctcgaagacctcaaattaagccgcgaattgtcccgtgtacgcaccgatttgccgctcgaagttgatttccgtggccgccgcgaacctgactgggagggtcttaaagcgtttttagagcgtcttgaatttggttcgctcttgcatgaattcggccttttagaaagcccgttaccagccgaagaagcaccttggccaccgcccgaaggcgcgtttttaggttaccgtttgagtcgcccggaaccgatgtgggccgaattattggctcttgcagcgtctgcccagggacgtgtgtatcgcgcggaagaccctcatggtgcgctccgcggcctcaaagaagtccgtggactccttgccaaagacttagctgttgttgcattgcgcgaaggtcttgatttacctccgactgatgatccaatgcttcttgcgtacctcttggacccgtcaaacacgacgcccgaaggcgtagcccgtcgttacggcggcgagtggaccgaagatgcaggcgagcgcgcgttattggccgaacgtttgcacgccaatttattaggacgtttgcaaggcgaggaacgtctcctctggctttacgaagaagtggagaaaccattgagtcgcgtgctcgcgcatatggaagctaccggtgtcaaattagacgtggcgtatttggaggcactcagccttgaagttgctgccgaaatgcgccgcttggaggaagaagtattccgtttagcaggccactccttttatcttaattctcgcgatcagttagaacgtgtgttgttcgatgaacttggtctccctcctatcggcaagacagagaagaccggtaaacgtagcacttcagcggcggttttagaagctcttcgcgaagtccatcccattgtggacaagatcttgcagtaccgcgaactcgcgaaattgaaaggcacctatattgaccctcttccggcattagtccacccgaaaacgggacgcctccatacccgcttcaaccaaacagccacggcgaccggtcgtttgtcctcctctgatccaaaccttcagaatattccagtacgtaccccattgggccagaagatccgccgcgcgtttgtagctgaggagggttggcgtttagtggccctcgattatagccaaattgaattacgtgtccttgcccatctttctggcgatgagaacctcatccgcgtgtttcaggaaggcaaagacattcacactcaaacggcaagctggatgtttggattatcagctgaagcgatcgatcctttgatgcgtcgtgcagcgaagaccatcaatttcggtgttctctacggtatgagtgcccatcgtttgtcgcaggaattaggcattccctatgaagaagctgcggcgttcattcagcgctactttcaaagctatcccaaagttaaagcatggatcgagaagactctcgaagaaggccgcacacgtggttacgtagagaccttatttggacgtcgccgctatgttcccgatttaaacgctcgcgtgaaatctgtccgtgaagccgccgaacgcatggcgttcaacatgcctgtacagggcacggcagctgacctcatgaaacttgcaatggtgcgcctttttccacaattgcgtgaagttggtgcccgcatgctcttgcaggtccacgatgaactcttgttagaagcgccaaaagaggatgcggaagaggtggcagccctcgcgaaagaggttatggaaggcgtgtggcccttagcggtgcctcttgaagtcgaagttggtattggcgaggattggttggctgccaaaggataatga

SEQ ID NO: 1786 - protein, 841 aa, synthetic construct
  REGION 1..841: note = Variant of DNA polymerase I from Thermus sp. strain 2.9
MHHHHHHGGSGMLPLFEPKGRVLLVDGHHLAYRNFFALKGLTTSRGEPVQGVYGFAKSLLKALKEDGDVVIVVFDAKAPSFRHEAYEAYKAGRAPTPEDFPRQLALMKELVDLLGLERLEVPGFEADDVLATLAKKAEREGYEVQILTADRDLFQLLSPRISVLHPEGHRITPEWLWEKYGLRPEQWVDFRALAGDPSDNIPGVKGIGEKTALKLLKEWGSLENLLKNLDQVKPESVREKILAHLEDLKLSRELSRVRTDLPLEVDFRGRREPDWEGLKAFLERLEFGSLLHEFGLLESPLPAEEAPWPPPEGAFLGYRLSRPEPMWAELLALAASAQGRVYRAEDPHGALRGLKEVRGLLAKDLAVVALREGLDLPPTDDPMLLAYLLDPSNTTPEGVARRYGGEWTEDAGERALLAERLHANLLGRLQGEERLLWLYEEVEKPLSRVLAHMEATGVKLDVAYLEALSLEVAAEMRRLEEEVFRLAGHSFYLNSRDQLERVLFDELGLPPIGKTEKTGKRSTSAAVLEALREVHPIVDKILQYRELAKLKGTYIDPLPALVHPKTGRLHTRFNQTATATGRLSSSDPNLQNIPVRTPLGQKIRRAFVAEEGWRLVALDYSQIELRVLAHLSGDENLIRVFQEGKDIHTQTASWMFGLSAEAIDPLMRRAAKTINFGVLYGMSAHRLSQELGIPYEEAAAFIQRYFQSYPKVKAWIEKTLEEGRTRGYVETLFGRRRYVPDLNARVKSVREAAERMAFNMPVQGTAADLMKLAMVRLFPQLREVGARMLLQVHDELLLEAPKEDAEEVAALAKEVMEGVWPLAVPLEVEVGIGEDWLAAKG

SEQ ID NO: 1787 - DNA, 2529 bp, synthetic construct
  misc_feature 1..2529: note = Variant of DNA polymerase I from Thermus sp. strain 2.9
  source 1..2529: mol_type = other DNA
atgcaccatcatcatcatcatggcggtagcggcatgttaccgttgttcgaacctaaaggtcgcgtgcttctggttgatggccatcatctcgcgtatcgtaacttctttgccctgaaaggattaaccaccagccgtggcgagccggtacagggtgtctacggctttgcaaagtcgctcctgaaagctctgaaagaagacggtgatgtggtgattgttgtctttgatgcgaaagcgccaagtgcgcgccacgaagcgtacgaagcttacaaagccgggcgtgctccaacgccggaagactttcctcgccaattggcgcttatgaaggaattagtggatttgcttggcctcgaacgcttggaagttcccggtttcgaggcagacgacgtattagcgactctcgcaaagaaagccgaacgtgagggctatgaagtccagatcttgacagcagatcgcgatcttttccagcttttatctccgcgcatctcggtgttacacccggaagggcatcgtatcaccccggaatggctctgggagaaatatggtttgcgtcccgaacaatgggtggattttcgcgccttagcaggcgatccgagcgacaatattccgggagttaaaggtatcggcgagaagacggcgctcaagctccttaaagaatgggggtcgttggagaacttgcttaagaatttagatcaggtcaaaccagagtcagtgcgtgagaagattcttgcacacctcgaagacctcaaattaagccgcgaattgtcccgtgtacgcaccgatttgccgctcgaagttgatttccgtggccgccgcgaacctgactgggagggtcttaaagcgtttttagagcgtcttgaatttggttcgctcttgcatgaattcggccttttagaaagcccgttaccagccgaagaagcaccttggccaccgcccgaaggcgcgtttttaggttaccgtttgagtcgcccggaaccgatgtgggccgaattattggctcttgcagcgtctgcccagggacgtgtgtatcgcgcggaagaccctcatggtgcgctccgcggcctcaaagaagtccgtggactccttgccaaagacttagctgttgttgcattgcgcgaaggtcttgatttacctccgactgatgatccaatgcttcttgcgtacctcttggacccgtcaaacacgacgcccgaaggcgtagcccgtcgttacggcggcgagtggaccgaagatgcaggcgagcgcgcgttattggccgaacgtttgcacgccaatttattaggacgtttgcaaggcgaggaacgtctcctctggctttacgaagaagtggagaaaccattgagtcgcgtgctcgcgcatatggaagctaccggtgtcaaattagacgtggcgtatttggaggcactcagccttgaagttgctgccgaaatgcgccgcttggaggaagaagtattccgtttagcaggccactccttttatcttaattctcgcgatcagttagaacgtgtgttgttcgatgaacttggtctccctcctatcggcaagacagagaagaccggtaaacgtagcacttcagcggcggttttagaagctcttcgcgaagtccatcccattgtggacaagatcttgcagtaccgcgaactcgcgaaattgaaaggcacctatattgaccctcttccggcattagtccacccgaaaacgggacgcctccatacccgcttcaaccaaacagccacggcgaccggtcgtttgtcctcctctgatccaaaccttcagaatattccagtacgtaccccattgggccagaagatccgccgcgcgtttgtagctgaggagggttggcgtttagtggccctcgattatagccaaattgaattacgtgtccttgcccatctttctggcgatgagaacctcatccgcgtgtttcaggaaggcaaagacattcacactcaaacggcaagctggatgtttggattatcagctgaagcgatcgatcctttgatgcgtcgtgcagcgaagaccatcaatttcggtgttctctacggtatgagtgcccatcgtttgtcgcaggaattaggcattccctatgaagaagctgcggcgttcattcagcgctactttcaaagctatcccaaagttaaagcatggatcgagaagactctcgaagaaggccgcacacgtggttacgtagagaccttatttggacgtcgccgctatgttcccgatttaaacgctcgcgtgaaatctgtccgtgaagccgccgaacgcatggcgttcaacatgcctgtacagggcacggcagctgacctcatgaaacttgcaatggtgcgcctttttccacaattgcgtgaagttggtgcccgcatgctcttgcaggtccacgatgaactcttgttagaagcgccaaaagagcgtgcggaagaggtggcagccctcgcgaaagaggttatggaaggcgtgtggcccttagcggtgcctcttgaagtcgaagttggtattggcgaggattggttggctgccaaaggataatga

SEQ ID NO: 1788 - protein, 841 aa, synthetic construct
  REGION 1..841: note = Variant of DNA polymerase I from Thermus sp. strain 2.9
MHHHHHHGGSGMLPLFEPKGRVLLVDGHHLAYRNFFALKGLTTSRGEPVQGVYGFAKSLLKALKEDGDVVIVVFDAKAPSARHEAYEAYKAGRAPTPEDFPRQLALMKELVDLLGLERLEVPGFEADDVLATLAKKAEREGYEVQILTADRDLFQLLSPRISVLHPEGHRITPEWLWEKYGLRPEQWVDFRALAGDPSDNIPGVKGIGEKTALKLLKEWGSLENLLKNLDQVKPESVREKILAHLEDLKLSRELSRVRTDLPLEVDFRGRREPDWEGLKAFLERLEFGSLLHEFGLLESPLPAEEAPWPPPEGAFLGYRLSRPEPMWAELLALAASAQGRVYRAEDPHGALRGLKEVRGLLAKDLAVVALREGLDLPPTDDPMLLAYLLDPSNTTPEGVARRYGGEWTEDAGERALLAERLHANLLGRLQGEERLLWLYEEVEKPLSRVLAHMEATGVKLDVAYLEALSLEVAAEMRRLEEEVFRLAGHSFYLNSRDQLERVLFDELGLPPIGKTEKTGKRSTSAAVLEALREVHPIVDKILQYRELAKLKGTYIDPLPALVHPKTGRLHTRFNQTATATGRLSSSDPNLQNIPVRTPLGQKIRRAFVAEEGWRLVALDYSQIELRVLAHLSGDENLIRVFQEGKDIHTQTASWMFGLSAEAIDPLMRRAAKTINFGVLYGMSAHRLSQELGIPYEEAAAFIQRYFQSYPKVKAWIEKTLEEGRTRGYVETLFGRRRYVPDLNARVKSVREAAERMAFNMPVQGTAADLMKLAMVRLFPQLREVGARMLLQVHDELLLEAPKERAEEVAALAKEVMEGVWPLAVPLEVEVGIGEDWLAAKG

SEQ ID NO: 1789 - DNA, 2529 bp, synthetic construct
  misc_feature 1..2529: note = Variant of DNA polymerase I from Thermus sp. strain 2.9
  source 1..2529: mol_type = other DNA
atgcaccatcatcatcatcatggcggtagcggcatgttaccgttgttcgaacctaaaggtcgcgtgcttctggttgatggccatcatctcgcgtatcgtaacttctttgccctgaaaggattaaccaccagccgtggcgagccggtacagggtgtctacggctttgcaaagtcgctcctgaaagctctgaaagaagacggtgatgtggtgattgttgtctttgatgcgaaagcgccaagttttcgccacgaagcgtacgaagcttacaaagccgggcgtgctccaacgccggaagactttcctcgccaattggcgcttatgaaggaattagtggatttgcttggcctcgaacgcttggaagttcccggtttcgaggcagacgacgtattagcgactctcgcaaagaaagccgaacgtgagggctatgaagtccagatcttgacagcagatcgcgatcttttccagcttttatctccgcgcatctcggtgttacacccggaagggcatcgtatcaccccggaatggctctgggagaaatatggtttgcgtcccgaacaatgggtggattttcgcgccttagcaggcgatccgagcgacaatattccgggagttaaaggtatcggcgagaagacggcgctcaagctccttaaagaatgggggtcgttggagaacttgcttaagaatttagatcaggtcaaaccagagtcagtgcgtgagaagattcttgcacacctcgaagacctcaaattaagccgcgaattgtcccgtgtacgcaccgatttgccgctcgaagttgatttccgtggccgccgcgaacctgactgggagggtcttaaagcgtttttagagcgtcttgaatttggttcgctcttgcatgaattcggccttttagaaagcgcgttaccagccgaagaagcaccttggccaccgcccgaaggcgcgtttttaggttaccgtttgagtcgcccggaaccgatgtgggccgaattattggctcttgcagcgtctgcccagggacgtgtgtatcgcgcggaagaccctcatggtgcgctccgcggcctcaaagaagtccgtggactcctcgccaaagacttagctgttgttgcattgcgcgaaggtcttgatttacctccgactgatgatccaatgcttcttgcgtacctcttggacccgtcaaacacgacgcccgaaggcgtagcccgtcgttacggcggcgagtggaccgaagatgcaggcgagcgcgcgttattggccgaacgtttgcacgccaatttattaggacgtttgcaaggcgaggaacgtctcctctggctttacgaagaagtggagaaaccattgagtcgcgtgctcgcgcatatggaagctaccggtgtcaaattagacgtggcgtatttggaggcactcagccttgaagttgctgccgaaatgcgccgcttggaggaagaagtattccgtttagcaggccactccttttatcttaattctcgcgatcagttagaacgtgtgttgttcgatgaacttggtctccctcctatcggcaagacagagaagaccggtaaacgtagcacttcagcggcggttttagaagctcttcgcgaagtccatcccattgtggacaagatcttgcagtaccgcgaactcgcgaaattgaaaggcacctatattgaccctcttccggcattagtccacccgaaaacgggacgcctccatacccgcttcaaccaaacagccacggcgaccggtcgtttgtcctcctctgatccaaaccttcagaatattccagtacgtaccccattgggccagaagatccgccgcgcgtttgtagctgaggagggttggcgtttagtggccctcgattatagccaaattgaattacgtgtccttgcccatctttctggcgatgagaacctcatccgcgtgtttcaggaaggcaaagacattcacactcaaacggcaagctggatgtttggattatcagctgaagcgatcgatcctttgatgcgtcgtgcagcgaagaccatcaatttcggtgttctctacggtatgagtgcccatcgtttgtcgcaggaattaggcattccctatgaagaagctgcggcgttcattcagcgctactttcaaagctatcccaaagttaaagcatggatcgagaagactctcgaagaaggccgcacacgtggttacgtagagaccttatttggacgtcgccgctatgttcccgatttaaacgctcgcgtgaaatctgtccgtgaagccgccgaacgcatggcgttcaacatgcctgtacagggcacggcagctgacctcatgaaacttgcaatggtgcgcctttttccacaattgcgtgaagttggtgcccgcatgctcttgcaggtccacgatgaactcttgttagaagcgccaaaagagcgtgcggaagaggtggcagccctcgcgaaagaggttatggaaggcgtgtggcccttagcggtgcctcttgaagtcgaagttggtattggcgaggattggttggctgccaaaggataatga

SEQ ID NO: 1790 - protein, 841 aa, synthetic construct
  REGION 1..841: note = Variant of DNA polymerase I from Thermus sp. strain 2.9
MHHHHHHGGSGMLPLFEPKGRVLLVDGHHLAYRNFFALKGLTTSRGEPVQGVYGFAKSLLKALKEDGDVVIVVFDAKAPSFRHEAYEAYKAGRAPTPEDFPRQLALMKELVDLLGLERLEVPGFEADDVLATLAKKAEREGYEVQILTADRDLFQLLSPRISVLHPEGHRITPEWLWEKYGLRPEQWVDFRALAGDPSDNIPGVKGIGEKTALKLLKEWGSLENLLKNLDQVKPESVREKILAHLEDLKLSRELSRVRTDLPLEVDFRGRREPDWEGLKAFLERLEFGSLLHEFGLLESALPAEEAPWPPPEGAFLGYRLSRPEPMWAELLALAASAQGRVYRAEDPHGALRGLKEVRGLLAKDLAVVALREGLDLPPTDDPMLLAYLLDPSNTTPEGVARRYGGEWTEDAGERALLAERLHANLLGRLQGEERLLWLYEEVEKPLSRVLAHMEATGVKLDVAYLEALSLEVAAEMRRLEEEVFRLAGHSFYLNSRDQLERVLFDELGLPPIGKTEKTGKRSTSAAVLEALREVHPIVDKILQYRELAKLKGTYIDPLPALVHPKTGRLHTRFNQTATATGRLSSSDPNLQNIPVRTPLGQKIRRAFVAEEGWRLVALDYSQIELRVLAHLSGDENLIRVFQEGKDIHTQTASWMFGLSAEAIDPLMRRAAKTINFGVLYGMSAHRLSQELGIPYEEAAAFIQRYFQSYPKVKAWIEKTLEEGRTRGYVETLFGRRRYVPDLNARVKSVREAAERMAFNMPVQGTAADLMKLAMVRLFPQLREVGARMLLQVHDELLLEAPKERAEEVAALAKEVMEGVWPLAVPLEVEVGIGEDWLAAKG

SEQ ID NO: 1791 - DNA, 2529 bp, synthetic construct
  misc_feature 1..2529: note = Variant of DNA polymerase I from Thermus sp. strain 2.9
  source 1..2529: mol_type = other DNA
atgcaccatcatcatcatcatggcggtagcggcatgttaccgttgttcgaacctaaaggtcgcgtgcttctggttgatggccatcatctcgcgtatcgtaacttctttgccctgaaaggattaaccaccagccgtggcgagccggtacagggtgtctacggctttgcaaagtcgctcctgaaagctctgaaagaagacggtgatgtggtgattgttgtctttgatgcgaaagcgccaagttttcgccacgaagcgtacgaagcttacaaagccgggcgtgctccaacgccggaagactttcctcgccaattggcgcttatgaaggaattagtggatttgcttggcctcgaacgcttggaagttcccggtttcgaggcagacgacgtattagcgactctcgcaaagaaagccgaacgtgagggctatgaagtccagatcttgacagcagatcgcgatcttttccagcttttatctccgcgcatctcggtgttacacccggaagggcatcgtatcaccccggaatggctctgggagaaatatggtttgcgtcccgaacaatgggtggattttcgcgccttagcaggcgatccgagcgacaatattccgggagttaaaggtatcggcgagaagacggcgctcaagctccttaaagaatgggggtcgttggagaacttgcttaagaatttagatcaggtcaaaccagagtcagtgcgtgagaagattcttgcacacctcgaagacctcaaattaagccgcgaattgtcccgtgtacgcaccgatttgccgctcgaagttgatttccgtggccgccgcgaacctgactgggagggtcttaaagcgtttttagagcgtcttgaatttggttcgctcttgcatgaattcggccttttagaaagcccgttaccagcctgtgaagcaccttggccaccgcccgaaggcgcgtttttaggttaccgtttgagtcgcccggaaccgatgtgggccgaattattggctcttgcagcgtctgcccagggacgtgtgtatcgcgcggaagaccctcatggtgcgctccgcggcctcaaagaagtccgtggactccttgccaaagacttagctgttgttgcattgcgcgaaggtcttgatttacctccgactgatgatccaatgcttcttgcgtacctcttggacccgtcaaacacgacgcccgaaggcgtagcccgtcgttacggcggcgagtggaccgaagatgcaggcgagcgcgcgttattggccgaacgtttgcacgccaatttattaggacgtttgcaaggcgaggaacgtctcctctggctttacgaagaagtggagaaaccattgagtcgcgtgctcgcgcatatggaagctaccggtgtcaaattagacgtggcgtatttggaggcactcagccttgaagttgctgccgaaatgcgccgcttggaggaagaagtattccgtttagcaggccactccttttatcttaattctcgcgatcagttagaacgtgtgttgttcgatgaacttggtctccctcctatcggcaagacagagaagaccggtaaacgtagcacttcagcggcggttttagaagctcttcgcgaagtccatcccattgtggacaagatcttgcagtaccgcgaactcgcgaaattgaaaggcacctatattgaccctcttccggcattagtccacccgaaaacgggacgcctccatacccgcttcaaccaaacagccacggcgaccggtcgtttgtcctcctctgatccaaaccttcagaatattccagtacgtaccccattgggccagaagatccgccgcgcgtttgtagctgaggagggttggcgtttagtggccctcgattatagccaaattgaattacgtgtccttgcccatctttctggcgatgagaacctcatccgcgtgtttcaggaaggcaaagacattcacactcaaacggcaagctggatgtttggattatcagctgaagcgatcgatcctttgatgcgtcgtgcagcgaagaccatcaatttcggtgttctctacggtatgagtgcccatcgtttgtcgcaggaattaggcattccctatgaagaagctgcggcgttcattcagcgctactttcaaagctatcccaaagttaaagcatggatcgagaagactctcgaagaaggccgcacacgtggttacgtagagaccttatttggacgtcgccgctatgttcccgatttaaacgctcgcgtgaaatctgtccgtgaagccgccgaacgcatggcgttcaacatgcctgtacagggcacggcagctgacctcatgaaacttgcaatggtgcgcctttttccacaattgcgtgaagttggtgcccgcatgctcttgcaggtccacgatgaactcttgttagaagcgccaaaagagcgtgcggaagaggtggcagccctcgcgaaagaggttatggaaggcgtgtggcccttagcggtgcctcttgaagtcgaagttggtattggcgaggattggttggctgccaaaggataatga

SEQ ID NO: 1792 - protein, 841 aa, synthetic construct
  REGION 1..841: note = Variant of DNA polymerase I from Thermus sp. strain 2.9
MHHHHHHGGSGMLPLFEPKGRVLLVDGHHLAYRNFFALKGLTTSRGEPVQGVYGFAKSLLKALKEDGDVVIVVFDAKAPSFRHEAYEAYKAGRAPTPEDFPRQLALMKELVDLLGLERLEVPGFEADDVLATLAKKAEREGYEVQILTADRDLFQLLSPRISVLHPEGHRITPEWLWEKYGLRPEQWVDFRALAGDPSDNIPGVKGIGEKTALKLLKEWGSLENLLKNLDQVKPESVREKILAHLEDLKLSRELSRVRTDLPLEVDFRGRREPDWEGLKAFLERLEFGSLLHEFGLLESPLPACEAPWPPPEGAFLGYRLSRPEPMWAELLALAASAQGRVYRAEDPHGALRGLKEVRGLLAKDLAVVALREGLDLPPTDDPMLLAYLLDPSNTTPEGVARRYGGEWTEDAGERALLAERLHANLLGRLQGEERLLWLYEEVEKPLSRVLAHMEATGVKLDVAYLEALSLEVAAEMRRLEEEVFRLAGHSFYLNSRDQLERVLFDELGLPPIGKTEKTGKRSTSAAVLEALREVHPIVDKILQYRELAKLKGTYIDPLPALVHPKTGRLHTRFNQTATATGRLSSSDPNLQNIPVRTPLGQKIRRAFVAEEGWRLVALDYSQIELRVLAHLSGDENLIRVFQEGKDIHTQTASWMFGLSAEAIDPLMRRAAKTINFGVLYGMSAHRLSQELGIPYEEAAAFIQRYFQSYPKVKAWIEKTLEEGRTRGYVETLFGRRRYVPDLNARVKSVREAAERMAFNMPVQGTAADLMKLAMVRLFPQLREVGARMLLQVHDELLLEAPKERAEEVAALAKEVMEGVWPLAVPLEVEVGIGEDWLAAKG

SEQ ID NO: 1793 - DNA, 2529 bp, synthetic construct
  misc_feature 1..2529: note = Variant of DNA polymerase I from Thermus sp. strain 2.9
  source 1..2529: mol_type = other DNA
atgcaccatcatcatcatcatggcggtagcggcatgttaccgttgttcgaacctaaaggtcgcgtgcttctggttgatggccatcatctcgcgtatcgtaacttctttgccctgaaaggattaaccaccagccgtggcgagccggtacagggtgtctacggctttgcaaagtcgctcctgaaagctctgaaagaagacggtgatgtggtgattgttgtctttgatgcgaaagcgccaagttttcgccacgaagcgtacgaagcttacaaagccgggcgtgctccaacgccggaagactttcctcgccaattggcgcttatgaaggaattagtggatttgcttggcctcgaacgcttggaagttcccggtttcgaggcagacgacgtattagcgactctcgcaaagaaagccgaacgtgagggctatgaagtccagatcttgacagcagatcgcgatcttttccagcttttatctccgcgcatctcggtgttacacccggaagggcatcgtatcaccccggaatggctctgggagaaatatggtttgcgtcccgaacaatgggtggattttcgcgccttagcaggcgatccgagcgacaatattccgggagttaaaggtatcggcgagaagacggcgctcaagctccttaaagaatgggggtcgttggagaacttgcttaagaatttagatcaggtcaaaccagagtcagtgcgtgagaagattcttgcacacctcgaagacctcaaattaagccgcgaattgtcccgtgtacgcaccgatttgccgctcgaagttgatttccgtggccgccgcgaacctgactgggagggtcttaaagcgtttttagagcgtcttgaatttggttcgctcttgcatgaattcggccttttagaaagcccgttaccagccgaagaagcaccttggccaccgcccgaaggcgcgtttttaggttaccgtttgagtcgcccggaaccgatgtgggccgaattattggctcttgcagcgtctgcccagggacgtgtgtatcgcgcggaagaccctcatggtgcgctccgcggcctcaaagaagtccgtggactccttgccaaagacttagctgttgttgcattgcgcgaaggtcttgatttacctccgactgatgatccaatgcttcttgcgtacctcttggacccgtcaaacacgacgcccgaaggcgtagcccgtcgttacggcggcgagtggaccgaagatgcaggcgagcgcgcgttattggccgaacgtttgcacgccaatttattaggacgtttgcaaggcgaggaacgtctcctctggctttacgaagaagtggagaaaccattgagtcgcgtgctcgcgcatatggaagctaccggtgtcaaattagacgtggcgtatttggaggcactcagccttgaagttgctgccgaaatgcgccgcttggaggaagaagtattccgtttagcaggccactccttttatcttaattctcgcgatcagttagaacgtgtgttgttcgatgaacttggtctccctcctatcggcaagacagagaagaccggtaaacgtagcacttcagcggcggttttagaagctcttcgcgaagtccatcccattgtggacaagatcttgcagtaccgcgaactcgcgaaattgaaaggcacctatattgaccctcttccggcattagtccacccgaaaacgggacgcctccatacccgcttcaaccaaacagccacggcgaccggtcgtttgtcctcctctgatccaaaccttcagaatattccagtacgtaccccattgggccagaagatccgccgcgcgtttgtagctgaggagggttggcgtttagtggccctcgattatagccaaattgaattacgtgtccttgcccatctttctggcgatgagaacctcatccgcgtgtttcaggaaggcaaagacattcacactcaaacggcaagctggatgtttggattatcagctgaagcgatcgatcctttgatgcgtcgtgcagcgaagaccatcaatttcggtgttctctacggtatgagtgcccatcgtttgtcgcaggaattaggcattccctatgaagaagctgcggcgttcattcagcgctactttcaaagctatcccaaagttaaagcatggatcgagaagactctcgaagaaggccgcacacgtggttacgtagagaccttatttggacgtcgccgctatgttcccgatttaaacgctcgccggaaatctgtccgtgaagccgccgaacgcatggcgttcaacatgcctgtacagggcacggcagctgacctcatgaaacttgcaatggtgcgcctttttccacaattgcgtgaagttggtgcccgcatgctcttgcaggtccacgatgaactcttgttagaagcgccaaaagagcgtgcggaagaggtggcagccctcgcgaaagaggttatggaaggcgtgtggcccttagcggtgcctcttgaagtcgaagttggtattggcgaggattggttggctgccaaaggataatga

SEQ ID NO: 1794 - protein, 841 aa, synthetic construct
  REGION 1..841: note = Variant of DNA polymerase I from Thermus sp. strain 2.9
MHHHHHHGGSGMLPLFEPKGRVLLVDGHHLAYRNFFALKGLTTSRGEPVQGVYGFAKSLLKALKEDGDVVIVVFDAKAPSFRHEAYEAYKAGRAPTPEDFPRQLALMKELVDLLGLERLEVPGFEADDVLATLAKKAEREGYEVQILTADRDLFQLLSPRISVLHPEGHRITPEWLWEKYGLRPEQWVDFRALAGDPSDNIPGVKGIGEKTALKLLKEWGSLENLLKNLDQVKPESVREKILAHLEDLKLSRELSRVRTDLPLEVDFRGRREPDWEGLKAFLERLEFGSLLHEFGLLESPLPAEEAPWPPPEGAFLGYRLSRPEPMWAELLALAASAQGRVYRAEDPHGALRGLKEVRGLLAKDLAVVALREGLDLPPTDDPMLLAYLLDPSNTTPEGVARRYGGEWTEDAGERALLAERLHANLLGRLQGEERLLWLYEEVEKPLSRVLAHMEATGVKLDVAYLEALSLEVAAEMRRLEEEVFRLAGHSFYLNSRDQLERVLFDELGLPPIGKTEKTGKRSTSAAVLEALREVHPIVDKILQYRELAKLKGTYIDPLPALVHPKTGRLHTRFNQTATATGRLSSSDPNLQNIPVRTPLGQKIRRAFVAEEGWRLVALDYSQIELRVLAHLSGDENLIRVFQEGKDIHTQTASWMFGLSAEAIDPLMRRAAKTINFGVLYGMSAHRLSQELGIPYEEAAAFIQRYFQSYPKVKAWIEKTLEEGRTRGYVETLFGRRRYVPDLNARRKSVREAAERMAFNMPVQGTAADLMKLAMVRLFPQLREVGARMLLQVHDELLLEAPKERAEEVAALAKEVMEGVWPLAVPLEVEVGIGEDWLAAKG

SEQ ID NO: 1795 - DNA, 2529 bp, synthetic construct
  misc_feature 1..2529: note = Variant of DNA polymerase I from Thermus sp. strain 2.9
  source 1..2529: mol_type = other DNA
atgcaccatcatcatcatcatggcggtagcggcatgttaccgttgttcgaacctaaaggtcgcgtgcttctggttgatggccatcatctcgcgtatcgtaacttctttgccctgaaaggattaaccaccagccgtggcgagccggtacagggtgtctacggctttgcaaagtcgctcctgaaagctctgaaagaagacggtgatgtggtgattgttgtctttgatgcgaaagcgccaagttttcgccacgaagcgtacgaagcttacaaagccgggcgtgctccaacgccggaagactttcctcgccaattggcgcttatgaaggaattagtggatttgcttggcctcgaacgcttggaagttcccggtttcgaggcagacgacgtattagcgactctcgcaaagaaagccgaacgtgagggctatgaagtccagatcttgacagcagatcgcgatcttttccagcttttatctccgcgcatctcggtgttacacccggaagggcatcgtatcaccccggaatggctctgggagaaatatggtttgcgtcccgaacaatgggtggattttcgcgccttagcaggcgatccgagcgacaatattccgggagttaaaggtatcggcgagaagacggcgctcaagctccttaaagaatgggggtcgttggagaacttgcttaagaatttagatcaggtcaaaccagagtcagtgcgtgagaagattcttgcacacctcgaagacctcaaattaagccgcgaattgtcccgtgtacgcaccgatttgccgctcgaagttgatttccgtggccgccgcgaacctgactgggagggtcttaaagcgtttttagagcgtcttgaatttggttcgctcttgcatgaattcggccttttagaaagcccgttaccagccgaagaagcaccttggccaccgcccgaaggcgcgtttttaggttaccgtttgagtcgcccggaaccgatgtgggccgaattattggctcttgcagcgtctgcccagggacgtgtgtatcgcgcggaagaccctcatggtgcgctccgcggcctcaaagaagtccgtggactccttgccaaagacttagctgttgttgcattgcgcgaaggtcttgatttacctccgactgatgatccaatgcttcttgcgtacctcttggacccgtcaaacacgacgcccgaaggcgtagcccgtcgttacggcggcgagtggaccgaagatgcaggcgagcgcgcgttattggccgaacgtttgcacgccaatttattaggacgtttgcaaggcgaggaacgtctcctctggctttacgaagaagtggagaaaccattgagtcgcgtgctcgcgcatatggaagctaccggtgtcaaattagacgtggcgtatttggaggcactcagccttgaagttgctgccgaaatgcgccgcttggaggaagaagtattccgtttagcaggccactccttttatcttaattctcgcgatcagttagaacgtgtgttgttcgatgaacttggtctccctcctatcggcaagacagagaagaccggtaaacgtagcacttcagcggcggttttagaagctcttcgcgaagtccatcccattgtggacaagatcttgcagtaccgcgaactcgcgaaattgaaaggcacctatattgaccctcttccggcattagtccacccgaaaacgggacgcctccatacccgcttcaaccaaacagccacggcgaccggtcgtttgtcctcctctgatccaaaccttcagaatattccagtacgtaccccattgggccagaagatccgccgcgcgtttgtagctgaggagggttggcgtttagtggccctcgattatagccaaattgaattacgtgtccttgcccatctttctggcgatgagaacctcatccgcgtgtttcaggaaggcaaagacattcacactcaaacggcaagctggatgtttggatgttcagctgaagcgatcgatcctttgatgcgtcgtgcagcgaagaccatcaatttcggtgttctctacggtatgagtgcccatcgtttgtcgcaggaattaggcattccctatgaagaagctgcggcgttcattcagcgctactttcaaagctatcccaaagttaaagcatggatcgagaagactctcgaagaaggccgcacacgtggttacgtagagaccttatttggacgtcgccgctatgttcccgatttaaacgctcgcgtgaaatctgtccgtgaagccgccgaacgcatggcgttcaacatgcctgtacagggcacggcagctgacctcatgaaacttgcaatggtgcgcctttttccacaattgcgtgaagttggtgcccgcatgctcttgcaggtccacgatgaactcttgttagaagcgccaaaagagcgtgcggaagaggtggcagccctcgcgaaagaggttatggaaggcgtgtggcccttagcggtgcctcttgaagtcgaagttggtattggcgaggattggttggctgccaaaggataatga

SEQ ID NO: 1796 - protein, 841 aa, synthetic construct
  REGION 1..841: note = Variant of DNA polymerase I from Thermus sp. strain 2.9
MHHHHHHGGSGMLPLFEPKGRVLLVDGHHLAYRNFFALKGLTTSRGEPVQGVYGFAKSLLKALKEDGDVVIVVFDAKAPSFRHEAYEAYKAGRAPTPEDFPRQLALMKELVDLLGLERLEVPGFEADDVLATLAKKAEREGYEVQILTADRDLFQLLSPRISVLHPEGHRITPEWLWEKYGLRPEQWVDFRALAGDPSDNIPGVKGIGEKTALKLLKEWGSLENLLKNLDQVKPESVREKILAHLEDLKLSRELSRVRTDLPLEVDFRGRREPDWEGLKAFLERLEFGSLLHEFGLLESPLPAEEAPWPPPEGAFLGYRLSRPEPMWAELLALAASAQGRVYRAEDPHGALRGLKEVRGLLAKDLAVVALREGLDLPPTDDPMLLAYLLDPSNTTPEGVARRYGGEWTEDAGERALLAERLHANLLGRLQGEERLLWLYEEVEKPLSRVLAHMEATGVKLDVAYLEALSLEVAAEMRRLEEEVFRLAGHSFYLNSRDQLERVLFDELGLPPIGKTEKTGKRSTSAAVLEALREVHPIVDKILQYRELAKLKGTYIDPLPALVHPKTGRLHTRFNQTATATGRLSSSDPNLQNIPVRTPLGQKIRRAFVAEEGWRLVALDYSQIELRVLAHLSGDENLIRVFQEGKDIHTQTASWMFGCSAEAIDPLMRRAAKTINFGVLYGMSAHRLSQELGIPYEEAAAFIQRYFQSYPKVKAWIEKTLEEGRTRGYVETLFGRRRYVPDLNARVKSVREAAERMAFNMPVQGTAADLMKLAMVRLFPQLREVGARMLLQVHDELLLEAPKERAEEVAALAKEVMEGVWPLAVPLEVEVGIGEDWLAAKG

SEQ ID NO: 1797 - DNA, 2529 bp, synthetic construct
  misc_feature 1..2529: note = Variant of DNA polymerase I from Thermus sp. strain 2.9
  source 1..2529: mol_type = other DNA
atgcaccatcatcatcatcatggcggtagcggcatgttaccgttgttcgaacctaaaggtcgcgtgcttctggttgatggccatcatctcgcgtatcgtaacttctttgccctgaaaggattaaccaccagccgtggcgagccggtacagggtgtctacggctttgcaaagtcgctcctgaaagctctgaaagaagacggtgatgtggtgattgttgtctttgatgcgaaagcgccaagttttcgccacgaagcgtacgaagcttacaaagccgggcgtgctccaacgccggaagactttcctcgccaattggcgcttatgaaggaattagtggatttgcttggcctcgaacgcttggaagttcccggtttcgaggcagacgacgtattagcgactctcgcaaagaaagccgaacgtgagggctatgaagtccagatcttgacagcagatcgcgatcttttccagcttttatctccgcgcatctcggtgttacacccggaagggcatcgtatcaccccggaatggctctgggagaaatatggtttgcgtcccgaacaatgggtggattttcgcgccttagcaggcgatccgagcgacaatattccgggagttaaaggtatcggcgagaagacggcgctcaagctccttaaagaatgggggtcgttggagaacttgcttaagaatttagatcaggtcaaaccagagtcagtgcgtgagaagattcttgcacacctcgaagacctcaaattaagccgcgaattgtcccgtgtacgcaccgatttgccgctcgaagttgatttccgtggccgccgcgaacctgactgggagggtcttaaagcgtttttagagcgtcttgaatttggttcgctcttgcatgaattcggccttttagaaagcccgttaccagccgaagaagcaccttggccaccgcccgaaggcgcgtttttaggttaccgtttgagtcgcccggaaccgatgtgggccgaattattggctcttgcagcgtctgcccagggacgtgtgtatcgcgcggaagaccctcatggtgcgctccgcggcctcaaagaagtccgtggactccttgccaaagacttagctgttgttgcattgcgcgaaggtcttgatttacctccgactgatgatccaatgcttcttgcgtacctcttggacccgtcaaacacgacgcccgaaggcgtagcccgtcgttacggcggcgagtggaccgaagatgcaggcgagcgcgcgttattggccgaacgtttgcacgccaatttattaggacgtttgcaaggcgaggaacgtctcctctggctttacgaagaagtggagaaaccattgagtcgcgtgctcgcgcatatggaagctaccggtgtcaaattagacgtggcgtatttggaggcactcagccttgaagttgctgccgaaatgcgccgcttggaggaagaagtattccgtttagcaggccactccttttatcttaattctcgcgatcagttagaacgtgtgttgttcgatgaacttggtctccctcctatcggcaagacagagaagaccggtaaacgtagcacttcagcggcggttttagaagctcttcgcgaagtccatcccattgtggacaagatcttgcagtaccgcgaactcgcgaaattgaaaggcacctatattgaccctcttccggcattagtccacccgaaaacgggacgcctccatacccgcttcaaccaaacagccacggcgaccggtcgtttgtcctcctctgatccaaaccttcagaatattccagtacgtaccccattgggccagaagatccgccgcgcgtttgtagctgaggagggttggcgtttagtggccctcgattatagccaaattgaattacgtgtccttgcccatctttctggcgatgagaacctcatccgcgtgtttcaggaaggcaaagacattcacactcaaacggcaagctggatgtttggattatcagctgaagcgatcgatcctttgatgcgtcgtgcagcgaagaccatcaatttcggtgttctctacggtatgagtgcccatcgtttgtcgcaggaattaggcattccctatgaagaagctgcggcgttcattcagcgctactttcaaagctatcccaaagttaaagcatggatcgagaagactctcgaagaaggccgcacacgtggttacgtagagaccttatttggacgtcgccgctatgttcccgatttaaacgctcgcgggaaatctgtccgtgaagccgccgaacgcatggcgttcaacatgcctgtacagggcacggcagctgacctcatgaaacttgcaatggtgcgcctttttccacaattgcgtgaagttggtgcccgcatgctcttgcaggtccacgatgaactcttgttagaagcgccaaaagagcgtgcggaagaggtggcagccctcgcgaaagaggttatggaaggcgtgtggcccttagcggtgcctcttgaagtcgaagttggtattggcgaggattggttggctgccaaaggataatga

SEQ ID NO: 1798 - protein, 841 aa, synthetic construct
  REGION 1..841: note = Variant of DNA polymerase I from Thermus sp. strain 2.9
MHHHHHHGGSGMLPLFEPKGRVLLVDGHHLAYRNFFALKGLTTSRGEPVQGVYGFAKSLLKALKEDGDVVIVVFDAKAPSFRHEAYEAYKAGRAPTPEDFPRQLALMKELVDLLGLERLEVPGFEADDVLATLAKKAEREGYEVQILTADRDLFQLLSPRISVLHPEGHRITPEWLWEKYGLRPEQWVDFRALAGDPSDNIPGVKGIGEKTALKLLKEWGSLENLLKNLDQVKPESVREKILAHLEDLKLSRELSRVRTDLPLEVDFRGRREPDWEGLKAFLERLEFGSLLHEFGLLESPLPAEEAPWPPPEGAFLGYRLSRPEPMWAELLALAASAQGRVYRAEDPHGALRGLKEVRGLLAKDLAVVALREGLDLPPTDDPMLLAYLLDPSNTTPEGVARRYGGEWTEDAGERALLAERLHANLLGRLQGEERLLWLYEEVEKPLSRVLAHMEATGVKLDVAYLEALSLEVAAEMRRLEEEVFRLAGHSFYLNSRDQLERVLFDELGLPPIGKTEKTGKRSTSAAVLEALREVHPIVDKILQYRELAKLKGTYIDPLPALVHPKTGRLHTRFNQTATATGRLSSSDPNLQNIPVRTPLGQKIRRAFVAEEGWRLVALDYSQIELRVLAHLSGDENLIRVFQEGKDIHTQTASWMFGLSAEAIDPLMRRAAKTINFGVLYGMSAHRLSQELGIPYEEAAAFIQRYFQSYPKVKAWIEKTLEEGRTRGYVETLFGRRRYVPDLNARGKSVREAAERMAFNMPVQGTAADLMKLAMVRLFPQLREVGARMLLQVHDELLLEAPKERAEEVAALAKEVMEGVWPLAVPLEVEVGIGEDWLAAKG

SEQ ID NO: 1799 - DNA, 2529 bp, synthetic construct
  misc_feature 1..2529: note = Variant of DNA polymerase I from Thermus sp. strain 2.9
  source 1..2529: mol_type = other DNA
atgcaccatcatcatcatcatggcggtagcggcatgttaccgttgttcgaacctaaaggtcgcgtgcttctggttgatggccatcatctcgcgtatcgtaacttctttgccctgaaaggattaaccaccagccgtggcgagccggtacagggtgtctacggctttgcaaagtcgctcctgaaagctctgaaagaagacggtgatgtggtgattgttgtctttgatgcgaaagcgccaagttttcgccacgaagcgtacgaagcttacaaagccgggcgtgctccaacgccggaagactttcctcgccaattggcgcttatgaaggaattagtggatttgcttggcctcgaacgcttggaagttcccggtttcgaggcagacgacgtattagcgactctcgcaaagaaagccgaacgtgagggctatgaagtccagatcttgacagcagatcgcgatcttttccagcttttatctccgcgcatctcggtgttacacccggaagggcatcgtatcaccccggaatggctctgggagaaatatggtttgcgtcccgaacaatgggtggattttcgcgccttagcaggcgatccgagcgacaatattccgggagttaaaggtatcggcgagaagacggcgctcaagctccttaaagaatgggggtcgttggagaacttgcttaagaatttagatcaggtcaaaccagagtcagtgcgtgagaagattcttgcacacctcgaagacctcaaattaagccgcgaattgtcccgtgtacgcaccgatttgccgctcgaagttgatttccgtggccgccgcgaacctgactgggagggtcttaaagcgtttttagagcgtcttgaatttggttcgctcttgcatgaattcggccttttagaaagcccgttaccagccgaagaagcaccttggccaccgcccgaaggcgcgtttttaggttaccgtttgagtcgcccggaaccgatgtgggccgaattattggctcttgcagcgtctgcccagggacgtgtgtatcgcgcggaagaccctcatggtgcgctccgcggcctcaaagaagtccgtggactccttgccaaagacttagctgttgttgcattgcgcgaaggtcttgatttacctccgactgatgatccaatgcttcttgcgtacctcttggacccgtcaaacacgacgcccgaaggcgtagcccgtcgttacggcggcgagtggaccgaagatgcaggcgagcgcgcgttattggccgaacgtttgcacgccaatttattaggacgtttgcaaggcgaggaacgtctcctctggctttacgaagaagtggagaaaccattgagtcgcgtgctcgcgcatatggaagctaccggtgtcaaattagacgtggcgtatttggaggcactcagccttgaagttgctgccgaaatgcgccgcttggaggaagaagtattccgtttagcaggccactccttttatcttaattctcgcgatcagttagaacgtgtgttgttcgatgaacttggtctccctcctatcggcaagacagagaagaccggtaaacgtagcacttcagcggcggttttagaagctcttcgcgaagtccatcccattgtggacaagatcttgcagtaccgcgaactcgcgaaattgaaaggcacctatattgaccctcttccggcattagtccacccgaaaacgggacgcctccatacccgcttcaaccaaacagccacggcgaccggtcgtttgtcctcctctgatccaaaccttcagaatattccagtacgtaccccattgggccagaagatccgccgcgcgtttgtagctgaggagggttggcgtttagtggccctcgattatagccaaattgaattacgtgtccttgcccatctttctggcgatgagaacctcatccgcgtgtttcaggaaggcaaagacattcacactcaaacggcaagctggatgtttggattatcagctgaagcgatcgatcctttgatgcgtcgtgcagcgaagaccatcaatttcggtgttctctacggtatgagtgcccatcgtttgtcgcaggaattaggcattccctatgaagaagctgcggcgttcattcagcgctactttcaaagctatcccaaagttaaagcatggatcgagaagactctcgaagaaggccgcacacgtggttacgtagagaccttatttggacgtcgccgctatgttcccgatttaaacgctcgcgtgaaatctgtccgtgaagccgccgaacgcatggcgttcaacatgcctgtacagggcacggcagctgacctcatgaaacttgcaatggtgcgcctttttccacaattgcgtgaagttggtgcccgcatgctcttgcaggtccacgatgaactcttgttagaagcgccaaaagagcgtgcggaagaggtggcagccctcgcgaaaagggttatggaaggcgtgtggcccttagcggtgcctcttgaagtcgaagttggtattggcgaggattggttggctgccaaaggataatga

SEQ ID NO: 1800 - protein, 841 aa, synthetic construct
  REGION 1..841: note = Variant of DNA polymerase I from Thermus sp. strain 2.9
MHHHHHHGGSGMLPLFEPKGRVLLVDGHHLAYRNFFALKGLTTSRGEPVQGVYGFAKSLLKALKEDGDVVIVVFDAKAPSFRHEAYEAYKAGRAPTPEDFPRQLALMKELVDLLGLERLEVPGFEADDVLATLAKKAEREGYEVQILTADRDLFQLLSPRISVLHPEGHRITPEWLWEKYGLRPEQWVDFRALAGDPSDNIPGVKGIGEKTALKLLKEWGSLENLLKNLDQVKPESVREKILAHLEDLKLSRELSRVRTDLPLEVDFRGRREPDWEGLKAFLERLEFGSLLHEFGLLESPLPAEEAPWPPPEGAFLGYRLSRPEPMWAELLALAASAQGRVYRAEDPHGALRGLKEVRGLLAKDLAVVALREGLDLPPTDDPMLLAYLLDPSNTTPEGVARRYGGEWTEDAGERALLAERLHANLLGRLQGEERLLWLYEEVEKPLSRVLAHMEATGVKLDVAYLEALSLEVAAEMRRLEEEVFRLAGHSFYLNSRDQLERVLFDELGLPPIGKTEKTGKRSTSAAVLEALREVHPIVDKILQYRELAKLKGTYIDPLPALVHPKTGRLHTRFNQTATATGRLSSSDPNLQNIPVRTPLGQKIRRAFVAEEGWRLVALDYSQIELRVLAHLSGDENLIRVFQEGKDIHTQTASWMFGLSAEAIDPLMRRAAKTINFGVLYGMSAHRLSQELGIPYEEAAAFIQRYFQSYPKVKAWIEKTLEEGRTRGYVETLFGRRRYVPDLNARVKSVREAAERMAFNMPVQGTAADLMKLAMVRLFPQLREVGARMLLQVHDELLLEAPKERAEEVAALAKRVMEGVWPLAVPLEVEVGIGEDWLAAKG

SEQ ID NO: 1801 - DNA, 2529 bp, synthetic construct
  misc_feature 1..2529: note = Variant of DNA polymerase I from Thermus sp. strain 2.9
  source 1..2529: mol_type = other DNA
atgcaccatcatcatcatcatggcggtagcggcatgttaccgttgttcgaacctaaaggtcgcgtgcttctggttgatggccatcatctcgcgtatcgtaacttctttgccctgaaaggattaaccaccagccgtggcgagccggtacagggtgtctacggctttgcaaagtcgctcctgaaagctctgaaagaagacggtgatgtggtgattgttgtctttgatgcgaaagcgccaagttttcgccacgaagcgtacgaagcttacaaagccgggcgtgctccaacgccggaagactttcctcgccaattggcgcttatgaaggaattagtggatttgcttggcctcgaacgcttggaagttcccggtttcgaggcagacgacgtattagcgactctcgcaaagaaagccgaacgtgagggctatgaagtccagatcttgacagcagatcgcgatcttttccagcttttatctccgcgcatctcggtgttacacccggaagggcatcgtatcaccccggaatggctctgggagaaatatggtttgcgtcccgaacaatgggtggattttcgcgccttagcaggcgatccgagcgacaatattccgggagttaaaggtatcggcgagaagacggcgctcaagctccttaaagaatgggggtcgttggagaacttgcttaagaatttagatcaggtcaaaccagagtcagtgcgtgagaagattcttgcacacctcgaagacctcaaattaagccgcgaattgtcccgtgtacgcaccgatttgccgctcgaagttgatttccgtggccgccgcgaacctgactgggagggtcttaaagcgtttttagagcgtcttgaatttggttcgctcttgcatgaattcggccttttagaaagcccgttaccagccgaagaagcaccttggccaccgcccgaaggcgcgtttttaggttaccgtttgagtcgcccggaaccgatgtgggccgaattagatgctcttgcagcgtctgcccagggacgtgtgtatcgcgcggaagaccctcatggtgcgctccgcggcctcaaagaagtccgtggactccttgccaaagacttagctgttgttgcattgcgcgaaggtcttgatttacctccgactgatgatccaatgcttcttgcgtacctcttggacccgtcaaacacgacgcccgaaggcgtagcccgtcgttacggcggcgagtggaccgaagatgcaggcgagcgcgcgttattggccgaacgtttgcacgccaatttattaggacgtttgcaaggcgaggaacgtctcctctggctttacgaagaagtggagaaaccattgagtcgcgtgctcgcgcatatggaagctaccggtgtcaaattagacgtggcgtatttggaggcactcagccttgaagttgctgccgaaatgcgccgcttggaggaagaagtattccgtttagcaggccactccttttatcttaattctcgcgatcagttagaacgtgtgttgttcgatgaacttggtctccctcctatcggcaagacagagaagaccggtaaacgtagcacttcagcggcggttttagaagctcttcgcgaagtccatcccattgtggacaagatcttgcagtaccgcgaactcgcgaaattgaaaggcacctatattgaccctcttccggcattagtccacccgaaaacgggacgcctccatacccgcttcaaccaaacagccacggcgaccggtcgtttgtcctcctctgatccaaaccttcagaatattccagtacgtaccccattgggccagaagatccgccgcgcgtttgtagctgaggagggttggcgtttagtggccctcgattatagccaaattgaattacgtgtccttgcccatctttctggcgatgagaacctcatccgcgtgtttcaggaaggcaaagacattcacactcaaacggcaagctggatgtttggattatcagctgaagcgatcgatcctttgatgcgtcgtgcagcgaagaccatcaatttcggtgttctctacggtatgagtgcccatcgtttgtcgcaggaattaggcattccctatgaagaagctgcggcgttcattcagcgctactttcaaagctatcccaaagttaaagcatggatcgagaagactctcgaagaaggccgcacacgtggttacgtagagaccttatttggacgtcgccgctatgttcccgatttaaacgctcgcgtgaaatctgtccgtgaagccgccgaacgcatggcgttcaacatgcctgtacagggcacggcagctgacctcatgaaacttgcaatggtgcgcctttttccacaattgcgtgaagttggtgcccgcatgctcttgcaggtccacgatgaactcttgttagaagcgccaaaagagcgtgcggaagaggtggcagccctcgcgaaagaggttatggaaggcgtgtggcccttagcggtgcctcttgaagtcgaagttggtattggcgaggattggttggctgccaaaggataatga

SEQ ID NO: 1802 - protein, 841 aa, synthetic construct
  REGION 1..841: note = Variant of DNA polymerase I from Thermus sp. strain 2.9
MHHHHHHGGSGMLPLFEPKGRVLLVDGHHLAYRNFFALKGLTTSRGEPVQGVYGFAKSLLKALKEDGDVVIVVFDAKAPSFRHEAYEAYKAGRAPTPEDFPRQLALMKELVDLLGLERLEVPGFEADDVLATLAKKAEREGYEVQILTADRDLFQLLSPRISVLHPEGHRITPEWLWEKYGLRPEQWVDFRALAGDPSDNIPGVKGIGEKTALKLLKEWGSLENLLKNLDQVKPESVREKILAHLEDLKLSRELSRVRTDLPLEVDFRGRREPDWEGLKAFLERLEFGSLLHEFGLLESPLPAEEAPWPPPEGAFLGYRLSRPEPMWAELDALAASAQGRVYRAEDPHGALRGLKEVRGLLAKDLAVVALREGLDLPPTDDPMLLAYLLDPSNTTPEGVARRYGGEWTEDAGERALLAERLHANLLGRLQGEERLLWLYEEVEKPLSRVLAHMEATGVKLDVAYLEALSLEVAAEMRRLEEEVFRLAGHSFYLNSRDQLERVLFDELGLPPIGKTEKTGKRSTSAAVLEALREVHPIVDKILQYRELAKLKGTYIDPLPALVHPKTGRLHTRFNQTATATGRLSSSDPNLQNIPVRTPLGQKIRRAFVAEEGWRLVALDYSQIELRVLAHLSGDENLIRVFQEGKDIHTQTASWMFGLSAEAIDPLMRRAAKTINFGVLYGMSAHRLSQELGIPYEEAAAFIQRYFQSYPKVKAWIEKTLEEGRTRGYVETLFGRRRYVPDLNARVKSVREAAERMAFNMPVQGTAADLMKLAMVRLFPQLREVGARMLLQVHDELLLEAPKERAEEVAALAKEVMEGVWPLAVPLEVEVGIGEDWLAAKG

SEQ ID NO: 1803 - DNA, 2529 bp, synthetic construct
  misc_feature 1..2529: note = Variant of DNA polymerase I from Thermus sp. strain 2.9
  source 1..2529: mol_type = other DNA
atgcaccatcatcatcatcatggcggtagcggcatgttaccgttgttcgaacctaaaggtcgcgtgcttctggttgatggccatcatctcgcgtatcgtaacttctttgccctgaaaggattaaccaccagccgtggcgagccggtacagggtgtctacggctttgcaaagtcgctcctgaaagctctgaaagaagacggtgatgtggtgattgttgtctttgatgcgaaagcgccaagttttcgccacgaagcgtacgaagcttacaaagccgggcgtgctccaacgccggaagactttcctcgccaattggcgcttatgaaggaattagtggatttgcttggcctcgaacgcttggaagttcccggtttcgaggcagacgacgtattagcgactctcgcaaagaaagccgaacgtgagggctatgaagtccagatcttgacagcagatcgcgatcttttccagcttttatctccgcgcatctcggtgttacacccggaagggcatcgtatcaccccggaatggctctgggagaaatatggtttgcgtcccgaacaatgggtggattttcgcgccttagcaggcgatccgagcgacaatattccgggagttaaaggtatcggcgagaagacggcgctcaagctccttaaagaatgggggtcgttggagaacttgcttaagaatttagatcaggtcaaaccagagtcagtgcgtgagaagattcttgcacacctcgaagacctcaaattaagccgcgaattgtcccgtgtacgcaccgatttgccgctcgaagttgatttccgtggccgccgcgaacctgactgggagggtcttaaagcgtttttagagcgtcttgaatttggttcgctcttgcatgaattcggccttttagaaagcccgttaccagccgaagaagcaccttggccaccgcccgaaggcgcgtttttaggttaccgtttgagtcgcccggaaccgatgtgggccgaattattggctcttgcagcgtctgcccagggacgtgtgtatcgcgcggaagaccctcatggtgcgctccgcggcctcaaagaagtccgtggactccttgccaaagacttagctgttgttgcattgcgcgaaggtcttgatttacctccgactgatgatccaatgcttcttgcgtacctcttggacccgtcaaacacgacgcccgaaggcgtagcccgtcgttacggcggcgagtggaccgaagatgcaggcgagcgcgcgttattggccgaacgtttgcacgccaatttattaggacgtttgcaaggcgaggaacgtctcctctggctttacgaagaagtggagaaaccattgagtcgcgtgctcgcgcatatggaagctaccggtgtcaaattagacgtggcgtatttggaggcactcagccttgaagttgctgccgaaatgcgccgcttggaggaagaagtattccgtttagcaggccactccttttatcttaattctcgcgatcagttagaacgtgtgttgttcgatgaacttggtctccctcctatcggcaagacagagaagaccggtaaacgtagcacttcagcggcggttttagaagctcttcgcgaagtccatcccattgtggacaagatcttgcagtaccgcgaactcgcgaaattgaaaggcacctatattgaccctcttccggcattagtccacccgaaaacgggacgcctccatacccgcttcaaccaaacagccacggcgaccggtcgtttgtcctcctctgatccaaaccttcagaatattccagtacgtaccccattgggccagaagatccgccgcgcgtttgtagctgaggagggttggcgtttagtggccctcgattatagccaaattgaattacgtgtccttgcccatctttctggcgatgagaacctcatccgcgtgtttcaggaaggcaaagacattcacactcaaacggcaagctggatgtttggattatcagctgaagcgatcgatcctttgatgcgtcgtgcagcgaagaccatcaatttcggtgttctctacggtatgagtgcccatcgtttgtcgcaggaattaggcatttcgtatgaagaagctgcggcgttcattcagcgctactttcaaagctatcccaaagttaaagcatggatcgagaagactctcgaagaaggccgcacacgtggttacgtagagaccttatttggacgtcgccgctatgttcccgatttaaacgctcgcgtgaaatctgtccgtgaagccgccgaacgcatggcgttcaacatgcctgtacagggcacggcagctgacctcatgaaacttgcaatggtgcgcctttttccacaattgcgtgaagttggtgcccgcatgctcttgcaggtccacgatgaactcttgttagaagcgccaaaagagcgtgcggaagaggtggcagccctcgcgaaagaggttatggaaggcgtgtggcccttagcggtgcctcttgaagtcgaagttggtattggcgaggattggttggctgccaaaggataatga

SEQ ID NO: 1804 - protein, 841 aa, synthetic construct
  REGION 1..841: note = Variant of DNA polymerase I from Thermus sp. strain 2.9
MHHHHHHGGSGMLPLFEPKGRVLLVDGHHLAYRNFFALKGLTTSRGEPVQGVYGFAKSLLKALKEDGDVVIVVFDAKAPSFRHEAYEAYKAGRAPTPEDFPRQLALMKELVDLLGLERLEVPGFEADDVLATLAKKAEREGYEVQILTADRDLFQLLSPRISVLHPEGHRITPEWLWEKYGLRPEQWVDFRALAGDPSDNIPGVKGIGEKTALKLLKEWGSLENLLKNLDQVKPESVREKILAHLEDLKLSRELSRVRTDLPLEVDFRGRREPDWEGLKAFLERLEFGSLLHEFGLLESPLPAEEAPWPPPEGAFLGYRLSRPEPMWAELLALAASAQGRVYRAEDPHGALRGLKEVRGLLAKDLAVVALREGLDLPPTDDPMLLAYLLDPSNTTPEGVARRYGGEWTEDAGERALLAERLHANLLGRLQGEERLLWLYEEVEKPLSRVLAHMEATGVKLDVAYLEALSLEVAAEMRRLEEEVFRLAGHSFYLNSRDQLERVLFDELGLPPIGKTEKTGKRSTSAAVLEALREVHPIVDKILQYRELAKLKGTYIDPLPALVHPKTGRLHTRFNQTATATGRLSSSDPNLQNIPVRTPLGQKIRRAFVAEEGWRLVALDYSQIELRVLAHLSGDENLIRVFQEGKDIHTQTASWMFGLSAEAIDPLMRRAAKTINFGVLYGMSAHRLSQELGISYEEAAAFIQRYFQSYPKVKAWIEKTLEEGRTRGYVETLFGRRRYVPDLNARVKSVREAAERMAFNMPVQGTAADLMKLAMVRLFPQLREVGARMLLQVHDELLLEAPKERAEEVAALAKEVMEGVWPLAVPLEVEVGIGEDWLAAKG

SEQ ID NO: 1805 - DNA, 2529 bp, synthetic construct
  misc_feature 1..2529: note = Variant of DNA polymerase I from Thermus sp. strain 2.9
  source 1..2529: mol_type = other DNA
atgcaccatcatcatcatcatggcggtagcggcatgttaccgttgttcgaacctaaaggtcgcgtgcttctggttgatggccatcatctcgcgtatcgtaacttctttgccctgaaaggattaaccaccagccgtggcgagccggtacagggtgtctacggctttgcaaagtcgctcctgaaagctctgaaagaagacggtgatgtggtgattgttgtctttgatgcgaaagcgccaagttttcgccacgaagcgtacgaagcttacaaagccgggcgtgctccaacgccggaagactttcctcgccaattggcgcttatgaaggaattagtggatttgcttggcctcgaacgcttggaagttcccggtttcgaggcagacgacgtattagcgactctcgcaaagaaagccgaacgtgagggctatgaagtccagatcttgacagcagatcgcgatcttttccagcttttatctccgcgcatctcggtgttacacccggaagggcatcgtatcaccccggaatggctctgggagaaatatggtttgcgtcccgaacaatgggtggattttcgcgccttagcaggcgatccgagcgacaatattccgggagttaaaggtatcggcgagaagacggcgctcaagctccttaaagaatgggggtcgttggagaacttgcttaagaatttagatcaggtcaaaccagagtcagtgcgtgagaagattcttgcacacctcgaagacctcaaattaagccgcgaattgtcccgtgtacgcaccgatttgccgctcgaagttgatttccgtggccgccgcgaacctgactgggagggtcttaaagcgtttttagagcgtcttgaatttggttcgctcttgcatgaattcggccttttagaaagcccgttaccagccgaagaagcaccttggccaccgcccgaaggcgcgtttttaggttaccgtttgagtcgcccggaaccgatgtgggccgaattattggctcttgcagcgtctgcccagggacgtgtgtatcgcgcggaagaccctcatggtgcgctccgcggcctcaaagaagtccgtggactccttgccaaagacttagctgttgttgcattgcgcgaaggtcttgatttacctccgactgatgatccaatgcttcttgcgtacctcttggacccgtcaaacacgacgcccgaaggcgtagcccgtcgttacggcggcgagtggaccgaagatgcaggcgagcgcgcgttattggccgaacgtttgcacgccaatttattaggacgtttgcaaggcgaggaacgtctcctctggctttacgaagaagtggagaaaccattgagtcgcgtgctcgcgcatatggaagctaccggtgtcaaattagacgtggcgtatttggaggcactcagccttgaagttgctgccgaaatgcgccgcttggaggaagaagtattccgtttagcaggccactccttttatcttaattctcgcgatcagttagaacgtgtgttgttcgatgaacttggtctccctcctatcggcaagacagagaagaccggtaaacgtagcacttcagcggcggttttagaagctcttcgcgaagtccatcccattgtggacaagatcttgcagtaccgcgaactcgcgaaattgaaaggcacctatattgaccctcttccggcattagtccacccgaaaacgggacgcctccatacccgcttcaaccaaacagccacggcgaccggtcgtttgtcctcctctgatccaaaccttcagaatattccagtacgtaccccattgggccagaagatccgccgcgcgtttgtagctgaggagggttggcgtttagtggccctcgattatagccaaattgaattacgtgtccttgcccatctttctggcgatgagaacctcatccgcgtgtttcaggaaggcaaagacattcacactcaaacggcaagctggatgtttggattatcagctgaagcgatcgatcctatgatgcgtcgtgcagcgaagaccatcaatttcggtgttctctacggtatgagtgcccatcgtttgtcgcaggaattaggcattccctatgaagaagctgcggcgttcattcagcgctactttcaaagctatcccaaagttaaagcatggatcgagaagactctcgaagaaggccgcacacgtggttacgtagagaccttatttggacgtcgccgctatgttcccgatttaaacgctcgcgtgaaatctgtccgtgaagccgccgaacgcatggcgttcaacatgcctgtacagggcacggcagctgacctcatgaaacttgcaatggtgcgcctttttccacaattgcgtgaagttggtgcccgcatgctcttgcaggtccacgatgaactcttgttagaagcgccaaaagagcgtgcggaagaggtggcagccctcgcgaaagaggttatggaaggcgtgtggcccttagcggtgcctcttgaagtcgaagttggtattggcgaggattggttggctgccaaaggataatga

SEQ ID NO: 1806 - protein, 841 aa, synthetic construct
  REGION 1..841: note = Variant of DNA polymerase I from Thermus sp. strain 2.9
MHHHHHHGGSGMLPLFEPKGRVLLVDGHHLAYRNFFALKGLTTSRGEPVQGVYGFAKSLLKALKEDGDVVIVVFDAKAPSFRHEAYEAYKAGRAPTPEDFPRQLALMKELVDLLGLERLEVPGFEADDVLATLAKKAEREGYEVQILTADRDLFQLLSPRISVLHPEGHRITPEWLWEKYGLRPEQWVDFRALAGDPSDNIPGVKGIGEKTALKLLKEWGSLENLLKNLDQVKPESVREKILAHLEDLKLSRELSRVRTDLPLEVDFRGRREPDWEGLKAFLERLEFGSLLHEFGLLESPLPAEEAPWPPPEGAFLGYRLSRPEPMWAELLALAASAQGRVYRAEDPHGALRGLKEVRGLLAKDLAVVALREGLDLPPTDDPMLLAYLLDPSNTTPEGVARRYGGEWTEDAGERALLAERLHANLLGRLQGEERLLWLYEEVEKPLSRVLAHMEATGVKLDVAYLEALSLEVAAEMRRLEEEVFRLAGHSFYLNSRDQLERVLFDELGLPPIGKTEKTGKRSTSAAVLEALREVHPIVDKILQYRELAKLKGTYIDPLPALVHPKTGRLHTRFNQTATATGRLSSSDPNLQNIPVRTPLGQKIRRAFVAEEGWRLVALDYSQIELRVLAHLSGDENLIRVFQEGKDIHTQTASWMFGLSAEAIDPMMRRAAKTINFGVLYGMSAHRLSQELGIPYEEAAAFIQRYFQSYPKVKAWIEKTLEEGRTRGYVETLFGRRRYVPDLNARVKSVREAAERMAFNMPVQGTAADLMKLAMVRLFPQLREVGARMLLQVHDELLLEAPKERAEEVAALAKEVMEGVWPLAVPLEVEVGIGEDWLAAKG

SEQ ID NO: 1807 - DNA, 2529 bp, synthetic construct
  misc_feature 1..2529: note = Variant of DNA polymerase I from Thermus sp. strain 2.9
  source 1..2529: mol_type = other DNA
atgcaccatcatcatcatcatggcggtagcggcatgttaccgttgttcgaacctaaaggtcgcgtgcttctggttgatggccatcatctcgcgtatcgtaacttctttgccctgaaaggattaaccaccagccgtggcgagccggtacagggtgtctacggctttgcaaagtcgctcctgaaagctctgaaagaagacggtgatgtggtgattgttgtctttgatgcgaaagcgccaagttttcgccacgaagcgtacgaagcttacaaagccgggcgtgctccaacgccggaagactttcctcgccaattggcgcttatgaaggaattagtggatttgcttggcctcgaacgcttggaagttcccggtttcgaggcagacgacgtattagcgactctcgcaaagaaagccgaacgtgagggctatgaagtccagatcttgacagcagatcgcgatcttttccagcttttatctccgcgcatctcggtgttacacccggaagggcatcgtatcaccccggaatggctctgggagaaatatggtttgcgtcccgaacaatgggtggattttcgcgccttagcaggcgatccgagcgacaatattccgggagttaaaggtatcggcgagaagacggcgctcaagctccttaaagaatgggggtcgttggagaacttgcttaagaatttagatcaggtcaaaccagagtcagtgcgtgagaagattcttgcacacctcgaagacctcaaattaagccgcgaattgtcccgtgtacgcaccgatttgccgctcgaagttgatttccgtggccgccgcgaacctgactgggagggtcttaaagcgtttttagagcgtcttgaatttggttcgctcttgcatgaattcggccttttagaaagcccgttaccagccgaagaagcaccttggccaccgcccgaaggcgcgtttttaggttaccgtttgagtcgcccggaaccgatgtgggccgaattattggctcttgcagcgtctgcccagggacgtgtgtatcgcgcggaagaccctcatggtgcgctccgcggcctcaaagaagtccgtggactccttgccaaagacttagctgttgttgcattgcgcgaaggtcttgatttacctccgactgatgatccaatgcttcttgcgtacctcttggacccgtcaaacacgacgcccgaaggcgtagcccgtcgttacggcggcgagtggaccgaagatgcaggcgagcgcgcgttattggccgaacgtttgcacgccaatttattaggacgtttgcaaggcgaggaacgtctcctctggctttacgaagaagtggagaaaccattgagtcgcgtgctcgcgcatatggaagctaccggtgtcaaattagacgtggcgtatttggaggcactcagccttgaagttgctgccgaaatgcgccgcttggaggaagaagtattccgtttagcaggccactccttttatcttaattctcgcgatcagttagaacgtgtgttgttcgatgaacttggtctccctcctatcggcaagacagagaagaccggtaaacgtagcacttcagcggcggttttagaagctcttcgcgaagtccatcccattgtggacaagatcttgcagtaccgcgaactcgcgaaattgaaaggcacctatattgaccctcttccggcattagtccacccgaaaacgggacgcctccatacccgcttcaaccaaacagccacggcgaccggtcgtttgtcctcctctgatccaaaccttcagaatattccagtacgtaccccattgggccagaagatccgccgcgcgtttgtagctgaggagggttggcgtttagtggccctcgattatagccaaattgaattacgtgtccttgcccatctttctggcgatgagaacctcatccgcgtgtttcaggaaggcaaagacattcacactcaaacggcaagctggatgtttggattatcagctgaagcgatcgatcctttgatgcgtcgtgcagcgaagaccatcaatttcggtgttctctacggtatgagtgcccatcgtttgtcgcaggaattaggcattccctatgaagaagctgcggcgttcattcaggtgtactttcaaagctatcccaaagttaaagcatggatcgagaagactctcgaagaaggccgcacacgtggttacgtagagaccttatttggacgtcgccgctatgttcccgatttaaacgctcgcgtgaaatctgtccgtgaagccgccgaacgcatggcgttcaacatgcctgtacagggcacggcagctgacctcatgaaacttgcaatggtgcgcctttttccacaattgcgtgaagttggtgcccgcatgctcttgcaggtccacgatgaactcttgttagaagcgccaaaagagcgtgcggaagaggtggcagccctcgcgaaagaggttatggaaggcgtgtggcccttagcggtgcctcttgaagtcgaagttggtattggcgaggattggttggctgccaaaggataatga

SEQ ID NO: 1808 - protein, 841 aa, synthetic construct
  REGION 1..841: note = Variant of DNA polymerase I from Thermus sp. strain 2.9
MHHHHHHGGSGMLPLFEPKGRVLLVDGHHLAYRNFFALKGLTTSRGEPVQGVYGFAKSLLKALKEDGDVVIVVFDAKAPSFRHEAYEAYKAGRAPTPEDFPRQLALMKELVDLLGLERLEVPGFEADDVLATLAKKAEREGYEVQILTADRDLFQLLSPRISVLHPEGHRITPEWLWEKYGLRPEQWVDFRALAGDPSDNIPGVKGIGEKTALKLLKEWGSLENLLKNLDQVKPESVREKILAHLEDLKLSRELSRVRTDLPLEVDFRGRREPDWEGLKAFLERLEFGSLLHEFGLLESPLPAEEAPWPPPEGAFLGYRLSRPEPMWAELLALAASAQGRVYRAEDPHGALRGLKEVRGLLAKDLAVVALREGLDLPPTDDPMLLAYLLDPSNTTPEGVARRYGGEWTEDAGERALLAERLHANLLGRLQGEERLLWLYEEVEKPLSRVLAHMEATGVKLDVAYLEALSLEVAAEMRRLEEEVFRLAGHSFYLNSRDQLERVLFDELGLPPIGKTEKTGKRSTSAAVLEALREVHPIVDKILQYRELAKLKGTYIDPLPALVHPKTGRLHTRFNQTATATGRLSSSDPNLQNIPVRTPLGQKIRRAFVAEEGWRLVALDYSQIELRVLAHLSGDENLIRVFQEGKDIHTQTASWMFGLSAEAIDPLMRRAAKTINFGVLYGMSAHRLSQELGIPYEEAAAFIQVYFQSYPKVKAWIEKTLEEGRTRGYVETLFGRRRYVPDLNARVKSVREAAERMAFNMPVQGTAADLMKLAMVRLFPQLREVGARMLLQVHDELLLEAPKERAEEVAALAKEVMEGVWPLAVPLEVEVGIGEDWLAAKG

SEQ ID NO: 1809 - DNA, 2529 bp, synthetic construct
  misc_feature 1..2529: note = Variant of DNA polymerase I from Thermus sp. strain 2.9
  source 1..2529: mol_type = other DNA
atgcaccatcatcatcatcatggcggtagcggcatgttaccgttgttcgaacctaaaggtcgcgtgcttctggttgatggccatcatctcgcgtatcgtaacttctttgccctgaaaggattaaccaccagccgtggcgagccggtacagggtgtctacggctttgcaaagtcgctcctgaaagctctgaaagaagacggtgatgtggtgattgttgtctttgatgcgaaagcgccaagttttcgccacgaagcgtacgaagcttacaaagccgggcgtgctccaacgccggaagactttcctcgccaattggcgcttatgaaggaattagtggatttgcttggcctcgaacgcttggaagttcccggtttcgaggcagacgacgtattagcgactctcgcaaagaaagccgaacgtgagggctatgaagtccagatcttgacagcagatcgcgatcttttccagcttttatctccgcgcatctcggtgttacacccggaagggcatcgtatcaccccggaatggctctgggagaaatatggtttgcgtcccgaacaatgggtggattttcgcgccttagcaggcgatccgagcgacaatattccgggagttaaaggtatcggcgagaagacggcgctcaagctccttaaagaatgggggtcgttggagaacttgcttaagaatttagatcaggtcaaaccagagtcagtgcgtgagaagattcttgcacacctcgaagacctcaaattaagccgcgaattgtcccgtgtacgcaccgatttgccgctcgaagttgatttccgtggccgccgcgaacctgactgggagggtcttaaagcgtttttagagcgtcttgaatttggttcgctcttgcatgaattcggccttttagaaagcccgttaccagccgaagaagcaccttggccaccgcccgaaggcgcgtttttaggttaccgtttgagtcgcccggaaccgatgtgggccgaattattggctcttgcagcgtctgcccagggacgtgtgtatcgcgcggaagaccctcatggtgcgctccgcggcctcaaagaagtccgtggactccttgccaaagacttagctgttgttgcattgcgcgaaggtcttgatttacctccgactgatgatccaatgcttcttgcgtacctcttggacccgtcaaacacgacgcccgaaggcgtagcccgtcgttacggcggcgagtggaccgaagatgcaggcgagcgcgcgttattggccgaacgtttgcacgccaatttattaggacgtttgcaaggcgaggaacgtctcctctggctttacgaagaagtggagaaaccattgagtcgcgtgctcgcgcatatggaagctaccggtgtcaaattagacgtggcgtatttggaggcactcagccttgaagttgctgccgaaatgcgccgcttggaggaagaagtattccgtttagcaggccactccttttatcttaattctcgcgatcagttagaacgtgtgttgttcgatgaacttggtctccctcctatcggcaagacagagaagaccggtaaacgtagcacttcagcggcggttttagaagctcttcgcgaagtccatcccattgtggacaagatcttgcagtaccgcgaactcgcgaaattgaaaggcacctatattgaccctcttccggcattagtccacccgaaaacgggacgcctccatacccgcttcaaccaaacagccacggcgaccggtcgtttgtcctcctctgatccaaaccttcagaatattccagtacgtaccccattgggccagaagatccgccgcgcgtttgtagctgaggagggttggcgtttagtggccctcgattatagccaaattgaattacgtgtccttgcccatctttctggcgatgagaacctcatccgcgtgtttcaggaaggcaaagacattcacactcaaacggcaagctggatgtttggattatcagctgaagcgatcgatcctaagatgcgtcgtgcagcgaagaccatcaatttcggtgttctctacggtatgagtgcccatcgtttgtcgcaggaattaggcattccctatgaagaagctgcggcgttcattcagcgctactttcaaagctatcccaaagttaaagcatggatcgagaagactctcgaagaaggccgcacacgtggttacgtagagaccttatttggacgtcgccgctatgttcccgatttaaacgctcgcgtgaaatctgtccgtgaagccgccgaacgcatggcgttcaacatgcctgtacagggcacggcagctgacctcatgaaacttgcaatggtgcgcctttttccacaattgcgtgaagttggtgcccgcatgctcttgcaggtccacgatgaactcttgttagaagcgccaaaagagcgtgcggaagaggtggcagccctcgcgaaagaggttatggaaggcgtgtggcccttagcggtgcctcttgaagtcgaagttggtattggcgaggattggttggctgccaaaggataatga

SEQ ID NO: 1810 - protein, 841 aa, synthetic construct
  REGION 1..841: note = Variant of DNA polymerase I from Thermus sp. strain 2.9
MHHHHHHGGSGMLPLFEPKGRVLLVDGHHLAYRNFFALKGLTTSRGEPVQGVYGFAKSLLKALKEDGDVVIVVFDAKAPSFRHEAYEAYKAGRAPTPEDFPRQLALMKELVDLLGLERLEVPGFEADDVLATLAKKAEREGYEVQILTADRDLFQLLSPRISVLHPEGHRITPEWLWEKYGLRPEQWVDFRALAGDPSDNIPGVKGIGEKTALKLLKEWGSLENLLKNLDQVKPESVREKILAHLEDLKLSRELSRVRTDLPLEVDFRGRREPDWEGLKAFLERLEFGSLLHEFGLLESPLPAEEAPWPPPEGAFLGYRLSRPEPMWAELLALAASAQGRVYRAEDPHGALRGLKEVRGLLAKDLAVVALREGLDLPPTDDPMLLAYLLDPSNTTPEGVARRYGGEWTEDAGERALLAERLHANLLGRLQGEERLLWLYEEVEKPLSRVLAHMEATGVKLDVAYLEALSLEVAAEMRRLEEEVFRLAGHSFYLNSRDQLERVLFDELGLPPIGKTEKTGKRSTSAAVLEALREVHPIVDKILQYRELAKLKGTYIDPLPALVHPKTGRLHTRFNQTATATGRLSSSDPNLQNIPVRTPLGQKIRRAFVAEEGWRLVALDYSQIELRVLAHLSGDENLIRVFQEGKDIHTQTASWMFGLSAEAIDPKMRRAAKTINFGVLYGMSAHRLSQELGIPYEEAAAFIQRYFQSYPKVKAWIEKTLEEGRTRGYVETLFGRRRYVPDLNARVKSVREAAERMAFNMPVQGTAADLMKLAMVRLFPQLREVGARMLLQVHDELLLEAPKERAEEVAALAKEVMEGVWPLAVPLEVEVGIGEDWLAAKG

SEQ ID NO: 1811 - DNA, 2529 bp, synthetic construct
  misc_feature 1..2529: note = Variant of DNA polymerase I from Thermus sp. strain 2.9
  source 1..2529: mol_type = other DNA
atgcaccatcatcatcatcatggcggtagcggcatgttaccgttgttcgaacctaaaggtcgcgtgcttctggttgatggccatcatctcgcgtatcgtaacttctttgccgtgaaaggattaaccaccagccgtggcgagccggtacagggtgtctacggctttgcaaagtcgctcctgaaagctctgaaagaagacggtgatgtggtgattgttgtctttgatgcgaaagcgccaagttttcgccacgaagcgtacgaagcttacaaagccgggcgtgctccaacgccggaagactttcctcgccaattggcgcttatgaaggaattagtggatttgcttggcctcgaacgcttggaagttcccggtttcgaggcagacgacgtattagcgactctcgcaaagaaagccgaacgtgagggctatgaagtccagatcttgacagcagatcgcgatcttttccagcttttatctccgcgcatctcggtgttacacccggaagggcatcgtatcaccccggaatggctctgggagaaatatggtttgcgtcccgaacaatgggtggattttcgcgccttagcaggcgatccgagcgacaatattccgggagttaaaggtatcggcgagaagacggcgctcaagctccttaaagaatgggggtcgttggagaacttgcttaagaatttagatcaggtcaaaccagagtcagtgcgtgagaagattcttgcacacctcgaagacctcaaattaagccgcgaattgtcccgtgtacgcaccgatttgccgctcgaagttgatttccgtggccgccgcgaacctgactgggagggtcttaaagcgtttttagagcgtcttgaatttggttcgctcttgcatgaattcggccttttagaaagcccgttaccagccgaagaagcaccttggccaccgcccgaaggcgcgtttttaggttaccgtttgagtcgcccggaaccgatgtgggccgaattattggctcttgcagcgtctgcccagggacgtgtgtatcgcgcggaagaccctcatggtgcgctccgcggcctcaaagaagtccgtggactccttgccaaagacttagctgttgttgcattgcgcgaaggtcttgatttacctccgactgatgatccaatgcttcttgcgtacctcttggacccgtcaaacacgacgcccgaaggcgtagcccgtcgttacggcggcgagtggaccgaagatgcaggcgagcgcgcgttattggccgaacgtttgcacgccaatttattaggacgtttgcaaggcgaggaacgtctcctctggctttacgaagaagtggagaaaccattgagtcgcgtgctcgcgcatatggaagctaccggtgtcaaattagacgtggcgtatttggaggcactcagccttgaagttgctgccgaaatgcgccgcttggaggaagaagtattccgtttagcaggccactccttttatcttaattctcgcgatcagttagaacgtgtgttgttcgatgaacttggtctccctcctatcggcaagacagagaagaccggtaaacgtagcacttcagcggcggttttagaagctcttcgcgaagtccatcccattgtggacaagatcttgcagtaccgcgaactcgcgaaattgaaaggcacctatattgaccctcttccggcattagtccacccgaaaacgggacgcctccatacccgcttcaaccaaacagccacggcgaccggtcgtttgtcctcctctgatccaaaccttcagaatattccagtacgtaccccattgggccagaagatccgccgcgcgtttgtagctgaggagggttggcgtttagtggccctcgattatagccaaattgaattacgtgtccttgcccatctttctggcgatgagaacctcatccgcgtgtttcaggaaggcaaagacattcacactcaaacggcaagctggatgtttggattatcagctgaagcgatcgatcctttgatgcgtcgtgcagcgaagaccatcaatttcggtgttctctacggtatgagtgcccatcgtttgtcgcaggaattaggcattccctatgaagaagctgcggcgttcattcagcgctactttcaaagctatcccaaagttaaagcatggatcgagaagactctcgaagaaggccgcacacgtggttacgtagagaccttatttggacgtcgccgctatgttcccgatttaaacgctcgcgtgaaatctgtccgtgaagccgccgaacgcatggcgttcaacatgcctgtacagggcacggcagctgacctcatgaaacttgcaatggtgcgcctttttccacaattgcgtgaagttggtgcccgcatgctcttgcaggtccacgatgaactcttgttagaagcgccaaaagagcgtgcggaagaggtggcagccctcgcgaaagaggttatggaaggcgtgtggcccttagcggtgcctcttgaagtcgaagttggtattggcgaggattggttggctgccaaaggataatga

SEQ ID NO: 1812 - protein, 841 aa, synthetic construct
  REGION 1..841: note = Variant of DNA polymerase I from Thermus sp. strain 2.9
MHHHHHHGGSGMLPLFEPKGRVLLVDGHHLAYRNFFAVKGLTTSRGEPVQGVYGFAKSLLKALKEDGDVVIVVFDAKAPSFRHEAYEAYKAGRAPTPEDFPRQLALMKELVDLLGLERLEVPGFEADDVLATLAKKAEREGYEVQILTADRDLFQLLSPRISVLHPEGHRITPEWLWEKYGLRPEQWVDFRALAGDPSDNIPGVKGIGEKTALKLLKEWGSLENLLKNLDQVKPESVREKILAHLEDLKLSRELSRVRTDLPLEVDFRGRREPDWEGLKAFLERLEFGSLLHEFGLLESPLPAEEAPWPPPEGAFLGYRLSRPEPMWAELLALAASAQGRVYRAEDPHGALRGLKEVRGLLAKDLAVVALREGLDLPPTDDPMLLAYLLDPSNTTPEGVARRYGGEWTEDAGERALLAERLHANLLGRLQGEERLLWLYEEVEKPLSRVLAHMEATGVKLDVAYLEALSLEVAAEMRRLEEEVFRLAGHSFYLNSRDQLERVLFDELGLPPIGKTEKTGKRSTSAAVLEALREVHPIVDKILQYRELAKLKGTYIDPLPALVHPKTGRLHTRFNQTATATGRLSSSDPNLQNIPVRTPLGQKIRRAFVAEEGWRLVALDYSQIELRVLAHLSGDENLIRVFQEGKDIHTQTASWMFGLSAEAIDPLMRRAAKTINFGVLYGMSAHRLSQELGIPYEEAAAFIQRYFQSYPKVKAWIEKTLEEGRTRGYVETLFGRRRYVPDLNARVKSVREAAERMAFNMPVQGTAADLMKLAMVRLFPQLREVGARMLLQVHDELLLEAPKERAEEVAALAKEVMEGVWPLAVPLEVEVGIGEDWLAAKG

SEQ ID NO: 1813 - DNA, 2529 bp, synthetic construct
  misc_feature 1..2529: note = Variant of DNA polymerase I from Thermus sp. strain 2.9
  source 1..2529: mol_type = other DNA
atgcaccatcatcatcatcatggcggtagcggcatgttaccgttgttcgaacctaaaggtcgcgtgcttctggttgatggccatcatctcgcgtatcgtaacttctttgccgagaaaggattaaccaccagccgtggcgagccggtacagggtgtctacggctttgcaaagtcgctcctgaaagctctgaaagaagacggtgatgtggtgattgttgtctttgatgcgaaagcgccaagttttcgccacgaagcgtacgaagcttacaaagccgggcgtgctccaacgccggaagactttcctcgccaattggcgcttatgaaggaattagtggatttgcttggcctcgaacgcttggaagttcccggtttcgaggcagacgacgtattagcgactctcgcaaagaaagccgaacgtgagggctatgaagtccagatcttgacagcagatcgcgatcttttccagcttttatctccgcgcatctcggtgttacacccggaagggcatcgtatcaccccggaatggctctgggagaaatatggtttgcgtcccgaacaatgggtggattttcgcgccttagcaggcgatccgagcgacaatattccgggagttaaaggtatcggcgagaagacggcgctcaagctccttaaagaatgggggtcgttggagaacttgcttaagaatttagatcaggtcaaaccagagtcagtgcgtgagaagattcttgcacacctcgaagacctcaaattaagccgcgaattgtcccgtgtacgcaccgatttgccgctcgaagttgatttccgtggccgccgcgaacctgactgggagggtcttaaagcgtttttagagcgtcttgaatttggttcgctcttgcatgaattcggccttttagaaagcccgttaccagccgaagaagcaccttggccaccgcccgaaggcgcgtttttaggttaccgtttgagtcgcccggaaccgatgtgggccgaattattggctcttgcagcgtctgcccagggacgtgtgtatcgcgcggaagaccctcatggtgcgctccgcggcctcaaagaagtccgtggactccttgccaaagacttagctgttgttgcattgcgcgaaggtcttgatttacctccgactgatgatccaatgcttcttgcgtacctcttggacccgtcaaacacgacgcccgaaggcgtagcccgtcgttacggcggcgagtggaccgaagatgcaggcgagcgcgcgttattggccgaacgtttgcacgccaatttattaggacgtttgcaaggcgaggaacgtctcctctggctttacgaagaagtggagaaaccattgagtcgcgtgctcgcgcatatggaagctaccggtgtcaaattagacgtggcgtatttggaggcactcagccttgaagttgctgccgaaatgcgccgcttggaggaagaagtattccgtttagcaggccactccttttatcttaattctcgcgatcagttagaacgtgtgttgttcgatgaacttggtctccctcctatcggcaagacagagaagaccggtaaacgtagcacttcagcggcggttttagaagctcttcgcgaagtccatcccattgtggacaagatcttgcagtaccgcgaactcgcgaaattgaaaggcacctatattgaccctcttccggcattagtccacccgaaaacgggacgcctccatacccgcttcaaccaaacagccacggcgaccggtcgtttgtcctcctctgatccaaaccttcagaatattccagtacgtaccccattgggccagaagatccgccgcgcgtttgtagctgaggagggttggcgtttagtggccctcgattatagccaaattgaattacgtgtccttgcccatctttctggcgatgagaacctcatccgcgtgtttcaggaaggcaaagacattcacactcaaacggcaagctggatgtttggattatcagctgaagcgatcgatcctttgatgcgtcgtgcagcgaagaccatcaatttcggtgttctctacggtatgagtgcccatcgtttgtcgcaggaattaggcattccctatgaagaagctgcggcgttcattcagcgctactttcaaagctatcccaaagttaaagcatggatcgagaagactctcgaagaaggccgcacacgtggttacgtagagaccttatttggacgtcgccgctatgttcccgatttaaacgctcgcgtgaaatctgtccgtgaagccgccgaacgcatggcgttcaacatgcctgtacagggcacggcagctgacctcatgaaacttgcaatggtgcgcctttttccacaattgcgtgaagttggtgcccgcatgctcttgcaggtccacgatgaactcttgttagaagcgccaaaagagcgtgcggaagaggtggcagccctcgcgaaagaggttatggaaggcgtgtggcccttagcggtgcctcttgaagtcgaagttggtattggcgaggattggttggctgccaaaggataatga

SEQ ID NO: 1814 - protein, 841 aa, synthetic construct
  REGION 1..841: note = Variant of DNA polymerase I from Thermus sp. strain 2.9
MHHHHHHGGSGMLPLFEPKGRVLLVDGHHLAYRNFFAEKGLTTSRGEPVQGVYGFAKSLLKALKEDGDVVIVVFDAKAPSFRHEAYEAYKAGRAPTPEDFPRQLALMKELVDLLGLERLEVPGFEADDVLATLAKKAEREGYEVQILTADRDLFQLLSPRISVLHPEGHRITPEWLWEKYGLRPEQWVDFRALAGDPSDNIPGVKGIGEKTALKLLKEWGSLENLLKNLDQVKPESVREKILAHLEDLKLSRELSRVRTDLPLEVDFRGRREPDWEGLKAFLERLEFGSLLHEFGLLESPLPAEEAPWPPPEGAFLGYRLSRPEPMWAELLALAASAQGRVYRAEDPHGALRGLKEVRGLLAKDLAVVALREGLDLPPTDDPMLLAYLLDPSNTTPEGVARRYGGEWTEDAGERALLAERLHANLLGRLQGEERLLWLYEEVEKPLSRVLAHMEATGVKLDVAYLEALSLEVAAEMRRLEEEVFRLAGHSFYLNSRDQLERVLFDELGLPPIGKTEKTGKRSTSAAVLEALREVHPIVDKILQYRELAKLKGTYIDPLPALVHPKTGRLHTRFNQTATATGRLSSSDPNLQNIPVRTPLGQKIRRAFVAEEGWRLVALDYSQIELRVLAHLSGDENLIRVFQEGKDIHTQTASWMFGLSAEAIDPLMRRAAKTINFGVLYGMSAHRLSQELGIPYEEAAAFIQRYFQSYPKVKAWIEKTLEEGRTRGYVETLFGRRRYVPDLNARVKSVREAAERMAFNMPVQGTAADLMKLAMVRLFPQLREVGARMLLQVHDELLLEAPKERAEEVAALAKEVMEGVWPLAVPLEVEVGIGEDWLAAKG

SEQ ID NO: 1815 - DNA, 2529 bp, synthetic construct
  misc_feature 1..2529: note = Variant of DNA polymerase I from Thermus sp. strain 2.9
  source 1..2529: mol_type = other DNA
atgcaccatcatcatcatcatggcggtagcggcatgttaccgttgttcgaacctaaaggtcgcgtgcttctggttgatggccatcatctcgcgtatcgtaacttctttgccctgaaaggattaaccaccagccgtggcgagccggtacagggtgtctacggctttgcaaagtcgctcctgaaagctctgaaagaagacggtgatgtggtgattgttgtctttgatgcgaaagcgccaagttttcgccacgaagcgtacgaagcttacaaagccgggcgtgctccaacgccggaagactttcctcgccaattggcgcttatgaaggaattagtggatttgcttggcctcgaacgcttggaagttcccggtttcgaggcagacgacgtattagcgactctcgcaaagaaagccgaacgtgagggctatgaagtccagatcttgacagcagatcgcgatcttttccagcttttatctccgcgcatctcggtgttacacccggaagggcatcgtatcaccccggaatggctctgggagaaatatggtttgcgtcccgaacaatgggtggattttcgcgccttagcaggcgatccgagcgacaatattccgggagttaaaggtatcggcgagaagacggcgctcaagctccttaaagaatgggggtcgttggagaacttgcttaagaatttagatcaggtcaaaccagagtcagtgcgtgagaagattcttgcacacctcgaagacctcaaattaagccgcgaattgtcccgtgtacgcaccgatttgccgctcgaagttgatttccgtggccgccgcgaacctgactgggagggtcttaaagcgtttttagagcgtcttgaatttggttcgctcttgcatgaattcggccttttagaaagcccgttaccagccgaagaagcaccttggccaccgcccgaaggcgcgtttttaggttaccgtttgagtcgcccggaaccgatgtgggccgaattattggctcttgcagcgtctgcccagggacgtgtgtatcgcgcggaagaccctcatggtgcgctccgcggcctcaaagaagtccgtggactccttgccaaagacttagctgttgttgcattgcgcgaaggtcttgatttacctccgactgatgatccaatgcttcttgcgtacctcttggacccgtcaaacacgacgcccgaaggcgtagcccgtcgttacggcggcgagtggaccgaagatgcaggcgagcgcgcgttattggccgaacgtttgcacgccaatttattaggacgtttgcaaggcgaggaacgtctcctctggctttacgaagaagtggagaaaccattgagtcgcgtgctcgcgcatatggaagctaccggtgtcaaattagacgtggcgtatttggaggcactcagccttgaagttgctgccgaaatgcgccgcttggaggaagaagtattccgtttagcaggccactccttttatcttaattctcgcgatcagttagaacgtgtgttgttcgatgaacttggtctccctcctatcggcaagacagagaagaccggtaaacgtagcacttcagcggcggttttagaagctcttcgcgaagtccatcccattgtggacaagatcttgcagtaccgcgaactcgcgaaattgaaaggcacctatattgaccctcttccggcattagtccacccgaaaacgggacgcctccatacccgcttcaaccaaacagccacggcgaccggtcgtttgtcctcctctgatccaaaccttcagaatattccagtacgtaccccattgggccagaagatccgccgcgcgtttgtagctgaggagggttggcgtttagtggccctcgattatagccaaattgaattacgtgtccttgcccatctttctggcgatgagaacctcatccgcgtgtttcaggaaggcaaagacattcacactcaaacggcaagctggatgtttggattatcagctgaagcgatcgatcctttgatgcgtcgtgcagcgaagaccatcaatttcggtgttctctacggtatgagtgcccatcgtttgtcgcaggaattaggcattacttatgaagaagctgcggcgttcattcagcgctactttcaaagctatcccaaagttaaagcatggatcgagaagactctcgaagaaggccgcacacgtggttacgtagagaccttatttggacgtcgccgctatgttcccgatttaaacgctcgcgtgaaatctgtccgtgaagccgccgaacgcatggcgttcaacatgcctgtacagggcacggcagctgacctcatgaaacttgcaatggtgcgcctttttccacaattgcgtgaagttggtgcccgcatgctcttgcaggtccacgatgaactcttgttagaagcgccaaaagagcgtgcggaagaggtggcagccctcgcgaaagaggttatggaaggcgtgtggcccttagcggtgcctcttgaagtcgaagttggtattggcgaggattggttggctgccaaaggataatga

SEQ ID NO: 1816 - protein, 841 aa, synthetic construct
  REGION 1..841: note = Variant of DNA polymerase I from Thermus sp. strain 2.9
MHHHHHHGGSGMLPLFEPKGRVLLVDGHHLAYRNFFALKGLTTSRGEPVQGVYGFAKSLLKALKEDGDVVIVVFDAKAPSFRHEAYEAYKAGRAPTPEDFPRQLALMKELVDLLGLERLEVPGFEADDVLATLAKKAEREGYEVQILTADRDLFQLLSPRISVLHPEGHRITPEWLWEKYGLRPEQWVDFRALAGDPSDNIPGVKGIGEKTALKLLKEWGSLENLLKNLDQVKPESVREKILAHLEDLKLSRELSRVRTDLPLEVDFRGRREPDWEGLKAFLERLEFGSLLHEFGLLESPLPAEEAPWPPPEGAFLGYRLSRPEPMWAELLALAASAQGRVYRAEDPHGALRGLKEVRGLLAKDLAVVALREGLDLPPTDDPMLLAYLLDPSNTTPEGVARRYGGEWTEDAGERALLAERLHANLLGRLQGEERLLWLYEEVEKPLSRVLAHMEATGVKLDVAYLEALSLEVAAEMRRLEEEVFRLAGHSFYLNSRDQLERVLFDELGLPPIGKTEKTGKRSTSAAVLEALREVHPIVDKILQYRELAKLKGTYIDPLPALVHPKTGRLHTRFNQTATATGRLSSSDPNLQNIPVRTPLGQKIRRAFVAEEGWRLVALDYSQIELRVLAHLSGDENLIRVFQEGKDIHTQTASWMFGLSAEAIDPLMRRAAKTINFGVLYGMSAHRLSQELGITYEEAAAFIQRYFQSYPKVKAWIEKTLEEGRTRGYVETLFGRRRYVPDLNARVKSVREAAERMAFNMPVQGTAADLMKLAMVRLFPQLREVGARMLLQVHDELLLEAPKERAEEVAALAKEVMEGVWPLAVPLEVEVGIGEDWLAAKG

SEQ ID NO: 1817 - DNA, 2529 bp, synthetic construct
  misc_feature 1..2529: note = Variant of DNA polymerase I from Thermus sp. strain 2.9
  source 1..2529: mol_type = other DNA
atgcaccatcatcatcatcatggcggtagcggcatgttaccgttgttcgaacctaaaggtcgcgtgcttctggttgatggccatcatctcgcgtatcgtaacttatttgccctgaaaggattaaccaccagccgtggcgagccggtacagggtgtctacggctttgcaaagtcgctcctgaaagctctgaaagaagacggtgatgtggtgattgttgtctttgatgcgaaagcgccaagttttcgccacgaagcgtacgaagcttacaaagccgggcgtgctccaacgccggaagactttcctcgccaattggcgcttatgaaggaattagtggatttgcttggcctcgaacgcttggaagttcccggtttcgaggcagacgacgtattagcgactctcgcaaagaaagccgaacgtgagggctatgaagtccagatcttgacagcagatcgcgatcttttccagcttttatctccgcgcatctcggtgttacacccggaagggcatcgtatcaccccggaatggctctgggagaaatatggtttgcgtcccgaacaatgggtggattttcgcgccttagcaggcgatccgagcgacaatattccgggagttaaaggtatcggcgagaagacggcgctcaagctccttaaagaatgggggtcgttggagaacttgcttaagaatttagatcaggtcaaaccagagtcagtgcgtgagaagattcttgcacacctcgaagacctcaaattaagccgcgaattgtcccgtgtacgcaccgatttgccgctcgaagttgatttccgtggccgccgcgaacctgactgggagggtcttaaagcgtttttagagcgtcttgaatttggttcgctcttgcatgaattcggccttttagaaagcccgttaccagccggggaagcaccttggccaccgcccgaaggcgcgtttttaggttaccgtttgagtcgcccggaaccgatgtgggccgaattattggctcttgcagcgtctgcccagggacgtgtgtatcgcgcggaagaccctcatggtgcgctccgcggcctcaaagaagtccgtggactccttgccaaagacttagctgttgttgcattgcgcgaaggtcttgatttacctccgactgatgatccaatgcttcttgcgtacctcttggacccgtcaaacacgacgcccgaaggcgtagcccgtcgttacggcggcgagtggaccgaagatgcaggcgagcgcgcgttattggccgaacgtttgcacgccaatttattaggacgtttgcaaggcgaggaacgtctcctctggctttacgaagaagtggagaaaccattgagtcgcgtgctcgcgcatatggaagctaccggtgtcaaattagacgtggcgtatttggaggcactcagccttgaagttgctgccgaaatgcgccgcttggaggaagaagtattccgtttagcaggccactccttttatcttaattctcgcgatcagttagaacgtgtgttgttcgatgaacttggtctccctcctatcggcaagacagagaagaccggtaaacgtagcacttcagcggcggttttagaagctcttcgcgaagtccatcccattgtggacaagatcttgcagtaccgcgaactcgcgaaattgaaaggcacctatattgaccctcttccggcattagtccacccgaaaacgggacgcctccatacccgcttcaaccaaacagccacggcgaccggtcgtttgtcctcctctgatccaaaccttcagaatattccagtacgtaccccattgggccagaagatccgccgcgcgtttgtagctgaggagggttggcgtttagtggccctcgattatagccaaattgaattacgtgtccttgcccatctttctggcgatgagaacctcatccgcgtgtttcaggaaggcaaagacattcacactcaaacggcaagctggatgtttggattatcagctgaagcgatcgatcctttgatgcgtcgtgcagcgaagaccatcaatttcggtgttctctacggtatgagtgcccatcgtttgtcgcaggaattaggcattccctatgaagaagctgcggcgttcattcagcgctactttcaaagctatcccaaagttaaagcatggatcgagaagactctcgaagaaggccgcacacgtggttacgtagagaccttatttggacgtcgccgctatgttcccgatttaaacgctcgcgtgaaatctgtccgtgaagccgccgaacgcatggcgttcaacatgcctgtacagggcacggcagctgacctcatgaaacttgcaatggtgcgcctttttccacaattgcgtgaagttggtgcccgcatgctcttgcaggtccacgatgaactcttgttagaagcgccaaaagagcgtgcggaagaggtggcagccctcgcgaaagaggttatggaaggcgtgtggcccttagcggtgcctcttgaagtcgaagttggtattggcgaggattggttggctgccaaaggataatga

SEQ ID NO: 1818 - protein, 841 aa, synthetic construct
  REGION 1..841: note = Variant of DNA polymerase I from Thermus sp. strain 2.9
MHHHHHHGGSGMLPLFEPKGRVLLVDGHHLAYRNLFALKGLTTSRGEPVQGVYGFAKSLLKALKEDGDVVIVVFDAKAPSFRHEAYEAYKAGRAPTPEDFPRQLALMKELVDLLGLERLEVPGFEADDVLATLAKKAEREGYEVQILTADRDLFQLLSPRISVLHPEGHRITPEWLWEKYGLRPEQWVDFRALAGDPSDNIPGVKGIGEKTALKLLKEWGSLENLLKNLDQVKPESVREKILAHLEDLKLSRELSRVRTDLPLEVDFRGRREPDWEGLKAFLERLEFGSLLHEFGLLESPLPAGEAPWPPPEGAFLGYRLSRPEPMWAELLALAASAQGRVYRAEDPHGALRGLKEVRGLLAKDLAVVALREGLDLPPTDDPMLLAYLLDPSNTTPEGVARRYGGEWTEDAGERALLAERLHANLLGRLQGEERLLWLYEEVEKPLSRVLAHMEATGVKLDVAYLEALSLEVAAEMRRLEEEVFRLAGHSFYLNSRDQLERVLFDELGLPPIGKTEKTGKRSTSAAVLEALREVHPIVDKILQYRELAKLKGTYIDPLPALVHPKTGRLHTRFNQTATATGRLSSSDPNLQNIPVRTPLGQKIRRAFVAEEGWRLVALDYSQIELRVLAHLSGDENLIRVFQEGKDIHTQTASWMFGLSAEAIDPLMRRAAKTINFGVLYGMSAHRLSQELGIPYEEAAAFIQRYFQSYPKVKAWIEKTLEEGRTRGYVETLFGRRRYVPDLNARVKSVREAAERMAFNMPVQGTAADLMKLAMVRLFPQLREVGARMLLQVHDELLLEAPKERAEEVAALAKEVMEGVWPLAVPLEVEVGIGEDWLAAKG

SEQ ID NO: 1819 - DNA, 2529 bp, synthetic construct
  misc_feature 1..2529: note = Variant of DNA polymerase I from Thermus sp. strain 2.9
  source 1..2529: mol_type = other DNA
atgcaccatcatcatcatcatggcggtagcggcatgttaccgttgttcgaacctaaaggtcgcgtgcttctggttgatggccatcatctcgcgtatcgtaacttctttgccctgaaaggattaaccaccagccgtggcgagccggtacagggtgtctacggctttgcaaagtcgctcctgaaagctctgaaagaagacggtgatgtggtgattgttgtctttgatgcgaaagcgccaagttttcgccacgaagcgtacgaagcttacaaagccgggcgtgctccaacgccggaagactttcctcgccaattggcgcttatgaaggaattagtggatttgcttggcctcgaacgcttggaagttcccggtttcgaggcagacgacgtattagcgactctcgcaaagaaagccgaacgtgagggctatgaagtccagatcttgacagcagatcgcgatcttttccagcttttatctccgcgcatctcggtgttacacccggaagggcatcgtatcaccccggaatggctctgggagaaatatggtttgcgtcccgaacaatgggtggattttcgcgccttagcaggcgatccgagcgacaatattccgggagttaaaggtatcggcgagaagacggcgctcaagctccttaaagaatgggggtcgttggagaacttgcttaagaatttagatcaggtcaaaccagagtcagtgcgtgagaagattcttgcacacctcgaagacctcaaattaagccgcgaattgtcccgtgtacgcaccgatttgccgctcgaagttgatttccgtggccgccgcgaacctgactgggagggtcttaaagcgtttttagagcgtcttgaatttggttcgctcttgcatgaattcggccttttagaaagcccgttaccagccgaagaagcaccttggccaccgcccgaaggcgcgtttttaggttaccgtttgagtcgcccggaaccgatgtgggccgaattattggctcttgcagcgtctgcccagggacgtgtgtatcgcgcggaagaccctcatggtgcgctccgcggcctcaaagaagtccgtggactccttgccaaagacttagctgttgttgcattgcgcgaaggtcttgatttacctccgactgatgatccaatgcttcttgcgtacctcttggacccgtcaaacacgacgcccgaaggcgtagcccgtcgttacggcggcgagtggaccgaagatgcaggcgagcgcgcgttattggccgaacgtttgcacgccaatttattaggacgtttgcaaggcgaggaacgtctcctctggctttacgaagaagtggagaaaccattgagtcgcgtgctcgcgcatatggaagctaccggtgtcaaattagacgtggcgtatttggaggcactcagccttgaagttgctgccgaaatgcgccgcttggaggaagaagtattccgtttagcaggccactccttttatcttaattctcgcgatcagttagaacgtgtgttgttcgatgaacttggtctccctcctatcggcaagacagagaagaccggtaaacgtagcacttcagcggcggttttagaagctcttcgcgaagtccatcccattgtggacaagatcttgcagtaccgcgaactcgcgaaattgaaaggcacctatattgaccctcttccggcattagtccacccgaaaacgggacgcctccatacccgcttcaaccaaacagccacggcgaccggtcgtttgtcctcctctgatccaaaccttcagaatattccagtacgtaccccattgggccagaagatccgccgcgcgtttgtagctgaggagggttggcgtttagtggccctcgattatagccaaattgaattacgtgtccttgcccatctttctggcgatgagaacctcatccgcgtgtttcaggaaggcaaagacattcacactcaaacggcaagctggatgtttggattatcagctgaagcgatcgatccttcgatgcgtcgtgcagcgaagaccatcaatttcggtgttctctacggtatgagtgcccatcgtttgtcgcaggaattaggcattccctatgaagaagctgcggcgttcattcagcgctactttcaaagctatcccaaagttaaagcatggatcgagaagactctcgaagaaggccgcacacgtggttacgtagagaccttatttggacgtcgccgctatgttcccgatttaaacgctcgcgtgaaatctgtccgtgaagccgccgaacgcatggcgttcaacatgcctgtacagggcacggcagctgacctcatgaaacttgcaatggtgcgcctttttccacaattgcgtgaagttggtgcccgcatgctcttgcaggtccacgatgaactcttgttagaagcgccaaaagagcgtgcggaagaggtggcagccctcgcgaaagaggttatggaaggcgtgtggcccttagcggtgcctcttgaagtcgaagttggtattggcgaggattggttggctgccaaaggataatga

SEQ ID NO: 1820 - protein, 841 aa, synthetic construct
  REGION 1..841: note = Variant of DNA polymerase I from Thermus sp. strain 2.9
MHHHHHHGGSGMLPLFEPKGRVLLVDGHHLAYRNFFALKGLTTSRGEPVQGVYGFAKSLLKALKEDGDVVIVVFDAKAPSFRHEAYEAYKAGRAPTPEDFPRQLALMKELVDLLGLERLEVPGFEADDVLATLAKKAEREGYEVQILTADRDLFQLLSPRISVLHPEGHRITPEWLWEKYGLRPEQWVDFRALAGDPSDNIPGVKGIGEKTALKLLKEWGSLENLLKNLDQVKPESVREKILAHLEDLKLSRELSRVRTDLPLEVDFRGRREPDWEGLKAFLERLEFGSLLHEFGLLESPLPAEEAPWPPPEGAFLGYRLSRPEPMWAELLALAASAQGRVYRAEDPHGALRGLKEVRGLLAKDLAVVALREGLDLPPTDDPMLLAYLLDPSNTTPEGVARRYGGEWTEDAGERALLAERLHANLLGRLQGEERLLWLYEEVEKPLSRVLAHMEATGVKLDVAYLEALSLEVAAEMRRLEEEVFRLAGHSFYLNSRDQLERVLFDELGLPPIGKTEKTGKRSTSAAVLEALREVHPIVDKILQYRELAKLKGTYIDPLPALVHPKTGRLHTRFNQTATATGRLSSSDPNLQNIPVRTPLGQKIRRAFVAEEGWRLVALDYSQIELRVLAHLSGDENLIRVFQEGKDIHTQTASWMFGLSAEAIDPSMRRAAKTINFGVLYGMSAHRLSQELGIPYEEAAAFIQRYFQSYPKVKAWIEKTLEEGRTRGYVETLFGRRRYVPDLNARVKSVREAAERMAFNMPVQGTAADLMKLAMVRLFPQLREVGARMLLQVHDELLLEAPKERAEEVAALAKEVMEGVWPLAVPLEVEVGIGEDWLAAKG

SEQ ID NO: 1821 - DNA, 2529 bp, synthetic construct
  misc_feature 1..2529: note = Variant of DNA polymerase I from Thermus sp. strain 2.9
  source 1..2529: mol_type = other DNA
atgcaccatcatcatcatcatggcggtagcggcatgttaccgttgttcgaacctaaaggtcgcgtgcttctggttgatggccatcatctcgcgtatcgtaacttctttgccctgaaaggattaaccaccagccgtggcgagccggtacagggtgtctacggctttgcaaagtcgctcctgaaagctctgaaagaagacggtgatgtggtgattgttgtctttgatgcgaaagcgccaagttttcgccacgaagcgtacgaagcttacaaagccgggcgtgctccaacgccggaagactttcctcgccaattggcgcttatgaaggaattagtggatttgcttggcctcgaacgcttggaagttcccggtttcgaggcagacgacgtattagcgactctcgcaaagaaagccgaacgtgagggctatgaagtccagatcttgacagcagatcgcgatcttttccagcttttatctccgcgcatctcggtgttacacccggaagggcatcgtatcaccccggaatggctctgggagaaatatggtttgcgtcccgaacaatgggtggattttcgcgccttagcaggcgatccgagcgacaatattccgggagttaaaggtatcggcgagaagacggcgctcaagctccttaaagaatgggggtcgttggagaacttgcttaagaatttagatcaggtcaaaccagagtcagtgcgtgagaagattcttgcacacctcgaagacctcaaattaagccgcgaattgtcccgtgtacgcaccgatttgccgctcgaagttgatttccgtggccgccgcgaacctgactgggagggtcttaaagcgtttttagagcgtcttgaatttggttcgctcttgcatgaattcggccttttagaaagcccgttaccagccgaagaagcaccttggccaccgcccgaaggcgcgtttttaggttaccgtttgagtcgcccggaaccgatgtgggccgaattattggctcttgcagcgtctgcccagggacgtgtgtatcgcgcggaagaccctcatggtgcgctccgcggcctcaaagaagtccgtggactccttgccaaagacttagctgttgttgcattgcgcgaaggtcttgatttacctccgactgatgatccaatgcttcttgcgtacctcttggacccgtcaaacacgacgcccgaaggcgtagcccgtcgttacggcggcgagtggaccgaagatgcaggcgagcgcgcgttattggccgaacgtttgcacgccaatttattaggacgtttgcaaggcgaggaacgtctcctctggctttacgaagaagtggagaaaccattgagtcgcgtgctcgcgcatatggaagctaccggtgtcaaattagacgtggcgtatttggaggcactcagccttgaagttgctgccgaaatgcgccgcttggaggaagaagtattccgtttagcaggccactccttttatcttaattctcgcgatcagttagaacgtgtgttgttcgatgaacttggtctccctcctatcggcaagacagagaagaccggtaaacgtagcacttcagcggcggttttagaagctcttcgcgaagtccatcccattgtggacaagatcttgcagtaccgcgaactcgcgaaattgaaaggcacctatattgaccctcttccggcattagtccacccgaaaacgggacgcctccatacccgcttcaaccaaacagccacggcgaccggtcgtttgtcctcctctgatccaaaccttcagaatattccagtacgtaccccattgggccagaagatccgccgcgcgtttgtagctgaggagggttggcgtttagtggccctcgattatagccaaattgaattacgtgtccttgcccatctttctggcgatgagaacctcatccgcgtgtttcaggaaggcaaagacattcacactcaaacggcaagctggatgtttggaaggtcagctgaagcgatcgatcctttgatgcgtcgtgcagcgaagaccatcaatttcggtgttctctacggtatgagtgcccatcgtttgtcgcaggaattaggcattccctatgaagaagctgcggcgttcattcagcgctactttcaaagctatcccaaagttaaagcatggatcgagaagactctcgaagaaggccgcacacgtggttacgtagagaccttatttggacgtcgccgctatgttcccgatttaaacgctcgcgtgaaatctgtccgtgaagccgccgaacgcatggcgttcaacatgcctgtacagggcacggcagctgacctcatgaaacttgcaatggtgcgcctttttccacaattgcgtgaagttggtgcccgcatgctcttgcaggtccacgatgaactcttgttagaagcgccaaaagagcgtgcggaagaggtggcagccctcgcgaaagaggttatggaaggcgtgtggcccttagcggtgcctcttgaagtcgaagttggtattggcgaggattggttggctgccaaaggataatga

SEQ ID NO: 1822 - protein, 841 aa, synthetic construct
  REGION 1..841: note = Variant of DNA polymerase I from Thermus sp. strain 2.9
MHHHHHHGGSGMLPLFEPKGRVLLVDGHHLAYRNFFALKGLTTSRGEPVQGVYGFAKSLLKALKEDGDVVIVVFDAKAPSFRHEAYEAYKAGRAPTPEDFPRQLALMKELVDLLGLERLEVPGFEADDVLATLAKKAEREGYEVQILTADRDLFQLLSPRISVLHPEGHRITPEWLWEKYGLRPEQWVDFRALAGDPSDNIPGVKGIGEKTALKLLKEWGSLENLLKNLDQVKPESVREKILAHLEDLKLSRELSRVRTDLPLEVDFRGRREPDWEGLKAFLERLEFGSLLHEFGLLESPLPAEEAPWPPPEGAFLGYRLSRPEPMWAELLALAASAQGRVYRAEDPHGALRGLKEVRGLLAKDLAVVALREGLDLPPTDDPMLLAYLLDPSNTTPEGVARRYGGEWTEDAGERALLAERLHANLLGRLQGEERLLWLYEEVEKPLSRVLAHMEATGVKLDVAYLEALSLEVAAEMRRLEEEVFRLAGHSFYLNSRDQLERVLFDELGLPPIGKTEKTGKRSTSAAVLEALREVHPIVDKILQYRELAKLKGTYIDPLPALVHPKTGRLHTRFNQTATATGRLSSSDPNLQNIPVRTPLGQKIRRAFVAEEGWRLVALDYSQIELRVLAHLSGDENLIRVFQEGKDIHTQTASWMFGRSAEAIDPLMRRAAKTINFGVLYGMSAHRLSQELGIPYEEAAAFIQRYFQSYPKVKAWIEKTLEEGRTRGYVETLFGRRRYVPDLNARVKSVREAAERMAFNMPVQGTAADLMKLAMVRLFPQLREVGARMLLQVHDELLLEAPKERAEEVAALAKEVMEGVWPLAVPLEVEVGIGEDWLAAKG

SEQ ID NO: 1823 - DNA, 2529 bp, synthetic construct
  misc_feature 1..2529: note = Variant of DNA polymerase I from Thermus sp. strain 2.9
  source 1..2529: mol_type = other DNA
atgcaccatcatcatcatcatggcggtagcggcatgttaccgttgttcgaacctaaaggtcgcgtgcttctggttgatggccatcatctcgcgtatcgtaacttctttgccctgaaaggattaaccaccagccgtggcgagccggtacagggtgtctacggctttgcaaagtcgctcctgaaagctctgaaagaagacggtgatgtggtgattgttgtctttgatgcgaaagcgccaagttttcgccacgaagcgtacgaagcttacaaagccgggcgtgctccaacgccggaagactttcctcgccaattggcgcttatgaaggaattagtggatttgcttggcctcgaacgcttggaagttcccggtttcgaggcagacgacgtattagcgactctcgcaaagaaagccgaacgtgagggctatgaagtccagatcttgacagcagatcgcgatcttttccagcttttatctccgcgcatctcggtgttacacccggaagggcatcgtatcaccccggaatggctctgggagaaatatggtttgcgtcccgaacaatgggtggattttcgcgccttagcaggcgatccgagcgacaatattccgggagttaaaggtatcggcgagaagacggcgctcaagctccttaaagaatgggggtcgttggagaacttgcttaagaatttagatcaggtcaaaccagagtcagtgcgtgagaagattcttgcacacctcgaagacctcaaattaagccgcgaattgtcccgtgtacgcaccgatttgccgctcgaagttgatttccgtggccgccgcgaacctgactgggagggtcttaaagcgtttttagagcgtcttgaatttggtgggctcttgcatgaattcggccttttagaaagcccgttaccagccgaagaagcaccttggccaccgcccgaaggcgcgtttttaggttaccgtttgagtcgcccggaaccgatgtgggccgaattattggctcttgcagcgtctgcccagggacgtgtgtatcgcgcggaagaccctcatggtgcgctccgcggcctcaaagaagtccgtggactccttgccaaagacttagctgttgttgcattgcgcgaaggtcttgatttacctccgactgatgatccaatgcttcttgcgtacctcttggacccgtcaaacacgacgcccgaaggcgtagcccgtcgttacggcggcgagtggaccgaagatgcaggcgagcgcgcgttattggccgaacgtttgcacgccaatttattaggacgtttgcaaggcgaggaacgtctcctctggctttacgaagaagtggagaaaccattgagtcgcgtgctcgcgcatatggaagctaccggtgtcaaattagacgtggcgtatttggaggcactcagccttgaagttgctgccgaaatgcgccgcttggaggaagaagtattccgtttagcaggccactccttttatcttaattctcgcgatcagttagaacgtgtgttgttcgatgaacttggtctccctcctatcggcaagacagagaagaccggtaaacgtagcacttcagcggcggttttagaagctcttcgcgaagtccatcccattgtggacaagatcttgcagtaccgcgaactcgcgaaattgaaaggcacctatattgaccctcttccggcattagtccacccgaaaacgggacgcctccatacccgcttcaaccaaacagccacggcgaccggtcgtttgtcctcctctgatccaaaccttcagaatattccagtacgtaccccattgggccagaagatccgccgcgcgtttgtagctgaggagggttggcgtttagtggccctcgattatagccaaattgaattacgtgtccttgcccatctttctggcgatgagaacctcatccgcgtgtttcaggaaggcaaagacattcacactcaaacggcaagctggatgtttggattatcagctgaagcgatcgatcctttgatgcgtcgtgcagcgaagaccatcaatttcggtgttctctacggtatgagtgcccatcgtttgtcgcaggaattaggcattccctatgaagaagctgcggcgttcattcagcgctactttcaaagctatcccaaagttaaagcatggatcgagaagactctcgaagaaggccgcacacgtggttacgtagagaccttatttggacgtcgccgctatgttcccgatttaaacgctcgcgtgaaatctgtccgtgaagccgccgaacgcatggcgttcaacatgcctgtacagggcacggcagctgacctcatgaaacttgcaatggtgcgcctttttccacaattgcgtgaagttggtgcccgcatgctcttgcaggtccacgatgaactcttgttagaagcgccaaaagagcgtgcggaagaggtggcagccctcgcgaaagaggttatggaaggcgtgtggcccttagcggtgcctcttgaagtcgaagttggtattggcgaggattggttggctgccaaaggataatga

SEQ ID NO: 1824 - protein, 841 aa, synthetic construct
  REGION 1..841: note = Variant of DNA polymerase I from Thermus sp. strain 2.9
MHHHHHHGGSGMLPLFEPKGRVLLVDGHHLAYRNFFALKGLTTSRGEPVQGVYGFAKSLLKALKEDGDVVIVVFDAKAPSFRHEAYEAYKAGRAPTPEDFPRQLALMKELVDLLGLERLEVPGFEADDVLATLAKKAEREGYEVQILTADRDLFQLLSPRISVLHPEGHRITPEWLWEKYGLRPEQWVDFRALAGDPSDNIPGVKGIGEKTALKLLKEWGSLENLLKNLDQVKPESVREKILAHLEDLKLSRELSRVRTDLPLEVDFRGRREPDWEGLKAFLERLEFGGLLHEFGLLESPLPAEEAPWPPPEGAFLGYRLSRPEPMWAELLALAASAQGRVYRAEDPHGALRGLKEVRGLLAKDLAVVALREGLDLPPTDDPMLLAYLLDPSNTTPEGVARRYGGEWTEDAGERALLAERLHANLLGRLQGEERLLWLYEEVEKPLSRVLAHMEATGVKLDVAYLEALSLEVAAEMRRLEEEVFRLAGHSFYLNSRDQLERVLFDELGLPPIGKTEKTGKRSTSAAVLEALREVHPIVDKILQYRELAKLKGTYIDPLPALVHPKTGRLHTRFNQTATATGRLSSSDPNLQNIPVRTPLGQKIRRAFVAEEGWRLVALDYSQIELRVLAHLSGDENLIRVFQEGKDIHTQTASWMFGLSAEAIDPLMRRAAKTINFGVLYGMSAHRLSQELGIPYEEAAAFIQRYFQSYPKVKAWIEKTLEEGRTRGYVETLFGRRRYVPDLNARVKSVREAAERMAFNMPVQGTAADLMKLAMVRLFPQLREVGARMLLQVHDELLLEAPKERAEEVAALAKEVMEGVWPLAVPLEVEVGIGEDWLAAKG

SEQ ID NO: 1825 - DNA, 2529 bp, synthetic construct
  misc_feature 1..2529: note = Variant of DNA polymerase I from Thermus sp. strain 2.9
  source 1..2529: mol_type = other DNA
atgcaccatcatcatcatcatggcggtagcggcatgttaccgttgttcgaacctaaaggtcgcgtgcttctggttgatggccatcatctcgcgtatcgtaacttctttgccctgaaaggattaaccaccagccgtggcgagccggtacagggtgtctacggctttgcaaagtcgctcctgaaagctctgaaagaagacggtgatgtggtgattgttgtctttgatgcgaaagcgccaagttttcgccacgaagcgtacgaagcttacaaagccgggcgtgctccaacgccggaagactttcctcgccaattggcgcttatgaaggaattagtggatttgcttggcctcgaacgcttggaagttcccggtttcgaggcagacgacgtattagcgactctcgcaaagaaagccgaacgtgagggctatgaagtccagatcttgacagcagatcgcgatcttttccagcttttatctccgcgcatctcggtgttacacccggaagggcatcgtatcaccccggaatggctctgggagaaatatggtttgcgtcccgaacaatgggtggattttcgcgccttagcaggcgatccgagcgacaatattccgggagttaaaggtatcggcgagaagacggcgctcaagctccttaaagaatgggggtcgttggagaacttgcttaagaatttagatcaggtcaaaccagagtcagtgcgtgagaagattcttgcacacctcgaagacctcaaattaagccgcgaattgtcccgtgtacgcaccgatttgccgctcgaagttgatttccgtggccgccgcgaacctgactgggagggtcttaaagcgtttttagagcgtcttgaatttggttcgctcttgcatgaattcggccttttagaaagcccgttaccagccgaagaagcaccttggccaccgcccgaaggcgcgtttttaggttaccgtttgagtcgcccggaaccgatgtgggccgaattattggctcttgcagcgtctgcccagggacgtgtgtatcgcgcggaagaccctcatggtgcgctccgcggcctcaaagaagtccgtggactccttgccaaagacttagctgttgttgcattgcgcgaaggtcttgatttacctccgactgatgatccaatgcttcttgcgtacctcttggacccgtcaaacacgacgcccgaaggcgtagcccgtcgttacggcggcgagtggaccgaagatgcaggcgagcgcgcgttattggccgaacgtttgcacgccaatttattaggacgtttgcaaggcgaggaacgtctcctctggctttacgaagaagtggagaaaccattgagtcgcgtgctcgcgcatatggaagctaccggtgtcaaattagacgtggcgtatttggaggcactcagccttgaagttgctgccgaaatgcgccgcttggaggaagaagtattccgtttagcaggccactccttttatcttaattctcgcgatcagttagaacgtgtgttgttcgatgaacttggtctccctcctatcggcaagacagagaagaccggtaaacgtagcacttcagcggcggttttagaagctcttcgcgaagtccatcccattgtggacaagatcttgcagtaccgcgaactcgcgaaattgaaaggcacctatattgaccctcttccggcattagtccacccgaaaacgggacgcctccatacccgcttcaaccaaacagccacggcgaccggtcgtttgtcctcctctgatccaaaccttcagaatattccagtacgtaccccattgggccagaagatccgccgcgcgtttgtagctgaggagggttggcgtttagtggccctcgattatagccaaattgaattacgtgtccttgcccatctttctggcgatgagaacctcatccgcgtgtttcaggaaggcaaagacattcacactcaaacggcaagctggatgtttggattatcagctgaagcgatcgatcctcggatgcgtcgtgcagcgaagaccatcaatttcggtgttctctacggtatgagtgcccatcgtttgtcgcaggaattaggcattccctatgaagaagctgcggcgttcattcagcgctactttcaaagctatcccaaagttaaagcatggatcgagaagactctcgaagaaggccgcacacgtggttacgtagagaccttatttggacgtcgccgctatgttcccgatttaaacgctcgcgtgaaatctgtccgtgaagccgccgaacgcatggcgttcaacatgcctgtacagggcacggcagctgacctcatgaaacttgcaatggtgcgcctttttccacaattgcgtgaagttggtgcccgcatgctcttgcaggtccacgatgaactcttgttagaagcgccaaaagagcgtgcggaagaggtggcagccctcgcgaaagaggttatggaaggcgtgtggcccttagcggtgcctcttgaagtcgaagttggtattggcgaggattggttggctgccaaaggataatga

SEQ ID NO: 1826 - protein, 841 aa, synthetic construct
  REGION 1..841: note = Variant of DNA polymerase I from Thermus sp. strain 2.9
MHHHHHHGGSGMLPLFEPKGRVLLVDGHHLAYRNFFALKGLTTSRGEPVQGVYGFAKSLLKALKEDGDVVIVVFDAKAPSFRHEAYEAYKAGRAPTPEDFPRQLALMKELVDLLGLERLEVPGFEADDVLATLAKKAEREGYEVQILTADRDLFQLLSPRISVLHPEGHRITPEWLWEKYGLRPEQWVDFRALAGDPSDNIPGVKGIGEKTALKLLKEWGSLENLLKNLDQVKPESVREKILAHLEDLKLSRELSRVRTDLPLEVDFRGRREPDWEGLKAFLERLEFGSLLHEFGLLESPLPAEEAPWPPPEGAFLGYRLSRPEPMWAELLALAASAQGRVYRAEDPHGALRGLKEVRGLLAKDLAVVALREGLDLPPTDDPMLLAYLLDPSNTTPEGVARRYGGEWTEDAGERALLAERLHANLLGRLQGEERLLWLYEEVEKPLSRVLAHMEATGVKLDVAYLEALSLEVAAEMRRLEEEVFRLAGHSFYLNSRDQLERVLFDELGLPPIGKTEKTGKRSTSAAVLEALREVHPIVDKILQYRELAKLKGTYIDPLPALVHPKTGRLHTRFNQTATATGRLSSSDPNLQNIPVRTPLGQKIRRAFVAEEGWRLVALDYSQIELRVLAHLSGDENLIRVFQEGKDIHTQTASWMFGLSAEAIDPRMRRAAKTINFGVLYGMSAHRLSQELGIPYEEAAAFIQRYFQSYPKVKAWIEKTLEEGRTRGYVETLFGRRRYVPDLNARVKSVREAAERMAFNMPVQGTAADLMKLAMVRLFPQLREVGARMLLQVHDELLLEAPKERAEEVAALAKEVMEGVWPLAVPLEVEVGIGEDWLAAKG

SEQ ID NO: 1827 - DNA, 2529 bp, synthetic construct
  misc_feature 1..2529: note = Variant of DNA polymerase I from Thermus sp. strain 2.9
  source 1..2529: mol_type = other DNA
atgcaccatcatcatcatcatggcggtagcggcatgttaccgttgttcgaacctaaaggtcgcgtgcttctggttgatggccatcatctcgcgtatcgtaacttctttgccctgaaaggattaaccaccagccgtggcgagccggtacagggtgtctacggctttgcaaagtcgctcctgaaagctctgaaagaagacggtgatgtggtgattgttgtctttgatgcgaaagcgccaagttttcgccacgaagcgtacgaagcttacaaagccgggcgtgctccaacgccggaagactttcctcgccaattggcgcttatgaaggaattagtggatttgcttggcctcgaacgcttggaagttcccggtttcgaggcagacgacgtattagcgactctcgcaaagaaagccgaacgtgagggctatgaagtccagatcttgacagcagatcgcgatcttttccagcttttatctccgcgcatctcggtgttacacccggaagggcatcgtatcaccccggaatggctctgggagaaatatggtttgcgtcccgaacaatgggtggattttcgcgccttagcaggcgatccgagcgacaatattccgggagttaaaggtatcggcgagaagacggcgctcaagctccttaaagaatgggggtcgttggagaacttgcttaagaatttagatcaggtcaaaccagagtcagtgcgtgagaagattcttgcacacctcgaagacctcaaattaagccgcgaattgtcccgtgtacgcaccgatttgccgctcgaagttgatttccgtggccgccgcgaacctgactgggagggtcttaaagcgtttttagagcgtcttgaatttggttcgctcttgcatgaattcggccttttagaaagcccgttaccagccgaagaagcaccttggccaccgcccgaaggcgcgtttttaggttaccgtttgagtcgcccggaaccgatgtgggccgaattattggctcttgcagcgtctgcccagggacgtgtgtatcgcgcggaagaccctcatggtgcgctccgcggcctcaaagaagtccgtggactccttgccaaagacttagctgttgttgcattgcgcgaaggtcttgatttacctccgactgatgatccaatgcttcttgcgtacctcttggacccgtcaaacacgacgcccgaaggcgtagcccgtcgttacggcggcgagtggaccgaagatgcaggcgagcgcgcgttattggccgaacgtttgcacgccaatttattaggacgtttgcaaggcgaggaacgtctcctctggctttacgaagaagtggagaaaccattgagtcgcgtgctcgcgcatatggaagctaccggtgtcaaattagacgtggcgtatttggaggcactcagccttgaagttgctgccgaaatgcgccgcttggaggaagaagtattccgtttagcaggccactccttttatcttaattctcgcgatcagttagaacgtgtgttgttcgatgaacttggtctccctcctatcggcaagacagagaagaccggtaaacgtagcacttcagcggcggttttagaagctcttcgcgaagtccatcccattgtggacaagatcttgcagtaccgcgaactcgcgaaattgaaaggcacctatattgaccctcttccggcattagtccacccgaaaacgggacgcctccatacccgcttcaaccaaacagccacggcgaccggtcgtttgtcctcctctgatccaaaccttcagaatattccagtacgtaccccattgggccagaagatccgccgcgcgtttgtagctgaggagggttggcgtttagtggccctcgattatagccaaattgaattacgtgtccttgcccatctttctggcgatgagaacctcatccgcgtgtttcaggaaggcaaagacattcacactcaaacggcaagctggatgtttggattatcagctgaagcgatcgatcctttgatgcgtcgtgcagcgaagaccatcaatttcggtgttctctacggtatgagtgcccatcgtttgtcgcaggaattaggcattccctatgaagaagctgcggcgttcattcagcgctactttcaaagctatcccaaagttaaagcatggatcgagaagactctcgaagaaggccgcacacgtggttacgtagagaccttatttggacgtcgccgctatgttcccgatttaaacgctcgcgtgaaatctgtccgtgaagccgccgaacgcatggcgttcaacatgcctgtacagggcacggcagctgacctcatgaaacttgcaatggtgcgcctttttccacaattgcgtgaagttggtgcccgcatgctcttgcaggtccacgatgaactcttgttagaagcgccaaaagagcgtgcggaagaggtggcagccctcgcgaaagaggttatggaaggcgtgtggcccttagcggtgcctcttgaagtcagggttggtattggcgaggattggttggctgccaaaggataatga

SEQ ID NO: 1828 - protein, 841 aa, synthetic construct
  REGION 1..841: note = Variant of DNA polymerase I from Thermus sp. strain 2.9
MHHHHHHGGSGMLPLFEPKGRVLLVDGHHLAYRNFFALKGLTTSRGEPVQGVYGFAKSLLKALKEDGDVVIVVFDAKAPSFRHEAYEAYKAGRAPTPEDFPRQLALMKELVDLLGLERLEVPGFEADDVLATLAKKAEREGYEVQILTADRDLFQLLSPRISVLHPEGHRITPEWLWEKYGLRPEQWVDFRALAGDPSDNIPGVKGIGEKTALKLLKEWGSLENLLKNLDQVKPESVREKILAHLEDLKLSRELSRVRTDLPLEVDFRGRREPDWEGLKAFLERLEFGSLLHEFGLLESPLPAEEAPWPPPEGAFLGYRLSRPEPMWAELLALAASAQGRVYRAEDPHGALRGLKEVRGLLAKDLAVVALREGLDLPPTDDPMLLAYLLDPSNTTPEGVARRYGGEWTEDAGERALLAERLHANLLGRLQGEERLLWLYEEVEKPLSRVLAHMEATGVKLDVAYLEALSLEVAAEMRRLEEEVFRLAGHSFYLNSRDQLERVLFDELGLPPIGKTEKTGKRSTSAAVLEALREVHPIVDKILQYRELAKLKGTYIDPLPALVHPKTGRLHTRFNQTATATGRLSSSDPNLQNIPVRTPLGQKIRRAFVAEEGWRLVALDYSQIELRVLAHLSGDENLIRVFQEGKDIHTQTASWMFGLSAEAIDPLMRRAAKTINFGVLYGMSAHRLSQELGIPYEEAAAFIQRYFQSYPKVKAWIEKTLEEGRTRGYVETLFGRRRYVPDLNARVKSVREAAERMAFNMPVQGTAADLMKLAMVRLFPQLREVGARMLLQVHDELLLEAPKERAEEVAALAKEVMEGVWPLAVPLEVRVGIGEDWLAAKG

SEQ ID NO: 1829 - DNA, 2529 bp, synthetic construct
  misc_feature 1..2529: note = Variant of DNA polymerase I from Thermus sp. strain 2.9
  source 1..2529: mol_type = other DNA
atgcaccatcatcatcatcatggcggtagcggcatgttaccgttgttcgaacctaaaggtcgcgtgcttctggttgatggccatcatctcgcgtatcgtaacttctttgccctgaaaggattaaccaccagccgtggcgagccggtacagggtgtctacggctttgcaaagtcgctcctgaaagctctgaaagaagacggtgatgtggtgattgttgtctttgatgcgaaagcgccaagttttcgccacgaagcgtacgaagcttacaaagccgggcgtgctccaacgccggaagactttcctcgccaattggcgcttatgaaggaattagtggatttgcttggcctcgaacgcttggaagttcccggtttcgaggcagacgacgtattagcgactctcgcaaagaaagccgaacgtgagggctatgaagtccagatcttgacagcagatcgcgatcttttccagcttttatctccgcgcatctcggtgttacacccggaagggcatcgtatcaccccggaatggctctgggagaaatatggtttgcgtcccgaacaatgggtggattttcgcgccttagcaggcgatccgagcgacaatattccgggagttaaaggtatcggcgagaagacggcgctcaagctccttaaagaatgggggtcgttggagaacttgcttaagaatttagatcaggtcaaaccagagtcagtgcgtgagaagattcttgcacacctcgaagacctcaaattaagccgcgaattgtcccgtgtattgaccgatttgccgctcgaagttgatttccgtggccgccgcgaacctgactgggagggtcttaaagcgtttttagagcgtcttgaatttggttcgctcttgcatgaattcggccttttagaaagcccgttaccagccgaagaagcaccttggccaccgcccgaaggcgcgtttttaggttaccgtttgagtcgcccggaaccgatgtgggccgaattattggctcttgcagcgtctgcccagggacgtgtgtatcgcgcggaagaccatcatggtgcgctccgcggcctcaaagaagtccgtggactccttgccaaagacttagctgttgttgcattgcgcgaaggtcttgatttacctccgactgatgatccaatgcttcttgcgtacctcttggacccgtcaaacacgacgcccgaaggcgtagcccgtcgttacggcggcgagtggaccgaagatgcaggcgagcgcgcgttattggccgaacgtttgcacgccaatttattaggacgtttgcaaggcgaggaacgtctcctctggctttacgaagaagtggagaaaccattgagtcgcgtgctcgcgcatatggaagctaccggtgtcaaattagacgtggcgtatttggaggcactcagccttgaagttgctgccgaaatgcgccgcttggaggaagaagtattccgtttagcaggccactccttttatcttaattctcgcgatcagttagaacgtgtgttgttcgatgaacttggtctccctcctatcggcaagacagagaagaccggtaaacgtagcacttcagcggcggttttagaagctcttcgcgaagtccatcccattgtggacaagatcttgcagtaccgcgaactcgcgaaattgaaaggcacctatattgaccctcttccggcattagtccacccgaaaacgggacgcctccatacccgcttcaaccaaacagccacggcgaccggtcgtttgtcctcctctgatccaaaccttcagaatattccagtacgtaccccattgggccagaagatccgccgcgcgtttgtagctgaggagggttggcgtttagtggccctcgattatagccaaattgaattacgtgtccttgcccatctttctggcgatgagaacctcatccgcgtgtttcaggaaggcaaagacattcacactcaaacggcaagctggatgtttggattatcagctgaagcgatcgatcctttgatgcgtcgtgcagcgaagaccatcaatttcggtgttctctacggtatgagtgcccatcgtttgtcgcaggaattaggcattccctatgaagaagctgcggcgttcattcagcgctactttcaaagctatcccaaagttaaagcatggatcgagaagactctcgaagaaggccgcacacgtggttacgtagagaccttatttggacgtcgccgctatgttcccgatttaaacgctcgcgtgaaatctgtccgtgaagccgccgaacgcatggcgttcaacatgcctgtacagggcacggcagctgacctcatgaaacttgcaatggtgcgcctttttccacaattgcgtgaagttggtgcccgcatgctcttgcaggtccacgatgaactcttgttagaagcgccaaaagagcgtgcggaagaggtggcagccctcgcgaaagaggttatggaaggcgtgtggcccttagcggtgcctcttgaagtcgaagttggtattggcgaggattggttggctgccaaaggataatga

SEQ ID NO: 1830 - protein, 841 aa, synthetic construct
  REGION 1..841: note = Variant of DNA polymerase I from Thermus sp. strain 2.9
MHHHHHHGGSGMLPLFEPKGRVLLVDGHHLAYRNFFALKGLTTSRGEPVQGVYGFAKSLLKALKEDGDVVIVVFDAKAPSFRHEAYEAYKAGRAPTPEDFPRQLALMKELVDLLGLERLEVPGFEADDVLATLAKKAEREGYEVQILTADRDLFQLLSPRISVLHPEGHRITPEWLWEKYGLRPEQWVDFRALAGDPSDNIPGVKGIGEKTALKLLKEWGSLENLLKNLDQVKPESVREKILAHLEDLKLSRELSRVLTDLPLEVDFRGRREPDWEGLKAFLERLEFGSLLHEFGLLESPLPAEEAPWPPPEGAFLGYRLSRPEPMWAELLALAASAQGRVYRAEDHHGALRGLKEVRGLLAKDLAVVALREGLDLPPTDDPMLLAYLLDPSNTTPEGVARRYGGEWTEDAGERALLAERLHANLLGRLQGEERLLWLYEEVEKPLSRVLAHMEATGVKLDVAYLEALSLEVAAEMRRLEEEVFRLAGHSFYLNSRDQLERVLFDELGLPPIGKTEKTGKRSTSAAVLEALREVHPIVDKILQYRELAKLKGTYIDPLPALVHPKTGRLHTRFNQTATATGRLSSSDPNLQNIPVRTPLGQKIRRAFVAEEGWRLVALDYSQIELRVLAHLSGDENLIRVFQEGKDIHTQTASWMFGLSAEAIDPLMRRAAKTINFGVLYGMSAHRLSQELGIPYEEAAAFIQRYFQSYPKVKAWIEKTLEEGRTRGYVETLFGRRRYVPDLNARVKSVREAAERMAFNMPVQGTAADLMKLAMVRLFPQLREVGARMLLQVHDELLLEAPKERAEEVAALAKEVMEGVWPLAVPLEVEVGIGEDWLAAKG

SEQ ID NO: 1831 - DNA, 2529 bp, synthetic construct
  misc_feature 1..2529: note = Variant of DNA polymerase I from Thermus sp. strain 2.9
  source 1..2529: mol_type = other DNA
atgcaccatcatgtgcatcatggcggtagcggcatgttaccgttgttcgaacctaaaggtcgcgtgcttctggttgatggccatcatctcgcgtatcgtaacttctttgccctgaaaggattaaccaccagccgtggcgagccggtacagggtgtctacggctttgcaaagtcgctcctgaaagctctgaaagaagacggtgatgtggtgattgttgtctttgatgcgaaagcgccaagttttcgccacgaagcgtacgaagcttacaaagccgggcgtgctccaacgccggaagactttcctcgccaattggcgcttatgaaggaattagtggatttgcttggcctcgaacgcttggaagttcccggtttcgaggcagacgacgtattagcgactctcgcaaagaaagccgaacgtgagggctatgaagtccagatcttgacagcagatcgcgatcttttccagcttttatctccgcgcatctcggtgttacacccggaagggcatcgtatcaccccggaatggctctgggagaaatatggtttgcgtcccgaacaatgggtggattttcgcgccttagcaggcgatccgagcgacaatattccgggagttaaaggtatcggcgagaagacggcgctcaagctccttaaagaatgggggtcgttggagaacttgcttaagaatttagatcaggtcaaaccagagtcagtgcgtgagaagattcttgcacacctcgaagacctcaaattaagccgcgaattgtcccgtgtacgcaccgatttgccgctcgaagttgatttccgtggccgccgcgaacctgactgggagggtcttaaagcgtttttagagcgtcttgaatttggttcgctcttgcatgaattcggccttttagaaagcccgttaccagccgaagaagcaccttggccaccgcccgaaggcgcgtttttaggttaccgtttgagtcgcccggaaccgatgtgggccgaattattggctcttgcagcgtctgcccagggacgtgtgtatcgcgcggaagaccctcatggtgcgctccgcggcctcaaagaagtccgtggactccttgccaaagacttagctgttgttgcattgcgcgaaggtcttgatttacctccgactgatgatccaatgcttcttgcgtacctcttggacccgtcaaacacgacgcccgaaggcgtagcccgtcgttacggcggcgagtggaccgaagatgcaggcgagcgcgcgttattggccgaacgtttgcacgccaatttattaggacgtttgcaaggcgaggaacgtctcctctggctttacgaagaagtggagaaaccattgagtcgcgtgctcgcgcatatggaagctaccggtgtcaaattagacgtggcgtatttggaggcactcagccttgaagttgctgccgaaatgcgccgcttggaggaagaagtattccgtttagcaggccactccttttatcttaattctcgcgatcagttagaacgtgtgttgttcgatgaacttggtctccctcctatcggcaagacagagaagaccggtaaacgtagcacttcagcggcggttttagaagctcttcgcgaagtccatcccattgtggacaagatcttgcagtaccgcgaactcgcgaaattgaaaggcacctatattgaccctcttccggcattagtccacccgaaaacgggacgcctccatacccgcttcaaccaaacagccacggcgaccggtcgtttgtcctcctctgatccaaaccttcagaatattccagtacgtaccccattgggccagaagatccgccgcgcgtttgtagctgaggagggttggcgtttagtggccctcgattatagccaaattgaattacgtgtccttgcccatctttctggcgatgagaacctcatccgcgtgtttcaggaaggcaaagacattcacactcaaacggcaagctggatgtttggattatcagctgaagcgatcgatcctttgatgcgtcgtgcagcgaagaccatcaatttcggtgttctctacggtatgagtgcccatcgtttgtcgcaggaattaggcattccctatgaagaagctgcggcgttcattcagcgctactttcaaagctatcccaaagttaaagcatggatcgagaagactctcgaagaaggccgcacacgtggttacgtagagaccttatttggacgtcgccgctatgttcccgatttaaacgctcgcgtgaaatctgtccgtgaagccgccgaacgcatggcgttcaacatgcctgtacagggcacggcagctgacctcatgaaacttgcaatggtgcgcctttttccacaattgcgtgaagttggtgcccgcatgctcttgcaggtccacgatgaactcttgttagaagcgccaaaagagcgtgcggaagaggtggcagccctcgcgaaagaggttatggaaggcgtgtggcccttagcggtgcctcttgaagtcgaagttggtattggcgaggattggttggctgccaaaggataatga

SEQ ID NO: 1832 - protein, 841 aa, synthetic construct
  REGION 1..841: note = Variant of DNA polymerase I from Thermus sp. strain 2.9
MHHHVHHGGSGMLPLFEPKGRVLLVDGHHLAYRNFFALKGLTTSRGEPVQGVYGFAKSLLKALKEDGDVVIVVFDAKAPSFRHEAYEAYKAGRAPTPEDFPRQLALMKELVDLLGLERLEVPGFEADDVLATLAKKAEREGYEVQILTADRDLFQLLSPRISVLHPEGHRITPEWLWEKYGLRPEQWVDFRALAGDPSDNIPGVKGIGEKTALKLLKEWGSLENLLKNLDQVKPESVREKILAHLEDLKLSRELSRVRTDLPLEVDFRGRREPDWEGLKAFLERLEFGSLLHEFGLLESPLPAEEAPWPPPEGAFLGYRLSRPEPMWAELLALAASAQGRVYRAEDPHGALRGLKEVRGLLAKDLAVVALREGLDLPPTDDPMLLAYLLDPSNTTPEGVARRYGGEWTEDAGERALLAERLHANLLGRLQGEERLLWLYEEVEKPLSRVLAHMEATGVKLDVAYLEALSLEVAAEMRRLEEEVFRLAGHSFYLNSRDQLERVLFDELGLPPIGKTEKTGKRSTSAAVLEALREVHPIVDKILQYRELAKLKGTYIDPLPALVHPKTGRLHTRFNQTATATGRLSSSDPNLQNIPVRTPLGQKIRRAFVAEEGWRLVALDYSQIELRVLAHLSGDENLIRVFQEGKDIHTQTASWMFGLSAEAIDPLMRRAAKTINFGVLYGMSAHRLSQELGIPYEEAAAFIQRYFQSYPKVKAWIEKTLEEGRTRGYVETLFGRRRYVPDLNARVKSVREAAERMAFNMPVQGTAADLMKLAMVRLFPQLREVGARMLLQVHDELLLEAPKERAEEVAALAKEVMEGVWPLAVPLEVEVGIGEDWLAAKG

SEQ ID NO: 1833 - DNA, 2529 bp, synthetic construct
  misc_feature 1..2529: note = Variant of DNA polymerase I from Thermus sp. strain 2.9
  source 1..2529: mol_type = other DNA
atgcaccatcatcatcatcatggcggtagcggcatgttaccgttgttcgaacctaaaggtcgcgtgcttctggttgatggccatcatctcgcgtatcgtaacttctttgccctgaaaggattaaccaccagccgtggcgagccggtacagggtgtctacggctttgcaaagtcgctcctgaaagctctgaaagaagacggtgatgtggtgattgttgtctttgatgcgaaagcgccaagttttcgccacgaagcgtacgaagcttacaaagccgggcgtgctccaacgccggaagactttcctcgccaattggcgcttatgaaggaattagtggatttgcttggcctcgaacgcttggaagttcccggtttcgaggcagacgacgtattagcgactctcgcaaagaaagccgaacgtgagggctatgaagtccagatcttgacagcagatcgcgatcttttccagcttttatctccgcgcatctcggtgttacacccggaagggcatcgtatcaccccggaatggctctgggagaaatatggtttgcgtcccgaacaatgggtggattttcgcgccttagcaggcgatccgagcgacaatattccgggagttaaaggtatcggcgagaagacggcgctcaagctccttaaatattgggggtcgttggagaacttgcttaagaatttagatcaggtcaaaccagagtcagtgcgtgagaagattcttgcacacctcgaagacctcaaattaagccgcgaattgtcccgtgtacgcaccgatttgccgctcgaagttgatttccgtggccgccgcgaacctgactgggagggtcttaaagcgtttttagagcgtcttgaatttggttcgctcttgcatgaattcggccttttagaaagcccgttaccagccgaagaagcaccttggccaccgcccgaaggcgcgtttttaggttaccgtttgagtcgcccggaaccgatgtgggccgaattattggctcttgcagcgtctgcccagggacgtgtgtatcgcgcggaagaccctcatggtgcgctccgcggcctcaaagaagtccgtggactccttgccaaagacttagctgttgttgcattgcgcgaaggtcttgatttacctccgactgatgatccaatgcttcttgcgtacctcttggacccgtcaaacacgacgcccgaaggcgtagcccgtcgttacggcggcgagtggaccgaagatgcaggcgagcgcgcgttattggccgaacgtttgcacgccaatttattaggacgtttgcaaggcgaggaacgtctcctctggctttacgaagaagtggagaaaccattgagtcgcgtgctcgcgcatatggaagctaccggtgtcaaattagacgtggcgtatttggaggcactcagccttgaagttgctgccgaaatgcgccgcttggaggaagaagtattccgtttagcaggccactccttttatcttaattctcgcgatcagttagaacgtgtgttgttcgatgaacttggtctccctcctatcggcaagacagagaagaccggtaaacgtagcacttcagcggcggttttagaagctcttcgcgaagtccatcccattgtggacaagatcttgcagtaccgcgaactcgcgaaattgaaaggcacctatattgaccctcttccggcattagtccacccgaaaacgggacgcctccatacccgcttcaaccaaacagccacggcgaccggtcgtttgtcctcctctgatccaaaccttcagaatattccagtacgtaccccattgggccagaagatccgccgcgcgtttgtagctgaggagggttggcgtttagtggccctcgattatagccaaattgaattacgtgtccttgcccatctttctggcgatgagaacctcatccgcgtgtttcaggaaggcaaagacattcacactcaaacggcaagctggatgtttggattatcagctgaagcgatcgatcctttgatgcgtcgtgcagcgaagaccatcaatttcggtgttctctacggtatgagtgcccatcgtttgtcgcaggaattaggcattccctatgaagaagctgcggcgttcattcagcgctactttcaaagctatcccaaagttaaagcatggatcgagaagactctcgaagaaggccgcacacgtggttacgtagagaccttatttggacgtcgccgctatgttcccgatttaaacgctcgcgtgaaatctgtccgtgaagccgccgaacgcatggcgttcaacatgcctgtacagggcacggcagctgacctcatgaaacttgcaatggtgcgcctttttccacaattgcgtgaagttggtgcccgcatgctcttgcaggtccacgatgaactcttgttagaagcgccaaaagagcgtgcggaagaggtggcagccctcgcgaaagaggttatggaaggcgtgtggcccttagcggtgcctcttgaagtcgaagttggtattggcgaggattggttggctgccaaaggataatga

SEQ ID NO: 1834 - protein, 841 aa, synthetic construct
  REGION 1..841: note = Variant of DNA polymerase I from Thermus sp. strain 2.9
MHHHHHHGGSGMLPLFEPKGRVLLVDGHHLAYRNFFALKGLTTSRGEPVQGVYGFAKSLLKALKEDGDVVIVVFDAKAPSFRHEAYEAYKAGRAPTPEDFPRQLALMKELVDLLGLERLEVPGFEADDVLATLAKKAEREGYEVQILTADRDLFQLLSPRISVLHPEGHRITPEWLWEKYGLRPEQWVDFRALAGDPSDNIPGVKGIGEKTALKLLKYWGSLENLLKNLDQVKPESVREKILAHLEDLKLSRELSRVRTDLPLEVDFRGRREPDWEGLKAFLERLEFGSLLHEFGLLESPLPAEEAPWPPPEGAFLGYRLSRPEPMWAELLALAASAQGRVYRAEDPHGALRGLKEVRGLLAKDLAVVALREGLDLPPTDDPMLLAYLLDPSNTTPEGVARRYGGEWTEDAGERALLAERLHANLLGRLQGEERLLWLYEEVEKPLSRVLAHMEATGVKLDVAYLEALSLEVAAEMRRLEEEVFRLAGHSFYLNSRDQLERVLFDELGLPPIGKTEKTGKRSTSAAVLEALREVHPIVDKILQYRELAKLKGTYIDPLPALVHPKTGRLHTRFNQTATATGRLSSSDPNLQNIPVRTPLGQKIRRAFVAEEGWRLVALDYSQIELRVLAHLSGDENLIRVFQEGKDIHTQTASWMFGLSAEAIDPLMRRAAKTINFGVLYGMSAHRLSQELGIPYEEAAAFIQRYFQSYPKVKAWIEKTLEEGRTRGYVETLFGRRRYVPDLNARVKSVREAAERMAFNMPVQGTAADLMKLAMVRLFPQLREVGARMLLQVHDELLLEAPKERAEEVAALAKEVMEGVWPLAVPLEVEVGIGEDWLAAKG

SEQ ID NO: 1835 - DNA, 2529 bp, synthetic construct
  misc_feature 1..2529: note = Variant of DNA polymerase I from Thermus sp. strain 2.9
  source 1..2529: mol_type = other DNA
atgcaccatcatcatcatcatggcggtagcggcatgttaccgttgttcgaacctaaaggtcgcgtgcttctggttgatggccatcatctcgcgtatcgtaacttctttgccctgaaaggattaaccaccagccgtggcgagccggtacagggtgtctacggctttgcaaagtcgctcctgaaagctctgaaagaagacggtgatgtggtgattgttgtctttgatgcgaaagcgccaagttttcgccacgaagcgtacgaagcttacaaagccgggcgtgctccaacgccggaagactttcctcgccaattggcgcttatgaaggaattagtggatttgcttggcctcgaacgcttggaagttcccggtttcgaggcagacgacgtattagcgactctcgcaaagaaagccgaacgtgagggctatgaagtccagatcttgacagcagatcgcgatcttttccagcttttatctccgcgcatctcggtgttacacccggaagggcatcgtatcaccccggaatggctctgggagaaatatggtttgcgtcccgaacaatgggtggattttcgcgccttagcaggcgatccgagcgacaatattccgggagttaaaggtatcggcgagaagacggcgctcaagctccttaaagaatgggggtcgttggagaacttgcttaagaatttagatcaggtcaaaccagagtcagtgcgtgagaagattcttgcacacctcgaagacctcaaattaagccgcgaattgtcccgtgtacgcaccgatttgccgctcgaagttgatttccgtggccgccgcgaacctgactgggagggtcttaaagcgtttttagagcgtcttgaatttggttcgctcttgcatgaattcggccttttagaaagcccgttaccagccgaagaagcaccttggccaccgcccgaaggcgcgtttttaggttaccgtttgagtcgcccggaaccgatgtgggccgaattattggctcttgcagcgtctgcccagggacgtgtgtatcgcgcggaagaccctcatggtgcgctccgcggcctcaaagaagtccgtggactccttgccaaagacttagctgttgttgcattgcgcgaaggtcttgatttacctccgactgatgatccaatgcttcttgcgtacctcttggacccgtcaaacacgacgcccgaaggcgtagcccgtcgttacggcggcgagtggaccgaagatgcaggcgagcgcgcgttattggccgaacgtttgcacgccaatttattaggacgtttgcaaggcgaggaacgtctcctctggctttacgaagaagtggagaaaccattgagtcgcgtgctcgcgcatatggaagctaccggtgtcaaattagacgtggcgtatttggaggcactcagccttgaagttgctgccgaaatgcgccgcttggaggaagaagtattccgtttagcaggccactccttttatcttaattctcgcgatcagttagaacgtgtgttgttcgatgaacttggtctccctcctatcggcaagacagagaagaccggtaaacgtagcacttcagcggcggttttagaagctcttcgcgaagtccatcccattgtggacaagatcttgcagtaccgcgaactcgcgaaattgaaaggcacctatattgaccctcttccggcattagtccacccgaaaacgggacgcctccatacccgcttcaaccaaacagccacggcgaccggtcgtttgtcctcctctgatccaaaccttcagaatattccagtacgtaccccattgggccagaagatccgccgcgcgtttgtagctgaggagggttggcgtttagtggccctcgattatagccaaattgaattacgtgtccttgcccatctttctggcgatgagaacctcatccgcgtgtttcaggaaggcaaagacattcacactcaaacggcaagctggatgtttggattatcagctgaagcgatcgatcctttgatgcgtcgtgcagcgaagaccatcaatttcggtgttctctacggtatgagtgcccatcgtttgtcgcaggaattaggcattccctatgaagaagctgcggcgttcattcagcgctactttcaaagctatcccaaagttaaagcatggatcgagaagactctcgaagaaggccgcacacgtggttacgtagagaccttatttggacgtcgccgctatgttcccgatttaaacgctcgcgtgaaatctgtccgtgaagccgccgaacgcatggcgttcaacatgcctgtacagggcacggcagctgacctcatgaaacttgcaatggtgcgcctttttccacaattgcgtgaagttggtgcccgcatgctcttgcaggtccacgatgaactcttgttagaagcgccaaaagagcgtgcggaagaggtggcagccctcgcgaaagaggttatggaaggcgtgtggcccttagcggtgcctcttgaagtccttgttggtattggcgaggattggttggctgccaaaggataatga

SEQ ID NO: 1836 - protein, 841 aa, synthetic construct
  REGION 1..841: note = Variant of DNA polymerase I from Thermus sp. strain 2.9
MHHHHHHGGSGMLPLFEPKGRVLLVDGHHLAYRNFFALKGLTTSRGEPVQGVYGFAKSLLKALKEDGDVVIVVFDAKAPSFRHEAYEAYKAGRAPTPEDFPRQLALMKELVDLLGLERLEVPGFEADDVLATLAKKAEREGYEVQILTADRDLFQLLSPRISVLHPEGHRITPEWLWEKYGLRPEQWVDFRALAGDPSDNIPGVKGIGEKTALKLLKEWGSLENLLKNLDQVKPESVREKILAHLEDLKLSRELSRVRTDLPLEVDFRGRREPDWEGLKAFLERLEFGSLLHEFGLLESPLPAEEAPWPPPEGAFLGYRLSRPEPMWAELLALAASAQGRVYRAEDPHGALRGLKEVRGLLAKDLAVVALREGLDLPPTDDPMLLAYLLDPSNTTPEGVARRYGGEWTEDAGERALLAERLHANLLGRLQGEERLLWLYEEVEKPLSRVLAHMEATGVKLDVAYLEALSLEVAAEMRRLEEEVFRLAGHSFYLNSRDQLERVLFDELGLPPIGKTEKTGKRSTSAAVLEALREVHPIVDKILQYRELAKLKGTYIDPLPALVHPKTGRLHTRFNQTATATGRLSSSDPNLQNIPVRTPLGQKIRRAFVAEEGWRLVALDYSQIELRVLAHLSGDENLIRVFQEGKDIHTQTASWMFGLSAEAIDPLMRRAAKTINFGVLYGMSAHRLSQELGIPYEEAAAFIQRYFQSYPKVKAWIEKTLEEGRTRGYVETLFGRRRYVPDLNARVKSVREAAERMAFNMPVQGTAADLMKLAMVRLFPQLREVGARMLLQVHDELLLEAPKERAEEVAALAKEVMEGVWPLAVPLEVLVGIGEDWLAAKG

SEQ ID NO: 1837 - DNA, 2529 bp, synthetic construct
  misc_feature 1..2529: note = Variant of DNA polymerase I from Thermus sp. strain 2.9
  source 1..2529: mol_type = other DNA
atgcaccatcatcatcatcatggcggtagcggcatgttaccgttgttcgaacctaaaggtcgcgtgcttctggttgatggccatcatctcgcgtatcgtaacttctttgccctgaaaggattaaccaccagccgtggcgagccggtacagggtgtctacggctttgcaaagtcgctcctgaaagctctgaaagaagacggtgatgtggtgattgttgtctttgatgcgaaagcgccaagttttcgccacgaagcgtacgaagcttacaaagccgggcgtgctccaacgccggaagactttcctcgccaattggcgcttatgaaggaattagtggatttgcttggcctcgaacgcttggaagttcccggtttcgaggcagacgacgtattagcgactctcgcaaagaaagccgaacgtgagggctatgaagtccagatcttgacagcagatcgcgatcttttccagcttttatctccgcgcatctcggtgttacacccggaagggcatcgtatcaccccggaatggctctgggagaaatatggtttgcgtcccgaacaatgggtggattttcgcgccttagcaggcgatccgagcgacaatattccgggagttaaaggtatcggcgagaagacggcgctcaagctccttaaagaatgggggtcgttggagaacttgcttaagaatttagatcaggtcaaaccagagtcagtgcgtgagaagattcttgcacacctcgaagacctcaaattaagccgcgaattgtcccgtgtacgcaccgatttgccgctcgaagttgatttccgtggccgccgcgaacctgactgggagggtcttagggcgtttttagagcgtcttgaatttggttcgctcttgcatgaattcggccttttagaaagcccgttaccagccgaagaagcaccttggccaccgcccgaaggcgcgtttttaggttaccgtttgagtcgcccggaaccgatgtgggccgaattattggctcttgcagcgtctgcccagggacgtgtgtatcgcgcggaagaccctcatggtgcgctccgcggcctcaaagaagtccgtggactccttgccaaagacttagctgttgttgcattgcgcgaaggtcttgatttacctccgactgatgatccaatgcttcttgcgtacctcttggacccgtcaaacacgacgcccgaaggcgtagcccgtcgttacggcggcgagtggaccgaagatgcaggcgagcgcgcgttattggccgaacgtttgcacgccaatttattaggacgtttgcaaggcgaggaacgtctcctctggctttacgaagaagtggagaaaccattgagtcgcgtgctcgcgcatatggaagctaccggtgtcaaattagacgtggcgtatttggaggcactcagccttgaagttgctgccgaaatgcgccgcttggaggaagaagtattccgtttagcaggccactccttttatcttaattctcgcgatcagttagaacgtgtgttgttcgatgaacttggtctccctcctatcggcaagacagagaagaccggtaaacgtagcacttcagcggcggttttagaagctcttcgcgaagtccatcccattgtggacaagatcttgcagtaccgcgaactcgcgaaattgaaaggcacctatattgaccctcttccggcattagtccacccgaaaacgggacgcctccatacccgcttcaaccaaacagccacggcgaccggtcgtttgtcctcctctgatccaaaccttcagaatattccagtacgtaccccattgggccagaagatccgccgcgcgtttgtagctgaggagggttggcgtttagtggccctcgattatagccaaattgaattacgtgtccttgcccatctttctggcgatgagaacctcatccgcgtgtttcaggaaggcaaagacattcacactcaaacggcaagctggatgtttggattatcagctgaagcgatcgatcctttgatgcgtcgtgcagcgaagaccatcaatttcggtgttctctacggtatgagtgcccatcgtttgtcgcaggaattaggcattccctatgaagaagctgcggcgttcattcagcgctactttcaaagctatcccaaagttaaagcatggatcgagaagactctcgaagaaggccgcacacgtggttacgtagagaccttatttggacgtcgccgctatgttcccgatttaaacgctcgcgtgaaatctgtccgtgaagccgccgaacgcatggcgttcaacatgcctgtacagggcacggcagctgacctcatgaaacttgcaatggtgcgcctttttccacaattgcgtgaagttggtgcccgcatgctcttgcaggtccacgatgaactcttgttagaagcgccaaaagagcgtgcggaagaggtggcagccctcgcgaaagaggttatggaaggcgtgtggcccttagcggtgcctcttgaagtcgaagttggtattggcgaggattggttggctgccaaaggataatga

SEQ ID NO: 1838 - protein, 841 aa, synthetic construct
  REGION 1..841: note = Variant of DNA polymerase I from Thermus sp. strain 2.9
MHHHHHHGGSGMLPLFEPKGRVLLVDGHHLAYRNFFALKGLTTSRGEPVQGVYGFAKSLLKALKEDGDVVIVVFDAKAPSFRHEAYEAYKAGRAPTPEDFPRQLALMKELVDLLGLERLEVPGFEADDVLATLAKKAEREGYEVQILTADRDLFQLLSPRISVLHPEGHRITPEWLWEKYGLRPEQWVDFRALAGDPSDNIPGVKGIGEKTALKLLKEWGSLENLLKNLDQVKPESVREKILAHLEDLKLSRELSRVRTDLPLEVDFRGRREPDWEGLRAFLERLEFGSLLHEFGLLESPLPAEEAPWPPPEGAFLGYRLSRPEPMWAELLALAASAQGRVYRAEDPHGALRGLKEVRGLLAKDLAVVALREGLDLPPTDDPMLLAYLLDPSNTTPEGVARRYGGEWTEDAGERALLAERLHANLLGRLQGEERLLWLYEEVEKPLSRVLAHMEATGVKLDVAYLEALSLEVAAEMRRLEEEVFRLAGHSFYLNSRDQLERVLFDELGLPPIGKTEKTGKRSTSAAVLEALREVHPIVDKILQYRELAKLKGTYIDPLPALVHPKTGRLHTRFNQTATATGRLSSSDPNLQNIPVRTPLGQKIRRAFVAEEGWRLVALDYSQIELRVLAHLSGDENLIRVFQEGKDIHTQTASWMFGLSAEAIDPLMRRAAKTINFGVLYGMSAHRLSQELGIPYEEAAAFIQRYFQSYPKVKAWIEKTLEEGRTRGYVETLFGRRRYVPDLNARVKSVREAAERMAFNMPVQGTAADLMKLAMVRLFPQLREVGARMLLQVHDELLLEAPKERAEEVAALAKEVMEGVWPLAVPLEVEVGIGEDWLAAKG

SEQ ID NO: 1839 - DNA, 2529 bp, synthetic construct
  misc_feature 1..2529: note = Variant of DNA polymerase I from Thermus sp. strain 2.9
  source 1..2529: mol_type = other DNA
atgcaccatcatcatcatcatggcggtagcggcatgttaccgttgttcgaacctaaaggtcgcgtgcttctggttgatggccatcatctcgcgtatcgtaacttctttgccctgaaaggattaaccaccagccgtggcgagccggtacagggtgtctacggctttgcaaagtcgctcctgaaagctctgaaagaagacggtgatgtggtgattgttgtctttgatgcgaaagcgccaagttttcgccacgaagcgtacgaagcttacaaagccgggcgtgctccaacgccggaagactttcctcgccaattggcgcttatgaaggaattagtggatttgcttggcctcgaacgcttggaagttcccggtttcgaggcagacgacgtattagcgactctcgcaaagaaagccgaacgtgagggctatgaagtccagatcttgacagcagatcgcgatcttttccagcttttatctccgcgcatctcggtgttacacccggaagggcatcgtatcaccccggaatggctctgggagaaatatggtttgcgtcccgaacaatgggtggattttcgcgccttagcaggcgatccgagcgacaatattccgggagttaaaggtatcggcgagaagacggcgctcaagctccttaaagaatgggggtcgttggagaacttgcttaagaatttagatcaggtcaaaccagagtcagtgcgtgagaagattcttgcacacctcgaagacctcaaattaagccgcgaattgtcccgtgtacgcaccgatttgccgctcgaagttgatttccgtggccgccgcgaacctgactgggagggtcttaaagcgtttttagagcgtcttgaatttggttcgctcttgcatgaattcggccttttagaaagcccgttaccagccgaagaagcaccttggccaccgcccgaaggcgcgtttttaggttaccgtttgagtcgcccggaaccgatgtgggccgaattattggctcttgcagcgtctgcccagggaactgtgtatcgcgcggaagaccctcatggtgcgctccgcggcctcaaagaagtccgtggactccttgccaaagacttagctgttgttgcattgcgcgaaggtcttgatttacctccgactgatgatccaatgcttcttgcgtacctcttggacccgtcaaacacgacgcccgaaggcgtagcccgtcgttacggcggcgagtggaccgaagatgcaggcgagcgcgcgttattggccgaacgtttgcacgccaatttattaggacgtttgcaaggcgaggaacgtctcctctggctttacgaagaagtggagaaaccattgagtcgcgtgctcgcgcatatggaagctaccggtgtcaaattagacgtggcgtatttggaggcactcagccttgaagttgctgccgaaatgcgccgcttggaggaagaagtattccgtttagcaggccactccttttatcttaattctcgcgatcagttagaacgtgtgttgttcgatgaacttggtctccctcctatcggcaagacagagaagaccggtaaacgtagcacttcagcggcggttttagaagctcttcgcgaagtccatcccattgtggacaagatcttgcagtaccgcgaactcgcgaaattgaaaggcacctatattgaccctcttccggcattagtccacccgaaaacgggacgcctccatacccgcttcaaccaaacagccacggcgaccggtcgtttgtcctcctctgatccaaaccttcagaatattccagtacgtaccccattgggccagaagatccgccgcgcgtttgtagctgaggagggttggcgtttagtggccctcgattatagccaaattgaattacgtgtccttgcccatctttctggcgatgagaacctcatccgcgtgtttcaggaaggcaaagacattcacactcaaacggcaagctggatgtttggattatcagctgaagcgatcgatcctttgatgcgtcgtgcagcgaagaccatcaatttcggtgttctctacggtatgagtgcccatcgtttgtcgcaggaattaggcattccctatgaagaagctgcggcgttcattcagcgctactttcaaagctatcccaaagttaaagcatggatcgagaagactctcgaagaaggccgcacacgtggttacgtagagaccttatttggacgtcgccgctatgttcccgatttaaacgctcgcgtgaaatctgtccgtgaagccgccgaacgcatggcgttcaacatgcctgtacagggcacggcagctgacctcatgaaacttgcaatggtgcgcctttttccacaattgcgtgaagttggtgcccgcatgctcttgcaggtccacgatgaactcttgttagaagcgccaaaagagcgtgcggaagaggtggcagccctcgcgaaagaggttatggaaggcgtgtggcccttagcggtgcctcttgaagtcgaagttggtattggcgaggattggttggctgccaaaggataatga

SEQ ID NO: 1840 - protein, 841 aa, synthetic construct
  REGION 1..841: note = Variant of DNA polymerase I from Thermus sp. strain 2.9
MHHHHHHGGSGMLPLFEPKGRVLLVDGHHLAYRNFFALKGLTTSRGEPVQGVYGFAKSLLKALKEDGDVVIVVFDAKAPSFRHEAYEAYKAGRAPTPEDFPRQLALMKELVDLLGLERLEVPGFEADDVLATLAKKAEREGYEVQILTADRDLFQLLSPRISVLHPEGHRITPEWLWEKYGLRPEQWVDFRALAGDPSDNIPGVKGIGEKTALKLLKEWGSLENLLKNLDQVKPESVREKILAHLEDLKLSRELSRVRTDLPLEVDFRGRREPDWEGLKAFLERLEFGSLLHEFGLLESPLPAEEAPWPPPEGAFLGYRLSRPEPMWAELLALAASAQGTVYRAEDPHGALRGLKEVRGLLAKDLAVVALREGLDLPPTDDPMLLAYLLDPSNTTPEGVARRYGGEWTEDAGERALLAERLHANLLGRLQGEERLLWLYEEVEKPLSRVLAHMEATGVKLDVAYLEALSLEVAAEMRRLEEEVFRLAGHSFYLNSRDQLERVLFDELGLPPIGKTEKTGKRSTSAAVLEALREVHPIVDKILQYRELAKLKGTYIDPLPALVHPKTGRLHTRFNQTATATGRLSSSDPNLQNIPVRTPLGQKIRRAFVAEEGWRLVALDYSQIELRVLAHLSGDENLIRVFQEGKDIHTQTASWMFGLSAEAIDPLMRRAAKTINFGVLYGMSAHRLSQELGIPYEEAAAFIQRYFQSYPKVKAWIEKTLEEGRTRGYVETLFGRRRYVPDLNARVKSVREAAERMAFNMPVQGTAADLMKLAMVRLFPQLREVGARMLLQVHDELLLEAPKERAEEVAALAKEVMEGVWPLAVPLEVEVGIGEDWLAAKG

SEQ ID NO: 1841 - DNA, 2529 bp, synthetic construct
  misc_feature 1..2529: note = Variant of DNA polymerase I from Thermus sp. strain 2.9
  source 1..2529: mol_type = other DNA
atgcaccatcatcatcatcatggcggtagcggcatgttaccgttgttcgaacctaaaggtcgcgtgcttctggttgatggccatcatctcgcgtatcgtaacttctttgccctgaaaggattaaccaccagccgtggcgagccggtacagggtgtctacggctttgcaaagtcgctcctgaaagctctgaaagaagacggtgatgtggtgattgttgtctttgatgcgaaagcgccaagttttcgccacgaagcgtacgaagcttacaaagccgggcgtgctccaacgccggaagactttcctcgccaattggcgcttatgaaggaattagtggatttgcttggcctcgaacgcttggaagttcccggtttcgaggcagacgacgtattagcgactctcgcaaagaaagccgaacgtgagggctatgaagtccagatcttgacagcagatcgcgatcttttccagcttttatctccgcgcatctcggtgttacacccggaagggcatcgtatcaccccggaatggctctgggagaaatatggtttgcgtcccgaacaatgggtggattttcgcgccttagcaggcgatccgagcgacaatattccgggagttaaaggtatcggcgagaagacggcgctcaagctccttaaagaatgggggtcgttggagaacttgcttaagaatttagatcaggtcaaaccagagtcagtgcgtgagaagattaatgcacacctcgaagacctcaaattaagccgcgaattgtcccgtgtacgcaccgatttgccgctcgaagttgatttccgtggccgccgcgaacctgactgggagggtcttaaagcgtttttagagcgtcttgaatttggttcgctcttgcatgaattcggccttttagaaagcccgttaccagccgaagaagcaccttggccaccgcccgaaggcgcgtttttaggttaccgtttgagtcgcccggaaccgatgtgggccgaattattggctcttgcagcgtctgcccagggacgtgtgtatcgcgcggaagaccctcatggtgcgctccgcggcctcaaagaagtccgtggactccttgccaaagacttagctgttgttgcattgcgcgaaggtcttgatttacctccgactgatgatccaatgcttcttgcgtacctcttggacccgtcaaacacgacgcccgaaggcgtagcccgtcgttacggcggcgagtggaccgaagatgcaggcgagcgcgcgttattggccgaacgtttgcacgccaatttattaggacgtttgcaaggcgaggaacgtctcctctggctttacgaagaagtggagaaaccattgagtcgcgtgctcgcgcatatggaagctaccggtgtcaaattagacgtggcgtatttggaggcactcagccttgaagttgctgccgaaatgcgccgcttggaggaagaagtattccgtttagcaggccactccttttatcttaattctcgcgatcagttagaacgtgtgttgttcgatgaacttggtctccctcctatcggcaagacagagaagaccggtaaacgtagcacttcagcggcggttttagaagctcttcgcgaagtccatcccattgtggacaagatcttgcagtaccgcgaactcgcgaaattgaaaggcacctatattgaccctcttccggcattagtccacccgaaaacgggacgcctccatacccgcttcaaccaaacagccacggcgaccggtcgtttgtcctcctctgatccaaaccttcagaatattccagtacgtaccccattgggccagaagatccgccgcgcgtttgtagctgaggagggttggcgtttagtggccctcgattatagccaaattgaattacgtgtccttgcccatctttctggcgatgagaacctcatccgcgtgtttcaggaaggcaaagacattcacactcaaacggcaagctggatgtttggattatcagctgaagcgatcgatcctttgatgcgtcgtgcagcgaagaccatcaatttcggtgttctctacggtatgagtgcccatcgtttgtcgcaggaattaggcattccctatgaagaagctgcggcgttcattcagcgctactttcaaagctatcccaaagttaaagcatggatcgagaagactctcgaagaaggccgcacacgtggttacgtagagaccttatttggacgtcgccgctatgttcccgatttaaacgctcgcgtgaaatctgtccgtgaagccgccgaacgcatggcgttcaacatgcctgtacagggcacggcagctgacctcatgaaacttgcaatggtgcgcctttttccacaattgcgtgaagttggtgcccgcatgctcttgcaggtccacgatgaactcttgttagaagcgccaaaagagcgtgcggaagaggtggcagccctcgcgaaagaggttatggaaggcgtgtggcccttagcggtgcctcttgaagtcgaagttggtattggcgaggattggttggctgccaaaggataatga

SEQ ID NO: 1842 - protein, 841 aa, synthetic construct
  REGION 1..841: note = Variant of DNA polymerase I from Thermus sp. strain 2.9
MHHHHHHGGSGMLPLFEPKGRVLLVDGHHLAYRNFFALKGLTTSRGEPVQGVYGFAKSLLKALKEDGDVVIVVFDAKAPSFRHEAYEAYKAGRAPTPEDFPRQLALMKELVDLLGLERLEVPGFEADDVLATLAKKAEREGYEVQILTADRDLFQLLSPRISVLHPEGHRITPEWLWEKYGLRPEQWVDFRALAGDPSDNIPGVKGIGEKTALKLLKEWGSLENLLKNLDQVKPESVREKINAHLEDLKLSRELSRVRTDLPLEVDFRGRREPDWEGLKAFLERLEFGSLLHEFGLLESPLPAEEAPWPPPEGAFLGYRLSRPEPMWAELLALAASAQGRVYRAEDPHGALRGLKEVRGLLAKDLAVVALREGLDLPPTDDPMLLAYLLDPSNTTPEGVARRYGGEWTEDAGERALLAERLHANLLGRLQGEERLLWLYEEVEKPLSRVLAHMEATGVKLDVAYLEALSLEVAAEMRRLEEEVFRLAGHSFYLNSRDQLERVLFDELGLPPIGKTEKTGKRSTSAAVLEALREVHPIVDKILQYRELAKLKGTYIDPLPALVHPKTGRLHTRFNQTATATGRLSSSDPNLQNIPVRTPLGQKIRRAFVAEEGWRLVALDYSQIELRVLAHLSGDENLIRVFQEGKDIHTQTASWMFGLSAEAIDPLMRRAAKTINFGVLYGMSAHRLSQELGIPYEEAAAFIQRYFQSYPKVKAWIEKTLEEGRTRGYVETLFGRRRYVPDLNARVKSVREAAERMAFNMPVQGTAADLMKLAMVRLFPQLREVGARMLLQVHDELLLEAPKERAEEVAALAKEVMEGVWPLAVPLEVEVGIGEDWLAAKG

SEQ ID NO: 1843 - DNA, 2529 bp, synthetic construct
  misc_feature 1..2529: note = Variant of DNA polymerase I from Thermus sp. strain 2.9
  source 1..2529: mol_type = other DNA
atgcaccatcatcatcatcatggcggtagcggcatgttaccgttgttcgaacctaaaggtcgcgtgcttctggttgatggccatcatctcgcgtatcgtaacttctttgccctgaaaggattaaccaccagccgtggcgagccggtacagggtgtctacggctttgcaaagtcgctcctgaaagctctgaaagaagacggtgatgtggtgattgttgtctttgatgcgaaagcgccaagttttcgccacgaagcgtacgaagcttacaaagccgggcgtgctccaacgccggaagactttcctcgccaattggcgcttatgaaggaattagtggatttgcttggcctcgaacgcttggaagttcccggtttcgaggcagacgacgtattagcgactctcgcaaagaaagccgaacgtgagggctatgaagtccagatcttgacagcagatcgcgatcttttccagcttttatctccgcgcatctcggtgttacacccggaagggcatcgtatcaccccggaatggctctgggagaaatatggtttgcgtcccgaacaatgggtggattttcgcgccttagcaggcgatccgagcgacaatattccgggagttaaaggtatcggcgagaagacggcgctcaagctccttaaagaatgggggtcgttggagaacttgcttaagaatttagatcaggtcaaaccagagtcagtgcgtgagaagattcttgcacacctcgaagacctcaaattaagccgcgaattgtcccgtgtacgcaccgatttgccgctcgaagttgatttccgtggccgccgcgaacctgactgggagggtcttaaagcgtttttagagcgtcttgaatttggttcgctcttgcatgaattcggccttttagaaagcccgttaccagccgaagaagcaccttggccaccgcccgaaggcgcgtttttaggttaccgtttgagtcgcccggaaccgatgtgggccgaattattggctcttgcagcgtctgcccagggacgtgtgtatcgcgcggaagaccctcatggtgcgctccgcggcctcaaagaagtccgtggactccttgccaaagacttagctgttgttgcattgcgcgaaggtcttgatttacctccgactgatgatccaatgcttcttgcgtacctcttggacccgtcaaacacgacgcccgaaggcgtagcccgtcgttacggcggcgagtggaccgaagatgcaggcgagcgcgcgttattggccgaacgtttgcacgccaatttattaggacgtttgcaaggcgaggaacgtctcctctggctttacgaagaagtggagaaaccattgagtcgcgtgctcgcgcatatggaagctaccggtgtcaaattagacgtggcgtatttggaggcactcagccttgaagttgctgccgaaatgcgccgcttggaggaagaagtattccgtttagcaggccacgtcttttatcttaattctcgcgatcagttagaacgtgtgttgttcgatgaacttggtctccctcctatcggcaagacagagaagaccggtaaacgtagcacttcagcggcggttttagaagctcttcgcgaagtccatcccattgtggacaagatcttgcagtaccgcgaactcgcgaaattgaaaggcacctatattgaccctcttccggcattagtccacccgaaaacgggacgcctccatacccgcttcaaccaaacagccacggcgaccggtcgtttgtcctcctctgatccaaaccttcagaatattccagtacgtaccccattgggccagaagatccgccgcgcgtttgtagctgaggagggttggcgtttagtggccctcgattatagccaaattgaattacgtgtccttgcccatctttctggcgatgagaacctcatccgcgtgtttcaggaaggcaaagacattcacactcaaacggcaagctggatgtttggattatcagctgaagcgatcgatcctttgatgcgtcgtgcagcgaagaccatcaatttcggtgttctctacggtatgagtgcccatcgtttgtcgcaggaattaggcattccctatgaagaagctgcggcgttcattcagcgctactttcaaagctatcccaaagttaaagcatggatcgagaagactctcgaagaaggccgcacacgtggttacgtagagaccttatttggacgtcgccgctatgttcccgatttaaacgctcgcgtgaaatctgtccgtgaagccgccgaacgcatggcgttcaacatgcctgtacagggcacggcagctgacctcatgaaacttgcaatggtgcgcctttttccacaattgcgtgaagttggtgcccgcatgctcttgcaggtccacgatgaactcttgttagaagcgccaaaagagcgtgcggaagaggtggcagccctcgcgaaagaggttatggaaggcgtgtggcccttagcggtgcctcttgaagtcgaagttggtattggcgaggattggttggctgccaaaggataatga

SEQ ID NO: 1844 - protein, 841 aa, synthetic construct
  REGION 1..841: note = Variant of DNA polymerase I from Thermus sp. strain 2.9
MHHHHHHGGSGMLPLFEPKGRVLLVDGHHLAYRNFFALKGLTTSRGEPVQGVYGFAKSLLKALKEDGDVVIVVFDAKAPSFRHEAYEAYKAGRAPTPEDFPRQLALMKELVDLLGLERLEVPGFEADDVLATLAKKAEREGYEVQILTADRDLFQLLSPRISVLHPEGHRITPEWLWEKYGLRPEQWVDFRALAGDPSDNIPGVKGIGEKTALKLLKEWGSLENLLKNLDQVKPESVREKILAHLEDLKLSRELSRVRTDLPLEVDFRGRREPDWEGLKAFLERLEFGSLLHEFGLLESPLPAEEAPWPPPEGAFLGYRLSRPEPMWAELLALAASAQGRVYRAEDPHGALRGLKEVRGLLAKDLAVVALREGLDLPPTDDPMLLAYLLDPSNTTPEGVARRYGGEWTEDAGERALLAERLHANLLGRLQGEERLLWLYEEVEKPLSRVLAHMEATGVKLDVAYLEALSLEVAAEMRRLEEEVFRLAGHVFYLNSRDQLERVLFDELGLPPIGKTEKTGKRSTSAAVLEALREVHPIVDKILQYRELAKLKGTYIDPLPALVHPKTGRLHTRFNQTATATGRLSSSDPNLQNIPVRTPLGQKIRRAFVAEEGWRLVALDYSQIELRVLAHLSGDENLIRVFQEGKDIHTQTASWMFGLSAEAIDPLMRRAAKTINFGVLYGMSAHRLSQELGIPYEEAAAFIQRYFQSYPKVKAWIEKTLEEGRTRGYVETLFGRRRYVPDLNARVKSVREAAERMAFNMPVQGTAADLMKLAMVRLFPQLREVGARMLLQVHDELLLEAPKERAEEVAALAKEVMEGVWPLAVPLEVEVGIGEDWLAAKG

SEQ ID NO: 1845 - DNA, 2529 bp, synthetic construct
  misc_feature 1..2529: note = Variant of DNA polymerase I from Thermus sp. strain 2.9
  source 1..2529: mol_type = other DNA
atgcaccatcatcatcatcatggcggtagcggcatgttaccgttgttcgaacctaaaggtcgcgtgcttctggttgatggccatcatctcgcgtatcgtaacttctttgccctgaaaggattaaccaccagccgtggcgagccggtacagggtgtctacggctttgcaaagtcgctcctgaaagctctgaaagaagacggtgatgtggtgattgttgtctttgatgcgaaagcgccaagttttcgccacgaagcgtacgaagcttacaaagccgggcgtgctccaacgccggaagactttcctcgccaattggcgcttatgaaggaattagtggatttgcttggcctcgaacgcttggaagttcccggtttcgaggcagacgacgtattagcgactctcgcaaagaaagccgaacgtgagggctatgaagtccagatcttgacagcagatcgcgatcttttccagcttttatctccgcgcatctcggtgttacacccggaagggcatcgtatcaccccggaatggctctgggagaaatatggtttgcgtcccgaacaatgggtggattttcgcgccttagcaggcgatccgagcgacaatattccgggagttaaaggtatcggcgagaagacggcgctcaagctccttaaagaatgggggtcgttggagaacttgcttaagaatttagatcaggtcaaaccagagtcagtgcgtgagaagattcttgcacacctcgaagacctcaaattaagccgcgaattgtcccgtgtacgcaccgatttgccgctcgaagttgatttccgtggccgccgcgaacctgactgggagggtcttaaagcgtttttagaggcgcttgaatttggttcgctcttgcatgaattcggccttttagaaagcccgttaccagccgaagaagcaccttggccaccgcccgaaggcgcgtttttaggttaccgtttgagtcgcccggaaccgatgtgggccgaattattggctcttgcagcgtctgcccagggacgtgtgtatcgcgcggaagaccctcatggtgcgctccgcggcctcaaagaagtccgtggactccttgccaaagacttagctgttgttgcattgcgcgaaggtcttgatttacctccgactgatgatccaatgcttcttgcgtacctcttggacccgtcaaacacgacgcccgaaggcgtagcccgtcgttacggcggcgagtggaccgaagatgcaggcgagcgcgcgttattggccgaacgtttgcacgccaatttattaggacgtttgcaaggcgaggaacgtctcctctggctttacgaagaagtggagaaaccattgagtcgcgtgctcgcgcatatggaagctaccggtgtcaaattagacgtggcgtatttggaggcactcagccttgaagttgctgccgaaatgcgccgcttggaggaagaagtattccgtttagcaggccactccttttatcttaattctcgcgatcagttagaacgtgtgttgttcgatgaacttggtctccctcctatcggcaagacagagaagaccggtaaacgtagcacttcagcggcggttttagaagctcttcgcgaagtccatcccattgtggacaagatcttgcagtaccgcgaactcgcgaaattgaaaggcacctatattgaccctcttccggcattagtccacccgaaaacgggacgcctccatacccgcttcaaccaaacagccacggcgaccggtcgtttgtcctcctctgatccaaaccttcagaatattccagtacgtaccccattgggccagaagatccgccgcgcgtttgtagctgaggagggttggcgtttagtggccctcgattatagccaaattgaattacgtgtccttgcccatctttctggcgatgagaacctcatccgcgtgtttcaggaaggcaaagacattcacactcaaacggcaagctggatgtttggattatcagctgaagcgatcgatcctttgatgcgtcgtgcagcgaagaccatcaatttcggtgttctctacggtatgagtgcccatcgtttgtcgcaggaattaggcattccctatgaagaagctgcggcgttcattcagcgctactttcaaagctatcccaaagttaaagcatggatcgagaagactctcgaagaaggccgcacacgtggttacgtagagaccttatttggacgtcgccgctatgttcccgatttaaacgctcgcgtgaaatctgtccgtgaagccgccgaacgcatggcgttcaacatgcctgtacagggcacggcagctgacctcatgaaacttgcaatggtgcgcctttttccacaattgcgtgaagttggtgcccgcatgctcttgcaggtccacgatgaactcttgttagaagcgccaaaagagcgtgcggaagaggtggcagccctcgcgaaagaggttatggaaggcgtgtggcccttagcggtgcctcttgaagtcgaagttggtattggcgaggattggttggctgccaaaggataatga

SEQ ID NO: 1846 - protein, 841 aa, synthetic construct
  REGION 1..841: note = Variant of DNA polymerase I from Thermus sp. strain 2.9
MHHHHHHGGSGMLPLFEPKGRVLLVDGHHLAYRNFFALKGLTTSRGEPVQGVYGFAKSLLKALKEDGDVVIVVFDAKAPSFRHEAYEAYKAGRAPTPEDFPRQLALMKELVDLLGLERLEVPGFEADDVLATLAKKAEREGYEVQILTADRDLFQLLSPRISVLHPEGHRITPEWLWEKYGLRPEQWVDFRALAGDPSDNIPGVKGIGEKTALKLLKEWGSLENLLKNLDQVKPESVREKILAHLEDLKLSRELSRVRTDLPLEVDFRGRREPDWEGLKAFLEALEFGSLLHEFGLLESPLPAEEAPWPPPEGAFLGYRLSRPEPMWAELLALAASAQGRVYRAEDPHGALRGLKEVRGLLAKDLAVVALREGLDLPPTDDPMLLAYLLDPSNTTPEGVARRYGGEWTEDAGERALLAERLHANLLGRLQGEERLLWLYEEVEKPLSRVLAHMEATGVKLDVAYLEALSLEVAAEMRRLEEEVFRLAGHSFYLNSRDQLERVLFDELGLPPIGKTEKTGKRSTSAAVLEALREVHPIVDKILQYRELAKLKGTYIDPLPALVHPKTGRLHTRFNQTATATGRLSSSDPNLQNIPVRTPLGQKIRRAFVAEEGWRLVALDYSQIELRVLAHLSGDENLIRVFQEGKDIHTQTASWMFGLSAEAIDPLMRRAAKTINFGVLYGMSAHRLSQELGIPYEEAAAFIQRYFQSYPKVKAWIEKTLEEGRTRGYVETLFGRRRYVPDLNARVKSVREAAERMAFNMPVQGTAADLMKLAMVRLFPQLREVGARMLLQVHDELLLEAPKERAEEVAALAKEVMEGVWPLAVPLEVEVGIGEDWLAAKG

SEQ ID NO: 1847 - DNA, 2529 bp, synthetic construct
  misc_feature 1..2529: note = Variant of DNA polymerase I from Thermus sp. strain 2.9
  source 1..2529: mol_type = other DNA
atgcaccatcatcatcatcatggcggtagcggcatgttaccgttgttcgaacctaaaggtcgcgtgcttctggttgatggccatcatctcgcgtatcgtaacttctttgccctgaaaggattaaccaccagccgtggcgagccggtacagggtgtctacggctttgcaaagtcgctcctgaaagctctgaaagaagacggtgatgtggtgattgttgtctttgatgcgaaagcgccaagttttcgccacgaagcgtacgaagcttacaaagccgggcgtgctccaacgccggaagactttcctcgccaattggcgcttatgaaggaattagtggatttgcttggcctcgaacgcttggaagttcccggtttcgaggcagacgacgtattagcgactctcgcaaagaaagccgaacgtgagggctatgaagtccagatcttgacagcagatcgcgatcttttccagcttttatctccgcgcatctcggtgttacacccggaagggcatcgtatcaccccggaatggctctgggagaaatatggtttgcgtcccgaacaatgggtggattttcgcgccttagcaggcgatccgagcgacaatattccgggagttaaaggtatcggcgagaagacggcgctcaagctccttaaagaatgggggtcgttggagaacttgcttaagaatttagatcaggtcaaaccagagtcagtgcgtgagaagattcttgcacacctcgaagacctcaaattaagccgcgaattgtcccgtgtacgcaccgatttgccgctcgaagttgatttccgtggccgccgcgaacctgactgggagggtcttaaagcgtttttagagcgtcttgaatttggttcgctcttgcatgaattcggccttttagaaagcccgttaccagccgaagaagcaccttggccaccgcccgaaggcgcgtttttaggttaccgtttgagtcgcccggaaccgatgtgggccgaattattggctcttgcagcgtctgcccagggacgtgtgtatcgcgcggaagaccctcatggtgcgctccgcggcctcaaagaagtccgtggactccttgccaaagacttagctgttgttgcattgcgcgaaggtcttgctatacctccgactgatgatccaatgcttcttgcgtacctcttggacccgtcaaacacgacgcccgaaggcgtagcccgtcgttacggcggcgagtggaccgaagatgcaggcgagcgcgcgttattggccgaacgtttgcacgccaatttattaggacgtttgcaaggcgaggaacgtctcctctggctttacgaagaagtggagaaaccattgagtcgcgtgctcgcgcatatggaagctaccggtgtcaaattagacgtggcgtatttggaggcactcagccttgaagttgctgccgaaatgcgccgcttggaggaagaagtattccgtttagcaggccactccttttatcttaattctcgcgatcagttagaacgtgtgttgttcgatgaacttggtctccctcctatcggcaagacagagaagaccggtaaacgtagcacttcagcggcggttttagaagctcttcgcgaagtccatcccattgtggacaagatcttgcagtaccgcgaactcgcgaaattgaaaggcacctatattgaccctcttccggcattagtccacccgaaaacgggacgcctccatacccgcttcaaccaaacagccacggcgaccggtcgtttgtcctcctctgatccaaaccttcagaatattccagtacgtaccccattgggccagaagatccgccgcgcgtttgtagctgaggagggttggcgtttagtggccctcgattatagccaaattgaattacgtgtccttgcccatctttctggcgatgagaacctcatccgcgtgtttcaggaaggcaaagacattcacactcaaacggcaagctggatgtttggattatcagctgaagcgatcgatcctttgatgcgtcgtgcagcgaagaccatcaatttcggtgttctctacggtatgagtgcccatcgtttgtcgcaggaattaggcattccctatgaagaagctgcggcgttcattcagcgctactttcaaagctatcccaaagttaaagcatggatcgagaagactctcgaagaaggccgcacacgtggttacgtagagaccttatttggacgtcgccgctatgttcccgatttaaacgctcgcgtgaaatctgtccgtgaagccgccgaacgcatggcgttcaacatgcctgtacagggcacggcagctgacctcatgaaacttgcaatggtgcgcctttttccacaattgcgtgaagttggtgcccgcatgctcttgcaggtccacgatgaactcttgttagaagcgccaaaagagcgtgcggaagaggtggcagccctcgcgaaagaggttatggaaggcgtgtggcccttagcggtgcctcttgaagtcgaagttggtattggcgaggattggttggctgccaaaggataatga

SEQ ID NO: 1848 - protein, 841 aa, synthetic construct
  REGION 1..841: note = Variant of DNA polymerase I from Thermus sp. strain 2.9
MHHHHHHGGSGMLPLFEPKGRVLLVDGHHLAYRNFFALKGLTTSRGEPVQGVYGFAKSLLKALKEDGDVVIVVFDAKAPSFRHEAYEAYKAGRAPTPEDFPRQLALMKELVDLLGLERLEVPGFEADDVLATLAKKAEREGYEVQILTADRDLFQLLSPRISVLHPEGHRITPEWLWEKYGLRPEQWVDFRALAGDPSDNIPGVKGIGEKTALKLLKEWGSLENLLKNLDQVKPESVREKILAHLEDLKLSRELSRVRTDLPLEVDFRGRREPDWEGLKAFLERLEFGSLLHEFGLLESPLPAEEAPWPPPEGAFLGYRLSRPEPMWAELLALAASAQGRVYRAEDPHGALRGLKEVRGLLAKDLAVVALREGLAIPPTDDPMLLAYLLDPSNTTPEGVARRYGGEWTEDAGERALLAERLHANLLGRLQGEERLLWLYEEVEKPLSRVLAHMEATGVKLDVAYLEALSLEVAAEMRRLEEEVFRLAGHSFYLNSRDQLERVLFDELGLPPIGKTEKTGKRSTSAAVLEALREVHPIVDKILQYRELAKLKGTYIDPLPALVHPKTGRLHTRFNQTATATGRLSSSDPNLQNIPVRTPLGQKIRRAFVAEEGWRLVALDYSQIELRVLAHLSGDENLIRVFQEGKDIHTQTASWMFGLSAEAIDPLMRRAAKTINFGVLYGMSAHRLSQELGIPYEEAAAFIQRYFQSYPKVKAWIEKTLEEGRTRGYVETLFGRRRYVPDLNARVKSVREAAERMAFNMPVQGTAADLMKLAMVRLFPQLREVGARMLLQVHDELLLEAPKERAEEVAALAKEVMEGVWPLAVPLEVEVGIGEDWLAAKG

SEQ ID NO: 1849 - DNA, 2529 bp, synthetic construct
  misc_feature 1..2529: note = Variant of DNA polymerase I from Thermus sp. strain 2.9
  source 1..2529: mol_type = other DNA
atgcaccatcatcatcatcatggcggtagcggcatgttaccgttgttcgaacctaaaggtcgcgtgcttctggttgatggccatcatctcgcgtatcgtaacttctttgccctgaaaggattaaccaccagccgtggcgagccggtacagggtgtctacggctttgcaaagtcgctcctgaaagctctgaaagaagacggtgatgtggtgattgttgtctttgatgcgaaagcgccaagttttcgccacgaagcgtacgaagcttacaaagccgggcgtgctccaacgccggaagactttcctcgccaattggcgcttatgaaggaattagtggatttgcttggcctcgaacgcttggaagttcccggtttcgaggcagacgacgtattagcgactctcgcaaagaaagccgaacgtgagggctatgaagtccagatcttgacagcagatcgcgatcttttccagcttttatctccgcgcatctcggtgttacacccggaagggcatcgtatcaccccggaatggctctgggagaaatatggtttgcgtcccgaacaatgggtggattttcgcgccttagcaggcgatccgagcgacaatattccgggagttaaaggtatcggcgagaagacggcgctcaagctccttaaagaatgggggtcgttggagaacttgcttaagaatttagatcaggtcaaaccagagtcagtgcgtgagaagattcttgcacacctcgaagacctcaaattaagccgcgaattgtcccgtgtacgcaccgatttgccgctcgaagttgatttccgtggccgccgcgaacctgactgggagggtcttaaagcgtttttagagcgtcttgaatttggttcgctcttgcatgaattcggccttttagaaagcccgttaccagccgaagaagcaccttggccaccgcccgaaggcgcgtttttaggttaccgtttgagtcgcccggaaccgatgtgggccgaattattggctcttgcagcgtctgcccagggacgtgtgtatcgcgcggaagaccctcatggtgcgctccgcggcctcaaagaagtccgtggactccttgccaaagacttagctgttgttgcattgcgcgaaggtcttgatttacctccgactgatgatccaatgcttcttgcgtacctcttggacccgtcaaacacgacgcccgaaggcgtagcccgtcgttacggcggcgagtggaccgaagatgcaggcgagcgcgcgttattggccgaacgtttgcacgccaatttattaggacgtttgcaaggcgaggaacgtctcctctggctttacgaagaagtggagaaaccattgagtcgcgtgctcgcgcatatggaagctaccggtgtcaaattagacgtggcgtatttggaggcactcagccttgaagttgctgccgaaatgcgccgcttggaggaagaagtattccgtttagcaggccactccttttatcttaattctcgcgatcagttagaacgtgtgttgttcgatgaacttggtctccctcctatcggcaagacagagaagaccggtaaacgtagcacttcagcggcggttttagaagctcttcgcgaagtccatcccattgtggacaagatcttgcagtaccgcgaactcgcgaaattgaaaggcacctatattgaccctcttccggcattagtccacccgaaaacgggacgcctccatacccgcttcaaccaaacagccacggcgaccggtcgtttgtcctcctctgatccaaaccttcagaatattccagtacgtaccccattgggccagaagatccgccgcgcgtttgtagctgaggagggttggcgtttagtggccctcgattatagccaaattgaattacgtgtccttgcccatctttctggcgatgagaacctcatccgcgtgtttcaggaaggcaaagacattcacactcaaacggcaagctggatgtttggattatcagctgaagcgatcgatcctttgatgcgtcgtgcagcgaagaccatcaatttcggtgttctctacggtatgagtgcccatcgtttgtcgcaggaattaggcattccctatgaagaagctgcggcgttcattcagcgctactttcaaagctatcccaaagttaaagcatggatcgagaagactctcgaagaaggccgcacacgtggttacgtagagaccttatttggacgtcgccgctatgttcccgatttaaacgctcgcgtgaaatctgtccgtgaagccgccgaacgcatggcgttcaacatgcctgtacagggcacggcagctgacctcatgaaacttgcaatggtgcgcctttttccacaattgcgtgaagttggtgcccgcatgctcttgcaggtccacgatgaactcttgttagaagcgccaaaagagcgtgcggaagaggtggcagccctcgcgaaagctgttatggaaggcgtgtggcccttagcggtgcctcttgaagtcgaagttggtattggcgaggattggttggctgccaaaggataatga

SEQ ID NO: 1850 - protein, 841 aa, synthetic construct
  REGION 1..841: note = Variant of DNA polymerase I from Thermus sp. strain 2.9
MHHHHHHGGSGMLPLFEPKGRVLLVDGHHLAYRNFFALKGLTTSRGEPVQGVYGFAKSLLKALKEDGDVVIVVFDAKAPSFRHEAYEAYKAGRAPTPEDFPRQLALMKELVDLLGLERLEVPGFEADDVLATLAKKAEREGYEVQILTADRDLFQLLSPRISVLHPEGHRITPEWLWEKYGLRPEQWVDFRALAGDPSDNIPGVKGIGEKTALKLLKEWGSLENLLKNLDQVKPESVREKILAHLEDLKLSRELSRVRTDLPLEVDFRGRREPDWEGLKAFLERLEFGSLLHEFGLLESPLPAEEAPWPPPEGAFLGYRLSRPEPMWAELLALAASAQGRVYRAEDPHGALRGLKEVRGLLAKDLAVVALREGLDLPPTDDPMLLAYLLDPSNTTPEGVARRYGGEWTEDAGERALLAERLHANLLGRLQGEERLLWLYEEVEKPLSRVLAHMEATGVKLDVAYLEALSLEVAAEMRRLEEEVFRLAGHSFYLNSRDQLERVLFDELGLPPIGKTEKTGKRSTSAAVLEALREVHPIVDKILQYRELAKLKGTYIDPLPALVHPKTGRLHTRFNQTATATGRLSSSDPNLQNIPVRTPLGQKIRRAFVAEEGWRLVALDYSQIELRVLAHLSGDENLIRVFQEGKDIHTQTASWMFGLSAEAIDPLMRRAAKTINFGVLYGMSAHRLSQELGIPYEEAAAFIQRYFQSYPKVKAWIEKTLEEGRTRGYVETLFGRRRYVPDLNARVKSVREAAERMAFNMPVQGTAADLMKLAMVRLFPQLREVGARMLLQVHDELLLEAPKERAEEVAALAKAVMEGVWPLAVPLEVEVGIGEDWLAAKG

SEQ ID NO: 1851 - DNA, 2529 bp, synthetic construct
  misc_feature 1..2529: note = Variant of DNA polymerase I from Thermus sp. strain 2.9
  source 1..2529: mol_type = other DNA
atgcaccatcatcatcatcatggcggtagcggcatgttaccgttgttcgaacctaaaggtcgcgtgcttctggttgatggccatcatctcgcgtatcgtaacttctttgccctgaaaggattaaccaccagccgtggcgagccggtacagggtgtctacggctttgcaaagtcgctcctgaaagctctgaaagaagacggtgatgtggtgattgttgtctttgatgcgaaagcgccaagttttcgccacgaagcgtacgaagcttacaaagccgggcgtgctccaacgccggaagactttcctcgccaattggcgcttatgaaggaattagtggatttgcttggcctcgaacgcttggaagttcccggtttcgaggcagacgacgtattagcgactctcgcaaagaaagccgaacgtgagggctatgaagtccagatcttgacagcagatcgcgatcttttccagcttttatctccgcgcatctcggtgttacacccggaagggcatcgtatcaccccggaatggctctgggagaaatatggtttgcgtcccgaacaatgggtggattttcgcgccttagcaggcgatccgagcgacaatattccgggagttaaaggtatcggcgagaagacggcgctcaagctccttaaagaatgggggtcgttggagaacttgcttaagaatttagatcaggtcaaaccagagtcagtgcgtgagaagattcttgcacacctcgaagacctcaaattaagccgcgaattgtcccgtgtacgcaccgatttgccgctcgaagttgatttccgtggccgccgcgaacctgactgggagggtcttaaagcgtttttagagcgtcttgaatttggttcgctcttgcatgaattcggccttttagaaagcccgttaccagccgaagaagcaccttggccaccgcccgaaggcgcgtttttaggttaccgtttgagtcgcccggaaccgatgtgggccctgttattggctcttgcagcgtctgcccagggacgtgtgtatcgcgcggaagaccctcatggtgcgctccgcggcctcaaagaagtccgtggactccttgccaaagacttagctgttgttgcattgcgcgaaggtcttgatttacctccgactgatgatccaatgcttcttgcgtacctcttggacccgtcaaacacgacgcccgaaggcgtagcccgtcgttacggcggcgagtggaccgaagatgcaggcgagcgcgcgttattggccgaacgtttgcacgccaatttattaggacgtttgcaaggcgaggaacgtctcctctggctttacgaagaagtggagaaaccattgagtcgcgtgctcgcgcatatggaagctaccggtgtcaaattagacgtggcgtatttggaggcactcagccttgaagttgctgccgaaatgcgccgcttggaggaagaagtattccgtttagcaggccactccttttatcttaattctcgcgatcagttagaacgtgtgttgttcgatgaacttggtctccctcctatcggcaagacagagaagaccggtaaacgtagcacttcagcggcggttttagaagctcttcgcgaagtccatcccattgtggacaagatcttgcagtaccgcgaactcgcgaaattgaaaggcacctatattgaccctcttccggcattagtccacccgaaaacgggacgcctccatacccgcttcaaccaaacagccacggcgaccggtcgtttgtcctcctctgatccaaaccttcagaatattccagtacgtaccccattgggccagaagatccgccgcgcgtttgtagctgaggagggttggcgtttagtggccctcgattatagccaaattgaattacgtgtccttgcccatctttctggcgatgagaacctcatccgcgtgtttcaggaaggcaaagacattcacactcaaacggcaagctggatgtttggattatcagctgaagcgatcgatcctttgatgcgtcgtgcagcgaagaccatcaatttcggtgttctctacggtatgagtgcccatcgtttgtcgcaggaattaggcattccctatgaagaagctgcggcgttcattcagcgctactttcaaagctatcccaaagttaaagcatggatcgagaagactctcgaagaaggccgcacacgtggttacgtagagaccttatttggacgtcgccgctatgttcccgatttaaacgctcgcgtgaaatctgtccgtgaagccgccgaacgcatggcgttcaacatgcctgtacagggcacggcagctgacctcatgaaacttgcaatggtgcgcctttttccacaattgcgtgaagttggtgcccgcatgctcttgcaggtccacgatgaactcttgttagaagcgccaaaagagcgtgcggaagaggtggcagccctcgcgaaagaggttatggaaggcgtgtggcccttagcggtgcctcttgaagtcgaagttggtattggcgaggattggttggctgccaaaggataatga

SEQ ID NO: 1852 - protein, 841 aa, synthetic construct
  REGION 1..841: note = Variant of DNA polymerase I from Thermus sp. strain 2.9
MHHHHHHGGSGMLPLFEPKGRVLLVDGHHLAYRNFFALKGLTTSRGEPVQGVYGFAKSLLKALKEDGDVVIVVFDAKAPSFRHEAYEAYKAGRAPTPEDFPRQLALMKELVDLLGLERLEVPGFEADDVLATLAKKAEREGYEVQILTADRDLFQLLSPRISVLHPEGHRITPEWLWEKYGLRPEQWVDFRALAGDPSDNIPGVKGIGEKTALKLLKEWGSLENLLKNLDQVKPESVREKILAHLEDLKLSRELSRVRTDLPLEVDFRGRREPDWEGLKAFLERLEFGSLLHEFGLLESPLPAEEAPWPPPEGAFLGYRLSRPEPMWALLLALAASAQGRVYRAEDPHGALRGLKEVRGLLAKDLAVVALREGLDLPPTDDPMLLAYLLDPSNTTPEGVARRYGGEWTEDAGERALLAERLHANLLGRLQGEERLLWLYEEVEKPLSRVLAHMEATGVKLDVAYLEALSLEVAAEMRRLEEEVFRLAGHSFYLNSRDQLERVLFDELGLPPIGKTEKTGKRSTSAAVLEALREVHPIVDKILQYRELAKLKGTYIDPLPALVHPKTGRLHTRFNQTATATGRLSSSDPNLQNIPVRTPLGQKIRRAFVAEEGWRLVALDYSQIELRVLAHLSGDENLIRVFQEGKDIHTQTASWMFGLSAEAIDPLMRRAAKTINFGVLYGMSAHRLSQELGIPYEEAAAFIQRYFQSYPKVKAWIEKTLEEGRTRGYVETLFGRRRYVPDLNARVKSVREAAERMAFNMPVQGTAADLMKLAMVRLFPQLREVGARMLLQVHDELLLEAPKERAEEVAALAKEVMEGVWPLAVPLEVEVGIGEDWLAAKG

SEQ ID NO: 1853 - DNA, 2529 bp, synthetic construct
  misc_feature 1..2529: note = Variant of DNA polymerase I from Thermus sp. strain 2.9
  source 1..2529: mol_type = other DNA
atgcaccatcatcatcatcatggcggtagcggcatgttaccgttgttcgaacctaaaggtcgcgtgcttctggttgatggccatcatctcgcgtatcgtaacttctttgccctgaaaggattaaccaccagccgtggcgagccggtacagggtgtctacggctttgcaaagtcgctcctgaaagctctgaaagaagacggtgatgtggtgattgttgtctttgatgcgaaagcgccaagttttcgccacgaagcgtacgaagcttacaaagccgggcgtgctccaacgccggaagactttcctcgccaattggcgcttatgaaggaattagtggatttgcttggcctcgaacgcttggaagttcccggtttcgaggcagacgacgtattagcgactctcgcaaagaaagccgaacgtgagggctatgaagtccagatcttgacagcagatcgcgatcttttccagcttttatctccgcgcatctcggtgttacacccggaagggcatcgtatcaccccggaatggctctgggagaaatatggtttgcgtcccgaacaatgggtggattttcgcgccttagcaggcgatccgagcgacaatattccgggagttaaaggtatcggcgagaagacggcgctcaagctccttaaagaatgggggtcgttggagaacttgcttaagaatttagatcaggtcaaaccagagtcagtgcgtgagaagattcttgcacacctcgaagacctcaaattaagccgcgaattgtcccgtgtacgcaccgatttgccgctcgaagttgatttccgtggccgccgcgaacctgactgggagggtcttaaagcgtttttagagcgtcttgaatttggttcgctcttgcatgaattcggccttttagaaagcccgttaccagccgaagaagcaccttggccaccgcccgaaggcgcgtttttaggttaccgtttgagtcgcccggaaccgatgtgggccgaattattggctcttgcagcgtctgcccagggacgtgtgtatcgcgcggaagaccctcatggtgcgctccgcggcctcaaagaagtccgtggactccttgccaaagacttagctgttgttgcattgcgcgaaggtcttgatttacctccgactgatgatccaatgcttcttgcgtacctcttggacccgtcaaacacgacgcccgaaggcgtagcccgtcgttacggcggcgagtggaccgaagatgcaggcgagcgcgcgttattggccgaacgtttgcacgccaatttattaggacgtttgcaaggcgaggaacgtctcctctggctttacgaagaagtggagaaaccattgagtcgcgtgctcgcgcatatggaagctaccggtgtcaaattagacgtggcgtatttggaggcactcagccttgaagttgctgccgaaatgcgccgcttggaggaagaagtattccgtttagcaggccactccttttatcttaattctcgcgatcagttagaacgtgtgttgttcgatgaacttggtctccctcctatcggcaagacagagaagaccggtaaacgtagcacttcagcggcggttttagaagctcttcgcgaagtccatcccattgtggacaagatcttgcagtaccgcgaactcgcgaaattgaaaggcacctatattgaccctcttccggcattagtccacccgaaaacgggacgcctccatacccgcttcaaccaaacagccacggcgaccggtcgtttgtcctcctctgatccaaaccttcagaatattccagtacgtaccccattgggccagaagatccgccgcgcgtttgtagctgaggagggttggcgtttagtggccctcgattatagccaaattgaattacgtgtccttgcccatctttctggcgatgagaacctcatccaggtgtttcaggaaggcaaagacattcacactcaaacggcaagctggatgtttggattatcagctgaagcgatcgatcctttgatgcgtcgtgcagcgaagaccatcaatttcggtgttctctacggtatgagtgcccatcgtttgtcgcaggaattaggcattccctatgaagaagctgcggcgttcattcagcgctactttcaaagctatcccaaagttaaagcatggatcgagaagactctcgaagaaggccgcacacgtggttacgtagagaccttatttggacgtcgccgctatgttcccgatttaaacgctcgcgtgaaatctgtccgtgaagccgccgaacgcatggcgttcaacatgcctgtacagggcacggcagctgacctcatgaaacttgcaatggtgcgcctttttccacaattgcgtgaagttggtgcccgcatgctcttgcaggtccacgatgaactcttgttagaagcgccaaaagagcgtgcggaagaggtggcagccctcgcgaaagaggttatggaaggcgtgtggcccttagcggtgcctcttgaagtcgaagttggtattggcgaggattggttggctgccaaaggataatga

SEQ ID NO: 1854 - protein, 841 aa, synthetic construct
  REGION 1..841: note = Variant of DNA polymerase I from Thermus sp. strain 2.9
MHHHHHHGGSGMLPLFEPKGRVLLVDGHHLAYRNFFALKGLTTSRGEPVQGVYGFAKSLLKALKEDGDVVIVVFDAKAPSFRHEAYEAYKAGRAPTPEDFPRQLALMKELVDLLGLERLEVPGFEADDVLATLAKKAEREGYEVQILTADRDLFQLLSPRISVLHPEGHRITPEWLWEKYGLRPEQWVDFRALAGDPSDNIPGVKGIGEKTALKLLKEWGSLENLLKNLDQVKPESVREKILAHLEDLKLSRELSRVRTDLPLEVDFRGRREPDWEGLKAFLERLEFGSLLHEFGLLESPLPAEEAPWPPPEGAFLGYRLSRPEPMWAELLALAASAQGRVYRAEDPHGALRGLKEVRGLLAKDLAVVALREGLDLPPTDDPMLLAYLLDPSNTTPEGVARRYGGEWTEDAGERALLAERLHANLLGRLQGEERLLWLYEEVEKPLSRVLAHMEATGVKLDVAYLEALSLEVAAEMRRLEEEVFRLAGHSFYLNSRDQLERVLFDELGLPPIGKTEKTGKRSTSAAVLEALREVHPIVDKILQYRELAKLKGTYIDPLPALVHPKTGRLHTRFNQTATATGRLSSSDPNLQNIPVRTPLGQKIRRAFVAEEGWRLVALDYSQIELRVLAHLSGDENLIQVFQEGKDIHTQTASWMFGLSAEAIDPLMRRAAKTINFGVLYGMSAHRLSQELGIPYEEAAAFIQRYFQSYPKVKAWIEKTLEEGRTRGYVETLFGRRRYVPDLNARVKSVREAAERMAFNMPVQGTAADLMKLAMVRLFPQLREVGARMLLQVHDELLLEAPKERAEEVAALAKEVMEGVWPLAVPLEVEVGIGEDWLAAKG

SEQ ID NO: 1855 - DNA, 2529 bp, synthetic construct
  misc_feature 1..2529: note = Variant of DNA polymerase I from Thermus sp. strain 2.9
  source 1..2529: mol_type = other DNA
atgcaccatcatcatcatcatggcggtagcggcatgttaccgttgttcgaacctaaaggtcgcgtgcttctggttgatggccatcatctcgcgtatcgtaacttctttgccctgaaaggattaaccaccagccgtggcgagccggtacagggtgtctacggctttgcaaagtcgctcctgaaagctctgaaagaagacggtgatgtggtgattgttgtctttgatgcgaaagcgccaagttttcgccacgaagcgtacgaagcttacaaagccgggcgtgctccaacgccggaagactttcctcgccaattggcgcttatgaaggaattagtggatttgcttggcctcgaacgcttggaagttcccggtttcgaggcagacgacgtattagcgactctcgcaaagaaagccgaacgtgagggctatgaagtccagatcttgacagcagatcgcgatcttttccagcttttatctccgcgcatctcggtgttacacccggaagggcatcgtatcaccccggaatggctctgggagaaatatggtttgcgtcccgaacaatgggtggattttcgcgccttagcaggcgatccgagcgacaatattccgggagttaaaggtatcggcgagaagacggcgctcaagctccttaaagaatgggggtcgttggagaacttgcttaagaatttagatcaggtcaaaccagagtcagtgcgtgagaagattcttgcacacctcgaagacctcaaattaagccgcgaattgtcccgtgtacgcaccgatttgccgctcgaagttgatttccgtggccgccgcgaacctgactgggagggtcttaaagcgtttttagagcgtcttgaatttggttcgctcttgcatgaattcggccttttagaaagcccgttaccagccgaagaagcaccttggccaccgcccgaaggcgcgtttttaggttaccgtttgagtcgcccggaaccgatgtgggccgaattattggctcttgcagcgtctgcccagggacgtgtgtatcgcgcggaagaccctcatggtgcgctccgcggcctcaaagaagtccgtggactccttgccaaagacttagctgttgttgcattgcgcgaaggtcttgatttacctccgactgatgatccaatgcttcttgcgtacctcttggacccgtcaaacacgacgcccgaaggcgtagcccgtcgttacggcggcgagtggaccgaagatgcaggcgagcgcgcgttattggccgaacgtttgcacgccaatttattaggacgtttgcaaggcgaggaacgtctcctctggctttacgaagaagtggagaaaccattgagtcgcgtgctcgcgcatatggaagctaccggtgtcaaattagacgtggcgtatttggaggcactcagccttgaagttgctgccgaaatgcgccgcttggaggaagaagtattccgtttagcaggccactccttttatcttaattctcgcgatcagttagaacgtgtgttgttcgatgaacttggtctccctcctatcggcaagacagagaagaccggtaaacgtagcacttcagcggcggttttagaagctcttcgcgaagtccatcccattgtggacaagatcttgcagtaccgcgaactcgcgaaattgaaaggcacctatattgaccctcttccggcattagtccacccgaaaacgggacgcctccatacccgcttcaaccaaacagccacggcgaccggtcgtttgtcctcctctgatccaaaccttcagaatattccagtacgtaccccattgggccagaagatccgccgcgcgtttgtagctgaggagggttggcgtttagtggccctcgattatagccaaattgaattacgtgtccttgcccatctttctggcgatgagaacctcatccgcgtgtttcaggaaggcaaagacattcacactcaaacggcaagctggatgtttggattatcagctgaagcgatcgatcctttgatgcgtcgtgcagcgaagaccatcaatttcggtgttctctacggtatgagtgcccatcgtttgtcgcaggaattaggcattccctatgaagaagctgcggcgttcattcagcgctactttcaaagctatcccaaagttaaagcatggatcgagaagactctctgggaaggccgcacacgtggttacgtagagaccttatttggacgtcgccgctatgttcccgatttaaacgctcgcgtgaaatctgtccgtgaagccgccgaacgcatggcgttcaacatgcctgtacagggcacggcagctgacctcatgaaacttgcaatggtgcgcctttttccacaattgcgtgaagttggtgcccgcatgctcttgcaggtccacgatgaactcttgttagaagcgccaaaagagcgtgcggaagaggtggcagccctcgcgaaagaggttatggaaggcgtgtggcccttagcggtgcctcttgaagtcgaagttggtattggcgaggattggttggctgccaaaggataatga

SEQ ID NO: 1856 - protein, 841 aa, synthetic construct
  REGION 1..841: note = Variant of DNA polymerase I from Thermus sp. strain 2.9
MHHHHHHGGSGMLPLFEPKGRVLLVDGHHLAYRNFFALKGLTTSRGEPVQGVYGFAKSLLKALKEDGDVVIVVFDAKAPSFRHEAYEAYKAGRAPTPEDFPRQLALMKELVDLLGLERLEVPGFEADDVLATLAKKAEREGYEVQILTADRDLFQLLSPRISVLHPEGHRITPEWLWEKYGLRPEQWVDFRALAGDPSDNIPGVKGIGEKTALKLLKEWGSLENLLKNLDQVKPESVREKILAHLEDLKLSRELSRVRTDLPLEVDFRGRREPDWEGLKAFLERLEFGSLLHEFGLLESPLPAEEAPWPPPEGAFLGYRLSRPEPMWAELLALAASAQGRVYRAEDPHGALRGLKEVRGLLAKDLAVVALREGLDLPPTDDPMLLAYLLDPSNTTPEGVARRYGGEWTEDAGERALLAERLHANLLGRLQGEERLLWLYEEVEKPLSRVLAHMEATGVKLDVAYLEALSLEVAAEMRRLEEEVFRLAGHSFYLNSRDQLERVLFDELGLPPIGKTEKTGKRSTSAAVLEALREVHPIVDKILQYRELAKLKGTYIDPLPALVHPKTGRLHTRFNQTATATGRLSSSDPNLQNIPVRTPLGQKIRRAFVAEEGWRLVALDYSQIELRVLAHLSGDENLIRVFQEGKDIHTQTASWMFGLSAEAIDPLMRRAAKTINFGVLYGMSAHRLSQELGIPYEEAAAFIQRYFQSYPKVKAWIEKTLWEGRTRGYVETLFGRRRYVPDLNARVKSVREAAERMAFNMPVQGTAADLMKLAMVRLFPQLREVGARMLLQVHDELLLEAPKERAEEVAALAKEVMEGVWPLAVPLEVEVGIGEDWLAAKG

SEQ ID NO: 1857 - DNA, 2529 bp, synthetic construct
  misc_feature 1..2529: note = Variant of DNA polymerase I from Thermus sp. strain 2.9
  source 1..2529: mol_type = other DNA
atgcaccatcatcatcatcatggcggtagcggcgtgttaccggtgttcgagcctaaaggtcgcgtgcttctggttgatggccatcatctcgcgtatcgtaacttctttgccctgaaaggattaaccaccagccgtggcgagccggtacagggtgtctacggctttgcaaagtcgctcctgaaagctctgaaagaagacggtgatgtggtgattgttgtctttgatgcgaaagcgccaagttttcgccacgaagcgtacgaagcttacaaagccgggcgtgctccaacgccggaagactttcctcgccaattggcgcttatgaaggaattagtggatttgcttggcctcgaacgcttggaagttcccggtttcgaggcagacgacgtattagcgactctcgcaaagaaagccgaacgtgagggctatgaagtccagatcttgacagcagatcgcgatcttttccagcttttatctccgcgcatctcggtgttacacccggaagggcatcgtatcaccccggaatggctctgggagaaatatggtttgcgtcccgaacaatgggtggattttcgcgccttagcaggcgatccgagcgacaatattccgggagttaaaggtatcggcgagaagacggcgctcaagctccttaaagaatgggggtcgttggagaacttgcttaagaatttagatcaggtcaaaccagagtcagtgcgtgagaagattcttgcacacctcgaagacctcaaattaagccgcgaattgtcccgtgtacgcaccgatttgccgctcgaagttgatttccgtcgccgccgcgaacctgactgggagggtcttaaagcgtttttagagcgtcttgaatttggttcgctcttgcatgaattcggccttttagaaagcccgttaccagccgaagaagcaccttggccaccgcccgaaggcgcgtttttaggttaccgtttgagtcgcccggaaccgatgtgggccgaattattggctcttgcagcgtctgcccagggacgtgtgtatcgcgcggaagaccctcatggtgcgctccgcggcctcttcgaagtccgtggactccttgccaaagacttagctgttgttgcattgcgcgaaggtcttgatttacctccgactgatgatccaatgcttcttgcgtacctcttggacccgtcaaacacgacgcccgaaggcgtagcccgtcgttacggcggcgagtggaccgaagatgcagcgaaacgcgcgttattggccgaacgtttgcacgccaatttattaggacgtttgcaaggcgaggaacgtctcctctggctttacgaagaagtggagaaaccattgagtcgcgtgctcgcgcatatggaagctaccggtgtcaaattagacgtggcgtatttggaggctctcagccttgaagttgctgccgaaatgcgccgcttggaggaagaagtattccgtttagcaggccactcctttcgccttaattctcgcgatcagttagaacgtgtgttgttcgatgaacttggtctccctcctatcggcaagacagagaagaccggtaaacgtagcacttcagcggcggttttagaagctcttcgcgaagtccatcccattgtggacaagatcttgcagtaccgcgaactcgcgaaattgaaaggcacctatattgaccctcttccggcattagtccacccgaaaacgggacgcctccatacccgcttcaaccaaacagccacggcgaccggtcgtttgtcctcctctgatccaaaccttcagaatattccagtacgtaccccattgggccagaagatccgccgcgcgtttgtagctgaggagggttggcgtttagtggccctcgattatagccaaattgaattacgtgtccttgcccatctttctggcgatgagaacctcatccgcgtgtttcaggaaggcaaagacattcacactcaaacggcaagctggatgtttggattatcagctgaagcgatcgatcctttgatgcgtcgtgcagcgaagaccatcaatttcggtgttctctacggtatgagtgcccatcgtttgtcgcaggaattaggcattccctatgaagaagctgcggcgttcattcagaaatactttcaaagctatcccaaagttaaagcatggatcgagaagactctcgaagaaggccgcacacgtggttacgtagagaccttatttggacgtcgccgctatgttcccgatttaaacgctcgcgtgaaatctgtccgtgaagccgccgaacgcatggcgttcaacatgcctgtacagggcacggcagctgacctcatgaaacttgcaatggtgcgcctttttccacaattgcgtgaagttggtgcccgcatgctcttgcaggtccacgatgaactcttgttagaagcgccaaaagagcgtgcggaagaggtggcagccctcgcgaaagaggttatggaaggcgtgtggcccttagcggtgcctcttgaagtcgaagttggtattggcgaggattggctggctgccaaaggataatga

SEQ ID NO: 1858 - protein, 841 aa, synthetic construct
  REGION 1..841: note = Variant of DNA polymerase I from Thermus sp. strain 2.9
MHHHHHHGGSGVLPVFEPKGRVLLVDGHHLAYRNFFALKGLTTSRGEPVQGVYGFAKSLLKALKEDGDVVIVVFDAKAPSFRHEAYEAYKAGRAPTPEDFPRQLALMKELVDLLGLERLEVPGFEADDVLATLAKKAEREGYEVQILTADRDLFQLLSPRISVLHPEGHRITPEWLWEKYGLRPEQWVDFRALAGDPSDNIPGVKGIGEKTALKLLKEWGSLENLLKNLDQVKPESVREKILAHLEDLKLSRELSRVRTDLPLEVDFRRRREPDWEGLKAFLERLEFGSLLHEFGLLESPLPAEEAPWPPPEGAFLGYRLSRPEPMWAELLALAASAQGRVYRAEDPHGALRGLFEVRGLLAKDLAVVALREGLDLPPTDDPMLLAYLLDPSNTTPEGVARRYGGEWTEDAAKRALLAERLHANLLGRLQGEERLLWLYEEVEKPLSRVLAHMEATGVKLDVAYLEALSLEVAAEMRRLEEEVFRLAGHSFRLNSRDQLERVLFDELGLPPIGKTEKTGKRSTSAAVLEALREVHPIVDKILQYRELAKLKGTYIDPLPALVHPKTGRLHTRFNQTATATGRLSSSDPNLQNIPVRTPLGQKIRRAFVAEEGWRLVALDYSQIELRVLAHLSGDENLIRVFQEGKDIHTQTASWMFGLSAEAIDPLMRRAAKTINFGVLYGMSAHRLSQELGIPYEEAAAFIQKYFQSYPKVKAWIEKTLEEGRTRGYVETLFGRRRYVPDLNARVKSVREAAERMAFNMPVQGTAADLMKLAMVRLFPQLREVGARMLLQVHDELLLEAPKERAEEVAALAKEVMEGVWPLAVPLEVEVGIGEDWLAAKG

SEQ ID NO: 1859 - DNA, 2529 bp, synthetic construct
  misc_feature 1..2529: note = Variant of DNA polymerase I from Thermus sp. strain 2.9
  source 1..2529: mol_type = other DNA
atgcaccatcatcatcatcatggcggtagcggcatgttaccgttgttcgaacctaaaggtcgcgtgcttctggttgatggccatcatctcgcgtatcgtaacttctttgccctgaaaggattaaccaccagccgtggcgagccggtacagggtgtctacggctttgcaaagtcgctcctgaaagctctgaaagaagacggtgatgtggtgattgttgtctttgatgcgaaagcgccaagttttcgccacgaagcgtacgaagcttacaaagccgggcgtgctccaacgccggaagactttcctcgccaattggcgcttatgaaggaattagtggatttgcttggcctcgaacgcttggaagttcccggtttcgaggcagacgacgtattagcgactctcgcaaagaaagccgaacgtgagggctatgaagtccagatcttgacagcagatcgcgatcttttccagcttttatctccgcgcatctcggtgttacacccggaagggcatcgtatcaccccggaatggctctgggagaaatatggtttgcgtcccgaacaatgggtggattttcgcgccttagcaggcgatccgagcgacaatattccgggagttaaaggtatcggcgagaagacggcgctcaagctccttaaagaatgggggtcgttggagaacttgcttaagaatttagatcaggtcaaaccagagtcagtgcgtgagaagattcttgcacacctcgaagacctcaaattaagccgcgaattgtcccgtgtacgcaccgatttgccgctcgaagttgatttccgtggccgccgcgaacctgactgggagggtcttaaagcgtttttagagcgtcttgaatttggttcgctcttgcatgaattcggccttttagaaagcccgttaccagccgaagaagcaccttggccaccgcccgaaggcgcgtttttaggttaccgtttgagtcgcccggaaccgatgtgggccgaattattggctcttgcagcgtctgcccagggacgtgtgtatcgcgcggaagaccctcatggtgcgctccgcggcctcaaagaagtccgtggactccttgccaaagacttagctgttgttgcattgcgcgaaggtcttgatttacctccgactgatgatccaatgcttcttgcgtacctcttggacccgtcaaacacgacgcccgaaggcgtagcccgtcgttacggcggcgagtggaccgaagatgcaggcgagcgcgcgttattggccgaacgtttgcacgccaatttattaggacgtttgcaaggcgaggaacgtctcctctggctttacgaagaagtggagaaaccattgagtcgcgtgctcgcgcatatggaagctaccggtgtcaaattagacgtggcgtatttggaggcactcagccttgaagttgctgccgaaatgcgccgcttggaggaagaagtattccgtttagcaggccactccttttatcttaattctcgcgatcagttagaacgtgtgttgttcgatgaacttggtctccctcctatcggcaagacagagaagaccggtaaacgtagcacttcagcggcggttttagaagctcttcgcgaagtccatcccattgtggacaagatcttgcagtaccgcgaactcgcgaaattgaaaggcacctatattgaccctcttccggcattagtccacccgaaaacgggacgcctccatacccgcttcaaccaaacagccacggcgaccggtcgtttgtcctcctctgatccaaaccttcagaatattccagtacgtaccccattgggccagaagatccgccgcgcgtttgtagctgaggagggttggcgtttagtggccctcgattatagccaaattgaattacgtgtccttgcccatctttctggcgatgagaacctcatccgcgtgtttcaggaaggcaaagacattcacactcaaacggcaagctggatgtttggattatcagctgaagcgatcgatcctttgatgcgtcgtgcagcgaagaccatcaatttcggtgttctctacggtatgagtgcccatcgtttgtcgcaggaattaggcattccctatgaagaagctgcggcgttcattcagcgctactttcaaagctatcccaaagttaaagcatggatcgagaagactctcgaagaaggccgcacacgtggttacgtagagaccttatttggacgtcgccgctatgttcccgatttaaacgctcgccagaaatctgtccgtgaagccgccgaacgcatggcgttcaacatgcctgtacagggcacggcagctgacctcatgaaacttgcaatggtgcgcctttttccacaattgcgtgaagttggtgcccgcatgctcttgcaggtccacgatgaactcttgttagaagcgccaaaagagcgtgcggaagaggtggcagccctcgcgaaagaggttatggaaggcgtgtggcccttagcggtgcctcttgaagtcgaagttggtattggcgaggattggttggctgccaaaggataatga

SEQ ID NO: 1860 - protein, 841 aa, synthetic construct
  REGION 1..841: note = Variant of DNA polymerase I from Thermus sp. strain 2.9
MHHHHHHGGSGMLPLFEPKGRVLLVDGHHLAYRNFFALKGLTTSRGEPVQGVYGFAKSLLKALKEDGDVVIVVFDAKAPSFRHEAYEAYKAGRAPTPEDFPRQLALMKELVDLLGLERLEVPGFEADDVLATLAKKAEREGYEVQILTADRDLFQLLSPRISVLHPEGHRITPEWLWEKYGLRPEQWVDFRALAGDPSDNIPGVKGIGEKTALKLLKEWGSLENLLKNLDQVKPESVREKILAHLEDLKLSRELSRVRTDLPLEVDFRGRREPDWEGLKAFLERLEFGSLLHEFGLLESPLPAEEAPWPPPEGAFLGYRLSRPEPMWAELLALAASAQGRVYRAEDPHGALRGLKEVRGLLAKDLAVVALREGLDLPPTDDPMLLAYLLDPSNTTPEGVARRYGGEWTEDAGERALLAERLHANLLGRLQGEERLLWLYEEVEKPLSRVLAHMEATGVKLDVAYLEALSLEVAAEMRRLEEEVFRLAGHSFYLNSRDQLERVLFDELGLPPIGKTEKTGKRSTSAAVLEALREVHPIVDKILQYRELAKLKGTYIDPLPALVHPKTGRLHTRFNQTATATGRLSSSDPNLQNIPVRTPLGQKIRRAFVAEEGWRLVALDYSQIELRVLAHLSGDENLIRVFQEGKDIHTQTASWMFGLSAEAIDPLMRRAAKTINFGVLYGMSAHRLSQELGIPYEEAAAFIQRYFQSYPKVKAWIEKTLEEGRTRGYVETLFGRRRYVPDLNARQKSVREAAERMAFNMPVQGTAADLMKLAMVRLFPQLREVGARMLLQVHDELLLEAPKERAEEVAALAKEVMEGVWPLAVPLEVEVGIGEDWLAAKG

SEQ ID NO: 1861 - DNA, 2529 bp, synthetic construct
  misc_feature 1..2529: note = Variant of DNA polymerase I from Thermus sp. strain 2.9
  source 1..2529: mol_type = other DNA
atgcaccatcatcatcatcatggcggtagcggcatgttaccgttgttcgaacctaaaggtcgcgtgcttctggttgatggccatcatctcgcgtatcgtaacttctttgccctgaaaggattaaccaccagccgtggcgagccggtacagggtgtctacggctttgcaaagtcgctcctgaaagctctgaaagaagacggtgatgtggtgattgttgtctttgatgcgaaagcgccaagttttcgccacgaagcgtacgaagcttacaaagccgggcgtgctccaacgccggaagactttcctcgccaattggcgcttatgaaggaattagtggatttgcttggcctcgaacgcttggaagttcccggtttcgaggcagacgacgtattagcgactctcgcaaagaaagccgaacgtgagggctatgaagtccagatcttgacagcagatcgcgatcttttccagcttttatctccgcgcatctcggtgttacacccggaagggcatcgtatcaccccggaatggctctgggagaaatatggtttgcgtcccgaacaatgggtggattttcgcgccttagcaggcgatccgagcgacaatattccgggagttaaaggtatcggcgagaagacggcgctcaagctccttaaagaatgggggtcgttggagaacttgcttaagaatttagatcaggtcaaaccagagtcagtgcgtgagaagattcttgcacacctcgaagacctcaaattaagccgcgaattgtcccgtgtacgcaccgatttgccgctcgaagttgatttccgtggccgccgcgaacctgactgggagggtcttaaagcgtttttagagcgtcttgaatttggttcgctcttgcatgaattcggccttttagaaagcccgttaccagccgaagaagcaccttggccaccgcccgaaggcgcgtttttaggttaccgtttgagtcgcccggaaccgatgtgggccgaattattggctcttgcagcgtctgcccagggacgtgtgtatcgcgcggaagaccctcatggtgcgctccgcggcctcaaagaagtccgtggactccttgccaaagacttagctgttgttgcattgcgcgaaggtcttgatttacctccgactgatgatccaatgcttcttgcgtacctcttggacccgtcaaacacgacgcccgaaggcgtagcccgtcgttacggcggcgagtggaccgaagatgcaggcgagcgcgcgttattggccgaacgtttgcacgccaatttattaggacgtttgcaaggcgaggaacgtctcctctggctttacgaagaagtggagaaaccattgagtcgcgtgctcgcgcatatggaagctaccggtgtcaaattagacgtggcgtatttggaggcactcagccttgaagttgctgccgaaatgcgccgcttggaggaagaagtattccgtttagcaggccactccttttatcttaattctcgcgatcagttagaacgtgtgttgttcgatgaacttggtctccctcctatcggcaagacagagaagaccggtaaacgtagcacttcagcggcggttttagtggctcttcgcgaagtccatcccattgtggacaagatcttgcagtaccgcgaactcgcgaaattgaaaggcacctatattgaccctcttccggcattagtccacccgaaaacgggacgcctccatacccgcttcaaccaaacagccacggcgaccggtcgtttgtcctcctctgatccaaaccttcagaatattccagtacgtaccccattgggccagaagatccgccgcgcgtttgtagctgaggagggttggcgtttagtggccctcgattatagccaaattgaattacgtgtccttgcccatctttctggcgatgagaacctcatccgcgtgtttcaggaaggcaaagacattcacactcaaacggcaagctggatgtttggattatcagctgaagcgatcgatcctttgatgcgtcgtgcagcgaagaccatcaatttcggtgttctctacggtatgagtgcccatcgtttgtcgcaggaattaggcattccctatgaagaagctgcggcgttcattcagcgctactttcaaagctatcccaaagttaaagcatggatcgagaagactctcgaagaaggccgcacacgtggttacgtagagaccttatttggacgtcgccgctatgttcccgatttaaacgctcgcgtgaaatctgtccgtgaagccgccgaacgcatggcgttcaacatgcctgtacagggcacggcagctgacctcatgaaacttgcaatggtgcgcctttttccacaattgcgtgaagttggtgcccgcatgctcttgcaggtccacgatgaactcttgttagaagcgccaaaagagcgtgcggaagaggtggcagccctcgcgaaagaggttatggaaggcgtgtggcccttagcggtgcctcttgaagtcgaagttggtattggcgaggattggttggctgccaaaggataatga

SEQ ID NO: 1862 - protein, 841 aa, synthetic construct
  REGION 1..841: note = Variant of DNA polymerase I from Thermus sp. strain 2.9
MHHHHHHGGSGMLPLFEPKGRVLLVDGHHLAYRNFFALKGLTTSRGEPVQGVYGFAKSLLKALKEDGDVVIVVFDAKAPSFRHEAYEAYKAGRAPTPEDFPRQLALMKELVDLLGLERLEVPGFEADDVLATLAKKAEREGYEVQILTADRDLFQLLSPRISVLHPEGHRITPEWLWEKYGLRPEQWVDFRALAGDPSDNIPGVKGIGEKTALKLLKEWGSLENLLKNLDQVKPESVREKILAHLEDLKLSRELSRVRTDLPLEVDFRGRREPDWEGLKAFLERLEFGSLLHEFGLLESPLPAEEAPWPPPEGAFLGYRLSRPEPMWAELLALAASAQGRVYRAEDPHGALRGLKEVRGLLAKDLAVVALREGLDLPPTDDPMLLAYLLDPSNTTPEGVARRYGGEWTEDAGERALLAERLHANLLGRLQGEERLLWLYEEVEKPLSRVLAHMEATGVKLDVAYLEALSLEVAAEMRRLEEEVFRLAGHSFYLNSRDQLERVLFDELGLPPIGKTEKTGKRSTSAAVLVALREVHPIVDKILQYRELAKLKGTYIDPLPALVHPKTGRLHTRFNQTATATGRLSSSDPNLQNIPVRTPLGQKIRRAFVAEEGWRLVALDYSQIELRVLAHLSGDENLIRVFQEGKDIHTQTASWMFGLSAEAIDPLMRRAAKTINFGVLYGMSAHRLSQELGIPYEEAAAFIQRYFQSYPKVKAWIEKTLEEGRTRGYVETLFGRRRYVPDLNARVKSVREAAERMAFNMPVQGTAADLMKLAMVRLFPQLREVGARMLLQVHDELLLEAPKERAEEVAALAKEVMEGVWPLAVPLEVEVGIGEDWLAAKG

SEQ ID NO: 1863 - DNA, 2529 bp, synthetic construct
  misc_feature 1..2529: note = Variant of DNA polymerase I from Thermus sp. strain 2.9
  source 1..2529: mol_type = other DNA
atgcaccatcatcatcatcatggcggtagcggcatgttaccgttgttcgaacctaaaggtcgcgtgcttctggttgatggccatcatctcgcgtatcgtaacttctttgccctgaaaggattaaccaccagccgtggcgagccggtacagggtgtctacggctttgcaaagtcgctcctgaaagctctgaaagaagacggtgatgtggtgattgttgtctttgatgcgaaagcgccagggtttcgccacgaagcgtacgaagcttacaaagccgggcgtgctccaacgccggaagactttcctcgccaattggcgcttatgaaggaattagtggatttgcttggcctcgaacgcttggaagttcccggtttcgaggcagacgacgtattagcgactctcgcaaagaaagccgaacgtgagggctatgaagtccagatcttgacagcagatcgcgatcttttccagcttttatctccgcgcatctcggtgttacacccggaagggcatcgtatcaccccggaatggctctgggagaaatatggtttgcgtcccgaacaatgggtggattttcgcgccttagcaggcgatccgagcgacaatattccgggagttaaaggtatcggcgagaagacggcgctcaagctccttaaagaatgggggtcgttggagaacttgcttaagaatttagatcaggtcaaaccagagtcagtgcgtgagaagattcttgcacacctcgaagacctcaaattaagccgcgaattgtcccgtgtacgcaccgatttgccgctcgaagttgatttccgtggccgccgcgaacctgactgggagggtcttaaagcgtttttagagcgtcttgaatttggttcgctcttgcatgaattcggccttttagaaagcccgttaccagccgaagaagcaccttggccaccgcccgaaggcgcgtttttaggttaccgtttgagtcgcccggaaccgatgtgggccgaattattggctcttgcagcgtctgcccagggacgtgtgtatcgcgcggaagaccctcatggtgcgctccgcggcctcaaagaagtccgtggactccttgccaaagacttagctgttgttgcattgcgcgaaggtcttgatttacctccgactgatgatccaatgcttcttgcgtacctcttggacccgtcaaacacgacgcccgaaggcgtagcccgtcgttacggcggcgagtggaccgaagatgcaggcgagcgcgcgttattggccgaacgtttgcacgccaatttattaggacgtttgcaaggcgaggaacgtctcctctggctttacgaagaagtggagaaaccattgagtcgcgtgctcgcgcatatggaagctaccggtgtcaaattagacgtggcgtatttggaggcactcagccttgaagttgctgccgaaatgcgccgcttggaggaagaagtattccgtttagcaggccactccttttatcttaattctcgcgatcagttagaacgtgtgttgttcgatgaacttggtctccctcctatcggcaagacagagaagaccggtaaacgtagcacttcagcggcggttttagaagctcttcgcgaagtccatcccattgtggacaagatcttgcagtaccgcgaactcgcgaaattgaaaggcacctatattgaccctcttccggcattagtccacccgaaaacgggacgcctccatacccgcttcaaccaaacagccacggcgaccggtcgtttgtcctcctctgatccaaaccttcagaatattccagtacgtaccccattgggccagaagatccgccgcgcgtttgtagctgaggagggttggcgtttagtggccctcgattatagccaaattgaattacgtgtccttgcccatctttctggcgatgagaacctcatccgcgtgtttcaggaaggcaaagacattcacactcaaacggcaagctggatgtttggattatcagctgaagcgatcgatcctttgatgcgtcgtgcagcgaagaccatcaatttcggtgttctctacggtatgagtgcccatcgtttgtcgcaggaattaggcattccctatgaagaagctgcggcgttcattcagcgctactttcaaagctatcccaaagttaaagcatggatcgagaagactctcgaagaaggccgcacacgtggttacgtagagaccttatttggacgtcgccgctatgttcccgatttaaacgctcgcgtgaaatctgtccgtgaagccgccgaacgcatggcgttcaacatgcctgtacagggcacggcagctgacctcatgaaacttgcaatggtgcgcctttttccacaattgcgtgaagttggtgcccgcatgctcttgcaggtccacgatgaactcttgttagaagcgccaaaagagcgtgcggaagaggtggcagccctcgcgaaagaggttatggaaggcgtgtggcccttagcggtgcctcttgaagtcgaagttggtattggcgaggattggttggctgccaaaggataatga

SEQ ID NO: 1864 - protein, 841 aa, synthetic construct
  REGION 1..841: note = Variant of DNA polymerase I from Thermus sp. strain 2.9
MHHHHHHGGSGMLPLFEPKGRVLLVDGHHLAYRNFFALKGLTTSRGEPVQGVYGFAKSLLKALKEDGDVVIVVFDAKAPGFRHEAYEAYKAGRAPTPEDFPRQLALMKELVDLLGLERLEVPGFEADDVLATLAKKAEREGYEVQILTADRDLFQLLSPRISVLHPEGHRITPEWLWEKYGLRPEQWVDFRALAGDPSDNIPGVKGIGEKTALKLLKEWGSLENLLKNLDQVKPESVREKILAHLEDLKLSRELSRVRTDLPLEVDFRGRREPDWEGLKAFLERLEFGSLLHEFGLLESPLPAEEAPWPPPEGAFLGYRLSRPEPMWAELLALAASAQGRVYRAEDPHGALRGLKEVRGLLAKDLAVVALREGLDLPPTDDPMLLAYLLDPSNTTPEGVARRYGGEWTEDAGERALLAERLHANLLGRLQGEERLLWLYEEVEKPLSRVLAHMEATGVKLDVAYLEALSLEVAAEMRRLEEEVFRLAGHSFYLNSRDQLERVLFDELGLPPIGKTEKTGKRSTSAAVLEALREVHPIVDKILQYRELAKLKGTYIDPLPALVHPKTGRLHTRFNQTATATGRLSSSDPNLQNIPVRTPLGQKIRRAFVAEEGWRLVALDYSQIELRVLAHLSGDENLIRVFQEGKDIHTQTASWMFGLSAEAIDPLMRRAAKTINFGVLYGMSAHRLSQELGIPYEEAAAFIQRYFQSYPKVKAWIEKTLEEGRTRGYVETLFGRRRYVPDLNARVKSVREAAERMAFNMPVQGTAADLMKLAMVRLFPQLREVGARMLLQVHDELLLEAPKERAEEVAALAKEVMEGVWPLAVPLEVEVGIGEDWLAAKG

SEQ ID NO: 1865 - DNA, 2529 bp, synthetic construct
  misc_feature 1..2529: note = Variant of DNA polymerase I from Thermus sp. strain 2.9
  source 1..2529: mol_type = other DNA
atgcaccatcatcatcatcatggcggtagcggcatgttaccgttgttcgaacctaaaggtcgcgtgcttctggttgatggccatcatctcgcgtatcgtaacttctttgccctgaaaggattaaccaccagccgtggcgagccggtacagggtgtctacggctttgcaaagtcgctcctgaaagctctgaaagaagacggtgatgtggtgattgttgtctttgatgcgaaagcgccaagttttcgccacgaagcgtacgaagcttacaaagccgggcgtgctccaacgccggaagactttcctcgccaattggcgcttatgaaggaattagtggatttgcttggcctcgaacgcttggaagttcccggtttcgaggcagacgacgtattagcgactctcgcaaagaaagccgaacgtgagggctatgaagtccagatcttgacagcagatcgcgatcttttccagcttttatctccgcgcatctcggtgttacacccggaagggcatcgtatcaccccggaatggctctgggagaaatatggtttgcgtcccgaacaatgggtggattttcgcgccttagcaggcgatccgagcgacaatattccgggagttaaaggtatcggcgagaagacggcgctcaagctccttaaagaatgggggtcgttggagaacttgcttaagaatttagatcaggtcaaaccagagtcagtgcgtgagaagattcttgcacacctcgaagacctcaaattaagccgcgaattgtcccgtgtacgcaccgatttgccgctcgaagttgatttccgtggccgccgcgaacctgactgggagggtcttaaagcgtttttagagcgtcttgaatttggttcgctcttgcatgaattcggccttttagaaagcccgttaccagccgaagaagcaccttggccaccgcccgaaggcgcgtttttaggttaccgtttgagtcgcccggaaccgatgtgggccgaattattggctcttgcagcgtctgcccagggacgtgtgtatcgcgcggaagaccctcatggtgcgctccgcggcctcaaagaagtccgtggactccttgccaaagacttagctgttgttgcattgcgcgaaggtcttgatttacctccgactgatgatccaatgcttcttgcgtacctcttggacccgtcaaacacgacgcccgaaggcgtagcccgtcgttacggcggcgagtggaccgaagatgcaggcgagcgcgcgttattggccgaaactttgcacgccaatttattaggacgtttgcaaggcgaggaacgtctcctctggctttacgaagaagtggagaaaccattgagtcgcgtgctcgcgcatatggaagctaccggtgtcaaattagacgtggcgtatttggaggcactcagccttgaagttgctgccgaaatgcgccgcttggaggaagaagtattccgtttagcaggccactccttttatcttaattctcgcgatcagttagaacgtgtgttgttcgatgaacttggtctccctcctatcggcaagacagagaagaccggtaaacgtagcacttcagcggcggttttagaagctcttcgcgaagtccatcccattgtggacaagatcttgcagtaccgcgaactcgcgaaattgaaaggcacctatattgaccctcttccggcattagtccacccgaaaacgggacgcctccatacccgcttcaaccaaacagccacggcgaccggtcgtttgtcctcctctgatccaaaccttcagaatattccagtacgtaccccattgggccagaagatccgccgcgcgtttgtagctgaggagggttggcgtttagtggccctcgattatagccaaattgaattacgtgtccttgcccatctttctggcgatgagaacctcatccgcgtgtttcaggaaggcaaagacattcacactcaaacggcaagctggatgtttggattatcagctgaagcgatcgatcctttgatgcgtcgtgcagcgaagaccatcaatttcggtgttctctacggtatgagtgcccatcgtttgtcgcaggaattaggcattccctatgaagaagctgcggcgttcattcagcgctactttcaaagctatcccaaagttaaagcatggatcgagaagactctcgaagaaggccgcacacgtggttacgtagagaccttatttggacgtcgccgctatgttcccgatttaaacgctcgcgtgaaatctgtccgtgaagccgccgaacgcatggcgttcaacatgcctgtacagggcacggcagctgacctcatgaaacttgcaatggtgcgcctttttccacaattgcgtgaagttggtgcccgcatgctcttgcaggtccacgatgaactcttgttagaagcgccaaaagagcgtgcggaagaggtggcagccctcgcgaaagaggttatggaaggcgtgtggcccttagcggtgcctcttgaagtcgaagttggtattggcgaggattggttggctgccaaaggataatga

SEQ ID NO: 1866 - protein, 841 aa, synthetic construct
  REGION 1..841: note = Variant of DNA polymerase I from Thermus sp. strain 2.9
MHHHHHHGGSGMLPLFEPKGRVLLVDGHHLAYRNFFALKGLTTSRGEPVQGVYGFAKSLLKALKEDGDVVIVVFDAKAPSFRHEAYEAYKAGRAPTPEDFPRQLALMKELVDLLGLERLEVPGFEADDVLATLAKKAEREGYEVQILTADRDLFQLLSPRISVLHPEGHRITPEWLWEKYGLRPEQWVDFRALAGDPSDNIPGVKGIGEKTALKLLKEWGSLENLLKNLDQVKPESVREKILAHLEDLKLSRELSRVRTDLPLEVDFRGRREPDWEGLKAFLERLEFGSLLHEFGLLESPLPAEEAPWPPPEGAFLGYRLSRPEPMWAELLALAASAQGRVYRAEDPHGALRGLKEVRGLLAKDLAVVALREGLDLPPTDDPMLLAYLLDPSNTTPEGVARRYGGEWTEDAGERALLAETLHANLLGRLQGEERLLWLYEEVEKPLSRVLAHMEATGVKLDVAYLEALSLEVAAEMRRLEEEVFRLAGHSFYLNSRDQLERVLFDELGLPPIGKTEKTGKRSTSAAVLEALREVHPIVDKILQYRELAKLKGTYIDPLPALVHPKTGRLHTRFNQTATATGRLSSSDPNLQNIPVRTPLGQKIRRAFVAEEGWRLVALDYSQIELRVLAHLSGDENLIRVFQEGKDIHTQTASWMFGLSAEAIDPLMRRAAKTINFGVLYGMSAHRLSQELGIPYEEAAAFIQRYFQSYPKVKAWIEKTLEEGRTRGYVETLFGRRRYVPDLNARVKSVREAAERMAFNMPVQGTAADLMKLAMVRLFPQLREVGARMLLQVHDELLLEAPKERAEEVAALAKEVMEGVWPLAVPLEVEVGIGEDWLAAKG

SEQ ID NO: 1867 - DNA, 2529 bp, synthetic construct
  misc_feature 1..2529: note = Variant of DNA polymerase I from Thermus sp. strain 2.9
  source 1..2529: mol_type = other DNA
atgcaccatcatcatcatcagggcggtagcggcatgttaccgttgttcgaacctaaaggtcgcgtgcttctggttgatggccatcatctcgcgtatcgtaacttctttgccctgaaaggattaaccaccagccgtggcgagccggtacagggtgtctacggctttgcaaagtcgctcctgaaagctctgaaagaagacggtgatgtggtgattgttgtctttgatgcgaaagcgccaagttttcgccacgaagcgtacgaagcttacaaagccgggcgtgctccaacgccggaagactttcctcgccaattggcgcttatgaaggaattagtggatttgcttggcctcgaacgcttggaagttcccggtttcgaggcagacgacgtattagcgactctcgcaaagaaagccgaacgtgagggctatgaagtccagatcttgacagcagatcgcgatcttttccagcttttatctccgcgcatctcggtgttacacccggaagggcatcgtatcaccccggaatggctctgggagaaatatggtttgcgtcccgaacaatgggtggattttcgcgccttagcaggcgatccgagcgacaatattccgggagttaaaggtatcggcgagaagacggcgctcaagctccttaaagaatgggggtcgttggagaacttgcttaagaatttagatcaggtcaaaccagagtcagtgcgtgagaagattcttgcacacctcgaagacctcaaattaagccgcgaattgtcccgtgtacgcaccgatttgccgctcgaagttgatttccgtggccgccgcgaacctgactgggagggtcttaaagcgtttttagagcgtcttgaatttggttcgctcttgcatgaattcggccttttagaaagcccgttaccagccgaagaagcaccttggccaccgcccgaaggcgcgtttttaggttaccgtttgagtcgcccggaaccgatgtgggccgaattattggctcttgcagcgtctgcccagggacgtgtgtatcgcgcggaagaccctcatggtgcgctccgcggcctcaaagaagtccgtggactccttgccaaagacttagctgttgttgcattgcgcgaaggtcttgatttacctccgactgatgatccaatgcttcttgcgtacctcttggacccgtcaaacacgacgcccgaaggcgtagcccgtcgttacggcggcgagtggaccgaagatgcaggggaacgcgcgttattggccgaacgtttgcacgccaatttattaggacgtttgcaaggcgaggaacgtctcctctggctttacgaagaagtggagaaaccattgagtcgcgtgctcgcgcatatggaagctaccggtgtcaaattagacgtggcgtatttggaggcactcagccttgaagttgctgccgaaatgcgccgcttggaggaagaagtattccgtttagcaggccactccttttatcttaattctcgcgatcagttagaacgtgtgttgttcgatgaacttggtctccctcctatcggcaagacagagaagaccggtaaacgtagcacttcagcggcggttttagaagctcttcgcgaagtccatcccattgtggacaagatcttgcagtaccgcgaactcgcgaaattgaaaggcacctatattgaccctcttccggcattagtccacccgaaaacgggacgcctccatacccgcttcaaccaaacagccacggcgaccggtcgtttgtcctcctctgatccaaaccttcagaatattccagtacgtaccccattgggccagaagatccgccgcgcgtttgtagctgaggagggttggcgtttagtggccctcgattatagccaaattgaattacgtgtccttgcccatctttctggcgatgagaacctcatccgcgtgtttcaggaaggcaaagacattcacactcaaacggcaagctggatgtttggattatcagctgaagcgatcgatcctttgatgcgtcgtgcagcgaagaccatcaatttcggtgttctctacggtatgagtgcccatcgtttgtcgcaggaattaggcattccctatgaagaagctgcggcgttcattcagcgctactttcaaagctatcccaaagttaaagcatggatcgagaagactctcgaagaaggccgcacacgtggttacgtagagaccttatttggacgtcgccgctatgttcccgatttaaacgctcgcgtgaaatctgtccgtgaagccgccgaacgcatggcgttcaacatgcctgtacagggcacggcagctgacctcatgaaacttgcaatggtgcgcctttttccacaattgcgtgaagttggtgcccgcatgctcttgcaggtccacgatgaactcttgttagaagcgccaaaagagcgtgcggaagaggtggcagccctcgcgaaagaggttatggaaggcgtgtggcccttagcggtgcctcttgaagtcgaagttggtattggcgaggattggttggctgccaaaggataatga

SEQ ID NO: 1868 - protein, 841 aa, synthetic construct
  REGION 1..841: note = Variant of DNA polymerase I from Thermus sp. strain 2.9
MHHHHHQGGSGMLPLFEPKGRVLLVDGHHLAYRNFFALKGLTTSRGEPVQGVYGFAKSLLKALKEDGDVVIVVFDAKAPSFRHEAYEAYKAGRAPTPEDFPRQLALMKELVDLLGLERLEVPGFEADDVLATLAKKAEREGYEVQILTADRDLFQLLSPRISVLHPEGHRITPEWLWEKYGLRPEQWVDFRALAGDPSDNIPGVKGIGEKTALKLLKEWGSLENLLKNLDQVKPESVREKILAHLEDLKLSRELSRVRTDLPLEVDFRGRREPDWEGLKAFLERLEFGSLLHEFGLLESPLPAEEAPWPPPEGAFLGYRLSRPEPMWAELLALAASAQGRVYRAEDPHGALRGLKEVRGLLAKDLAVVALREGLDLPPTDDPMLLAYLLDPSNTTPEGVARRYGGEWTEDAGERALLAERLHANLLGRLQGEERLLWLYEEVEKPLSRVLAHMEATGVKLDVAYLEALSLEVAAEMRRLEEEVFRLAGHSFYLNSRDQLERVLFDELGLPPIGKTEKTGKRSTSAAVLEALREVHPIVDKILQYRELAKLKGTYIDPLPALVHPKTGRLHTRFNQTATATGRLSSSDPNLQNIPVRTPLGQKIRRAFVAEEGWRLVALDYSQIELRVLAHLSGDENLIRVFQEGKDIHTQTASWMFGLSAEAIDPLMRRAAKTINFGVLYGMSAHRLSQELGIPYEEAAAFIQRYFQSYPKVKAWIEKTLEEGRTRGYVETLFGRRRYVPDLNARVKSVREAAERMAFNMPVQGTAADLMKLAMVRLFPQLREVGARMLLQVHDELLLEAPKERAEEVAALAKEVMEGVWPLAVPLEVEVGIGEDWLAAKG

SEQ ID NO: 1869 - DNA, 2529 bp, synthetic construct
  misc_feature 1..2529: note = Variant of DNA polymerase I from Thermus sp. strain 2.9
  source 1..2529: mol_type = other DNA
atgcaccatcatcatcatcatggcggtagcggcatgttaccgttgttcgaacctaaaggtcgcgtgcttctggttgatggccatcatctcgcgtatcgtaacttctttgccctgaaaggattaaccaccagccgtggcgagccggtacagggtgtctacggctttgcaaagtcgctcctgaaagctctgaaagaagacggtgatgtggtgattgttgtctttgatgcgaaagcgccaagttttcgccacgaagcgtacgaagcttacaaagccgggcgtgctccaacgccggaagactttcctcgccaattggcgcttatgaaggaattagtggatttgcttggcctcgaacgcttggaagttcccggtttcgaggcagacgacgtattagcgactctcgcaaagaaagccgaacgtgagggctatgaagtccagatcttgacagcagatcgcgatcttttccagcttttatctccgcgcatctcggtgttacacccggaagggcatcgtatcaccccggaatggctctgggagaaatatggtttgcgtcccgaacaatgggtggattttcgcgccttagcaggcgatccgagcgacaatattccgggagttaaaggtatcggcgagaagacggcgctcaagctccttaaagaatgggggtcgttggagaacttgcttaagaatttagatcaggtcaaaccagagtcagtgcgtgagaagattcttgcacacctcgaagacctcaaattaagccgcgaattgtcccgtgtacgcaccgatttgccgctcgaagttgatttccgtggccgccgcgaacctgactgggagggtcttaaagcgtttttagagcgtcttgaatttggttcgctcttgcatgaattcggccttttagaaagcccgttaccagccgaagaagcaccttggccaccgcccgaaggcgcgtttttaggttaccgtttgagtcgcccggaaccgatgtgggccgaattattggctcttgcagcgtctgcccagggacgtgtgtatcgcgcggaagaccctcatggtgcgctccgcggcctcaaagaagtccgtggactccttgccaaagacttagctgttgttgcattgcgcgaaggtcttgatttacctccgactgatgatccaatgcttcttgcgtacctcttggacccgtcaaacacgacgcccgaaggcgtagcccgtcgttacggcggcgagtggaccgaagatgcaggcgagcgcgcgttattggccgaaagtttgcacgccaatttattaggacgtttgcaaggcgaggaacgtctcctctggctttacgaagaagtggagaaaccattgagtcgcgtgctcgcgcatatggaagctaccggtgtcaaattagacgtggcgtatttggaggcactcagccttgaagttgctgccgaaatgcgccgcttggaggaagaagtattccgtttagcaggccactccttttatcttaattctcgcgatcagttagaacgtgtgttgttcgatgaacttggtctccctcctatcggcaagacagagaagaccggtaaacgtagcacttcagcggcggttttagaagctcttcgcgaagtccatcccattgtggacaagatcttgcagtaccgcgaactcgcgaaattgaaaggcacctatattgaccctcttccggcattagtccacccgaaaacgggacgcctccatacccgcttcaaccaaacagccacggcgaccggtcgtttgtcctcctctgatccaaaccttcagaatattccagtacgtaccccattgggccagaagatccgccgcgcgtttgtagctgaggagggttggcgtttagtggccctcgattatagccaaattgaattacgtgtccttgcccatctttctggcgatgagaacctcatccgcgtgtttcaggaaggcaaagacattcacactcaaacggcaagctggatgtttggattatcagctgaagcgatcgatcctttgatgcgtcgtgcagcgaagaccatcaatttcggtgttctctacggtatgagtgcccatcgtttgtcgcaggaattaggcattccctatgaagaagctgcggcgttcattcagcgctactttcaaagctatcccaaagttaaagcatggatcgagaagactctcgaagaaggccgcacacgtggttacgtagagaccttatttggacgtcgccgctatgttcccgatttaaacgctcgcgtgaaatctgtccgtgaagccgccgaacgcatggcgttcaacatgcctgtacagggcacggcagctgacctcatgaaacttgcaatggtgcgcctttttccacaattgcgtgaagttggtgcccgcatgctcttgcaggtccacgatgaactcttgttagaagcgccaaaagagcgtgcggaagaggtggcagccctcgcgaaagaggttatggaaggcgtgtggcccttagcggtgcctcttgaagtcgaagttggtattggcgaggattggttggctgccaaaggataatga

SEQ ID NO: 1870 - protein, 841 aa, synthetic construct
  REGION 1..841: note = Variant of DNA polymerase I from Thermus sp. strain 2.9
MHHHHHHGGSGMLPLFEPKGRVLLVDGHHLAYRNFFALKGLTTSRGEPVQGVYGFAKSLLKALKEDGDVVIVVFDAKAPSFRHEAYEAYKAGRAPTPEDFPRQLALMKELVDLLGLERLEVPGFEADDVLATLAKKAEREGYEVQILTADRDLFQLLSPRISVLHPEGHRITPEWLWEKYGLRPEQWVDFRALAGDPSDNIPGVKGIGEKTALKLLKEWGSLENLLKNLDQVKPESVREKILAHLEDLKLSRELSRVRTDLPLEVDFRGRREPDWEGLKAFLERLEFGSLLHEFGLLESPLPAEEAPWPPPEGAFLGYRLSRPEPMWAELLALAASAQGRVYRAEDPHGALRGLKEVRGLLAKDLAVVALREGLDLPPTDDPMLLAYLLDPSNTTPEGVARRYGGEWTEDAGERALLAESLHANLLGRLQGEERLLWLYEEVEKPLSRVLAHMEATGVKLDVAYLEALSLEVAAEMRRLEEEVFRLAGHSFYLNSRDQLERVLFDELGLPPIGKTEKTGKRSTSAAVLEALREVHPIVDKILQYRELAKLKGTYIDPLPALVHPKTGRLHTRFNQTATATGRLSSSDPNLQNIPVRTPLGQKIRRAFVAEEGWRLVALDYSQIELRVLAHLSGDENLIRVFQEGKDIHTQTASWMFGLSAEAIDPLMRRAAKTINFGVLYGMSAHRLSQELGIPYEEAAAFIQRYFQSYPKVKAWIEKTLEEGRTRGYVETLFGRRRYVPDLNARVKSVREAAERMAFNMPVQGTAADLMKLAMVRLFPQLREVGARMLLQVHDELLLEAPKERAEEVAALAKEVMEGVWPLAVPLEVEVGIGEDWLAAKG

SEQ ID NO: 1871 - DNA, 2529 bp, synthetic construct
  misc_feature 1..2529: note = Variant of DNA polymerase I from Thermus sp. strain 2.9
  source 1..2529: mol_type = other DNA
atgcaccatcatcatcatcatggcggtagcggcatgttaccgttgttcgaacctaaaggtcgcgtgcttctggttgatggccatcatctcgcgtatcgtaacttctttgccctgaaaggattaaccaccagccgtggcgagccggtacagggtgtctacggctttgcaaagtcgctcctgaaagctctgaaagaagacggtgatgtggtgattgttgtctttgatgcgaaagcgccaagttttcgccacgaagcgtacgaagcttacaaagccgggcgtgctccaacgccggaagactttcctcgccaattggcgcttatgaaggaattagtggatttgcttggcctcgaacgcttggaagttcccggtttcgaggcagacgacgtattagcgactctcgcaaagaaagccgaacgtgagggctatgaagtccagatcttgacagcagatcgcgatcttttccagcttttatctccgcgcatctcggtgttacacccggaagggcatcgtatcaccccggaatggctctgggagaaatatggtttgcgtcccgaacaatgggtggattttcgcgccttagcaggcgatccgagcgacaatattccgggagttaaaggtatcggcgagaagacggcgctcaagctccttaaagaatgggggtcgttggagaacttgcttaagaatttagatcaggtcaaaccagagtcagtgcgtgagaagattcttgcacacctcgaagacctcaaattaagccgcgaattgtcccgtgtacgcaccgatttgccgctcgaagttgatttccgtggccgccgcgaacctgactgggagggtcttaaagcgtttttagagcgtcttgaatttggttcgctcttgcatgaattcggccttttagaaagcccgttaccagccgaagaagcaccttggccaccgcccgaaggcgcgtttttaggttaccgtttgagtcgcccggaaccgatgtgggccgaattattggctcttgcagcgtctgcccagggacgtgtgtatcgcgcggaagaccctcatggtgcgctccgcggcctcaaagaagtccgtggactccttgccaaagacttagctgttgttgcattgcgcgaaggtcttgatttacctccgactgatgatccaatgcttcttgcgtacctcttggacccgtcaaacacgacgcccgaaggcgtagcccgtcgttacggcggcgagtggaccgaagatgcaggcgagcgcgcgttattggccgaacgtttgcacgccaatttattaggacgtttgcaaggcgaggaacgtctcctctggctttacgaagaagtggagaaaccattgagtcgcgtgctcgcgcatatggaagctaccggtgtcaaattagacgtggcgtatttggaggcactcagccttgaagttgctgccgaaatgcgccgcttggaggaagaagtattccgtttagcaggccactccttttatcttaattctcgcgatcagttagaacgtgtgttgttcgatgaacttggtctccctcctatcggcaagacagagaagaccggtaaacgtagcacttcagcggcggttttagaagctcttcgcgaagtccatcccattgtggacaagatcttgcagtaccgcgaactcgcgaaattgaaaggcacctatattgaccctcttccggcattagtccacccgaaaacgggacgcctccatacccgcttcaaccaaacagccacggcgaccggtcgtttgtcctcctctgatccaaaccttcagaatattccagtacgtaccccattgggccagaagatccgccgcgcgtttgtagctgaggagggttggcgtttagtggccctcgattatagccaaattgaattacgtgtccttgcccatctttctggcgatgagaacctcatccgcgtgtttcaggaaggcagggacattcacactcaaacggcaagctggatgtttggattatcagctgaagcgatcgatcctttgatgcgtcgtgcagcgaagaccatcaatttcggtgttctctacggtatgagtgcccatcgtttgtcgcaggaattaggcattccctatgaagaagctgcggcgttcattcagcgctactttcaaagctatcccaaagttaaagcatggatcgagaagactctcgaagaaggccgcacacgtggttacgtagagaccttatttggacgtcgccgctatgttcccgatttaaacgctcgcgtgaaatctgtccgtgaagccgccgaacgcatggcgttcaacatgcctgtacagggcacggcagctgacctcatgaaacttgcaatggtgcgcctttttccacaattgcgtgaagttggtgcccgcatgctcttgcaggtccacgatgaactcttgttagaagcgccaaaagagcgtgcggaagaggtggcagccctcgcgaaagaggttatggaaggcgtgtggcccttagcggtgcctcttgaagtcgaagttggtattggcgaggattggttggctgccaaaggataatga

SEQ ID NO: 1872 - protein, 841 aa, synthetic construct
  REGION 1..841: note = Variant of DNA polymerase I from Thermus sp. strain 2.9
MHHHHHHGGSGMLPLFEPKGRVLLVDGHHLAYRNFFALKGLTTSRGEPVQGVYGFAKSLLKALKEDGDVVIVVFDAKAPSFRHEAYEAYKAGRAPTPEDFPRQLALMKELVDLLGLERLEVPGFEADDVLATLAKKAEREGYEVQILTADRDLFQLLSPRISVLHPEGHRITPEWLWEKYGLRPEQWVDFRALAGDPSDNIPGVKGIGEKTALKLLKEWGSLENLLKNLDQVKPESVREKILAHLEDLKLSRELSRVRTDLPLEVDFRGRREPDWEGLKAFLERLEFGSLLHEFGLLESPLPAEEAPWPPPEGAFLGYRLSRPEPMWAELLALAASAQGRVYRAEDPHGALRGLKEVRGLLAKDLAVVALREGLDLPPTDDPMLLAYLLDPSNTTPEGVARRYGGEWTEDAGERALLAERLHANLLGRLQGEERLLWLYEEVEKPLSRVLAHMEATGVKLDVAYLEALSLEVAAEMRRLEEEVFRLAGHSFYLNSRDQLERVLFDELGLPPIGKTEKTGKRSTSAAVLEALREVHPIVDKILQYRELAKLKGTYIDPLPALVHPKTGRLHTRFNQTATATGRLSSSDPNLQNIPVRTPLGQKIRRAFVAEEGWRLVALDYSQIELRVLAHLSGDENLIRVFQEGRDIHTQTASWMFGLSAEAIDPLMRRAAKTINFGVLYGMSAHRLSQELGIPYEEAAAFIQRYFQSYPKVKAWIEKTLEEGRTRGYVETLFGRRRYVPDLNARVKSVREAAERMAFNMPVQGTAADLMKLAMVRLFPQLREVGARMLLQVHDELLLEAPKERAEEVAALAKEVMEGVWPLAVPLEVEVGIGEDWLAAKG

SEQ ID NO: 1873 - DNA, 2529 bp, synthetic construct
  misc_feature 1..2529: note = Variant of DNA polymerase I from Thermus sp. strain 2.9
  source 1..2529: mol_type = other DNA
atggggcatcatcatcatcatggcggtagcggcatgttaccgttgttcgaacctaaaggtcgcgtgcttctggttgatggccatcatctcgcgtatcgtaacttctttgccctgaaaggattaaccaccagccgtggcgagccggtacagggtgtctacggctttgcaaagtcgctcctgaaagctctgaaagaagacggtgatgtggtgattgttgtctttgatgcgaaagcgccaagttttcgccacgaagcgtacgaagcttacaaagccgggcgtgctccaacgccggaagactttcctcgccaattggcgcttatgaaggaattagtggatttgcttggcctcgaacgcttggaagttcccggtttcgaggcagacgacgtattagcgactctcgcaaagaaagccgaacgtgagggctatgaagtccagatcttgacagcagatcgcgatcttttccagcttttatctccgcgcatctcggtgttacacccggaagggcatcgtatcaccccggaatggctctgggagaaatatggtttgcgtcccgaacaatgggtggattttcgcgccttagcaggcgatccgagcgacaatattccgggagttaaaggtatcggcgagaagacggcgctcaagctccttaaagaatgggggtcgttggagaacttgcttaagaatttagatcaggtcaaaccagagtcagtgcgtgagaagattcttgcacacctcgaagacctcaaattaagccgcgaattgtcccgtgtacgcaccgatttgccgctcgaagttgatttccgtggccgccgcgaacctgactgggagggtcttaaagcgtttttagagcgtcttgaatttggttcgctcttgcatgaattcggccttttagaaagcccgttaccagccgaagaagcaccttggccaccgcccgaaggcgcgtttttaggttaccgtttgagtcgcccggaaccgatgtgggccgaattattggctcttgcagcgtctgcccagggacgtgtgtatcgcgcggaagaccctcatggtgcgctccgcggcctcaaagaagtccgtggactccttgccaaagacttagctgttgttgcattgcgcgaaggtcttgatttacctccgactgatgatccaatgcttcttgcgtacctcttggacccgtcaaacacgacgcccgaaggcgtagcccgtcgttacggcggcgagtggaccgaagatgcaggcgagcgcgcgttattggccgaacgtttgcacgccaatttattaggacgtttgcaaggcgaggaacgtctcctctggctttacgaagaagtggagaaaccattgagtcgcgtgctcgcgcatatggaagctaccggtgtcaaattagacgtggcgtatttggaggcactcagccttgaagttgctgccgaaatgcgccgcttggaggaagaagtattccgtttagcaggccactccttttatcttaattctcgcgatcagttagaacgtgtgttgttcgatgaacttggtctccctcctatcggcaagacagagaagaccggtaaacgtagcacttcagcggcggttttagaagctcttcgcgaagtccatcccattgtggacaagatcttgcagtaccgcgaactcgcgaaattgaaaggcacctatattgaccctcttccggcattagtccacccgaaaacgggacgcctccatacccgcttcaaccaaacagccacggcgaccggtcgtttgtcctcctctgatccaaaccttcagaatattccagtacgtaccccattgggccagaagatccgccgcgcgtttgtagctgaggagggttggcgtttagtggccctcgattatagccaaattgaattacgtgtccttgcccatctttctggcgatgagaacctcatccgcgtgtttcaggaaggcaaagacattcacactcaaacggcaagctggatgtttggattatcagctgaagcgatcgatcctttgatgcgtcgtgcagcgaagaccatcaatttcggtgttctctacggtatgagtgcccatcgtttgtcgcaggaattaggcattccctatgaagaagctgcggcgttcattcagcgctactttcaaagctatcccaaagttaaagcatggatcgagaagactctcgaagaaggccgcacacgtggttacgtagagaccttatttggacgtcgccgctatgttcccgatttaaacgctcgcgtgaaatctgtccgtgaagccgccgaacgcatggcgttcaacatgcctgtacagggcacggcagctgacctcatgaaacttgcaatggtgcgcctttttccacaattgcgtgaagttggtgcccgcatgctcttgcaggtccacgatgaactcttgttagaagcgccaaaagagcgtgcggaagaggtggcagccctcgcgaaagaggttatggaaggcgtgtggcccttagcggtgcctcttgaagtcgaagttggtattggcgaggattggttggctgccaaaggataatga

SEQ ID NO: 1874 - protein, 841 aa, synthetic construct
  REGION 1..841: note = Variant of DNA polymerase I from Thermus sp. strain 2.9
MGHHHHHGGSGMLPLFEPKGRVLLVDGHHLAYRNFFALKGLTTSRGEPVQGVYGFAKSLLKALKEDGDVVIVVFDAKAPSFRHEAYEAYKAGRAPTPEDFPRQLALMKELVDLLGLERLEVPGFEADDVLATLAKKAEREGYEVQILTADRDLFQLLSPRISVLHPEGHRITPEWLWEKYGLRPEQWVDFRALAGDPSDNIPGVKGIGEKTALKLLKEWGSLENLLKNLDQVKPESVREKILAHLEDLKLSRELSRVRTDLPLEVDFRGRREPDWEGLKAFLERLEFGSLLHEFGLLESPLPAEEAPWPPPEGAFLGYRLSRPEPMWAELLALAASAQGRVYRAEDPHGALRGLKEVRGLLAKDLAVVALREGLDLPPTDDPMLLAYLLDPSNTTPEGVARRYGGEWTEDAGERALLAERLHANLLGRLQGEERLLWLYEEVEKPLSRVLAHMEATGVKLDVAYLEALSLEVAAEMRRLEEEVFRLAGHSFYLNSRDQLERVLFDELGLPPIGKTEKTGKRSTSAAVLEALREVHPIVDKILQYRELAKLKGTYIDPLPALVHPKTGRLHTRFNQTATATGRLSSSDPNLQNIPVRTPLGQKIRRAFVAEEGWRLVALDYSQIELRVLAHLSGDENLIRVFQEGKDIHTQTASWMFGLSAEAIDPLMRRAAKTINFGVLYGMSAHRLSQELGIPYEEAAAFIQRYFQSYPKVKAWIEKTLEEGRTRGYVETLFGRRRYVPDLNARVKSVREAAERMAFNMPVQGTAADLMKLAMVRLFPQLREVGARMLLQVHDELLLEAPKERAEEVAALAKEVMEGVWPLAVPLEVEVGIGEDWLAAKG

SEQ ID NO: 1875 - DNA, 2529 bp, synthetic construct
  misc_feature 1..2529: note = Variant of DNA polymerase I from Thermus sp. strain 2.9
  source 1..2529: mol_type = other DNA
atgcaccatcatcatcatcatggcggtagcggcatgttaccgttgttcgaacctaaaggtcgcgtgcttctggttgatggccatcatctcgcgtatcgtaacttctttgccctgaaaggattaaccaccagccgtggcgagccggtacagggtgtctacggctttgcaaagtcgctcctgaaagctctgaaagaagacggtgatgtggtgattgttgtctttgatgcgaaagcgccaagttttcgccacgaagcgtacgaagcttacaaagccgggcgtgctccaacgccggaagactttcctcgccaattggcgcttatgaaggaattagtggatttgcttggcctcgaacgcttggaagttcccggtttcgaggcagacgacgtattagcgactctcgcaaagaaagccgaacgtgagggctatgaagtccagatcttgacagcagatcgcgatcttttccagcttttatctccgcgcatctcggtgttacacccggaagggcatcgtatcaccccggaatggctctgggagaaatatggtttgcgtcccgaacaatgggtggattttcgcgccttagcaggcgatccgagcgacaatattccgggagttaaaggtatcggcgagaagacggcgctcaagctccttaaagaatgggggtcgttggagaacttgcttaagaatttagatcaggtcaaaccagagtcagtgcgtgagaagattcttgcacacctcgaagacctcaaattaagccgcgaattgtcccgtgtacgcaccgatttgccgctcgaagttgatttccgtggccgccgcgaacctgactgggagggtcttaaagcgtttttagagcgtcttgaatttggttcgctcttgcatgaattcggccttttagaaagcccgttaccagccgaagaagcaccttggccaccgcccgaaggcgcgtttttaggttaccgtttgagtcgcccggaaccgatgtgggccgaattattggctcttgcagcgtctgcccagggacgtgtgtatcgcgcggaagaccctcatggtgcgctccgcggcctcaaagaagtccgtggactccttgccaaagacttagctgttgttgcattgcgcgaaggtcttgatttacctccgactgatgatccaatgcttcttgcgtacctcttggacccgtcaaacacgacgcccgaaggcgtagcccgtcgttacggcggcgagtggaccgaagatgcaggcgagcgcgcgttattggccgaacgtttgcacgccaatttattaggacgtttgcaaggcgaggaacgtctcctctggctttacgaagaagtggagaaaccattgagtcgcgtgctcgcgcatatggaagctaccggtgtcaaattagacgtggcgtatttggaggcactcagccttgaagttgctgccgaaatgcgccgcttggaggaagaagtattccgtttagcaggccactccttttatcttaattctcgcgatcagttagaacgtgtgttgttcgatgaacttggtctccctcctatcggcaagacagagaagaccggtaaacgtagcacttcagcggcggttttagaagctcttcgcgaagtccatcccattgtggacaagatcttgcagtaccgcgaactcgcgaaattgaaaggcacctatattgaccctcttccggcattagtccacccgaaaacgggacgcctccatacccgcttcaaccaaacagccacggcgaccggtcgtttgtcctcctctgatccaaaccttcagaatattccagtacgtaccccattgggccagaagatccgccgcgcgtttgtagctgaggagggttggcgtttagtggccctcgattatagccaaattgaattacgtgtccttgcccatctttctggcgatattaacctcatccgcgtgtttcaggaaggcaaagacattcacactcaaacggcaagctggatgtttggattatcagctgaagcgatcgatcctttgatgcgtcgtgcagcgaagaccatcaatttcggtgttctctacggtatgagtgcccatcgtttgtcgcaggaattaggcattccctatgaagaagctgcggcgttcattcagcgctactttcaaagctatcccaaagttaaagcatggatcgagaagactctcgaagaaggccgcacacgtggttacgtagagaccttatttggacgtcgccgctatgttcccgatttaaacgctcgcgtgaaatctgtccgtgaagccgccgaacgcatggcgttcaacatgcctgtacagggcacggcagctgacctcatgaaacttgcaatggtgcgcctttttccacaattgcgtgaagttggtgcccgcatgctcttgcaggtccacgatgaactcttgttagaagcgccaaaagagcgtgcggaagaggtggcagccctcgcgaaagaggttatggaaggcgtgtggcccttagcggtgcctcttgaagtcgaagttggtattggcgaggattggttggctgccaaaggataatga

SEQ ID NO: 1876 - protein, 841 aa, synthetic construct
  REGION 1..841: note = Variant of DNA polymerase I from Thermus sp. strain 2.9
MHHHHHHGGSGMLPLFEPKGRVLLVDGHHLAYRNFFALKGLTTSRGEPVQGVYGFAKSLLKALKEDGDVVIVVFDAKAPSFRHEAYEAYKAGRAPTPEDFPRQLALMKELVDLLGLERLEVPGFEADDVLATLAKKAEREGYEVQILTADRDLFQLLSPRISVLHPEGHRITPEWLWEKYGLRPEQWVDFRALAGDPSDNIPGVKGIGEKTALKLLKEWGSLENLLKNLDQVKPESVREKILAHLEDLKLSRELSRVRTDLPLEVDFRGRREPDWEGLKAFLERLEFGSLLHEFGLLESPLPAEEAPWPPPEGAFLGYRLSRPEPMWAELLALAASAQGRVYRAEDPHGALRGLKEVRGLLAKDLAVVALREGLDLPPTDDPMLLAYLLDPSNTTPEGVARRYGGEWTEDAGERALLAERLHANLLGRLQGEERLLWLYEEVEKPLSRVLAHMEATGVKLDVAYLEALSLEVAAEMRRLEEEVFRLAGHSFYLNSRDQLERVLFDELGLPPIGKTEKTGKRSTSAAVLEALREVHPIVDKILQYRELAKLKGTYIDPLPALVHPKTGRLHTRFNQTATATGRLSSSDPNLQNIPVRTPLGQKIRRAFVAEEGWRLVALDYSQIELRVLAHLSGDINLIRVFQEGKDIHTQTASWMFGLSAEAIDPLMRRAAKTINFGVLYGMSAHRLSQELGIPYEEAAAFIQRYFQSYPKVKAWIEKTLEEGRTRGYVETLFGRRRYVPDLNARVKSVREAAERMAFNMPVQGTAADLMKLAMVRLFPQLREVGARMLLQVHDELLLEAPKERAEEVAALAKEVMEGVWPLAVPLEVEVGIGEDWLAAKG

SEQ ID NO: 1877 - DNA, 2529 bp, synthetic construct
  misc_feature 1..2529: note = Variant of DNA polymerase I from Thermus sp. strain 2.9
  source 1..2529: mol_type = other DNA
atgcaccatcatcatcatcatggcggtagcggcatgttaccgttgttcgaacctaaaggtcgcgtgcttctggttgatggccatcatctcgcgtatcgtaacttctttgccctgaaaggattaaccaccagccgtggcgagccggtacagggtgtctacggctttgcaaagtcgctcctgaaagctctgaaagaagacggtgatgtggtgattgttgtctttgatgcgaaagcgccaagttttcgccacgaagcgtacgaagcttacaaagccgggcgtgctccaacgccggaagactttcctcgccaattggcgcttatgaaggaattagtggatttgcttggcctcgaacgcttggaagttcccggtttcgaggcagacgacgtattagcgactctcgcaaagaaagccgaacgtgagggctatgaagtccagatcttgacagcagatcgcgatcttttccagcttttatctccgcgcatctcggtgttacacccggaagggcatcgtatcaccccggaatggctctgggagaaatatggtttgcgtcccgaacaatgggtggattttcgcgccttagcaggcgatccgagcgacaatattccgggagttaaaggtatcggcgagaagacggcgctcaagctccttaaagaatgggggtcgttggagaacttgcttaagaatttagatcaggtcaaaccagagtcagtgcgtgagaagattcttgcacacctcgaagacctcaaattaagccgcgaattgtcccgtgtacgcaccgatttgccgctcgaagttgatttccgtggccgccgcgaacctgactgggagggtcttaaagcgtttttagagcgtcttgaatttggttcgctcttgcatgaattcggccttttagaaagcactttaccagccgaagaagcaccttggccaccgcccgaaggcgcgtttttaggttaccgtttgagtcgcccggaaccgatgtgggccgaattattggctcttgcagcgtctgcccagggacgtgtgtatcgcgcggaagaccctcatggtgcgctccgcggcctcaaagaagtccgtggactccttgccaaagacttagctgttgttgcattgcgcgaaggtcttgatttacctccgactgatgatccaatgcttcttgcgtacctcttggacccgtcaaacacgacgcccgaaggcgtagcccgtcgttacggcggcgagtggaccgaagatgcaggcgagcgcgcgttattggccgaacgtttgcacgccaatttattaggacgtttgcaaggcgaggaacgtctcctctggctttacgaagaagtggagaaaccattgagtcgcgtgctcgcgcatatggaagctaccggtgtcaaattagacgtggcgtatttggaggcactcagccttgaagttgctgccgaaatgcgccgcttggaggaagaagtattccgtttagcaggccactccttttatcttaattctcgcgatcagttagaacgtgtgttgttcgatgaacttggtctccctcctatcggcaagacagagaagaccggtaaacgtagcacttcagcggcggttttagaagctcttcgcgaagtccatcccattgtggacaagatcttgcagtaccgcgaactcgcgaaattgaaaggcacctatattgaccctcttccggcattagtccacccgaaaacgggacgcctccatacccgcttcaaccaaacagccacggcgaccggtcgtttgtcctcctctgatccaaaccttcagaatattccagtacgtaccccattgggccagaagatccgccgcgcgtttgtagctgaggagggttggcgtttagtggccctcgattatagccaaattgaattacgtgtccttgcccatctttctggcgatgagaacctcatccgcgtgtttcaggaaggcaaagacattcacactcaaacggcaagctggatgtttggattatcagctgaagcgatcgatcctttgatgcgtcgtgcagcgaagaccatcaatttcggtgttctctacggtatgagtgcccatcgtttgtcgcaggaattaggcattccctatgaagaagctgcggcgttcattcagcgctactttcaaagctatcccaaagttaaagcatggatcgagaagactctcgaagaaggccgcacacgtggttacgtagagaccttatttggacgtcgccgctatgttcccgatttaaacgctcgcgtgaaatctgtccgtgaagccgccgaacgcatggcgttcaacatgcctgtacagggcacggcagctgacctcatgaaacttgcaatggtgcgcctttttccacaattgcgtgaagttggtgcccgcatgctcttgcaggtccacgatgaactcttgttagaagcgccaaaagagcgtgcggaagaggtggcagccctcgcgaaagaggttatggaaggcgtgtggcccttagcggtgcctcttgaagtcgaagttggtattggcgaggattggttggctgccaaaggataatga

SEQ ID NO: 1878 - protein, 841 aa, synthetic construct
  REGION 1..841: note = Variant of DNA polymerase I from Thermus sp. strain 2.9
MHHHHHHGGSGMLPLFEPKGRVLLVDGHHLAYRNFFALKGLTTSRGEPVQGVYGFAKSLLKALKEDGDVVIVVFDAKAPSFRHEAYEAYKAGRAPTPEDFPRQLALMKELVDLLGLERLEVPGFEADDVLATLAKKAEREGYEVQILTADRDLFQLLSPRISVLHPEGHRITPEWLWEKYGLRPEQWVDFRALAGDPSDNIPGVKGIGEKTALKLLKEWGSLENLLKNLDQVKPESVREKILAHLEDLKLSRELSRVRTDLPLEVDFRGRREPDWEGLKAFLERLEFGSLLHEFGLLESTLPAEEAPWPPPEGAFLGYRLSRPEPMWAELLALAASAQGRVYRAEDPHGALRGLKEVRGLLAKDLAVVALREGLDLPPTDDPMLLAYLLDPSNTTPEGVARRYGGEWTEDAGERALLAERLHANLLGRLQGEERLLWLYEEVEKPLSRVLAHMEATGVKLDVAYLEALSLEVAAEMRRLEEEVFRLAGHSFYLNSRDQLERVLFDELGLPPIGKTEKTGKRSTSAAVLEALREVHPIVDKILQYRELAKLKGTYIDPLPALVHPKTGRLHTRFNQTATATGRLSSSDPNLQNIPVRTPLGQKIRRAFVAEEGWRLVALDYSQIELRVLAHLSGDENLIRVFQEGKDIHTQTASWMFGLSAEAIDPLMRRAAKTINFGVLYGMSAHRLSQELGIPYEEAAAFIQRYFQSYPKVKAWIEKTLEEGRTRGYVETLFGRRRYVPDLNARVKSVREAAERMAFNMPVQGTAADLMKLAMVRLFPQLREVGARMLLQVHDELLLEAPKERAEEVAALAKEVMEGVWPLAVPLEVEVGIGEDWLAAKG

SEQ ID NO: 1879 - DNA, 2529 bp, synthetic construct
  misc_feature 1..2529: note = Variant of DNA polymerase I from Thermus sp. strain 2.9
  source 1..2529: mol_type = other DNA
atgcaccatcatcatcatcatggcggtagcggcatgttaccgttgttcgaacctaaaggtcgcgtgcttctggttgatggccatcatctcgcgtatcgtaacttctttgccctgaaatcgttaaccaccagccgtggcgagccggtacagggtgtctacggctttgcaaagtcgctcctgaaagctctgaaagaagacggtgatgtggtgattgttgtctttgatgcgaaagcgccaagttttcgccacgaagcgtacgaagcttacaaagccgggcgtgctccaacgccggaagactttcctcgccaattggcgcttatgaaggaattagtggatttgcttggcctcgaacgcttggaagttcccggtttcgaggcagacgacgtattagcgactctcgcaaagaaagccgaacgtgagggctatgaagtccagatcttgacagcagatcgcgatcttttccagcttttatctccgcgcatctcggtgttacacccggaagggcatcgtatcaccccggaatggctctgggagaaatatggtttgcgtcccgaacaatgggtggattttcgcgccttagcaggcgatccgagcgacaatattccgggagttaaaggtatcggcgagaagacggcgctcaagctccttaaagaatgggggtcgttggagaacttgcttaagaatttagatcaggtcaaaccagagtcagtgcgtgagaagattcttgcacacctcgaagacctcaaattaagccgcgaattgtcccgtgtacgcaccgatttgccgctcgaagttgatttccgtggccgccgcgaacctgactgggagggtcttaaagcgtttttagagcgtcttgaatttggttcgctcttgcatgaattcggccttttagaaagcccgttaccagccgaagaagcaccttggccaccgcccgaaggcgcgtttttaggttaccgtttgagtcgcccggaaccgatgtgggccgaattattggctcttgcagcgtctgcccagggacgtgtgtatcgcgcggaagaccctcatggtgcgctccgcggcctcaaagaagtccgtggactccttgccaaagacttagctgttgttgcattgcgcgaaggtcttgatttacctccgactgatgatccaatgcttcttgcgtacctcttggacccgtcaaacacgacgcccgaaggcgtagcccgtcgttacggcggcgagtggaccgaagatgcaggcgagcgcgcgttattggccgaacgtttgcacgccaatttattaggacgtttgcaaggcgaggaacgtctcctctggctttacgaagaagtggagaaaccattgagtcgcgtgctcgcgcatatggaagctaccggtgtcaaattagacgtggcgtatttggaggcactcagccttgaagttgctgccgaaatgcgccgcttggaggaagaagtattccgtttagcaggccactccttttatcttaattctcgcgatcagttagaacgtgtgttgttcgatgaacttggtctccctcctatcggcaagacagagaagaccggtaaacgtagcacttcagcggcggttttagaagctcttcgcgaagtccatcccattgtggacaagatcttgcagtaccgcgaactcgcgaaattgaaaggcacctatattgaccctcttccggcattagtccacccgaaaacgggacgcctccatacccgcttcaaccaaacagccacggcgaccggtcgtttgtcctcctctgatccaaaccttcagaatattccagtacgtaccccattgggccagaagatccgccgcgcgtttgtagctgaggagggttggcgtttagtggccctcgattatagccaaattgaattacgtgtccttgcccatctttctggcgatgagaacctcatccgcgtgtttcaggaaggcaaagacattcacactcaaacggcaagctggatgtttggattatcagctgaagcgatcgatcctttgatgcgtcgtgcagcgaagaccatcaatttcggtgttctctacggtatgagtgcccatcgtttgtcgcaggaattaggcattccctatgaagaagctgcggcgttcattcagcgctactttcaaagctatcccaaagttaaagcatggatcgagaagactctcgaagaaggccgcacacgtggttacgtagagaccttatttggacgtcgccgctatgttcccgatttaaacgctcgcgtgaaatctgtccgtgaagccgccgaacgcatggcgttcaacatgcctgtacagggcacggcagctgacctcatgaaacttgcaatggtgcgcctttttccacaattgcgtgaagttggtgcccgcatgctcttgcaggtccacgatgaactcttgttagaagcgccaaaagagcgtgcggaagaggtggcagccctcgcgaaagaggttatggaaggcgtgtggcccttagcggtgcctcttgaagtcgaagttggtattggcgaggattggttggctgccaaaggataatga

SEQ ID NO: 1880 - protein, 841 aa, synthetic construct
  REGION 1..841: note = Variant of DNA polymerase I from Thermus sp. strain 2.9
MHHHHHHGGSGMLPLFEPKGRVLLVDGHHLAYRNFFALKSLTTSRGEPVQGVYGFAKSLLKALKEDGDVVIVVFDAKAPSFRHEAYEAYKAGRAPTPEDFPRQLALMKELVDLLGLERLEVPGFEADDVLATLAKKAEREGYEVQILTADRDLFQLLSPRISVLHPEGHRITPEWLWEKYGLRPEQWVDFRALAGDPSDNIPGVKGIGEKTALKLLKEWGSLENLLKNLDQVKPESVREKILAHLEDLKLSRELSRVRTDLPLEVDFRGRREPDWEGLKAFLERLEFGSLLHEFGLLESPLPAEEAPWPPPEGAFLGYRLSRPEPMWAELLALAASAQGRVYRAEDPHGALRGLKEVRGLLAKDLAVVALREGLDLPPTDDPMLLAYLLDPSNTTPEGVARRYGGEWTEDAGERALLAERLHANLLGRLQGEERLLWLYEEVEKPLSRVLAHMEATGVKLDVAYLEALSLEVAAEMRRLEEEVFRLAGHSFYLNSRDQLERVLFDELGLPPIGKTEKTGKRSTSAAVLEALREVHPIVDKILQYRELAKLKGTYIDPLPALVHPKTGRLHTRFNQTATATGRLSSSDPNLQNIPVRTPLGQKIRRAFVAEEGWRLVALDYSQIELRVLAHLSGDENLIRVFQEGKDIHTQTASWMFGLSAEAIDPLMRRAAKTINFGVLYGMSAHRLSQELGIPYEEAAAFIQRYFQSYPKVKAWIEKTLEEGRTRGYVETLFGRRRYVPDLNARVKSVREAAERMAFNMPVQGTAADLMKLAMVRLFPQLREVGARMLLQVHDELLLEAPKERAEEVAALAKEVMEGVWPLAVPLEVEVGIGEDWLAAKG

SEQ ID NO: 1881 - DNA, 2529 bp, synthetic construct
  misc_feature 1..2529: note = Variant of DNA polymerase I from Thermus sp. strain 2.9
  source 1..2529: mol_type = other DNA
atgcaccatcattggcatcatggcggtagcggcatgttaccgttgttcgaacctaaaggtcgcgtgcttctggttgatggccatcatctcgcgtatcgtaacttctttgccctgaaaggattaaccaccagccgtggcgagccggtacagggtgtctacggctttgcaaagtcgctcctgaaagctctgaaagaagacggtgatgtggtgattgttgtctttgatgcgaaagcgccaagttttcgccacgaagcgtacgaagcttacaaagccgggcgtgctccaacgccggaagactttcctcgccaattggcgcttatgaaggaattagtggatttgcttggcctcgaacgcttggaagttcccggtttcgaggcagacgacgtattagcgactctcgcaaagaaagccgaacgtgagggctatgaagtccagatcttgacagcagatcgcgatcttttccagcttttatctccgcgcatctcggtgttacacccggaagggcatcgtatcaccccggaatggctctgggagaaatatggtttgcgtcccgaacaatgggtggattttcgcgccttagcaggcgatccgagcgacaatattccgggagttaaaggtatcggcgagaagacggcgctcaagctccttaaagaatgggggtcgttggagaacttgcttaagaatttagatcaggtcaaaccagagtcagtgcgtgagaagattcttgcacacctcgaagacctcaaattaagccgcgaattgtcccgtgtacgcaccgatttgccgctcgaagttgatttccgtggccgccgcgaacctgactgggagggtcttaaagcgtttttagagcgtcttgaatttggttcgctcttgcatgaattcggccttttagaaagcccgttaccagccgaagaagcaccttggccaccgcccgaaggcgcgtttttaggttaccgtttgagtcgcccggaaccgatgtgggccgaattattggctcttgcagcgtctgcccagggacgtgtgtatcgcgcggaagaccctcatggtgcgctccgcggcctcaaagaagtccgtggactccttgccaaagacttagctgttgttgcattgcgcgaaggtcttgatttacctccgactgatgatccaatgcttcttgcgtacctcttggacccgtcaaacacgacgcccgaaggcgtagcccgtcgttacggcggcgagtggaccgaagatgcaggcgagcgcgcgttattggccgaacgtttgcacgccaatttattaggacgtttgcaaggcgaggaacgtctcctctggctttacgaagaagtggagaaaccattgagtcgcgtgctcgcgcatatggaagctaccggtgtcaaattagacgtggcgtatttggaggcactcagccttgaagttgctgccgaaatgcgccgcttggaggaagaagtattccgtttagcaggccactccttttatcttaattctcgcgatcagttagaacgtgtgttgttcgatgaacttggtctccctcctatcggcaagacagagaagaccggtaaacgtagcacttcagcggcggttttagaagctcttcgcgaagtccatcccattgtggacaagatcttgcagtaccgcgaactcgcgaaattgaaaggcacctatattgaccctcttccggcattagtccacccgaaaacgggacgcctccatacccgcttcaaccaaacagccacggcgaccggtcgtttgtcctcctctgatccaaaccttcagaatattccagtacgtaccccattgggccagaagatccgccgcgcgtttgtagctgaggagggttggcgtttagtggccctcgattatagccaaattgaattacgtgtccttgcccatctttctggcgatgagaacctcatccgcgtgtttcaggaaggcaaagacattcacactcaaacggcaagctggatgtttggattatcagctgaagcgatcgatcctttgatgcgtcgtgcagcgaagaccatcaatttcggtgttctctacggtatgagtgcccatcgtttgtcgcaggaattaggcattccctatgaagaagctgcggcgttcattcagcgctactttcaaagctatcccaaagttaaagcatggatcgagaagactctcgaagaaggccgcacacgtggttacgtagagaccttatttggacgtcgccgctatgttcccgatttaaacgctcgcgtgaaatctgtccgtgaagccgccgaacgcatggcgttcaacatgcctgtacagggcacggcagctgacctcatgaaacttgcaatggtgcgcctttttccacaattgcgtgaagttggtgcccgcatgctcttgcaggtccacgatgaactcttgttagaagcgccaaaagagcgtgcggaagaggtggcagccctcgcgaaagaggttatggaaggcgtgtggcccttagcggtgcctcttgaagtcgaagttggtattggcgaggattggttggctgccaaaggataatga

SEQ ID NO: 1882 - protein, 841 aa, synthetic construct
  REGION 1..841: note = Variant of DNA polymerase I from Thermus sp. strain 2.9
MHHHWHHGGSGMLPLFEPKGRVLLVDGHHLAYRNFFALKGLTTSRGEPVQGVYGFAKSLLKALKEDGDVVIVVFDAKAPSFRHEAYEAYKAGRAPTPEDFPRQLALMKELVDLLGLERLEVPGFEADDVLATLAKKAEREGYEVQILTADRDLFQLLSPRISVLHPEGHRITPEWLWEKYGLRPEQWVDFRALAGDPSDNIPGVKGIGEKTALKLLKEWGSLENLLKNLDQVKPESVREKILAHLEDLKLSRELSRVRTDLPLEVDFRGRREPDWEGLKAFLERLEFGSLLHEFGLLESPLPAEEAPWPPPEGAFLGYRLSRPEPMWAELLALAASAQGRVYRAEDPHGALRGLKEVRGLLAKDLAVVALREGLDLPPTDDPMLLAYLLDPSNTTPEGVARRYGGEWTEDAGERALLAERLHANLLGRLQGEERLLWLYEEVEKPLSRVLAHMEATGVKLDVAYLEALSLEVAAEMRRLEEEVFRLAGHSFYLNSRDQLERVLFDELGLPPIGKTEKTGKRSTSAAVLEALREVHPIVDKILQYRELAKLKGTYIDPLPALVHPKTGRLHTRFNQTATATGRLSSSDPNLQNIPVRTPLGQKIRRAFVAEEGWRLVALDYSQIELRVLAHLSGDENLIRVFQEGKDIHTQTASWMFGLSAEAIDPLMRRAAKTINFGVLYGMSAHRLSQELGIPYEEAAAFIQRYFQSYPKVKAWIEKTLEEGRTRGYVETLFGRRRYVPDLNARVKSVREAAERMAFNMPVQGTAADLMKLAMVRLFPQLREVGARMLLQVHDELLLEAPKERAEEVAALAKEVMEGVWPLAVPLEVEVGIGEDWLAAKG

SEQ ID NO: 1883 - DNA, 2529 bp, synthetic construct
  misc_feature 1..2529: note = Variant of DNA polymerase I from Thermus sp. strain 2.9
  source 1..2529: mol_type = other DNA
atgcaccatcatcatcatcatggcggtagcggcatgttaccgttgttcgaacctaaaggtcgcgtgcttctggttgatggccatcatctcgcgtatcgtaacttctttgccctgaaaggattaaccaccagccgtggcgagccggtacagggtgtctacggctttgcaaagtcgctcctgaaagctctgaaagaagacggtgatgtggtgattgttgtctttgatgcgaaagcgccaagttttcgccacgaagcgtacgaagcttacaaagccgggcgtgctccaacgccggaagactttcctcgccaattggcgcttatgaaggaattagtggatttgcttggcctcgaacgcttggaagttcccggtttcgaggcagacgacgtattagcgactctcgcaaagaaagccgaacgtgagggctatgaagtccagatcttgacagcagatcgcgatcttttccagcttttatctccgcgcatctcggtgttacacccggaagggcatcgtatcaccccggaatggctctgggagaaatatggtttgcgtcccgaacaatgggtggattttcgcgccttagcaggcgatccgagcgacaatattccgggagttaaaggtatcggcgagaagacggcgctcaagctccttaaagaatgggggtcgttggagaacttgcttaagaatttagatcaggtcaaaccagagtcagtgcgtgagaagattcttgcacacctcgaagacctcaaattaagccgcgaattgtcccgtgtacgcaccgatttgccgctcgaagttgatttccgtggccgccgcgaacctgactgggagggtcttaaagcgtttttagagcgtcttgaatttggttcgctcttgcatgaattcggccttttagaaagcccgttaccagccgaagaagcaccttggccaccgcccgaaggcgcgtttttaggttaccgtttgagtcgcccggaaccgatgtgggccgaattattggctcttgcagcgtctgcccagggacgtgtgtatcgcgcggaagaccctcatggtgcgctccgcggcctcaaagaagtccgtggactccttgccaaagacttagctgttgttgcattgcgcgaaggtcttgatttacctccgactgatgatccaatgcttcttgcgtacctcttggacccgtcaaacacgacgcccgaaggcgtagcccgtcgttacggcggcgagtggaccgaagatgcaggcgagcgcgcgttattggccgaacgtttgcacgccaatttattaggacgtttgcaaggcgaggaacgtctcctctggctttacgaagaagtggagaaaccattgagtcgcgtgctcgcgcatatggaagctaccggtgtcaaattagacgtggcgtatttggaggcactcagccttgaagttgctgccgaaatgcgccgcttggaggaagaagtattccgtttagcaggccactccttttatcttaattctcgcgatcagttagaacgtgtgttgttcgatgaacttggtctccctcctatcggcaagacagagaagaccggtaaacgtagcacttcagcggcggttttagaagctcttcgcgaagtccatcccattgtggacaagatcttgcagtaccgcgaactcgcgaaattgaaaggcacctatattgaccctcttccggcattagtccacccgaaaacgggacgcctccatacccgcttcaaccaaacagccacggcgaccggtcgtttgtcctcctctgatccaaaccttcagagtattccagtacgtaccccattgggccagaagatccgccgcgcgtttgtagctgaggagggttggcgtttagtggccctcgattatagccaaattgaattacgtgtccttgcccatctttctggcgatgagaacctcatccgcgtgtttcaggaaggcaaagacattcacactcaaacggcaagctggatgtttggattatcagctgaagcgatcgatcctttgatgcgtcgtgcagcgaagaccatcaatttcggtgttctctacggtatgagtgcccatcgtttgtcgcaggaattaggcattccctatgaagaagctgcggcgttcattcagcgctactttcaaagctatcccaaagttaaagcatggatcgagaagactctcgaagaaggccgcacacgtggttacgtagagaccttatttggacgtcgccgctatgttcccgatttaaacgctcgcgtgaaatctgtccgtgaagccgccgaacgcatggcgttcaacatgcctgtacagggcacggcagctgacctcatgaaacttgcaatggtgcgcctttttccacaattgcgtgaagttggtgcccgcatgctcttgcaggtccacgatgaactcttgttagaagcgccaaaagagcgtgcggaagaggtggcagccctcgcgaaagaggttatggaaggcgtgtggcccttagcggtgcctcttgaagtcgaagttggtattggcgaggattggttggctgccaaaggataatga

SEQ ID NO: 1884 - protein, 841 aa, synthetic construct
  REGION 1..841: note = Variant of DNA polymerase I from Thermus sp. strain 2.9
MHHHHHHGGSGMLPLFEPKGRVLLVDGHHLAYRNFFALKGLTTSRGEPVQGVYGFAKSLLKALKEDGDVVIVVFDAKAPSFRHEAYEAYKAGRAPTPEDFPRQLALMKELVDLLGLERLEVPGFEADDVLATLAKKAEREGYEVQILTADRDLFQLLSPRISVLHPEGHRITPEWLWEKYGLRPEQWVDFRALAGDPSDNIPGVKGIGEKTALKLLKEWGSLENLLKNLDQVKPESVREKILAHLEDLKLSRELSRVRTDLPLEVDFRGRREPDWEGLKAFLERLEFGSLLHEFGLLESPLPAEEAPWPPPEGAFLGYRLSRPEPMWAELLALAASAQGRVYRAEDPHGALRGLKEVRGLLAKDLAVVALREGLDLPPTDDPMLLAYLLDPSNTTPEGVARRYGGEWTEDAGERALLAERLHANLLGRLQGEERLLWLYEEVEKPLSRVLAHMEATGVKLDVAYLEALSLEVAAEMRRLEEEVFRLAGHSFYLNSRDQLERVLFDELGLPPIGKTEKTGKRSTSAAVLEALREVHPIVDKILQYRELAKLKGTYIDPLPALVHPKTGRLHTRFNQTATATGRLSSSDPNLQSIPVRTPLGQKIRRAFVAEEGWRLVALDYSQIELRVLAHLSGDENLIRVFQEGKDIHTQTASWMFGLSAEAIDPLMRRAAKTINFGVLYGMSAHRLSQELGIPYEEAAAFIQRYFQSYPKVKAWIEKTLEEGRTRGYVETLFGRRRYVPDLNARVKSVREAAERMAFNMPVQGTAADLMKLAMVRLFPQLREVGARMLLQVHDELLLEAPKERAEEVAALAKEVMEGVWPLAVPLEVEVGIGEDWLAAKG

SEQ ID NO: 1885 - DNA, 2529 bp, synthetic construct
  misc_feature 1..2529: note = Variant of DNA polymerase I from Thermus sp. strain 2.9
  source 1..2529: mol_type = other DNA
atgcaccatcatcatcatcatggcggtagcggcatgttaccgttgttcgaacctaaaggtcgcgtgcttctggttgatggccatcatctcgcgtatcgtaacttctttgccctgaaaggattaaccaccagccgtggcgagccggtacagggtgtctacggctttgcaaagtcgctcctgaaagctctgaaagaagacggtgatgtggtgattgttgtctttgatgcgaaagcgccaagttttcgccacgaagcgtacgaagcttacaaagccgggcgtgctccaacgccggaagactttcctcgccaattggcgcttatgaaggaattagtggatttgcttggcctcgaacgcttggaagttcccggtttcgaggcagacgacgtattagcgactctcgcaaagaaagccgaacgtgagggctatgaagtccagatcttgacagcagatcgcgatcttttccagcttttatctccgcgcatctcggtgttacacccggaagggcatcgtatcaccccggaatggctctgggagaaatatggtttgcgtcccgaacaatgggtggattttcgcgccttagcaggcgatccgagcgacaatattccgggagttaaaggtatcggcgagaagacggcgctcaagctccttaaagaatgggggtcgttggagaacttgcttaagaatttagatcaggtcaaaccagagtcagtgcgtgagaagattcttgcacacctcgaagacctcaaattaagccgcgaattgtcccgtgtacgcaccgatttgccgctcgaagttgatttccgtggccgccgcgaacctgactgggagggtcttaaagcgtttttagagcgtcttgaatttggttcgctcttgcatgaattcggccttttagaaagcccgttaccagccgaagaagcaccttggccaccgcccgaaggcgcgtttttaggttaccgtttgagtcgcccggaaccgatgtgggccgaattattggctcttgcagcgtctgcccagggacgtgtgtatcgcgcggaagaccctcatggtgcgctccgcggcctcaaagaagtccgtggactccttgccaaagacttagctgttgttgcattgcgcgaaggtcttgatttacctccgactgatgatccaatgcttcttgcgtacctcttggacccgtcaaacacgacgcccgaaggcgtagcccgtcgttacggcggcgagtggaccgaagatgcaggcgagcgcgcgttattggccgaacgtttgcacgccaatttattaggacgtttgcaaggcgaggaacgtctcctctggctttacgaagaagtggagaaaccattgagtcgcgtgctcgcgcatatggaagctaccggtgtcaaattagacgtggcgtatttggaggcactcagccttgaagttgctgccgaaatgcgccgcttggaggaagaagtattccgtttagcaggccactccttttatcttaattctcgcgatcagttagaacgtgtgttgttcgatgaacttggtctccctcctatcggcaagacagagaagaccggtaaacgtagcacttcagcggcggttttagaagctcttcgcgaagtccatcccattgtggacaagatcttgcagtaccgcgaactcgcgaaattgaaaggcacctatattgaccctcttccggcattagtccacccgaaaacgggacgcctccatacccgcttcaaccaaacagccacggcgaccggtcgtttgtcctcctctgatccaaaccttcagaatattccagtacgtaccccattgggccagaagatccgccgcgcgtttgtagctgaggagggttggcgtttagtggccctcgattatagccaaattgaattacgtgtccttgcccatctttctggcgatgagaacctcatccgcgtgtttcaggaaggcaaagacattcacactcaaacggcaagctggatgtttggattatcagctgaagcgatcgatcctttgatgcgtcgtgcagcgaagaccatcaatttcggtgttctctacggtatgagtgcccatcgtttgtcgcaggaattaggcattccctatgaagaagctgcggcgttcattcagcgctactttcaaagctatcccaaagttaaagcatggatcgagaagactctcgaagaaggccgcacacgtggttacgtagagaccttatttggacgtcgccgctatgttcccgatttaaacgctcgcgtgaaatctgtccgtgaagccgccgaacgcatggcgttcaacatgcctgtacagggcacggcagctgacctcatgaaacttgcaatggtgcgcctttttccacaattgcgtgaagttggtgcccgcatgctcttgcaggtccacgatgaactcttgttagaagcgccaaaagagcgtgcggaagaggtggcagccctcgcgaaaattgttatggaaggcgtgtggcccttagcggtgcctcttgaagtcgaagttggtattggcgaggattggttggctgccaaaggataatga

SEQ ID NO: 1886 - protein, 841 aa, synthetic construct
  REGION 1..841: note = Variant of DNA polymerase I from Thermus sp. strain 2.9
MHHHHHHGGSGMLPLFEPKGRVLLVDGHHLAYRNFFALKGLTTSRGEPVQGVYGFAKSLLKALKEDGDVVIVVFDAKAPSFRHEAYEAYKAGRAPTPEDFPRQLALMKELVDLLGLERLEVPGFEADDVLATLAKKAEREGYEVQILTADRDLFQLLSPRISVLHPEGHRITPEWLWEKYGLRPEQWVDFRALAGDPSDNIPGVKGIGEKTALKLLKEWGSLENLLKNLDQVKPESVREKILAHLEDLKLSRELSRVRTDLPLEVDFRGRREPDWEGLKAFLERLEFGSLLHEFGLLESPLPAEEAPWPPPEGAFLGYRLSRPEPMWAELLALAASAQGRVYRAEDPHGALRGLKEVRGLLAKDLAVVALREGLDLPPTDDPMLLAYLLDPSNTTPEGVARRYGGEWTEDAGERALLAERLHANLLGRLQGEERLLWLYEEVEKPLSRVLAHMEATGVKLDVAYLEALSLEVAAEMRRLEEEVFRLAGHSFYLNSRDQLERVLFDELGLPPIGKTEKTGKRSTSAAVLEALREVHPIVDKILQYRELAKLKGTYIDPLPALVHPKTGRLHTRFNQTATATGRLSSSDPNLQNIPVRTPLGQKIRRAFVAEEGWRLVALDYSQIELRVLAHLSGDENLIRVFQEGKDIHTQTASWMFGLSAEAIDPLMRRAAKTINFGVLYGMSAHRLSQELGIPYEEAAAFIQRYFQSYPKVKAWIEKTLEEGRTRGYVETLFGRRRYVPDLNARVKSVREAAERMAFNMPVQGTAADLMKLAMVRLFPQLREVGARMLLQVHDELLLEAPKERAEEVAALAKIVMEGVWPLAVPLEVEVGIGEDWLAAKG

SEQ ID NO: 1887 - DNA, 2529 bp, synthetic construct
  misc_feature 1..2529: note = Variant of DNA polymerase I from Thermus sp. strain 2.9
  source 1..2529: mol_type = other DNA
atgcaccatcatcatcatcatggcggtagcggcatgttaccgttgttcgaacctaaaggtcgcgtgcttctggttgatggccatcatctcgcgtatcgtaacttctttgccctgaaaggattaaccaccagccgtggcgagccggtacagggtgtctacggctttgcaaagtcgctcctgaaagctctgaaagaagacggtgatgtggtgattgttgtctttgatgcgaaagcgccaagttttcgccacgaagcgtacgaagcttacaaagccgggcgtgctccaacgccggaagactttcctcgccaattggcgcttatgaaggaattagtggatttgcttggcctcgaacgcttggaagttcccggtttcgaggcagacgacgtattagcgactctcgcaaagaaagccgaacgtgagggctatgaagtccagatcttgacagcagatcgcgatcttttccagcttttatctccgcgcatctcggtgttacacccggaagggcatcgtatcaccccggaatggctctgggagaaatatggtttgcgtcccgaacaatgggtggattttcgcgccttagcaggcgatccgagcgacaatattccgggagttaaaggtatcggcgagaagacggcgctcaagctccttaaagaatgggggtcgttggagaacttgcttaagaatttagatcaggtcaaaccagagtcagtgcgtgagaagattcttgcacacctcgaagacctcaaattaagccgcgaattgtcccgtgtacgcaccgatttgccgctcgaagttgatttccgtggccgccgcgaacctgactgggagggtcttaaagcgtttttagagcgtcttgaatttggttcgctcttgcatgaattcggccttttagaaagcccgttaccagccgaagaagcaccttggccaccgcccgaaggcgcgtttttaggttaccgtttgagtcgcccggaaccgatgtgggccgaattattggctcttgcagcgtctgcccagggacgtgtgtatcgcgcggaagaccctcatggtgcgctccgcggcctcaaagaagtccgtggactccttgccaaagacttagctgttgttgcattgcgcgaaggtcttgatttacctccgactgatgatccaatgcttcttgcgtacctcttggacccgtcaaacacgacgcccgaaggcgtagcccgtcgttacggcggcgagtggaccgaagatgcaggcgagcgcgcgttattggccgaacgtttgcacgccaatttattaggacgtttgcaaggcgaggaacgtctcctctggctttacgaagaagtggagaaaccattgagtcgcgtgctcgcgcatatggaagctaccggtgtcaaattagacgtggcgtatttggaggcactcagccttgaagttgctgccgaaatgcgccgcttggaggaagaagtattccgtttagcaggccactccttttatcttaattctcgcgatcagttagaacgtgtgttgttcgatgaacttggtctccctcctatcggcaagacagagaagaccggtaaacgtagcacttcagcggcggttttagaagctcttcgcgaagtccatcccattgtggacaagatcttgcagtaccgcgaactcgcgaaattgaaaggcacctatattgaccctcttccggcattagtccacccgaaaacgggacgcctccatacccgcttcaaccaaacagccacggcgaccggtcgtttgtcctcctctgatccaaaccttcagaatattccagtacgtaccccattgggccagaagatccgccgcgcgtttgtagctgaggagggttggcgtttagtggccctcgattatagccaaattgaattacgtgtccttgcccatctttctggcgatgagaacctcatccgcgtgtttcaggaaggcaaagacattcacactcaaacggcaagctggatgtttggattatcagctgaagcgatcgatcctttgatgcgtcgtgcagcgaagaccatcaatttcggtgttctctacggtatgagtgcccatcgtttgtcgcaggaattaggcattccctatgaagaagctgcggcgttcattcagcgctactttcaaagctatcccaaagttaaagcatggatcgagagtactctcgaagaaggccgcacacgtggttacgtagagaccttatttggacgtcgccgctatgttcccgatttaaacgctcgcgtgaaatctgtccgtgaagccgccgaacgcatggcgttcaacatgcctgtacagggcacggcagctgacctcatgaaacttgcaatggtgcgcctttttccacaattgcgtgaagttggtgcccgcatgctcttgcaggtccacgatgaactcttgttagaagcgccaaaagagcgtgcggaagaggtggcagccctcgcgaaagaggttatggaaggcgtgtggcccttagcggtgcctcttgaagtcgaagttggtattggcgaggattggttggctgccaaaggataatga

SEQ ID NO: 1888 - protein, 841 aa, synthetic construct
  REGION 1..841: note = Variant of DNA polymerase I from Thermus sp. strain 2.9
MHHHHHHGGSGMLPLFEPKGRVLLVDGHHLAYRNFFALKGLTTSRGEPVQGVYGFAKSLLKALKEDGDVVIVVFDAKAPSFRHEAYEAYKAGRAPTPEDFPRQLALMKELVDLLGLERLEVPGFEADDVLATLAKKAEREGYEVQILTADRDLFQLLSPRISVLHPEGHRITPEWLWEKYGLRPEQWVDFRALAGDPSDNIPGVKGIGEKTALKLLKEWGSLENLLKNLDQVKPESVREKILAHLEDLKLSRELSRVRTDLPLEVDFRGRREPDWEGLKAFLERLEFGSLLHEFGLLESPLPAEEAPWPPPEGAFLGYRLSRPEPMWAELLALAASAQGRVYRAEDPHGALRGLKEVRGLLAKDLAVVALREGLDLPPTDDPMLLAYLLDPSNTTPEGVARRYGGEWTEDAGERALLAERLHANLLGRLQGEERLLWLYEEVEKPLSRVLAHMEATGVKLDVAYLEALSLEVAAEMRRLEEEVFRLAGHSFYLNSRDQLERVLFDELGLPPIGKTEKTGKRSTSAAVLEALREVHPIVDKILQYRELAKLKGTYIDPLPALVHPKTGRLHTRFNQTATATGRLSSSDPNLQNIPVRTPLGQKIRRAFVAEEGWRLVALDYSQIELRVLAHLSGDENLIRVFQEGKDIHTQTASWMFGLSAEAIDPLMRRAAKTINFGVLYGMSAHRLSQELGIPYEEAAAFIQRYFQSYPKVKAWIESTLEEGRTRGYVETLFGRRRYVPDLNARVKSVREAAERMAFNMPVQGTAADLMKLAMVRLFPQLREVGARMLLQVHDELLLEAPKERAEEVAALAKEVMEGVWPLAVPLEVEVGIGEDWLAAKG

SEQ ID NO: 1889 - DNA, 2529 bp, synthetic construct
  misc_feature 1..2529: note = Variant of DNA polymerase I from Thermus sp. strain 2.9
  source 1..2529: mol_type = other DNA
atgcaccatcatcatcatcatggcggtagcggcatgttaccgttgttcgaacctaaaggtcgcgtgcttctggttgatggccatcatctcgcgtatcgtaacttctttgccctgaaaggattaaccaccagccgtggcgagccggtacagggtgtctacggctttgcaaagtcgctcctgaaagctctgaaagaagacggtgatgtggtgattgttgtctttgatgcgaaagcgccaagttttcgccacgaagcgtacgaagcttacaaagccgggcgtgctccaacgccggaagactttcctcgccaattggcgcttatgaaggaattagtggatttgcttggcctcgaacgcttggaagttcccggtttcgaggcagacgacgtattagcgactctcgcaaagaaagccgaacgtgagggctatgaagtccagatcttgacagcagatcgcgatcttttccagcttttatctccgcgcatctcggtgttacacccggaagggcatcgtatcaccccggaatggctctgggagaaatatggtttgcgtcccgaacaatgggtggattttcgcgccttagcaggcgatccgagcgacaatattccgggagttaaaggtatcggcgagaagacggcgctcaagctccttaaagaatgggggtcgttggagaacttgcttaagaatttagatcaggtcaaaccagagtcagtgcgtgagaagattcttgcacacctcgaagacctcaaattaagccgcgaattgtcccgtgtacgcaccgatttgccgctcgaagttgatttccgtggccgccgcgaacctgactgggagggtcttaaagcgtttttagagcgtcttgaatttggttcgctcttgcatgaattcggccttttagaaagcccgttaccagccgaagaagcaccttggccaccgcccgaaggcgcgtttttaggttaccgtttgagtcgcccggaaccgatgtgggccgaattattggctcttgcagcgtctgcccagggacgtgtgtatcgcgcggaagaccctcatggtgcgctccgcggcctcaaagaagtccgtggactccttgccaaagacttagctgttgttgcattgcgcgaaggtcttgatttacctccgactgatgatccaatgcttcttgcgtacctcttggacccgtcaaacacgacgcccgaaggcgtagcccgtcgttacggcggcgagtggaccgaagatgcaggcgagcgcgcgttattggccgaacgtttgcacgccaatttattaggacgtttgcaaggcgaggaacgtctcctctggctttacgaagaagtggagaaaccattgagtcgcgtgctcgcgcatatggaagctaccggtgtcaaattagacgtggcgtatttggaggcactcagccttgaagttgctgccgaaatgcgccgcttggaggaagaagtattccgtttagcaggccactccttttatcttaattctcgcgatcagttagaacgtgtgttgttcgatgaacttggtctccctcctatcggcaagacagagaagaccggtaaacgtagcacttcagcggcggttttagaagctcttcgcgaagtccatcccattgtggacaagatcttgcagtaccgcgaactcgcgaaattgaaaggcacctatattgaccctcttccggcattagtccacccgaaaacgggacgcctccatacccgcttcaaccaaacagccacggcgaccggtcgtttgtcctcctctgatccaaaccttcagaatattccagtacgtaccccattgggccagaagatccgccgcgcgtttgtagctgaggagggttggcgtttagtggccctcgattatagccaaattgaattacgtgtccttgcccatctttctggcgatgagaacctcatccgcgtgtttcaggaaggcaaagacattcacactcaaacggcaagctggatgtttggattatcagctgaagcgatcgatcctttgatgcgtcgtgcagcgaagaccatcaatttcggtgttctctacggtatgagtgcccatcgtttgtcgcaggaattaggcattccctatgaagaagctgcggcgttcattcagcgctactttcaaagctatcccaaagttaaagcatggatcactaagactctcgaagaaggccgcacacgtggttacgtagagaccttatttggacgtcgccgctatgttcccgatttaaacgctcgcgtgaaatctgtccgtgaagccgccgaacgcatggcgttcaacatgcctgtacagggcacggcagctgacctcatgaaacttgcaatggtgcgcctttttccacaattgcgtgaagttggtgcccgcatgctcttgcaggtccacgatgaactcttgttagaagcgccaaaagagcgtgcggaagaggtggcagccctcgcgaaagaggttatggaaggcgtgtggcccttagcggtgcctcttgaagtcgaagttggtattggcgaggattggttggctgccaaaggataatga

SEQ ID NO: 1890 - protein, 841 aa, synthetic construct
  REGION 1..841: note = Variant of DNA polymerase I from Thermus sp. strain 2.9
MHHHHHHGGSGMLPLFEPKGRVLLVDGHHLAYRNFFALKGLTTSRGEPVQGVYGFAKSLLKALKEDGDVVIVVFDAKAPSFRHEAYEAYKAGRAPTPEDFPRQLALMKELVDLLGLERLEVPGFEADDVLATLAKKAEREGYEVQILTADRDLFQLLSPRISVLHPEGHRITPEWLWEKYGLRPEQWVDFRALAGDPSDNIPGVKGIGEKTALKLLKEWGSLENLLKNLDQVKPESVREKILAHLEDLKLSRELSRVRTDLPLEVDFRGRREPDWEGLKAFLERLEFGSLLHEFGLLESPLPAEEAPWPPPEGAFLGYRLSRPEPMWAELLALAASAQGRVYRAEDPHGALRGLKEVRGLLAKDLAVVALREGLDLPPTDDPMLLAYLLDPSNTTPEGVARRYGGEWTEDAGERALLAERLHANLLGRLQGEERLLWLYEEVEKPLSRVLAHMEATGVKLDVAYLEALSLEVAAEMRRLEEEVFRLAGHSFYLNSRDQLERVLFDELGLPPIGKTEKTGKRSTSAAVLEALREVHPIVDKILQYRELAKLKGTYIDPLPALVHPKTGRLHTRFNQTATATGRLSSSDPNLQNIPVRTPLGQKIRRAFVAEEGWRLVALDYSQIELRVLAHLSGDENLIRVFQEGKDIHTQTASWMFGLSAEAIDPLMRRAAKTINFGVLYGMSAHRLSQELGIPYEEAAAFIQRYFQSYPKVKAWITKTLEEGRTRGYVETLFGRRRYVPDLNARVKSVREAAERMAFNMPVQGTAADLMKLAMVRLFPQLREVGARMLLQVHDELLLEAPKERAEEVAALAKEVMEGVWPLAVPLEVEVGIGEDWLAAKG

SEQ ID NO: 1891 - DNA, 2529 bp, synthetic construct
  misc_feature 1..2529: note = Variant of DNA polymerase I from Thermus sp. strain 2.9
  source 1..2529: mol_type = other DNA
atgcaccatcatcatcatcatggcggtagcggcatgttaccgttgttcgaacctaaaggtcgcgtgcttctggttgatggccatcatctcgcgtatcgtaacttctttgccctgaaaggattaaccaccagccgtggcgagccggtacagggtgtctacggctttgcaaagtcgctcctgaaagctctgaaagaagacggtgatgtggtgattgttgtctttgatgcgaaagcgccaagttttcgccacgaagcgtacgaagcttacaaagccgggcgtgctccaacgccggaagactttcctcgccaattggcgcttatgaaggaattagtggatttgcttggcctcgaacgcttggaagttcccggtttcgaggcagacgacgtattagcgactctcgcaaagaaagccgaacgtgagggctatgaagtccagatcttgacagcagatcgcgatcttttccagcttttatctccgcgcatctcggtgttacacccggaagggcatcgtatcaccccggaatggctctgggagaaatatggtttgcgtcccgaacaatgggtggattttcgcgccttagcaggcgatccgagcgacaatattccgggagttaaaggtatcggcgagaagacggcgctcaagctccttaaagaatgggggtcgttggagaacttgcttaagaatttagatcaggtcaaaccagagtcagtgcgtgagaagattcttgcacacctcgaagacctcaaattaagccgcgaattgtcccgtgtacgcaccgatttgccgctcgaagttgatttccgtggccgccgcgaacctgactgggagggtcttaaagcgtttttagagcgtcttgaatttggttcgctcttgcatgaattcggccttttagaaagcccgttaccagccggtgaagcaccttggccaccgcccgaaggcgcgtttttaggttaccgtttgagtcgcccggaaccgatgtgggccgaattattggctcttgcagcgtctgcccagggacgtgtgtatcgcgcggaagaccctcatggtgcgctccgcggcctcaaagaagtccgtggactccttgccaaagacttagctgttgttgcattgcgcgaaggtcttgatttacctccgactgatgatccaatgcttcttgcgtacctcttggacccgtcaaacacgacgcccgaaggcgtagcccgtcgttacggcggcgagtggaccgaagatgcaggcgagcgcgcgttattggccgaacgtttgcacgccaatttattaggacgtttgcaaggcgaggaacgtctcctctggctttacgaagaagtggagaaaccattgagtcgcgtgctcgcgcatatggaagctaccggtgtcaaattagacgtggcgtatttggaggcactcagccttgaagttgctgccgaaatgcgccgcttggaggaagaagtattccgtttagcaggccactccttttatcttaattctcgcgatcagttagaacgtgtgttgttcgatgaacttggtctccctcctatcggcaagacagagaagaccggtaaacgtagcacttcagcggcggttttagaagctcttcgcgaagtccatcccattgtggacaagatcttgcagtaccgcgaactcgcgaaattgaaaggcacctatattgaccctcttccggcattagtccacccgaaaacgggacgcctccatacccgcttcaaccaaacagccacggcgaccggtcgtttgtcctcctctgatccaaaccttcagaatattccagtacgtaccccattgggccagaagatccgccgcgcgtttgtagctgaggagggttggcgtttagtggccctcgattatagccaaattgaattacgtgtccttgcccatctttctggcgatgagaacctcatccgcgtgtttcaggaaggcaaagacattcacactcaaacggcaagctggatgtttggattatcagctgaagcgatcgatcctttgatgcgtcgtgcagcgaagaccatcaatttcggtgttctctacggtatgagtgcccatcgtttgtcgcaggaattaggcattccctatgaagaagctgcggcgttcattcagcgctactttcaaagctatcccaaagttaaagcatggatcgagaagactctcgaagaaggccgcacacgtggttacgtagagaccttatttggacgtcgccgctatgttcccgatttaaacgctcgcgtgaaatctgtccgtgaagccgccgaacgcatggcgttcaacatgcctgtacagggcacggcagctgacctcatgaaacttgcaatggtgcgcctttttccacaattgcgtgaagttggtgcccgcatgctcttgcaggtccacgatgaactcttgttagaagcgccaaaagagcgtgcggaagaggtggcagccctcgcgaaagaggttatggaaggcgtgtggcccttagcggtgcctcttgaagtcgaagttggtattggcgaggattggttggctgccaaaggataatga

SEQ ID NO: 1892 - protein, 841 aa, synthetic construct
  REGION 1..841: note = Variant of DNA polymerase I from Thermus sp. strain 2.9
MHHHHHHGGSGMLPLFEPKGRVLLVDGHHLAYRNFFALKGLTTSRGEPVQGVYGFAKSLLKALKEDGDVVIVVFDAKAPSFRHEAYEAYKAGRAPTPEDFPRQLALMKELVDLLGLERLEVPGFEADDVLATLAKKAEREGYEVQILTADRDLFQLLSPRISVLHPEGHRITPEWLWEKYGLRPEQWVDFRALAGDPSDNIPGVKGIGEKTALKLLKEWGSLENLLKNLDQVKPESVREKILAHLEDLKLSRELSRVRTDLPLEVDFRGRREPDWEGLKAFLERLEFGSLLHEFGLLESPLPAGEAPWPPPEGAFLGYRLSRPEPMWAELLALAASAQGRVYRAEDPHGALRGLKEVRGLLAKDLAVVALREGLDLPPTDDPMLLAYLLDPSNTTPEGVARRYGGEWTEDAGERALLAERLHANLLGRLQGEERLLWLYEEVEKPLSRVLAHMEATGVKLDVAYLEALSLEVAAEMRRLEEEVFRLAGHSFYLNSRDQLERVLFDELGLPPIGKTEKTGKRSTSAAVLEALREVHPIVDKILQYRELAKLKGTYIDPLPALVHPKTGRLHTRFNQTATATGRLSSSDPNLQNIPVRTPLGQKIRRAFVAEEGWRLVALDYSQIELRVLAHLSGDENLIRVFQEGKDIHTQTASWMFGLSAEAIDPLMRRAAKTINFGVLYGMSAHRLSQELGIPYEEAAAFIQRYFQSYPKVKAWIEKTLEEGRTRGYVETLFGRRRYVPDLNARVKSVREAAERMAFNMPVQGTAADLMKLAMVRLFPQLREVGARMLLQVHDELLLEAPKERAEEVAALAKEVMEGVWPLAVPLEVEVGIGEDWLAAKG

SEQ ID NO: 1893 - DNA, 2529 bp, synthetic construct
  misc_feature 1..2529: note = Variant of DNA polymerase I from Thermus sp. strain 2.9
  source 1..2529: mol_type = other DNA
atgcaccatcatcatcatcatggcggtagcggcatgttaccgttgttcgaacctaaaggtcgcgtgcttctggttgatggccatcatctcgcgtatcgtaacttctttgccctgaaaggattaaccaccagccgtggcgagccggtacagggtgtctacggctttgcaaagtcgctcctgaaagctctgaaagaagacggtgatgtggtgattgttgtctttgatgcgaaagcgccaagttttcgccacgaagcgtacgaagcttacaaagccgggcgtgctccaacgccggaagactttcctcgccaattggcgcttatgaaggaattagtggatttgcttggcctcgaacgcttggaagttcccggtttcgaggcagacgacgtattagcgactctcgcaaagaaagccgaacgtgagggctatgaagtccagatcttgacagcagatcgcgatcttttccagcttttatctccgcgcatctcggtgttacacccggaagggcatcgtatcaccccggaatggctctgggagaaatatggtttgcgtcccgaacaatgggtggattttcgcgccttagcaggcgatccgagcgacaatattccgggagttaaaggtatcggcgagaagacggcgctcaagctccttaaagaatgggggtcgttggagaacttgcttaagaatttagatcaggtcaaaccagagtcagtgcgtgagaagattcttgcacacctcgaagacctcaaattaagccgcgaattgtcccgtgtacgcaccgatttgccgctcgaagttgatttccgtggccgccgcgaacctgactgggagggtcttaaagcgtttttagagcgtcttgaatttggtgatctcttgcatgaattcggccttttagaaagcccgttaccagccgaagaagcaccttggccaccgcccgaaggcgcgtttttaggttaccgtttgagtcgcccggaaccgatgtgggccgaattattggctcttgcagcgtctgcccagggacgtgtgtatcgcgcggaagaccctcatggtgcgctccgcggcctcaaagaagtccgtggactccttgccaaagacttagctgttgttgcattgcgcgaaggtcttgatttacctccgactgatgatccaatgcttcttgcgtacctcttggacccgtcaaacacgacgcccgaaggcgtagcccgtcgttacggcggcgagtggaccgaagatgcaggcgagcgcgcgttattggccgaacgtttgcacgccaatttattaggacgtttgcaaggcgaggaacgtctcctctggctttacgaagaagtggagaaaccattgagtcgcgtgctcgcgcatatggaagctaccggtgtcaaattagacgtggcgtatttggaggcactcagccttgaagttgctgccgaaatgcgccgcttggaggaagaagtattccgtttagcaggccactccttttatcttaattctcgcgatcagttagaacgtgtgttgttcgatgaacttggtctccctcctatcggcaagacagagaagaccggtaaacgtagcacttcagcggcggttttagaagctcttcgcgaagtccatcccattgtggacaagatcttgcagtaccgcgaactcgcgaaattgaaaggcacctatattgaccctcttccggcattagtccacccgaaaacgggacgcctccatacccgcttcaaccaaacagccacggcgaccggtcgtttgtcctcctctgatccaaaccttcagaatattccagtacgtaccccattgggccagaagatccgccgcgcgtttgtagctgaggagggttggcgtttagtggccctcgattatagccaaattgaattacgtgtccttgcccatctttctggcgatgagaacctcatccgcgtgtttcaggaaggcaaagacattcacactcaaacggcaagctggatgtttggattatcagctgaagcgatcgatcctttgatgcgtcgtgcagcgaagaccatcaatttcggtgttctctacggtatgagtgcccatcgtttgtcgcaggaattaggcattccctatgaagaagctgcggcgttcattcagcgctactttcaaagctatcccaaagttaaagcatggatcgagaagactctcgaagaaggccgcacacgtggttacgtagagaccttatttggacgtcgccgctatgttcccgatttaaacgctcgcgtgaaatctgtccgtgaagccgccgaacgcatggcgttcaacatgcctgtacagggcacggcagctgacctcatgaaacttgcaatggtgcgcctttttccacaattgcgtgaagttggtgcccgcatgctcttgcaggtccacgatgaactcttgttagaagcgccaaaagagcgtgcggaagaggtggcagccctcgcgaaagaggttatggaaggcgtgtggcccttagcggtgcctcttgaagtcgaagttggtattggcgaggattggttggctgccaaaggataatga

SEQ ID NO: 1894 - protein, 841 aa, synthetic construct
  REGION 1..841: note = Variant of DNA polymerase I from Thermus sp. strain 2.9
MHHHHHHGGSGMLPLFEPKGRVLLVDGHHLAYRNFFALKGLTTSRGEPVQGVYGFAKSLLKALKEDGDVVIVVFDAKAPSFRHEAYEAYKAGRAPTPEDFPRQLALMKELVDLLGLERLEVPGFEADDVLATLAKKAEREGYEVQILTADRDLFQLLSPRISVLHPEGHRITPEWLWEKYGLRPEQWVDFRALAGDPSDNIPGVKGIGEKTALKLLKEWGSLENLLKNLDQVKPESVREKILAHLEDLKLSRELSRVRTDLPLEVDFRGRREPDWEGLKAFLERLEFGDLLHEFGLLESPLPAEEAPWPPPEGAFLGYRLSRPEPMWAELLALAASAQGRVYRAEDPHGALRGLKEVRGLLAKDLAVVALREGLDLPPTDDPMLLAYLLDPSNTTPEGVARRYGGEWTEDAGERALLAERLHANLLGRLQGEERLLWLYEEVEKPLSRVLAHMEATGVKLDVAYLEALSLEVAAEMRRLEEEVFRLAGHSFYLNSRDQLERVLFDELGLPPIGKTEKTGKRSTSAAVLEALREVHPIVDKILQYRELAKLKGTYIDPLPALVHPKTGRLHTRFNQTATATGRLSSSDPNLQNIPVRTPLGQKIRRAFVAEEGWRLVALDYSQIELRVLAHLSGDENLIRVFQEGKDIHTQTASWMFGLSAEAIDPLMRRAAKTINFGVLYGMSAHRLSQELGIPYEEAAAFIQRYFQSYPKVKAWIEKTLEEGRTRGYVETLFGRRRYVPDLNARVKSVREAAERMAFNMPVQGTAADLMKLAMVRLFPQLREVGARMLLQVHDELLLEAPKERAEEVAALAKEVMEGVWPLAVPLEVEVGIGEDWLAAKG

SEQ ID NO: 1895 - DNA, 2529 bp, synthetic construct
  misc_feature 1..2529: note = Variant of DNA polymerase I from Thermus sp. strain 2.9
  source 1..2529: mol_type = other DNA
atgcaccatcatcatcatcatggcggtagcggcatgttaccgttgttcgaacctaaaggtcgcgtgcttctggttgatggccatcatctcgcgtatcgtaacttctttgccctgaaaggattaaccaccagccgtggcgagccggtacagggtgtctacggctttgcaaagtcgctcctgaaagctctgaaagaagacggtgatgtggtgattgttgtctttgatgcgaaagcgccaagttttcgccacgaagcgtacgaagcttacaaagccgggcgtgctccaacgccggaagactttcctcgccaattggcgcttatgaaggaattagtggatttgcttggcctcgaacgcttggaagttcccggtttcgaggcagacgacgtattagcgactctcgcaaagaaagccgaacgtgagggctatgaagtccagatcttgacagcagatcgcgatcttttccagcttttatctccgcgcatctcggtgttacacccggaagggcatcgtatcaccccggaatggctctgggagaaatatggtttgcgtcccgaacaatgggtggattttcgcgccttagcaggcgatccgagcgacaatattccgggagttaaaggtatcggcgagaagacggcgctcaagctccttaaagaatgggggtcgttggagaacttgcttaagaatttagatcaggtcaaaccagagtcagtgcgtgagaagattcttgcacacctcgaagacctcaaattaagccgcgaattgtcccgtgtacgcaccgatttgccgctcgaagttgatttccgtggccgccgcgaacctgactgggagggtcttaaagcgtttttagagcgtcttgaatttggttcgctcttgcatgaattcggccttttagaaagcccgttaccagccgaagaagcaccttggccaccgcccgaaggcgcgtttttaggttaccgtttgagtcgcccggaaccgatgtgggccgaattattggctcttgcagcgtctgcccagggacgtgtgtatcgcgcggaagaccctcatggtgcgctccgcggcctcaaagaagtccgtggactccttgccaaagacttagctgttgttgcattgcgcgaaggtcttgatttacctccgactgatgatccaatgcttcttgcgtacctcttggacccgtcaaacacgacgcccgaaggcgtagcccgtcgttacggcggcgagtggaccgaagatgcaggcgagcgcgcgttattggccgaacgtttgcacgccaatttattaggacgtttgcaaggcgaggaacgtctcctctggctttacgaagaagtggagaaaccattgagtcgcgtgctcgcgcatatggaagctaccggtgtcaaattagacgtggcgtatttggaggcactcagccttgaagttgctgccgaaatgcgccgcttggaggaagaagtattccgtttagcaggccactccttttatcttaattctcgcgatcagttagaacgtgtgttgttcgatgaacttggtctccctcctatcggcaagacagagaagaccggtaaacgtagcacttcagcggcggttttagaagctcttcgcgaagtccatcccattgtggacaagatcttgcagtaccgcgaactcgcgaaattgaaaggcacctatattgaccctcttccggcattagtccacccgaaaacgggacgcctccatacccgcttcaaccaaacagccacggcgaccggtcgtttgtcctcctctgatccaaaccttcagaatattccagtacgtaccccattgggccagaagatccgccgcgcgtttgtagctgaggagggttggcgtttagtggccctcgattatagccaaattgaattacgtgtccttgcccatctttctggcgatgagaacctcatccgcgtgtttcaggaaggcaaagacattcacactcaaacggcaagctggatgtttggattatcagctgaagcgatcgatcctttgatgcgtcgtgcagcgaagaccatcaatttcggtgttctctacggtatgagtgcccatcgtttgtcgcaggaattaggcattccctatgaagaagctgcggcgttcattcagcgctactttcaaagctatcccaaagttaaagcatggatcgagaagactctcgaagaaggccgcacacgtggttacgtagagaccttatttggacgtcgccgctatgttcccgatttaaacgctcgcgtgaaatctgtccgtgaagccgccgaacgcatggcgttcaacatgcctgtacagggcacggcagctgacctcatgaaacttgcaatggtgcgcctttttccacaattgagtgaagttggtgcccgcatgctcttgcaggtccacgatgaactcttgttagaagcgccaaaagagcgtgcggaagaggtggcagccctcgcgaaagaggttatggaaggcgtgtggcccttagcggtgcctcttgaagtcgaagttggtattggcgaggattggttggctgccaaaggataatga

SEQ ID NO: 1896 - protein, 841 aa, synthetic construct
  REGION 1..841: note = Variant of DNA polymerase I from Thermus sp. strain 2.9
MHHHHHHGGSGMLPLFEPKGRVLLVDGHHLAYRNFFALKGLTTSRGEPVQGVYGFAKSLLKALKEDGDVVIVVFDAKAPSFRHEAYEAYKAGRAPTPEDFPRQLALMKELVDLLGLERLEVPGFEADDVLATLAKKAEREGYEVQILTADRDLFQLLSPRISVLHPEGHRITPEWLWEKYGLRPEQWVDFRALAGDPSDNIPGVKGIGEKTALKLLKEWGSLENLLKNLDQVKPESVREKILAHLEDLKLSRELSRVRTDLPLEVDFRGRREPDWEGLKAFLERLEFGSLLHEFGLLESPLPAEEAPWPPPEGAFLGYRLSRPEPMWAELLALAASAQGRVYRAEDPHGALRGLKEVRGLLAKDLAVVALREGLDLPPTDDPMLLAYLLDPSNTTPEGVARRYGGEWTEDAGERALLAERLHANLLGRLQGEERLLWLYEEVEKPLSRVLAHMEATGVKLDVAYLEALSLEVAAEMRRLEEEVFRLAGHSFYLNSRDQLERVLFDELGLPPIGKTEKTGKRSTSAAVLEALREVHPIVDKILQYRELAKLKGTYIDPLPALVHPKTGRLHTRFNQTATATGRLSSSDPNLQNIPVRTPLGQKIRRAFVAEEGWRLVALDYSQIELRVLAHLSGDENLIRVFQEGKDIHTQTASWMFGLSAEAIDPLMRRAAKTINFGVLYGMSAHRLSQELGIPYEEAAAFIQRYFQSYPKVKAWIEKTLEEGRTRGYVETLFGRRRYVPDLNARVKSVREAAERMAFNMPVQGTAADLMKLAMVRLFPQLSEVGARMLLQVHDELLLEAPKERAEEVAALAKEVMEGVWPLAVPLEVEVGIGEDWLAAKG

SEQ ID NO: 1897 - DNA, 2529 bp, synthetic construct
  misc_feature 1..2529: note = Variant of DNA polymerase I from Thermus sp. strain 2.9
  source 1..2529: mol_type = other DNA
atgcaccatcatcatcatcatggcggtagcggcatgttaccgttgttcgaacctaaaggtcgcgtgcttctggttgatggccatcatctcgcgtatcgtaacttctttgccctgaaaggattaaccaccagccgtggcgagccggtacagggtgtctacggctttgcaaagtcgctcctgaaagctctgaaagaagacggtgatgtggtgattgttgtctttgatgcgaaagcgccaagttttcgccacgaagcgtacgaagcttacaaagccgggcgtgctccaacgccggaagactttcctcgccaattggcgcttatgaaggaattagtggatttgcttggcctcgaacgcttggaagttcccggtttcgaggcagacgacgtattagcgactctcgcaaagaaagccgaacgtgagggctatgaagtccagatcttgacagcagatcgcgatcttttccagcttttatctccgcgcatctcggtgttacacccggaagggcatcgtatcaccccggaatggctctgggagaaatatggtttgcgtcccgaacaatgggtggattttcgcgccttagcaggcgatccgagcgacaatattccgggagttaaaggtatcggcgagaagacggcgctcaagctccttaaagaatgggggtcgttggagaacttgcttaagaatttagatcaggtcaaaccagagtcagtgcgtgagaagattcttgcacacctcgaagacctcaaattaagccgcgaattgtcccgtgtacgcaccgatttgccgctcgaagttgatttccgtggccgccgcgaacctgactgggagggtcttaaagcgtttttagagcgtcttgaatttggttcgctcttgcatgaattcggccttttagaaagcccgttaccagccgaagaagcaccttggccaccgcccgaaggcgcgtttttaggttaccgtttgagtcgcccggaaccgatgtgggccgaattattggctcttgcagcgtctgcccagggacgtgtgtatcgcgcggaagaccctcatggtgcgctccgcggcctcaaagaagtccgtggactccttgccaaagacttagctgttgttgcattgcgcgaaggtcttgatttacctccgactgatgatccaatgcttcttgcgtacctcttggacccgtcaaacacgacgcccgaaggcgtagcccgtcgttacggcggcgagtggaccgaagatgcaggcgagcgcgcgttattggccgaacgtttgcacgccaatttattaggacgtttgcaaggcgaggaacgtctcctctggctttacacggaagtggagaaaccattgagtcgcgtgctcgcgcatatggaagctaccggtgtcaaattagacgtggcgtatttggaggcactcagccttgaagttgctgccgaaatgcgccgcttggaggaagaagtattccgtttagcaggccactccttttatcttaattctcgcgatcagttagaacgtgtgttgttcgatgaacttggtctccctcctatcggcaagacagagaagaccggtaaacgtagcacttcagcggcggttttagaagctcttcgcgaagtccatcccattgtggacaagatcttgcagtaccgcgaactcgcgaaattgaaaggcacctatattgaccctcttccggcattagtccacccgaaaacgggacgcctccatacccgcttcaaccaaacagccacggcgaccggtcgtttgtcctcctctgatccaaaccttcagaatattccagtacgtaccccattgggccagaagatccgccgcgcgtttgtagctgaggagggttggcgtttagtggccctcgattatagccaaattgaattacgtgtccttgcccatctttctggcgatgagaacctcatccgcgtgtttcaggaaggcaaagacattcacactcaaacggcaagctggatgtttggattatcagctgaagcgatcgatcctttgatgcgtcgtgcagcgaagaccatcaatttcggtgttctctacggtatgagtgcccatcgtttgtcgcaggaattaggcattccctatgaagaagctgcggcgttcattcagcgctactttcaaagctatcccaaagttaaagcatggatcgagaagactctcgaagaaggccgcacacgtggttacgtagagaccttatttggacgtcgccgctatgttcccgatttaaacgctcgcgtgaaatctgtccgtgaagccgccgaacgcatggcgttcaacatgcctgtacagggcacggcagctgacctcatgaaacttgcaatggtgcgcctttttccacaattgcgtgaagttggtgcccgcatgctcttgcaggtccacgatgaactcttgttagaagcgccaaaagagcgtgcggaagaggtggcagccctcgcgaaagaggttatggaaggcgtgtggcccttagcggtgcctcttgaagtcgaagttggtattggcgaggattggttggctgccaaaggataatga

SEQ ID NO: 1898 - protein, 841 aa, synthetic construct
  REGION 1..841: note = Variant of DNA polymerase I from Thermus sp. strain 2.9
MHHHHHHGGSGMLPLFEPKGRVLLVDGHHLAYRNFFALKGLTTSRGEPVQGVYGFAKSLLKALKEDGDVVIVVFDAKAPSFRHEAYEAYKAGRAPTPEDFPRQLALMKELVDLLGLERLEVPGFEADDVLATLAKKAEREGYEVQILTADRDLFQLLSPRISVLHPEGHRITPEWLWEKYGLRPEQWVDFRALAGDPSDNIPGVKGIGEKTALKLLKEWGSLENLLKNLDQVKPESVREKILAHLEDLKLSRELSRVRTDLPLEVDFRGRREPDWEGLKAFLERLEFGSLLHEFGLLESPLPAEEAPWPPPEGAFLGYRLSRPEPMWAELLALAASAQGRVYRAEDPHGALRGLKEVRGLLAKDLAVVALREGLDLPPTDDPMLLAYLLDPSNTTPEGVARRYGGEWTEDAGERALLAERLHANLLGRLQGEERLLWLYTEVEKPLSRVLAHMEATGVKLDVAYLEALSLEVAAEMRRLEEEVFRLAGHSFYLNSRDQLERVLFDELGLPPIGKTEKTGKRSTSAAVLEALREVHPIVDKILQYRELAKLKGTYIDPLPALVHPKTGRLHTRFNQTATATGRLSSSDPNLQNIPVRTPLGQKIRRAFVAEEGWRLVALDYSQIELRVLAHLSGDENLIRVFQEGKDIHTQTASWMFGLSAEAIDPLMRRAAKTINFGVLYGMSAHRLSQELGIPYEEAAAFIQRYFQSYPKVKAWIEKTLEEGRTRGYVETLFGRRRYVPDLNARVKSVREAAERMAFNMPVQGTAADLMKLAMVRLFPQLREVGARMLLQVHDELLLEAPKERAEEVAALAKEVMEGVWPLAVPLEVEVGIGEDWLAAKG

SEQ ID NO: 1899 - DNA, 2529 bp, synthetic construct
  misc_feature 1..2529: note = Variant of DNA polymerase I from Thermus sp. strain 2.9
  source 1..2529: mol_type = other DNA
atgcaccatcatcatcatcatcgtggtagcggcatgttaccgttgttcgaacctaaaggtcgcgtgcttctggttgatggccatcatctcgcgtatcgtaacttctttgccctgaaaggattaaccaccagccgtggcgagccggtacagggtgtctacggctttgcaaagtcgctcctgaaagctctgaaagaagacggtgatgtggtgattgttgtctttgatgcgaaagcgccaagttttcgccacgaagcgtacgaagcttacaaagccgggcgtgctccaacgccggaagactttcctcgccaattggcgcttatgaaggaattagtggatttgcttggcctcgaacgcttggaagttcccggtttcgaggcagacgacgtattagcgactctcgcaaagaaagccgaacgtgagggctatgaagtccagatcttgacagcagatcgcgatcttttccagcttttatctccgcgcatctcggtgttacacccggaagggcatcgtatcaccccggaatggctctgggagaaatatggtttgcgtcccgaacaatgggtggattttcgcgccttagcaggcgatccgagcgacaatattccgggagttaaaggtatcggcgagaagacggcgctcaagctccttaaagaatgggggtcgttggagaacttgcttaagaatttagatcaggtcaaaccagagtcagtgcgtgagaagattcttgcacacctcgaagacctcaaattaagccgcgaattgtcccgtgtacgcaccgatttgccgctcgaagttgatttccgtggccgccgcgaacctgactgggagggtcttaaagcgtttttagagcgtcttgaatttggttcgctcttgcatgaattcggccttttagaaagcccgttaccagccgaagaagcaccttggccaccgcccgaaggcgcgtttttaggttaccgtttgagtcgcccggaaccgatgtgggccgaattattggctcttgcagcgtctgcccagggacgtgtgtatcgcgcggaagaccctcatggtgcgctccgcggcctcaaagaagtccgtggactccttgccaaagacttagctgttgttgcattgcgcgaaggtcttgatttacctccgactgatgatccaatgcttcttgcgtacctcttggacccgtcaaacacgacgcccgaaggcgtagcccgtcgttacggcggcgagtggaccgaagatgcaggcgagcgcgcgttattggccgaacgtttgcacgccaatttattaggacgtttgcaaggcgaggaacgtctcctctggctttacgaagaagtggagaaaccattgagtcgcgtgctcgcgcatatggaagctaccggtgtcaaattagacgtggcgtatttggaggcactcagccttgaagttgctgccgaaatgcgccgcttggaggaagaagtattccgtttagcaggccactccttttatcttaattctcgcgatcagttagaacgtgtgttgttcgatgaacttggtctccctcctatcggcaagacagagaagaccggtaaacgtagcacttcagcggcggttttagaagctcttcgcgaagtccatcccattgtggacaagatcttgcagtaccgcgaactcgcgaaattgaaaggcacctatattgaccctcttccggcattagtccacccgaaaacgggacgcctccatacccgcttcaaccaaacagccacggcgaccggtcgtttgtcctcctctgatccaaaccttcagaatattccagtacgtaccccattgggccagaagatccgccgcgcgtttgtagctgaggagggttggcgtttagtggccctcgattatagccaaattgaattacgtgtccttgcccatctttctggcgatgagaacctcatccgcgtgtttcaggaaggcaaagacattcacactcaaacggcaagctggatgtttggattatcagctgaagcgatcgatcctttgatgcgtcgtgcagcgaagaccatcaatttcggtgttctctacggtatgagtgcccatcgtttgtcgcaggaattaggcattccctatgaagaagctgcggcgttcattcagcgctactttcaaagctatcccaaagttaaagcatggatcgagaagactctcgaagaaggccgcacacgtggttacgtagagaccttatttggacgtcgccgctatgttcccgatttaaacgctcgcgtgaaatctgtccgtgaagccgccgaacgcatggcgttcaacatgcctgtacagggcacggcagctgacctcatgaaacttgcaatggtgcgcctttttccacaattgcgtgaagttggtgcccgcatgctcttgcaggtccacgatgaactcttgttagaagcgccaaaagagcgtgcggaagaggtggcagccctcgcgaaagaggttatggaaggcgtgtggcccttagcggtgcctcttgaagtcgaagttggtattggcgaggattggttggctgccaaaggataatga

SEQ ID NO: 1900 - protein, 841 aa, synthetic construct
  REGION 1..841: note = Variant of DNA polymerase I from Thermus sp. strain 2.9
MHHHHHHRGSGMLPLFEPKGRVLLVDGHHLAYRNFFALKGLTTSRGEPVQGVYGFAKSLLKALKEDGDVVIVVFDAKAPSFRHEAYEAYKAGRAPTPEDFPRQLALMKELVDLLGLERLEVPGFEADDVLATLAKKAEREGYEVQILTADRDLFQLLSPRISVLHPEGHRITPEWLWEKYGLRPEQWVDFRALAGDPSDNIPGVKGIGEKTALKLLKEWGSLENLLKNLDQVKPESVREKILAHLEDLKLSRELSRVRTDLPLEVDFRGRREPDWEGLKAFLERLEFGSLLHEFGLLESPLPAEEAPWPPPEGAFLGYRLSRPEPMWAELLALAASAQGRVYRAEDPHGALRGLKEVRGLLAKDLAVVALREGLDLPPTDDPMLLAYLLDPSNTTPEGVARRYGGEWTEDAGERALLAERLHANLLGRLQGEERLLWLYEEVEKPLSRVLAHMEATGVKLDVAYLEALSLEVAAEMRRLEEEVFRLAGHSFYLNSRDQLERVLFDELGLPPIGKTEKTGKRSTSAAVLEALREVHPIVDKILQYRELAKLKGTYIDPLPALVHPKTGRLHTRFNQTATATGRLSSSDPNLQNIPVRTPLGQKIRRAFVAEEGWRLVALDYSQIELRVLAHLSGDENLIRVFQEGKDIHTQTASWMFGLSAEAIDPLMRRAAKTINFGVLYGMSAHRLSQELGIPYEEAAAFIQRYFQSYPKVKAWIEKTLEEGRTRGYVETLFGRRRYVPDLNARVKSVREAAERMAFNMPVQGTAADLMKLAMVRLFPQLREVGARMLLQVHDELLLEAPKERAEEVAALAKEVMEGVWPLAVPLEVEVGIGEDWLAAKG

SEQ ID NO: 1901 - DNA, 2529 bp, synthetic construct
  misc_feature 1..2529: note = Variant of DNA polymerase I from Thermus sp. strain 2.9
  source 1..2529: mol_type = other DNA
atgcaccatcatcatcatcatggcggtagcggcatgttaccgttgttcgaacctaaaggtcgcgtgcttctggttgatggccatcatctcgcgtatcgtaacttctttgccctgaaaggattaaccaccagccgtggcgagccggtacagggtgtctacggctttgcaaagtcgctcctgaaagctctgaaagaagacggtgatgtggtgattgttgtctttgatgcgaaagcgccaagttttcgccacgaagcgtacgaagcttacaaagccgggcgtgctccaacgccggaagactttcctcgccaattggcgcttatgaaggaattagtggatttgcttggcctcgaacgcttggaagttcccggtttcgaggcagacgacgtattagcgactctcgcaaagaaagccgaacgtgagggctatgaagtccagatcttgacagcagatcgcgatcttttccagcttttatctccgcgcatctcggtgttacacccggaagggcatcgtatcaccccggaatggctctgggagaaatatggtttgcgtcccgaacaatgggtggattttcgcgccttagcaggcgatccgagcgacaatattccgggagttaaaggtatcggcgagaagacggcgctcaagctccttaaagaatgggggtcgttggagaacttgcttaagaatttagatcaggtcaaaccagagtcagtgcgtgagaagattcttgcacacctcgaagacctcaaattaagccgcgaattgtcccgtgtacgcaccgatttgccgctcgaagttgatttccgtggccgccgcgaacctgactgggagggtcttaaagcgtttttagagcgtcttgaatttggttcgctcttgcatgaattcggccttttagaaagcccgttaccagccgaagaagcaccttggccaccgcccgaaggcgcgtttttaggttaccgtttgagtcgcccggaaccgatgtgggccgaattattggctcttgcagcgtctgcccagggacgtgtgtatcgcgcggaagaccctcatggtgcgctccgcggcctcaaagaagtccgtggactccttgccaaagacttagctgttgttgcattgcgcgaaggtcttgatttacctccgactgatgatccaatgcttcttgcgtacctcttggacccgtcaaacacgacgcccgaaggcgtagcccgtcgttacggcggcgagtggaccgaagatgcaggcgagcgcgcgttattggccgaacgtttgcacgccaatttattaggacgtttgcaaggcgaggaacgtctcctctggctttacgaagaagtggagaaaccattgagtcgcgtgctcgcgcatatggaagctaccggtgtcaaattagacgtggcgtatttggaggcactcagccttgaagttgctgccgaaatgcgccgcttggaggaagaagtattccgtttagcaggccactccttttatcttaattctcgcgatcagttagaacgtgtgttgttcgatgaacttggtctccctcctatcggcaagacagagaagaccggtaaacgtagcacttcagcggcggttttagaagctcttcgcgaagtccatcccattgtggacaagatcttgcagtaccgcgaactcgcgaaattgaaaggcacctatattgaccctcttccggcattagtccacccgaaaacgggacgcctccatacccgcttcaaccaaacagccacggcgaccggtcgtttgtcctcctctgatccaaaccttcaggcgattccagtacgtaccccattgggccagaagatccgccgcgcgtttgtagctgaggagggttggcgtttagtggccctcgattatagccaaattgaattacgtgtccttgcccatctttctggcgatgagaacctcatccgcgtgtttcaggaaggcaaagacattcacactcaaacggcaagctggatgtttggattatcagctgaagcgatcgatcctttgatgcgtcgtgcagcgaagaccatcaatttcggtgttctctacggtatgagtgcccatcgtttgtcgcaggaattaggcattccctatgaagaagctgcggcgttcattcagcgctactttcaaagctatcccaaagttaaagcatggatcgagaagactctcgaagaaggccgcacacgtggttacgtagagaccttatttggacgtcgccgctatgttcccgatttaaacgctcgcgtgaaatctgtccgtgaagccgccgaacgcatggcgttcaacatgcctgtacagggcacggcagctgacctcatgaaacttgcaatggtgcgcctttttccacaattgcgtgaagttggtgcccgcatgctcttgcaggtccacgatgaactcttgttagaagcgccaaaagagcgtgcggaagaggtggcagccctcgcgaaagaggttatggaaggcgtgtggcccttagcggtgcctcttgaagtcgaagttggtattggcgaggattggttggctgccaaaggataatga

SEQ ID NO: 1902 - protein, 841 aa, synthetic construct
  REGION 1..841: note = Variant of DNA polymerase I from Thermus sp. strain 2.9
MHHHHHHGGSGMLPLFEPKGRVLLVDGHHLAYRNFFALKGLTTSRGEPVQGVYGFAKSLLKALKEDGDVVIVVFDAKAPSFRHEAYEAYKAGRAPTPEDFPRQLALMKELVDLLGLERLEVPGFEADDVLATLAKKAEREGYEVQILTADRDLFQLLSPRISVLHPEGHRITPEWLWEKYGLRPEQWVDFRALAGDPSDNIPGVKGIGEKTALKLLKEWGSLENLLKNLDQVKPESVREKILAHLEDLKLSRELSRVRTDLPLEVDFRGRREPDWEGLKAFLERLEFGSLLHEFGLLESPLPAEEAPWPPPEGAFLGYRLSRPEPMWAELLALAASAQGRVYRAEDPHGALRGLKEVRGLLAKDLAVVALREGLDLPPTDDPMLLAYLLDPSNTTPEGVARRYGGEWTEDAGERALLAERLHANLLGRLQGEERLLWLYEEVEKPLSRVLAHMEATGVKLDVAYLEALSLEVAAEMRRLEEEVFRLAGHSFYLNSRDQLERVLFDELGLPPIGKTEKTGKRSTSAAVLEALREVHPIVDKILQYRELAKLKGTYIDPLPALVHPKTGRLHTRFNQTATATGRLSSSDPNLQAIPVRTPLGQKIRRAFVAEEGWRLVALDYSQIELRVLAHLSGDENLIRVFQEGKDIHTQTASWMFGLSAEAIDPLMRRAAKTINFGVLYGMSAHRLSQELGIPYEEAAAFIQRYFQSYPKVKAWIEKTLEEGRTRGYVETLFGRRRYVPDLNARVKSVREAAERMAFNMPVQGTAADLMKLAMVRLFPQLREVGARMLLQVHDELLLEAPKERAEEVAALAKEVMEGVWPLAVPLEVEVGIGEDWLAAKG

SEQ ID NO: 1903 - DNA, 2529 bp, synthetic construct
  misc_feature 1..2529: note = Variant of DNA polymerase I from Thermus sp. strain 2.9
  source 1..2529: mol_type = other DNA
atgcaccatcatcatcatcatggcggtagcggcatgttaccgttgttcgaacctaaaggtcgcgtgcttctggttgatggccatcatctcgcgtatcgtaacttctttgccctgaaaggattaaccaccagccgtggcgagccggtacagggtgtctacggctttgcaaagtcgctcctgaaagctctgaaagaagacggtgatgtggtgattgttgtctttgatgcgaaagcgccaagttttcgccacgaagcgtacgaagcttacaaagccgggcgtgctccaacgccggaagactttcctcgccaattggcgcttatgaaggaattagtggatttgcttggcctcgaacgcttggaagttcccggtttcgaggcagacgacgtattagcgactctcgcaaagaaagccgaacgtgagggctatgaagtccagatcttgacagcagatcgcgatcttttccagcttttatctccgcgcatctcggtgttacacccggaagggcatcgtatcaccccggaatggctctgggagaaatatggtttgcgtcccgaacaatgggtggattttcgcgccttagcaggcgatccgagcgacaatattccgggagttaaaggtatcggcgagaagacggcgctcaagctccttaaagaatgggggtcgttggagaacttgcttaagaatttagatcaggtcaaaccagagtcagtgcgtgagaagattcttgcacacctcgaagacctcaaattaagccgcgaattgtcccgtgtacgcaccgatttgccgctcgaagttgatttccgtggccgccgcgaacctgactgggagggtcttaaagcgtttttagagcgtcttgaatttggttcgctcttgcatgaattcggccttttagaaagcccgttaccagccgaagaagcaccttggccaccgcccgaaggcgcgtttttaggttaccgtttgagtcgcccggaaccgatgtgggccgaattattggctcttgcagcgtctgcccagggacgtgtgtatcgcgcggaagaccctcatggtgcgctccgcggcctcaaagaagtccgtggactccttgccaaagacttagctgttgttgcattgcgcgaaggtcttgatttacctccgactgatgatccaatgcttcttgcgtacctcttggacccgtcaaacacgacgcccgaaggcgtagcccgtcgttacggcggcgagtggaccgaagatgcaggcgagcgcgcgttattggccgaacgtttgcacgccaatttattaggacgtttgcaaggcgaggaacgtctcctctggctttacgaagaagtggagaaaccattgagtcgcgtgctcgcgcatatggaagctaccggtgtcaaattagacgtggcgtatttggaggcactcagccttgaagttgctgccgaaatgcgccgcttggaggaagaagtattccgtttagcaggccactccttttatcttaattctcgcgatcagttagaacgtgtgttgttcgatgaacttggtctccctcctatcggcaagacagagaagaccggtaaacgtagcacttcagcggcggttttagaagctcttcgcgaagtccatcccattgtggacaagatcttgcagtaccgcgaactcgcgaaattgaaaggcacctatattgaccctcttccggcattagtccacccgaaaacgggacgcctccatacccgcttcaaccaaacagccacggcgaccggtcgtttgtcctcctctgatccaaaccttcagaatattccagtacgtaccccattgggccagaagatccgccgcgcgtttgtagctgaggagggttggcgtttagtggccctcgattatagccaaattgaattacgtgtccttgcccatctttctggcgatgagaacctcatccgcgtgtttcaggaaggcaaagacattcacactcaaacggcaagctggatgtttggattatcagctgaagcgatcgatcctttgatgcgtcgtgcagcgaagaccatcaatttcggtgttctctacggtatgagtgcccatcgtttgtcgcaggaattaggcattccctatgaagaagctgcggcgttcattcagcgctactttcaaagctatcccaaagttgttgcatggatcgagaagactctcgaagaaggccgcacacgtggttacgtagagaccttatttggacgtcgccgctatgttcccgatttaaacgctcgcgtgaaatctgtccgtgaagccgccgaacgcatggcgttcaacatgcctgtacagggcacggcagctgacctcatgaaacttgcaatggtgcgcctttttccacaattgcgtgaagttggtgcccgcatgctcttgcaggtccacgatgaactcttgttagaagcgccaaaagagcgtgcggaagaggtggcagccctcgcgaaagaggttatggaaggcgtgtggcccttagcggtgcctcttgaagtcgaagttggtattggcgaggattggttggctgccaaaggataatga

SEQ ID NO: 1904 - protein, 841 aa, synthetic construct
  REGION 1..841: note = Variant of DNA polymerase I from Thermus sp. strain 2.9
MHHHHHHGGSGMLPLFEPKGRVLLVDGHHLAYRNFFALKGLTTSRGEPVQGVYGFAKSLLKALKEDGDVVIVVFDAKAPSFRHEAYEAYKAGRAPTPEDFPRQLALMKELVDLLGLERLEVPGFEADDVLATLAKKAEREGYEVQILTADRDLFQLLSPRISVLHPEGHRITPEWLWEKYGLRPEQWVDFRALAGDPSDNIPGVKGIGEKTALKLLKEWGSLENLLKNLDQVKPESVREKILAHLEDLKLSRELSRVRTDLPLEVDFRGRREPDWEGLKAFLERLEFGSLLHEFGLLESPLPAEEAPWPPPEGAFLGYRLSRPEPMWAELLALAASAQGRVYRAEDPHGALRGLKEVRGLLAKDLAVVALREGLDLPPTDDPMLLAYLLDPSNTTPEGVARRYGGEWTEDAGERALLAERLHANLLGRLQGEERLLWLYEEVEKPLSRVLAHMEATGVKLDVAYLEALSLEVAAEMRRLEEEVFRLAGHSFYLNSRDQLERVLFDELGLPPIGKTEKTGKRSTSAAVLEALREVHPIVDKILQYRELAKLKGTYIDPLPALVHPKTGRLHTRFNQTATATGRLSSSDPNLQNIPVRTPLGQKIRRAFVAEEGWRLVALDYSQIELRVLAHLSGDENLIRVFQEGKDIHTQTASWMFGLSAEAIDPLMRRAAKTINFGVLYGMSAHRLSQELGIPYEEAAAFIQRYFQSYPKVVAWIEKTLEEGRTRGYVETLFGRRRYVPDLNARVKSVREAAERMAFNMPVQGTAADLMKLAMVRLFPQLREVGARMLLQVHDELLLEAPKERAEEVAALAKEVMEGVWPLAVPLEVEVGIGEDWLAAKG

SEQ ID NO: 1905 - DNA, 2529 bp, synthetic construct
  misc_feature 1..2529: note = Variant of DNA polymerase I from Thermus sp. strain 2.9
  source 1..2529: mol_type = other DNA
atgcaccatcatcatcatcatggcggtagcggcatgttaccgttgttcgaacctaaaggtcgcgtgcttctggttgatggccatcatctcgcgtatcgtaacttctttgccctgaaaggattaaccaccagccgtggcgagccggtacagggtgtctacggctttgcaaagtcgctcctgaaagctctgaaagaagacggtgatgtggtgattgttgtctttgatgcgaaagcgccaagttttcgccacgaagcgtacgaagcttacaaagccgggcgtgctccaacgccggaagactttcctcgccaattggcgcttatgaaggaattagtggatttgcttggcctcgaacgcttggaagttcccggtttcgaggcagacgacgtattagcgactctcgcaaagaaagccgaacgtgagggctatgaagtccagatcttgacagcagatcgcgatcttttccagcttttatctccgcgcatctcggtgttacacccggaagggcatcgtatcaccccggaatggctctgggagaaatatggtttgcgtcccgaacaatgggtggattttcgcgccttagcaggcgatccgagcgacaatattccgggagttaaaggtatcggcgagaagacggcgctcaagctccttaaagaatgggggtcgttggagaacttgcttaagaatttagatcaggtcaaaccagagtcagtgcgtgagaagattcttgcacacctcgaagacctcaaattaagccgcgaattgtcccgtgtacgcaccgatttgccgctcgaagttgatttccgtggccgccgcgaacctgactgggagggtcttaaagcgtttttagagcgtcttgaatttggttcgctcttgcatgaattcggccttttagaaagcctgttaccagccgaagaagcaccttggccaccgcccgaaggcgcgtttttaggttaccgtttgagtcgcccggaaccgatgtgggccgaattattggctcttgcagcgtctgcccagggacgtgtgtatcgcgcggaagaccctcatggtgcgctccgcggcctcaaagaagtccgtggactccttgccaaagacttagctgttgttgcattgcgcgaaggtcttgatttacctccgactgatgatccaatgcttcttgcgtacctcttggacccgtcaaacacgacgcccgaaggcgtagcccgtcgttacggcggcgagtggaccgaagatgcaggcgagcgcgcgttattggccgaacgtttgcacgccaatttattaggacgtttgcaaggcgaggaacgtctcctctggctttacgaagaagtggagaaaccattgagtcgcgtgctcgcgcatatggaagctaccggtgtcaaattagacgtggcgtatttggaggcactcagccttgaagttgctgccgaaatgcgccgcttggaggaagaagtattccgtttagcaggccactccttttatcttaattctcgcgatcagttagaacgtgtgttgttcgatgaacttggtctccctcctatcggcaagacagagaagaccggtaaacgtagcacttcagcggcggttttagaagctcttcgcgaagtccatcccattgtggacaagatcttgcagtaccgcgaactcgcgaaattgaaaggcacctatattgaccctcttccggcattagtccacccgaaaacgggacgcctccatacccgcttcaaccaaacagccacggcgaccggtcgtttgtcctcctctgatccaaaccttcagaatattccagtacgtaccccattgggccagaagatccgccgcgcgtttgtagctgaggagggttggcgtttagtggccctcgattatagccaaattgaattacgtgtccttgcccatctttctggcgatgagaacctcatccgcgtgtttcaggaaggcaaagacattcacactcaaacggcaagctggatgtttggattatcagctgaagcgatcgatcctttgatgcgtcgtgcagcgaagaccatcaatttcggtgttctctacggtatgagtgcccatcgtttgtcgcaggaattaggcattccctatgaagaagctgcggcgttcattcagcgctactttcaaagctatcccaaagttaaagcatggatcgagaagactctcgaagaaggccgcacacgtggttacgtagagaccttatttggacgtcgccgctatgttcccgatttaaacgctcgcgtgaaatctgtccgtgaagccgccgaacgcatggcgttcaacatgcctgtacagggcacggcagctgacctcatgaaacttgcaatggtgcgcctttttccacaattgcgtgaagttggtgcccgcatgctcttgcaggtccacgatgaactcttgttagaagcgccaaaagagcgtgcggaagaggtggcagccctcgcgaaagaggttatggaaggcgtgtggcccttagcggtgcctcttgaagtcgaagttggtattggcgaggattggttggctgccaaaggataatga

SEQ ID NO: 1906 - protein, 841 aa, synthetic construct
  REGION 1..841: note = Variant of DNA polymerase I from Thermus sp. strain 2.9
MHHHHHHGGSGMLPLFEPKGRVLLVDGHHLAYRNFFALKGLTTSRGEPVQGVYGFAKSLLKALKEDGDVVIVVFDAKAPSFRHEAYEAYKAGRAPTPEDFPRQLALMKELVDLLGLERLEVPGFEADDVLATLAKKAEREGYEVQILTADRDLFQLLSPRISVLHPEGHRITPEWLWEKYGLRPEQWVDFRALAGDPSDNIPGVKGIGEKTALKLLKEWGSLENLLKNLDQVKPESVREKILAHLEDLKLSRELSRVRTDLPLEVDFRGRREPDWEGLKAFLERLEFGSLLHEFGLLESLLPAEEAPWPPPEGAFLGYRLSRPEPMWAELLALAASAQGRVYRAEDPHGALRGLKEVRGLLAKDLAVVALREGLDLPPTDDPMLLAYLLDPSNTTPEGVARRYGGEWTEDAGERALLAERLHANLLGRLQGEERLLWLYEEVEKPLSRVLAHMEATGVKLDVAYLEALSLEVAAEMRRLEEEVFRLAGHSFYLNSRDQLERVLFDELGLPPIGKTEKTGKRSTSAAVLEALREVHPIVDKILQYRELAKLKGTYIDPLPALVHPKTGRLHTRFNQTATATGRLSSSDPNLQNIPVRTPLGQKIRRAFVAEEGWRLVALDYSQIELRVLAHLSGDENLIRVFQEGKDIHTQTASWMFGLSAEAIDPLMRRAAKTINFGVLYGMSAHRLSQELGIPYEEAAAFIQRYFQSYPKVKAWIEKTLEEGRTRGYVETLFGRRRYVPDLNARVKSVREAAERMAFNMPVQGTAADLMKLAMVRLFPQLREVGARMLLQVHDELLLEAPKERAEEVAALAKEVMEGVWPLAVPLEVEVGIGEDWLAAKG

SEQ ID NO: 1907 - DNA, 2529 bp, synthetic construct
  misc_feature 1..2529: note = Variant of DNA polymerase I from Thermus sp. strain 2.9
  source 1..2529: mol_type = other DNA
atgcaccatcatcatcatcatggcggtagcggcatgttaccgttgttcgaacctaaaggtcgcgtgcttctggttgatggccatcatctcgcgtatcgtaacttctttgccctgaaaggattaaccaccagccgtggcgagccggtacagggtgtctacggctttgcaaagtcgctcctgaaagctctgaaagaagacggtgatgtggtgattgttgtctttgatgcgaaagcgccaagttttcgccacgaagcgtacgaagcttacaaagccgggcgtgctccaacgccggaagactttcctcgccaattggcgcttatgaaggaattagtggatttgcttggcctcgaacgcttggaagttcccggtttcgaggcagacgacgtattagcgactctcgcaaagaaagccgaacgtgagggctatgaagtccagatcttgacagcagatcgcgatcttttccagcttttatctccgcgcatctcggtgttacacccggaagggcatcgtatcaccccggaatggctctgggagaaatatggtttgcgtcccgaacaatgggtggattttcgcgccttagcaggcgatccgagcgacaatattccgggagttaaaggtatcggcgagaagacggcgctcaagctccttaaagaatgggggtcgttggagaacttgcttaagaatttagatcaggtcaaaccagagtcagtgcgtgagaagattcttgcacacctcgaagacctcaaattaagccgcgaattgtcccgtgtacgcaccgatttgccgctcgaagttgatttccgtggccgccgcgaacctgactgggagggtcttaaagcgtttttagagcgtcttgaatttggttcgctcttgcatgaattcggccttttagaaagcccgttaccagccgaagaagcaccttggccaccgcccgaaggcgcgtttttaggttaccgtttgagtcgcccggaaccgatgtgggccgaattattggctcttgcagcgtctgcccagggacgtgtgtatcgcgcggaagaccctcatggtgcgctccgcggcctcaaagaagtccgtggactccttgccaaagacttagctgttgttgcattgcgcgaaggtcttgatttacctccgactgatgatccaatgcttcttgcgtacctcttggacccgtcaaacacgacgcccgaaggcgtagcccgtcgttacggcggcatgtggaccgaagatgcaggcgagcgcgcgttattggccgaacgtttgcacgccaatttattaggacgtttgcaaggcgaggaacgtctcctctggctttacgaagaagtggagaaaccattgagtcgcgtgctcgcgcatatggaagctaccggtgtcaaattagacgtggcgtatttggaggcactcagccttgaagttgctgccgaaatgcgccgcttggaggaagaagtattccgtttagcaggccactccttttatcttaattctcgcgatcagttagaacgtgtgttgttcgatgaacttggtctccctcctatcggcaagacagagaagaccggtaaacgtagcacttcagcggcggttttagaagctcttcgcgaagtccatcccattgtggacaagatcttgcagtaccgcgaactcgcgaaattgaaaggcacctatattgaccctcttccggcattagtccacccgaaaacgggacgcctccatacccgcttcaaccaaacagccacggcgaccggtcgtttgtcctcctctgatccaaaccttcagaatattccagtacgtaccccattgggccagaagatccgccgcgcgtttgtagctgaggagggttggcgtttagtggccctcgattatagccaaattgaattacgtgtccttgcccatctttctggcgatgagaacctcatccgcgtgtttcaggaaggcaaagacattcacactcaaacggcaagctggatgtttggattatcagctgaagcgatcgatcctttgatgcgtcgtgcagcgaagaccatcaatttcggtgttctctacggtatgagtgcccatcgtttgtcgcaggaattaggcattccctatgaagaagctgcggcgttcattcagcgctactttcaaagctatcccaaagttaaagcatggatcgagaagactctcgaagaaggccgcacacgtggttacgtagagaccttatttggacgtcgccgctatgttcccgatttaaacgctcgcgtgaaatctgtccgtgaagccgccgaacgcatggcgttcaacatgcctgtacagggcacggcagctgacctcatgaaacttgcaatggtgcgcctttttccacaattgcgtgaagttggtgcccgcatgctcttgcaggtccacgatgaactcttgttagaagcgccaaaagagcgtgcggaagaggtggcagccctcgcgaaagaggttatggaaggcgtgtggcccttagcggtgcctcttgaagtcgaagttggtattggcgaggattggttggctgccaaaggataatga

SEQ ID NO: 1908 - protein, 841 aa, synthetic construct
  REGION 1..841: note = Variant of DNA polymerase I from Thermus sp. strain 2.9
MHHHHHHGGSGMLPLFEPKGRVLLVDGHHLAYRNFFALKGLTTSRGEPVQGVYGFAKSLLKALKEDGDVVIVVFDAKAPSFRHEAYEAYKAGRAPTPEDFPRQLALMKELVDLLGLERLEVPGFEADDVLATLAKKAEREGYEVQILTADRDLFQLLSPRISVLHPEGHRITPEWLWEKYGLRPEQWVDFRALAGDPSDNIPGVKGIGEKTALKLLKEWGSLENLLKNLDQVKPESVREKILAHLEDLKLSRELSRVRTDLPLEVDFRGRREPDWEGLKAFLERLEFGSLLHEFGLLESPLPAEEAPWPPPEGAFLGYRLSRPEPMWAELLALAASAQGRVYRAEDPHGALRGLKEVRGLLAKDLAVVALREGLDLPPTDDPMLLAYLLDPSNTTPEGVARRYGGMWTEDAGERALLAERLHANLLGRLQGEERLLWLYEEVEKPLSRVLAHMEATGVKLDVAYLEALSLEVAAEMRRLEEEVFRLAGHSFYLNSRDQLERVLFDELGLPPIGKTEKTGKRSTSAAVLEALREVHPIVDKILQYRELAKLKGTYIDPLPALVHPKTGRLHTRFNQTATATGRLSSSDPNLQNIPVRTPLGQKIRRAFVAEEGWRLVALDYSQIELRVLAHLSGDENLIRVFQEGKDIHTQTASWMFGLSAEAIDPLMRRAAKTINFGVLYGMSAHRLSQELGIPYEEAAAFIQRYFQSYPKVKAWIEKTLEEGRTRGYVETLFGRRRYVPDLNARVKSVREAAERMAFNMPVQGTAADLMKLAMVRLFPQLREVGARMLLQVHDELLLEAPKERAEEVAALAKEVMEGVWPLAVPLEVEVGIGEDWLAAKG

SEQ ID NO: 1909 - DNA, 2529 bp, synthetic construct
  misc_feature 1..2529: note = Variant of DNA polymerase I from Thermus sp. strain 2.9
  source 1..2529: mol_type = other DNA
atgcaccatcatcatcatcatggcggtagcggcatgttaccgttgttcgaacctaaaggtcgcgtgcttctggttgatggccatcatctcgcgtatcgtaacttctttgccctgaaacgtttaaccaccagccgtggcgagccggtacagggtgtctacggctttgcaaagtcgctcctgaaagctctgaaagaagacggtgatgtggtgattgttgtctttgatgcgaaagcgccaagttttcgccacgaagcgtacgaagcttacaaagccgggcgtgctccaacgccggaagactttcctcgccaattggcgcttatgaaggaattagtggatttgcttggcctcgaacgcttggaagttcccggtttcgaggcagacgacgtattagcgactctcgcaaagaaagccgaacgtgagggctatgaagtccagatcttgacagcagatcgcgatcttttccagcttttatctccgcgcatctcggtgttacacccggaagggcatcgtatcaccccggaatggctctgggagaaatatggtttgcgtcccgaacaatgggtggattttcgcgccttagcaggcgatccgagcgacaatattccgggagttaaaggtatcggcgagaagacggcgctcaagctccttaaagaatgggggtcgttggagaacttgcttaagaatttagatcaggtcaaaccagagtcagtgcgtgagaagattcttgcacacctcgaagacctcaaattaagccgcgaattgtcccgtgtacgcaccgatttgccgctcgaagttgatttccgtggccgccgcgaacctgactgggagggtcttaaagcgtttttagagcgtcttgaatttggttcgctcttgcatgaattcggccttttagaaagcccgttaccagccgaagaagcaccttggccaccgcccgaaggcgcgtttttaggttaccgtttgagtcgcccggaaccgatgtgggccgaattattggctcttgcagcgtctgcccagggacgtgtgtatcgcgcggaagaccctcatggtgcgctccgcggcctcaaagaagtccgtggactccttgccaaagacttagctgttgttgcattgcgcgaaggtcttgatttacctccgactgatgatccaatgcttcttgcgtacctcttggacccgtcaaacacgacgcccgaaggcgtagcccgtcgttacggcggcgagtggaccgaagatgcaggcgagcgcgcgttattggccgaacgtttgcacgccaatttattaggacgtttgcaaggcgaggaacgtctcctctggctttacgaagaagtggagaaaccattgagtcgcgtgctcgcgcatatggaagctaccggtgtcaaattagacgtggcgtatttggaggcactcagccttgaagttgctgccgaaatgcgccgcttggaggaagaagtattccgtttagcaggccactccttttatcttaattctcgcgatcagttagaacgtgtgttgttcgatgaacttggtctccctcctatcggcaagacagagaagaccggtaaacgtagcacttcagcggcggttttagaagctcttcgcgaagtccatcccattgtggacaagatcttgcagtaccgcgaactcgcgaaattgaaaggcacctatattgaccctcttccggcattagtccacccgaaaacgggacgcctccatacccgcttcaaccaaacagccacggcgaccggtcgtttgtcctcctctgatccaaaccttcagaatattccagtacgtaccccattgggccagaagatccgccgcgcgtttgtagctgaggagggttggcgtttagtggccctcgattatagccaaattgaattacgtgtccttgcccatctttctggcgatgagaacctcatccgcgtgtttcaggaaggcaaagacattcacactcaaacggcaagctggatgtttggattatcagctgaagcgatcgatcctttgatgcgtcgtgcagcgaagaccatcaatttcggtgttctctacggtatgagtgcccatcgtttgtcgcaggaattaggcattccctatgaagaagctgcggcgttcattcagcgctactttcaaagctatcccaaagttaaagcatggatcgagaagactctcgaagaaggccgcacacgtggttacgtagagaccttatttggacgtcgccgctatgttcccgatttaaacgctcgcgtgaaatctgtccgtgaagccgccgaacgcatggcgttcaacatgcctgtacagggcacggcagctgacctcatgaaacttgcaatggtgcgcctttttccacaattgcgtgaagttggtgcccgcatgctcttgcaggtccacgatgaactcttgttagaagcgccaaaagagcgtgcggaagaggtggcagccctcgcgaaagaggttatggaaggcgtgtggcccttagcggtgcctcttgaagtcgaagttggtattggcgaggattggttggctgccaaaggataatga

SEQ ID NO: 1910 - protein, 841 aa, synthetic construct
  REGION 1..841: note = Variant of DNA polymerase I from Thermus sp. strain 2.9
MHHHHHHGGSGMLPLFEPKGRVLLVDGHHLAYRNFFALKRLTTSRGEPVQGVYGFAKSLLKALKEDGDVVIVVFDAKAPSFRHEAYEAYKAGRAPTPEDFPRQLALMKELVDLLGLERLEVPGFEADDVLATLAKKAEREGYEVQILTADRDLFQLLSPRISVLHPEGHRITPEWLWEKYGLRPEQWVDFRALAGDPSDNIPGVKGIGEKTALKLLKEWGSLENLLKNLDQVKPESVREKILAHLEDLKLSRELSRVRTDLPLEVDFRGRREPDWEGLKAFLERLEFGSLLHEFGLLESPLPAEEAPWPPPEGAFLGYRLSRPEPMWAELLALAASAQGRVYRAEDPHGALRGLKEVRGLLAKDLAVVALREGLDLPPTDDPMLLAYLLDPSNTTPEGVARRYGGEWTEDAGERALLAERLHANLLGRLQGEERLLWLYEEVEKPLSRVLAHMEATGVKLDVAYLEALSLEVAAEMRRLEEEVFRLAGHSFYLNSRDQLERVLFDELGLPPIGKTEKTGKRSTSAAVLEALREVHPIVDKILQYRELAKLKGTYIDPLPALVHPKTGRLHTRFNQTATATGRLSSSDPNLQNIPVRTPLGQKIRRAFVAEEGWRLVALDYSQIELRVLAHLSGDENLIRVFQEGKDIHTQTASWMFGLSAEAIDPLMRRAAKTINFGVLYGMSAHRLSQELGIPYEEAAAFIQRYFQSYPKVKAWIEKTLEEGRTRGYVETLFGRRRYVPDLNARVKSVREAAERMAFNMPVQGTAADLMKLAMVRLFPQLREVGARMLLQVHDELLLEAPKERAEEVAALAKEVMEGVWPLAVPLEVEVGIGEDWLAAKG

SEQ ID NO: 1911 - DNA, 2529 bp, synthetic construct
  misc_feature 1..2529: note = Variant of DNA polymerase I from Thermus sp. strain 2.9
  source 1..2529: mol_type = other DNA
atgcaccatcatcatcatcatggcggtagcggcatgttaccgttgttcgaacctaaaggtcgcgtgcttctggttgatggccatcatctcgcgtatcgtaacttctttgccctgaaaggattaaccaccagccgtggcgagccggtacagggtgtctacggctttgcaaagtcgctcctgaaagctctgaaagaagacggtgatgtggtgattgttgtctttgatgcgaaagcgccaagttttcgccacgaagcgtacgaagcttacaaagccgggcgtgctccaacgccggaagactttcctcgccaattggcgcttatgaaggaattagtggatttgcttggcctcgaacgcttggaagttcccggtttcgaggcagacgacgtattagcgactctcgcaaagaaagccgaacgtgagggctatgaagtccagatcttgacagcagatcgcgatcttttccagcttttatctccgcgcatctcggtgttacacccggaagggcatcgtatcaccccggaatggctctgggagaaatatggtttgcgtcccgaacaatgggtggattttcgcgccttagcaggcgatccgagcgacaatattccgggagttaaaggtatcggcgagaagacggcgctcaagctccttaaagaatgggggtcgttggagaacttgcttaagaatttagatcaggtcaaaccagagtcagtgcgtgagaagattggggcacacctcgaagacctcaaattaagccgcgaattgtcccgtgtacgcaccgatttgccgctcgaagttgatttccgtggccgccgcgaacctgactgggagggtcttaaagcgtttttagagcgtcttgaatttggttcgctcttgcatgaattcggccttttagaaagcccgttaccagccgaagaagcaccttggccaccgcccgaaggcgcgtttttaggttaccgtttgagtcgcccggaaccgatgtgggccgaattattggctcttgcagcgtctgcccagggacgtgtgtatcgcgcggaagaccctcatggtgcgctccgcggcctcaaagaagtccgtggactccttgccaaagacttagctgttgttgcattgcgcgaaggtcttgatttacctccgactgatgatccaatgcttcttgcgtacctcttggacccgtcaaacacgacgcccgaaggcgtagcccgtcgttacggcggcgagtggaccgaagatgcaggcgagcgcgcgttattggccgaacgtttgcacgccaatttattaggacgtttgcaaggcgaggaacgtctcctctggctttacgaagaagtggagaaaccattgagtcgcgtgctcgcgcatatggaagctaccggtgtcaaattagacgtggcgtatttggaggcactcagccttgaagttgctgccgaaatgcgccgcttggaggaagaagtattccgtttagcaggccactccttttatcttaattctcgcgatcagttagaacgtgtgttgttcgatgaacttggtctccctcctatcggcaagacagagaagaccggtaaacgtagcacttcagcggcggttttagaagctcttcgcgaagtccatcccattgtggacaagatcttgcagtaccgcgaactcgcgaaattgaaaggcacctatattgaccctcttccggcattagtccacccgaaaacgggacgcctccatacccgcttcaaccaaacagccacggcgaccggtcgtttgtcctcctctgatccaaaccttcagaatattccagtacgtaccccattgggccagaagatccgccgcgcgtttgtagctgaggagggttggcgtttagtggccctcgattatagccaaattgaattacgtgtccttgcccatctttctggcgatgagaacctcatccgcgtgtttcaggaaggcaaagacattcacactcaaacggcaagctggatgtttggattatcagctgaagcgatcgatcctttgatgcgtcgtgcagcgaagaccatcaatttcggtgttctctacggtatgagtgcccatcgtttgtcgcaggaattaggcattccctatgaagaagctgcggcgttcattcagcgctactttcaaagctatcccaaagttaaagcatggatcgagaagactctcgaagaaggccgcacacgtggttacgtagagaccttatttggacgtcgccgctatgttcccgatttaaacgctcgcgtgaaatctgtccgtgaagccgccgaacgcatggcgttcaacatgcctgtacagggcacggcagctgacctcatgaaacttgcaatggtgcgcctttttccacaattgcgtgaagttggtgcccgcatgctcttgcaggtccacgatgaactcttgttagaagcgccaaaagagcgtgcggaagaggtggcagccctcgcgaaagaggttatggaaggcgtgtggcccttagcggtgcctcttgaagtcgaagttggtattggcgaggattggttggctgccaaaggataatga

SEQ ID NO: 1912 - protein, 841 aa, synthetic construct
  REGION 1..841: note = Variant of DNA polymerase I from Thermus sp. strain 2.9
MHHHHHHGGSGMLPLFEPKGRVLLVDGHHLAYRNFFALKGLTTSRGEPVQGVYGFAKSLLKALKEDGDVVIVVFDAKAPSFRHEAYEAYKAGRAPTPEDFPRQLALMKELVDLLGLERLEVPGFEADDVLATLAKKAEREGYEVQILTADRDLFQLLSPRISVLHPEGHRITPEWLWEKYGLRPEQWVDFRALAGDPSDNIPGVKGIGEKTALKLLKEWGSLENLLKNLDQVKPESVREKIGAHLEDLKLSRELSRVRTDLPLEVDFRGRREPDWEGLKAFLERLEFGSLLHEFGLLESPLPAEEAPWPPPEGAFLGYRLSRPEPMWAELLALAASAQGRVYRAEDPHGALRGLKEVRGLLAKDLAVVALREGLDLPPTDDPMLLAYLLDPSNTTPEGVARRYGGEWTEDAGERALLAERLHANLLGRLQGEERLLWLYEEVEKPLSRVLAHMEATGVKLDVAYLEALSLEVAAEMRRLEEEVFRLAGHSFYLNSRDQLERVLFDELGLPPIGKTEKTGKRSTSAAVLEALREVHPIVDKILQYRELAKLKGTYIDPLPALVHPKTGRLHTRFNQTATATGRLSSSDPNLQNIPVRTPLGQKIRRAFVAEEGWRLVALDYSQIELRVLAHLSGDENLIRVFQEGKDIHTQTASWMFGLSAEAIDPLMRRAAKTINFGVLYGMSAHRLSQELGIPYEEAAAFIQRYFQSYPKVKAWIEKTLEEGRTRGYVETLFGRRRYVPDLNARVKSVREAAERMAFNMPVQGTAADLMKLAMVRLFPQLREVGARMLLQVHDELLLEAPKERAEEVAALAKEVMEGVWPLAVPLEVEVGIGEDWLAAKG

SEQ ID NO: 1913 - DNA, 2529 bp, synthetic construct
  misc_feature 1..2529: note = Variant of DNA polymerase I from Thermus sp. strain 2.9
  source 1..2529: mol_type = other DNA
atgcaccatcatcatcatcatggcggtagcggcatgttaccgttgttcgaacctaaaggtcgcgtgcttctggttgatggccatcatctcgcgtatcgtaacttctttgccctgaaaggattaaccaccagccgtggcgagccggtacagggtgtctacggctttgcaaagtcgctcctgaaagctctgaaagaagacggtgatgtggtgattgttgtctttgatgcgaaagcgccaagttttcgccacgaagcgtacgaagcttacaaagccgggcgtgctccaacgccggaagactttcctcgccaattggcgcttatgaaggaattagtggatttgcttggcctcgaacgcttggaagttcccggtttcgaggcagacgacgtattagcgactctcgcaaagaaagccgaacgtgagggctatgaagtccagatcttgacagcagatcgcgatcttttccagcttttatctccgcgcatctcggtgttacacccggaagggcatcgtatcaccccggaatggctctgggagaaatatggtttgcgtcccgaacaatgggtggattttcgcgccttagcaggcgatccgagcgacaatattccgggagttaaaggtatcggcgagaagacggcgctcaagctccttaaagaatgggggtcgttggagaacttgcttaagaatttagatcaggtcaaaccagagtcagtgcgtgagaagattcttgcacacctcgaagacctcaaattaagccgcgaattgtcccgtgtacgcaccgatttgccgctcgaagttgatttccgtggccgccgcgaacctgactgggagggtcttaaagcgtttttagagcgtcttgaatttggttcgctcttgcatgaattcggccttttagaaagcccgttaccagccgaagaagcaccttggccaccgcccgaaggcgcgtttttaggttaccgtttgagtcgcccggaaccgatgtgggccgaattattggctcttgcagcgtctgcccagggacgtgtgtatcgcgcggaagaccctcatggtgcgctccgcggcctcaaagaagtccgtggactccttgccaaagacttagctgttgttgcattgcgcgaaggtcttgatttacctccgactgatgatccaatgcttcttgcgtacctcttggacccgtcaaacacgacgcccgaaggcgtagcccgtcgttacggcggcgagtggaccgaagatgcaggcgagcgcgcgttattggccgaacgtttgcacgccaatttattaggacgtttgcaaggcgaggaacgtctcctctggctttacgaagaagtggagaaaccattgagtcgcgtgctcgcgcatatggaagctaccggtgtcaaattagacgtggcgtatttggaggcactcagccttgaagttgctgccgaaatgcgccgcttggaggaagaagtattccgtttagcaggccactccttttatcttaattctcgcgatcagttagaacgtgtgttgttcgatgaacttggtctccctcctatcggcaagacagagaagaccggtaaacgtagcacttcagcggcggttttagaagctcttcgcgaagtccatcccattgtggacaagatcttgcagtaccgcgaactcgcgaaattgaaaggcacctatattgaccctcttccgggtttagtccacccgaaaacgggacgcctccatacccgcttcaaccaaacagccacggcgaccggtcgtttgtcctcctctgatccaaaccttcagaatattccagtacgtaccccattgggccagaagatccgccgcgcgtttgtagctgaggagggttggcgtttagtggccctcgattatagccaaattgaattacgtgtccttgcccatctttctggcgatgagaacctcatccgcgtgtttcaggaaggcaaagacattcacactcaaacggcaagctggatgtttggattatcagctgaagcgatcgatcctttgatgcgtcgtgcagcgaagaccatcaatttcggtgttctctacggtatgagtgcccatcgtttgtcgcaggaattaggcattccctatgaagaagctgcggcgttcattcagcgctactttcaaagctatcccaaagttaaagcatggatcgagaagactctcgaagaaggccgcacacgtggttacgtagagaccttatttggacgtcgccgctatgttcccgatttaaacgctcgcgtgaaatctgtccgtgaagccgccgaacgcatggcgttcaacatgcctgtacagggcacggcagctgacctcatgaaacttgcaatggtgcgcctttttccacaattgcgtgaagttggtgcccgcatgctcttgcaggtccacgatgaactcttgttagaagcgccaaaagagcgtgcggaagaggtggcagccctcgcgaaagaggttatggaaggcgtgtggcccttagcggtgcctcttgaagtcgaagttggtattggcgaggattggttggctgccaaaggataatga

SEQ ID NO: 1914 - protein, 841 aa, synthetic construct
  REGION 1..841: note = Variant of DNA polymerase I from Thermus sp. strain 2.9
MHHHHHHGGSGMLPLFEPKGRVLLVDGHHLAYRNFFALKGLTTSRGEPVQGVYGFAKSLLKALKEDGDVVIVVFDAKAPSFRHEAYEAYKAGRAPTPEDFPRQLALMKELVDLLGLERLEVPGFEADDVLATLAKKAEREGYEVQILTADRDLFQLLSPRISVLHPEGHRITPEWLWEKYGLRPEQWVDFRALAGDPSDNIPGVKGIGEKTALKLLKEWGSLENLLKNLDQVKPESVREKILAHLEDLKLSRELSRVRTDLPLEVDFRGRREPDWEGLKAFLERLEFGSLLHEFGLLESPLPAEEAPWPPPEGAFLGYRLSRPEPMWAELLALAASAQGRVYRAEDPHGALRGLKEVRGLLAKDLAVVALREGLDLPPTDDPMLLAYLLDPSNTTPEGVARRYGGEWTEDAGERALLAERLHANLLGRLQGEERLLWLYEEVEKPLSRVLAHMEATGVKLDVAYLEALSLEVAAEMRRLEEEVFRLAGHSFYLNSRDQLERVLFDELGLPPIGKTEKTGKRSTSAAVLEALREVHPIVDKILQYRELAKLKGTYIDPLPGLVHPKTGRLHTRFNQTATATGRLSSSDPNLQNIPVRTPLGQKIRRAFVAEEGWRLVALDYSQIELRVLAHLSGDENLIRVFQEGKDIHTQTASWMFGLSAEAIDPLMRRAAKTINFGVLYGMSAHRLSQELGIPYEEAAAFIQRYFQSYPKVKAWIEKTLEEGRTRGYVETLFGRRRYVPDLNARVKSVREAAERMAFNMPVQGTAADLMKLAMVRLFPQLREVGARMLLQVHDELLLEAPKERAEEVAALAKEVMEGVWPLAVPLEVEVGIGEDWLAAKG

SEQ ID NO: 1915 - DNA, 2529 bp, synthetic construct
  misc_feature 1..2529: note = Variant of DNA polymerase I from Thermus sp. strain 2.9
  source 1..2529: mol_type = other DNA
atgcaccatcatcatcatcatggcggtagcggcatgttaccgttgttcgaacctaaaggtcgcgtgcttctggttgatggccatcatctcgcgtatcgtaacttctttgccctgaaaggattaaccaccagccgtggcgagccggtacagggtgtctacggctttgcaaagtcgctcctgaaagctctgaaagaagacggtgatgtggtgattgttgtctttgatgcgaaagcgccaagttttcgccacgaagcgtacgaagcttacaaagccgggcgtgctccaacgccggaagactttcctcgccaattggcgcttatgaaggaattagtggatttgcttggcctcgaacgcttggaagttcccggtttcgaggcagacgacgtattagcgactctcgcaaagaaagccgaacgtgagggctatgaagtccagatcttgacagcagatcgcgatcttttccagcttttatctccgcgcatctcggtgttacacccggaagggcatcgtatcaccccggaatggctctgggagaaatatggtttgcgtcccgaacaatgggtggattttcgcgccttagcaggcgatccgagcgacaatattccgggagttaaaggtatcggcgagaagacggcgctcaagctccttaaagaatgggggtcgttggagaacttgcttaagaatttagatcaggtcaaaccagagtcagtgcgtgagaagattcttgcacacctcgaagacctcaaattaagccgcgaattgtcccgtgtacgcaccgatttgccgctcgaagttgatttccgtggccgccgcgaacctgactgggagggtcttaaagcgtttttagagcgtcttgaatttggttcgctcttgcatgaattcggccttttagcgagcccgttaccagccgaagaagcaccttggccaccgcccgaaggcgcgtttttaggttaccgtttgagtcgcccggaaccgatgtgggccgaattattggctcttgcagcgtctgcccagggacgtgtgtatcgcgcggaagaccctcatggtgcgctccgcggcctcaaagaagtccgtggactccttgccaaagacttagctgttgttgcattgcgcgaaggtcttgatttacctccgactgatgatccaatgcttcttgcgtacctcttggacccgtcaaacacgacgcccgaaggcgtagcccgtcgttacggcggcgagtggaccgaagatgcaggcgagcgcgcgttattggccgaacgtttgcacgccaatttattaggacgtttgcaaggcgaggaacgtctcctctggctttacgaagaagtggagaaaccattgagtcgcgtgctcgcgcatatggaagctaccggtgtcaaattagacgtggcgtatttggaggcactcagccttgaagttgctgccgaaatgcgccgcttggaggaagaagtattccgtttagcaggccactccttttatcttaattctcgcgatcagttagaacgtgtgttgttcgatgaacttggtctccctcctatcggcaagacagagaagaccggtaaacgtagcacttcagcggcggttttagaagctcttcgcgaagtccatcccattgtggacaagatcttgcagtaccgcgaactcgcgaaattgaaaggcacctatattgaccctcttccggcattagtccacccgaaaacgggacgcctccatacccgcttcaaccaaacagccacggcgaccggtcgtttgtcctcctctgatccaaaccttcagaatattccagtacgtaccccattgggccagaagatccgccgcgcgtttgtagctgaggagggttggcgtttagtggccctcgattatagccaaattgaattacgtgtccttgcccatctttctggcgatgagaacctcatccgcgtgtttcaggaaggcaaagacattcacactcaaacggcaagctggatgtttggattatcagctgaagcgatcgatcctttgatgcgtcgtgcagcgaagaccatcaatttcggtgttctctacggtatgagtgcccatcgtttgtcgcaggaattaggcattccctatgaagaagctgcggcgttcattcagcgctactttcaaagctatcccaaagttaaagcatggatcgagaagactctcgaagaaggccgcacacgtggttacgtagagaccttatttggacgtcgccgctatgttcccgatttaaacgctcgcgtgaaatctgtccgtgaagccgccgaacgcatggcgttcaacatgcctgtacagggcacggcagctgacctcatgaaacttgcaatggtgcgcctttttccacaattgcgtgaagttggtgcccgcatgctcttgcaggtccacgatgaactcttgttagaagcgccaaaagagcgtgcggaagaggtggcagccctcgcgaaagaggttatggaaggcgtgtggcccttagcggtgcctcttgaagtcgaagttggtattggcgaggattggttggctgccaaaggataatga

SEQ ID NO: 1916 - protein, 841 aa, synthetic construct
  REGION 1..841: note = Variant of DNA polymerase I from Thermus sp. strain 2.9
MHHHHHHGGSGMLPLFEPKGRVLLVDGHHLAYRNFFALKGLTTSRGEPVQGVYGFAKSLLKALKEDGDVVIVVFDAKAPSFRHEAYEAYKAGRAPTPEDFPRQLALMKELVDLLGLERLEVPGFEADDVLATLAKKAEREGYEVQILTADRDLFQLLSPRISVLHPEGHRITPEWLWEKYGLRPEQWVDFRALAGDPSDNIPGVKGIGEKTALKLLKEWGSLENLLKNLDQVKPESVREKILAHLEDLKLSRELSRVRTDLPLEVDFRGRREPDWEGLKAFLERLEFGSLLHEFGLLASPLPAEEAPWPPPEGAFLGYRLSRPEPMWAELLALAASAQGRVYRAEDPHGALRGLKEVRGLLAKDLAVVALREGLDLPPTDDPMLLAYLLDPSNTTPEGVARRYGGEWTEDAGERALLAERLHANLLGRLQGEERLLWLYEEVEKPLSRVLAHMEATGVKLDVAYLEALSLEVAAEMRRLEEEVFRLAGHSFYLNSRDQLERVLFDELGLPPIGKTEKTGKRSTSAAVLEALREVHPIVDKILQYRELAKLKGTYIDPLPALVHPKTGRLHTRFNQTATATGRLSSSDPNLQNIPVRTPLGQKIRRAFVAEEGWRLVALDYSQIELRVLAHLSGDENLIRVFQEGKDIHTQTASWMFGLSAEAIDPLMRRAAKTINFGVLYGMSAHRLSQELGIPYEEAAAFIQRYFQSYPKVKAWIEKTLEEGRTRGYVETLFGRRRYVPDLNARVKSVREAAERMAFNMPVQGTAADLMKLAMVRLFPQLREVGARMLLQVHDELLLEAPKERAEEVAALAKEVMEGVWPLAVPLEVEVGIGEDWLAAKG

SEQ ID NO: 1917 - DNA, 2529 bp, synthetic construct
  misc_feature 1..2529: note = Variant of DNA polymerase I from Thermus sp. strain 2.9
  source 1..2529: mol_type = other DNA
atgcaccatcatcatcatcatggcggtagcggcatgttaccgttgttcgaacctaaaggtcgcgtgcttctggttgatggccatcatctcgcgtatcgtaacttctttgccctgaaaggattaaccaccagccgtggcgagccggtacagggtgtctacggctttgcaaagtcgctcctgaaagctctgaaagaagacggtgatgtggtgattgttgtctttgatgcgaaagcgccaagttttcgccacgaagcgtacgaagcttacaaagccgggcgtgctccaacgccggaagactttcctcgccaattggcgcttatgaaggaattagtggatttgcttggcctcgaacgcttggaagttcccggtttcgaggcagacgacgtattagcgactctcgcaaagaaagccgaacgtgagggctatgaagtccagatcttgacagcagatcgcgatcttttccagcttttatctccgcgcatctcggtgttacacccggaagggcatcgtatcaccccggaatggctctgggagaaatatggtttgcgtcccgaacaatgggtggattttcgcgccttagcaggcgatccgagcgacaatattccgggagttaaaggtatcggcgagaagacggcgctcaagctccttaaagaatgggggtcgttggagaacttgcttaagaatttagatcaggtcaaaccagagtcagtgcgtgagaagattcttgcacacctcgaagacctcaaattaagccgcgaattgtcccgtgtacgcaccgatttgccgctcgaagttgatttccgtggccgccgcgaacctgactgggagggtcttaaagcgtttttagagcgtcttgaatttggttcgctcttgcatgaattcggccttttagaaagcccgttaccagccgaagaagcaccttggccaccgcccgaaggcgcgtttttaggttaccgtttgagtcgcccggaaccgatgtgggccgaattattggctcttgcagcgtctgcccagggacgtgtgtatcgcgcggaagaccctcatggtgcgctccgcggcctcaaagaagtccgtggactccttgccaaagacttagctgttgttgcattgcgcgaaggtcttgatttacctccgactgatgatccaatgcttcttgcgtacctcttggacccgtcaaacacgacgcccgaaggcgtagcccgtcgttacggcggcgagtggaccgaagatgcaggcgagcgcgcgttattggccgaacgtttgcacgccaatttattaggacgtttgcaaggcgaggaacgtctcctctggctttacgaagaagtggagaaaccattgagtcgcgtgctcgcgcatatggaagctaccggtgtcaaattagacgtggcgtatttggaggcactcagccttgaagttgctgccgaaatgcgccgcttggaggaagaagtattccgtttagcaggccgttccttttatcttaattctcgcgatcagttagaacgtgtgttgttcgatgaacttggtctccctcctatcggcaagacagagaagaccggtaaacgtagcacttcagcggcggttttagaagctcttcgcgaagtccatcccattgtggacaagatcttgcagtaccgcgaactcgcgaaattgaaaggcacctatattgaccctcttccggcattagtccacccgaaaacgggacgcctccatacccgcttcaaccaaacagccacggcgaccggtcgtttgtcctcctctgatccaaaccttcagaatattccagtacgtaccccattgggccagaagatccgccgcgcgtttgtagctgaggagggttggcgtttagtggccctcgattatagccaaattgaattacgtgtccttgcccatctttctggcgatgagaacctcatccgcgtgtttcaggaaggcaaagacattcacactcaaacggcaagctggatgtttggattatcagctgaagcgatcgatcctttgatgcgtcgtgcagcgaagaccatcaatttcggtgttctctacggtatgagtgcccatcgtttgtcgcaggaattaggcattccctatgaagaagctgcggcgttcattcagcgctactttcaaagctatcccaaagttaaagcatggatcgagaagactctcgaagaaggccgcacacgtggttacgtagagaccttatttggacgtcgccgctatgttcccgatttaaacgctcgcgtgaaatctgtccgtgaagccgccgaacgcatggcgttcaacatgcctgtacagggcacggcagctgacctcatgaaacttgcaatggtgcgcctttttccacaattgcgtgaagttggtgcccgcatgctcttgcaggtccacgatgaactcttgttagaagcgccaaaagagcgtgcggaagaggtggcagccctcgcgaaagaggttatggaaggcgtgtggcccttagcggtgcctcttgaagtcgaagttggtattggcgaggattggttggctgccaaaggataatga

SEQ ID NO: 1918 - protein, 841 aa, synthetic construct
  REGION 1..841: note = Variant of DNA polymerase I from Thermus sp. strain 2.9
MHHHHHHGGSGMLPLFEPKGRVLLVDGHHLAYRNFFALKGLTTSRGEPVQGVYGFAKSLLKALKEDGDVVIVVFDAKAPSFRHEAYEAYKAGRAPTPEDFPRQLALMKELVDLLGLERLEVPGFEADDVLATLAKKAEREGYEVQILTADRDLFQLLSPRISVLHPEGHRITPEWLWEKYGLRPEQWVDFRALAGDPSDNIPGVKGIGEKTALKLLKEWGSLENLLKNLDQVKPESVREKILAHLEDLKLSRELSRVRTDLPLEVDFRGRREPDWEGLKAFLERLEFGSLLHEFGLLESPLPAEEAPWPPPEGAFLGYRLSRPEPMWAELLALAASAQGRVYRAEDPHGALRGLKEVRGLLAKDLAVVALREGLDLPPTDDPMLLAYLLDPSNTTPEGVARRYGGEWTEDAGERALLAERLHANLLGRLQGEERLLWLYEEVEKPLSRVLAHMEATGVKLDVAYLEALSLEVAAEMRRLEEEVFRLAGRSFYLNSRDQLERVLFDELGLPPIGKTEKTGKRSTSAAVLEALREVHPIVDKILQYRELAKLKGTYIDPLPALVHPKTGRLHTRFNQTATATGRLSSSDPNLQNIPVRTPLGQKIRRAFVAEEGWRLVALDYSQIELRVLAHLSGDENLIRVFQEGKDIHTQTASWMFGLSAEAIDPLMRRAAKTINFGVLYGMSAHRLSQELGIPYEEAAAFIQRYFQSYPKVKAWIEKTLEEGRTRGYVETLFGRRRYVPDLNARVKSVREAAERMAFNMPVQGTAADLMKLAMVRLFPQLREVGARMLLQVHDELLLEAPKERAEEVAALAKEVMEGVWPLAVPLEVEVGIGEDWLAAKG

SEQ ID NO: 1919 - DNA, 2529 bp, synthetic construct
  misc_feature 1..2529: note = Variant of DNA polymerase I from Thermus sp. strain 2.9
  source 1..2529: mol_type = other DNA
atgcaccatcatcatcatcatggcggtagcggcatgttaccgttgttcgaacctaaaggtcgcgtgcttctggttgatggccatcatctcgcgtatcgtaacttctttgccctgaaaggattaaccaccagccgtggcgagccggtacagggtgtctacggctttgcaaagtcgctcctgaaagctctgaaagaagacggtgatgtggtgattgttgtctttgatgcgaaagcgccaagttttcgccacgaagcgtacgaagcttacaaagccgggcgtgctccaacgccggaagactttcctcgccaattggcgcttatgaaggaattagtggatttgcttggcctcgaacgcttggaagttcccggtttcgaggcagacgacgtattagcgactctcgcaaagaaagccgaacgtgagggctatgaagtccagatcttgacagcagatcgcgatcttttccagcttttatctccgcgcatctcggtgttacacccggaagggcatcgtatcaccccggaatggctctgggagaaatatggtttgcgtcccgaacaatgggtggattttcgcgccttagcaggcgatccgagcgacaatattccgggagttaaaggtatcggcgagaagacggcgctcaagctccttaaagaatgggggtcgttggagaacttgcttaagaatttagatcaggtcaaaccagagtcagtgcgtgagaagattcttgcacacctcgaagacctcaaattaagccgcgaattgtcccgtgtacgcaccgatttgccgctcgaagttgatttccgtggccgccgcgaacctgactgggagggtcttaaagcgtttttagagcgtcttgaatttggttcgctcttgcatgaattcggccttttagaaagcccgttaccagccgaagaagcaccttggccaccgcccgaaggcgcgtttttaggttaccgtttgagtcgcccggaaccgatgtgggccgaattatatgctcttgcagcgtctgcccagggacgtgtgtatcgcgcggaagaccctcatggtgcgctccgcggcctcaaagaagtccgtggactccttgccaaagacttagctgttgttgcattgcgcgaaggtcttgatttacctccgactgatgatccaatgcttcttgcgtacctcttggacccgtcaaacacgacgcccgaaggcgtagcccgtcgttacggcggcgagtggaccgaagatgcaggcgagcgcgcgttattggccgaacgtttgcacgccaatttattaggacgtttgcaaggcgaggaacgtctcctctggctttacgaagaagtggagaaaccattgagtcgcgtgctcgcgcatatggaagctaccggtgtcaaattagacgtggcgtatttggaggcactcagccttgaagttgctgccgaaatgcgccgcttggaggaagaagtattccgtttagcaggccactccttttatcttaattctcgcgatcagttagaacgtgtgttgttcgatgaacttggtctccctcctatcggcaagacagagaagaccggtaaacgtagcacttcagcggcggttttagaagctcttcgcgaagtccatcccattgtggacaagatcttgcagtaccgcgaactcgcgaaattgaaaggcacctatattgaccctcttccggcattagtccacccgaaaacgggacgcctccatacccgcttcaaccaaacagccacggcgaccggtcgtttgtcctcctctgatccaaaccttcagaatattccagtacgtaccccattgggccagaagatccgccgcgcgtttgtagctgaggagggttggcgtttagtggccctcgattatagccaaattgaattacgtgtccttgcccatctttctggcgatgagaacctcatccgcgtgtttcaggaaggcaaagacattcacactcaaacggcaagctggatgtttggattatcagctgaagcgatcgatcctttgatgcgtcgtgcagcgaagaccatcaatttcggtgttctctacggtatgagtgcccatcgtttgtcgcaggaattaggcattccctatgaagaagctgcggcgttcattcagcgctactttcaaagctatcccaaagttaaagcatggatcgagaagactctcgaagaaggccgcacacgtggttacgtagagaccttatttggacgtcgccgctatgttcccgatttaaacgctcgcgtgaaatctgtccgtgaagccgccgaacgcatggcgttcaacatgcctgtacagggcacggcagctgacctcatgaaacttgcaatggtgcgcctttttccacaattgcgtgaagttggtgcccgcatgctcttgcaggtccacgatgaactcttgttagaagcgccaaaagagcgtgcggaagaggtggcagccctcgcgaaagaggttatggaaggcgtgtggcccttagcggtgcctcttgaagtcgaagttggtattggcgaggattggttggctgccaaaggataatga

SEQ ID NO: 1920 - protein, 841 aa, synthetic construct
  REGION 1..841: note = Variant of DNA polymerase I from Thermus sp. strain 2.9
MHHHHHHGGSGMLPLFEPKGRVLLVDGHHLAYRNFFALKGLTTSRGEPVQGVYGFAKSLLKALKEDGDVVIVVFDAKAPSFRHEAYEAYKAGRAPTPEDFPRQLALMKELVDLLGLERLEVPGFEADDVLATLAKKAEREGYEVQILTADRDLFQLLSPRISVLHPEGHRITPEWLWEKYGLRPEQWVDFRALAGDPSDNIPGVKGIGEKTALKLLKEWGSLENLLKNLDQVKPESVREKILAHLEDLKLSRELSRVRTDLPLEVDFRGRREPDWEGLKAFLERLEFGSLLHEFGLLESPLPAEEAPWPPPEGAFLGYRLSRPEPMWAELYALAASAQGRVYRAEDPHGALRGLKEVRGLLAKDLAVVALREGLDLPPTDDPMLLAYLLDPSNTTPEGVARRYGGEWTEDAGERALLAERLHANLLGRLQGEERLLWLYEEVEKPLSRVLAHMEATGVKLDVAYLEALSLEVAAEMRRLEEEVFRLAGHSFYLNSRDQLERVLFDELGLPPIGKTEKTGKRSTSAAVLEALREVHPIVDKILQYRELAKLKGTYIDPLPALVHPKTGRLHTRFNQTATATGRLSSSDPNLQNIPVRTPLGQKIRRAFVAEEGWRLVALDYSQIELRVLAHLSGDENLIRVFQEGKDIHTQTASWMFGLSAEAIDPLMRRAAKTINFGVLYGMSAHRLSQELGIPYEEAAAFIQRYFQSYPKVKAWIEKTLEEGRTRGYVETLFGRRRYVPDLNARVKSVREAAERMAFNMPVQGTAADLMKLAMVRLFPQLREVGARMLLQVHDELLLEAPKERAEEVAALAKEVMEGVWPLAVPLEVEVGIGEDWLAAKG

SEQ ID NO: 1921 - DNA, 2529 bp, synthetic construct
  misc_feature 1..2529: note = Variant of DNA polymerase I from Thermus sp. strain 2.9
  source 1..2529: mol_type = other DNA
atgcaccatcatcatcatcatggcggtagcggcatgttaccgttgttcgaacctaaaggtcgcgtgcttctggttgatggccatcatctcgcgtatcgtaacttctttgccctgaaaggattaaccaccagccgtggcgagccggtacagggtgtctacggctttgcaaagtcgctcctgaaagctctgaaagaagacggtgatgtggtgattgttgtctttgatgcgaaagcgccaagttttcgccacgaagcgtacgaagcttacaaagccgggcgtgctccaacgccggaagactttcctcgccaattggcgcttatgaaggaattagtggatttgcttggcctcgaacgcttggaagttcccggtttcgaggcagacgacgtattagcgactctcgcaaagaaagccgaacgtgagggctatgaagtccagatcttgacagcagatcgcgatcttttccagcttttatctccgcgcatctcggtgttacacccggaagggcatcgtatcaccccggaatggctctgggagaaatatggtttgcgtcccgaacaatgggtggattttcgcgccttagcaggcgatccgagcgacaatattccgggagttaaaggtatcggcgagaagacggcgctcaagctccttaaagaatgggggtcgttggagaacttggagaagaatttagatcaggtcaaaccagagtcagtgcgtgagaagattcttgcacacctcgaagacctcaaattaagccgcgaattgtcccgtgtacgcaccgatttgccgctcgaagttgatttccgtggccgccgcgaacctgactgggagggtcttaaagcgtttttagagcgtcttgaatttggttcgctcttgcatgaattcggccttttagaaagcccgttaccagccgaagaagcaccttggccaccgcccgaaggcgcgtttttaggttaccgtttgagtcgcccggaaccgatgtgggccgaattattggctcttgcagcgtctgcccagggacgtgtgtatcgcgcggaagaccctcatggtgcgctccgcggcctcaaagaagtccgtggactccttgccaaagacttagctgttgttgcattgcgcgaaggtcttgatttacctccgactgatgatccaatgcttcttgcgtacctcttggacccgtcaaacacgacgcccgaaggcgtagcccgtcgttacggcggcgagtggaccgaagatgcaggcgagcgcgcgttattggccgaacgtttgcacgccaatttattaggacgtttgcaaggcgaggaacgtctcctctggctttacgaagaagtggagaaaccattgagtcgcgtgctcgcgcatatggaagctaccggtgtcaaattagacgtggcgtatttggaggcactcagccttgaagttgctgccgaaatgcgccgcttggaggaagaagtattccgtttagcaggccactccttttatcttaattctcgcgatcagttagaacgtgtgttgttcgatgaacttggtctccctcctatcggcaagacagagaagaccggtaaacgtagcacttcagcggcggttttagaagctcttcgcgaagtccatcccattgtggacaagatcttgcagtaccgcgaactcgcgaaattgaaaggcacctatattgaccctcttccggcattagtccacccgaaaacgggacgcctccatacccgcttcaaccaaacagccacggcgaccggtcgtttgtcctcctctgatccaaaccttcagaatattccagtacgtaccccattgggccagaagatccgccgcgcgtttgtagctgaggagggttggcgtttagtggccctcgattatagccaaattgaattacgtgtccttgcccatctttctggcgatgagaacctcatccgcgtgtttcaggaaggcaaagacattcacactcaaacggcaagctggatgtttggattatcagctgaagcgatcgatcctttgatgcgtcgtgcagcgaagaccatcaatttcggtgttctctacggtatgagtgcccatcgtttgtcgcaggaattaggcattccctatgaagaagctgcggcgttcattcagcgctactttcaaagctatcccaaagttaaagcatggatcgagaagactctcgaagaaggccgcacacgtggttacgtagagaccttatttggacgtcgccgctatgttcccgatttaaacgctcgcgtgaaatctgtccgtgaagccgccgaacgcatggcgttcaacatgcctgtacagggcacggcagctgacctcatgaaacttgcaatggtgcgcctttttccacaattgcgtgaagttggtgcccgcatgctcttgcaggtccacgatgaactcttgttagaagcgccaaaagagcgtgcggaagaggtggcagccctcgcgaaagaggttatggaaggcgtgtggcccttagcggtgcctcttgaagtcgaagttggtattggcgaggattggttggctgccaaaggataatga

SEQ ID NO: 1922 - protein, 841 aa, synthetic construct
  REGION 1..841: note = Variant of DNA polymerase I from Thermus sp. strain 2.9
MHHHHHHGGSGMLPLFEPKGRVLLVDGHHLAYRNFFALKGLTTSRGEPVQGVYGFAKSLLKALKEDGDVVIVVFDAKAPSFRHEAYEAYKAGRAPTPEDFPRQLALMKELVDLLGLERLEVPGFEADDVLATLAKKAEREGYEVQILTADRDLFQLLSPRISVLHPEGHRITPEWLWEKYGLRPEQWVDFRALAGDPSDNIPGVKGIGEKTALKLLKEWGSLENLEKNLDQVKPESVREKILAHLEDLKLSRELSRVRTDLPLEVDFRGRREPDWEGLKAFLERLEFGSLLHEFGLLESPLPAEEAPWPPPEGAFLGYRLSRPEPMWAELLALAASAQGRVYRAEDPHGALRGLKEVRGLLAKDLAVVALREGLDLPPTDDPMLLAYLLDPSNTTPEGVARRYGGEWTEDAGERALLAERLHANLLGRLQGEERLLWLYEEVEKPLSRVLAHMEATGVKLDVAYLEALSLEVAAEMRRLEEEVFRLAGHSFYLNSRDQLERVLFDELGLPPIGKTEKTGKRSTSAAVLEALREVHPIVDKILQYRELAKLKGTYIDPLPALVHPKTGRLHTRFNQTATATGRLSSSDPNLQNIPVRTPLGQKIRRAFVAEEGWRLVALDYSQIELRVLAHLSGDENLIRVFQEGKDIHTQTASWMFGLSAEAIDPLMRRAAKTINFGVLYGMSAHRLSQELGIPYEEAAAFIQRYFQSYPKVKAWIEKTLEEGRTRGYVETLFGRRRYVPDLNARVKSVREAAERMAFNMPVQGTAADLMKLAMVRLFPQLREVGARMLLQVHDELLLEAPKERAEEVAALAKEVMEGVWPLAVPLEVEVGIGEDWLAAKG

SEQ ID NO: 1923 - DNA, 2529 bp, synthetic construct
  misc_feature 1..2529: note = Variant of DNA polymerase I from Thermus sp. strain 2.9
  source 1..2529: mol_type = other DNA
atgcaccatcatcatcatcatggcggtagcggcatgttaccgttgttcgaacctaaaggtcgcgtgcttctggttgatggccatcatctcgcgtataagaacttctttgccctgaaaggattaaccaccagccgtggcgagccggtacagggtgtctacggctttgcaaagtcgctcctgaaagctctgaaagaagacggtgatgtggtgattgttgtctttgatgcgaaagcgccaagttttcgccacgaagcgtacgaagcttacaaagccgggcgtgctccaacgccggaagactttcctcgccaattggcgcttatgaaggaattagtggatttgcttggcctcgaacgcttggaagttcccggtttcgaggcagacgacgtattagcgactctcgcaaagaaagccgaacgtgagggctatgaagtccagatcttgacagcagatcgcgatcttttccagcttttatctccgcgcatctcggtgttacacccggaagggcatcgtatcaccccggaatggctctgggagaaatatggtttgcgtcccgaacaatgggtggattttcgcgccttagcaggcgatccgagcgacaatattccgggagttaaaggtatcggcgagaagacggcgctcaagctccttaaagaatgggggtcgttggagaacttgcttaagaatttagatcaggtcaaaccagagtcagtgcgtgagaagattcttgcacacctcgaagacctcaaattaagccgcgaattgtcccgtgtacgcaccgatttgccgctcgaagttgatttccgtggccgccgcgaacctgactgggagggtcttaaagcgtttttagagcgtcttgaatttggttcgctcttgcatgaattcggccttttagaaagcccgttaccagccgaagaagcaccttggccaccgcccgaaggcgcgtttttaggttaccgtttgagtcgcccggaaccgatgtgggccgaattattggctcttgcagcgtctgcccagggacgtgtgtatcgcgcggaagaccctcatggtgcgctccgcggcctcaaagaagtccgtggactccttgccaaagacttagctgttgttgcattgcgcgaaggtcttgatttacctccgactgatgatccaatgcttcttgcgtacctcttggacccgtcaaacacgacgcccgaaggcgtagcccgtcgttacggcggcgagtggaccgaagatgcaggcgagcgcgcgttattggccgaacgtttgcacgccaatttattaggacgtttgcaaggcgaggaacgtctcctctggctttacgaagaagtggagaaaccattgagtcgcgtgctcgcgcatatggaagctaccggtgtcaaattagacgtggcgtatttggaggcactcagccttgaagttgctgccgaaatgcgccgcttggaggaagaagtattccgtttagcaggccactccttttatcttaattctcgcgatcagttagaacgtgtgttgttcgatgaacttggtctccctcctatcggcaagacagagaagaccggtaaacgtagcacttcagcggcggttttagaagctcttcgcgaagtccatcccattgtggacaagatcttgcagtaccgcgaactcgcgaaattgaaaggcacctatattgaccctcttccggcattagtccacccgaaaacgggacgcctccatacccgcttcaaccaaacagccacggcgaccggtcgtttgtcctcctctgatccaaaccttcagaatattccagtacgtaccccattgggccagaagatccgccgcgcgtttgtagctgaggagggttggcgtttagtggccctcgattatagccaaattgaattacgtgtccttgcccatctttctggcgatgagaacctcatccgcgtgtttcaggaaggcaaagacattcacactcaaacggcaagctggatgtttggattatcagctgaagcgatcgatcctttgatgcgtcgtgcagcgaagaccatcaatttcggtgttctctacggtatgagtgcccatcgtttgtcgcaggaattaggcattccctatgaagaagctgcggcgttcattcagcgctactttcaaagctatcccaaagttaaagcatggatcgagaagactctcgaagaaggccgcacacgtggttacgtagagaccttatttggacgtcgccgctatgttcccgatttaaacgctcgcgtgaaatctgtccgtgaagccgccgaacgcatggcgttcaacatgcctgtacagggcacggcagctgacctcatgaaacttgcaatggtgcgcctttttccacaattgcgtgaagttggtgcccgcatgctcttgcaggtccacgatgaactcttgttagaagcgccaaaagagcgtgcggaagaggtggcagccctcgcgaaagaggttatggaaggcgtgtggcccttagcggtgcctcttgaagtcgaagttggtattggcgaggattggttggctgccaaaggataatga

SEQ ID NO: 1924 - protein, 841 aa, synthetic construct
  REGION 1..841: note = Variant of DNA polymerase I from Thermus sp. strain 2.9
MHHHHHHGGSGMLPLFEPKGRVLLVDGHHLAYKNFFALKGLTTSRGEPVQGVYGFAKSLLKALKEDGDVVIVVFDAKAPSFRHEAYEAYKAGRAPTPEDFPRQLALMKELVDLLGLERLEVPGFEADDVLATLAKKAEREGYEVQILTADRDLFQLLSPRISVLHPEGHRITPEWLWEKYGLRPEQWVDFRALAGDPSDNIPGVKGIGEKTALKLLKEWGSLENLLKNLDQVKPESVREKILAHLEDLKLSRELSRVRTDLPLEVDFRGRREPDWEGLKAFLERLEFGSLLHEFGLLESPLPAEEAPWPPPEGAFLGYRLSRPEPMWAELLALAASAQGRVYRAEDPHGALRGLKEVRGLLAKDLAVVALREGLDLPPTDDPMLLAYLLDPSNTTPEGVARRYGGEWTEDAGERALLAERLHANLLGRLQGEERLLWLYEEVEKPLSRVLAHMEATGVKLDVAYLEALSLEVAAEMRRLEEEVFRLAGHSFYLNSRDQLERVLFDELGLPPIGKTEKTGKRSTSAAVLEALREVHPIVDKILQYRELAKLKGTYIDPLPALVHPKTGRLHTRFNQTATATGRLSSSDPNLQNIPVRTPLGQKIRRAFVAEEGWRLVALDYSQIELRVLAHLSGDENLIRVFQEGKDIHTQTASWMFGLSAEAIDPLMRRAAKTINFGVLYGMSAHRLSQELGIPYEEAAAFIQRYFQSYPKVKAWIEKTLEEGRTRGYVETLFGRRRYVPDLNARVKSVREAAERMAFNMPVQGTAADLMKLAMVRLFPQLREVGARMLLQVHDELLLEAPKERAEEVAALAKEVMEGVWPLAVPLEVEVGIGEDWLAAKG

SEQ ID NO: 1925 - DNA, 2529 bp, synthetic construct
  misc_feature 1..2529: note = Variant of DNA polymerase I from Thermus sp. strain 2.9
  source 1..2529: mol_type = other DNA
atgcaccatcatgctcatcatggcggtagcggcatgttaccgttgttcgaacctaaaggtcgcgtgcttctggttgatggccatcatctcgcgtatcgtaacttctttgccctgaaaggattaaccaccagccgtggcgagccggtacagggtgtctacggctttgcaaagtcgctcctgaaagctctgaaagaagacggtgatgtggtgattgttgtctttgatgcgaaagcgccaagttttcgccacgaagcgtacgaagcttacaaagccgggcgtgctccaacgccggaagactttcctcgccaattggcgcttatgaaggaattagtggatttgcttggcctcgaacgcttggaagttcccggtttcgaggcagacgacgtattagcgactctcgcaaagaaagccgaacgtgagggctatgaagtccagatcttgacagcagatcgcgatcttttccagcttttatctccgcgcatctcggtgttacacccggaagggcatcgtatcaccccggaatggctctgggagaaatatggtttgcgtcccgaacaatgggtggattttcgcgccttagcaggcgatccgagcgacaatattccgggagttaaaggtatcggcgagaagacggcgctcaagctccttaaagaatgggggtcgttggagaacttgcttaagaatttagatcaggtcaaaccagagtcagtgcgtgagaagattcttgcacacctcgaagacctcaaattaagccgcgaattgtcccgtgtacgcaccgatttgccgctcgaagttgatttccgtggccgccgcgaacctgactgggagggtcttaaagcgtttttagagcgtcttgaatttggttcgctcttgcatgaattcggccttttagaaagcccgttaccagccgaagaagcaccttggccaccgcccgaaggcgcgtttttaggttaccgtttgagtcgcccggaaccgatgtgggccgaattattggctcttgcagcgtctgcccagggacgtgtgtatcgcgcggaagaccctcatggtgcgctccgcggcctcaaagaagtccgtggactccttgccaaagacttagctgttgttgcattgcgcgaaggtcttgatttacctccgactgatgatccaatgcttcttgcgtacctcttggacccgtcaaacacgacgcccgaaggcgtagcccgtcgttacggcggcgagtggaccgaagatgcaggcgagcgcgcgttattggccgaacgtttgcacgccaatttattaggacgtttgcaaggcgaggaacgtctcctctggctttacgaagaagtggagaaaccattgagtcgcgtgctcgcgcatatggaagctaccggtgtcaaattagacgtggcgtatttggaggcactcagccttgaagttgctgccgaaatgcgccgcttggaggaagaagtattccgtttagcaggccactccttttatcttaattctcgcgatcagttagaacgtgtgttgttcgatgaacttggtctccctcctatcggcaagacagagaagaccggtaaacgtagcacttcagcggcggttttagaagctcttcgcgaagtccatcccattgtggacaagatcttgcagtaccgcgaactcgcgaaattgaaaggcacctatattgaccctcttccggcattagtccacccgaaaacgggacgcctccatacccgcttcaaccaaacagccacggcgaccggtcgtttgtcctcctctgatccaaaccttcagaatattccagtacgtaccccattgggccagaagatccgccgcgcgtttgtagctgaggagggttggcgtttagtggccctcgattatagccaaattgaattacgtgtccttgcccatctttctggcgatgagaacctcatccgcgtgtttcaggaaggcaaagacattcacactcaaacggcaagctggatgtttggattatcagctgaagcgatcgatcctttgatgcgtcgtgcagcgaagaccatcaatttcggtgttctctacggtatgagtgcccatcgtttgtcgcaggaattaggcattccctatgaagaagctgcggcgttcattcagcgctactttcaaagctatcccaaagttaaagcatggatcgagaagactctcgaagaaggccgcacacgtggttacgtagagaccttatttggacgtcgccgctatgttcccgatttaaacgctcgcgtgaaatctgtccgtgaagccgccgaacgcatggcgttcaacatgcctgtacagggcacggcagctgacctcatgaaacttgcaatggtgcgcctttttccacaattgcgtgaagttggtgcccgcatgctcttgcaggtccacgatgaactcttgttagaagcgccaaaagagcgtgcggaagaggtggcagccctcgcgaaagaggttatggaaggcgtgtggcccttagcggtgcctcttgaagtcgaagttggtattggcgaggattggttggctgccaaaggataatga

SEQ ID NO: 1926 - protein, 841 aa, synthetic construct
  REGION 1..841: note = Variant of DNA polymerase I from Thermus sp. strain 2.9
MHHHAHHGGSGMLPLFEPKGRVLLVDGHHLAYRNFFALKGLTTSRGEPVQGVYGFAKSLLKALKEDGDVVIVVFDAKAPSFRHEAYEAYKAGRAPTPEDFPRQLALMKELVDLLGLERLEVPGFEADDVLATLAKKAEREGYEVQILTADRDLFQLLSPRISVLHPEGHRITPEWLWEKYGLRPEQWVDFRALAGDPSDNIPGVKGIGEKTALKLLKEWGSLENLLKNLDQVKPESVREKILAHLEDLKLSRELSRVRTDLPLEVDFRGRREPDWEGLKAFLERLEFGSLLHEFGLLESPLPAEEAPWPPPEGAFLGYRLSRPEPMWAELLALAASAQGRVYRAEDPHGALRGLKEVRGLLAKDLAVVALREGLDLPPTDDPMLLAYLLDPSNTTPEGVARRYGGEWTEDAGERALLAERLHANLLGRLQGEERLLWLYEEVEKPLSRVLAHMEATGVKLDVAYLEALSLEVAAEMRRLEEEVFRLAGHSFYLNSRDQLERVLFDELGLPPIGKTEKTGKRSTSAAVLEALREVHPIVDKILQYRELAKLKGTYIDPLPALVHPKTGRLHTRFNQTATATGRLSSSDPNLQNIPVRTPLGQKIRRAFVAEEGWRLVALDYSQIELRVLAHLSGDENLIRVFQEGKDIHTQTASWMFGLSAEAIDPLMRRAAKTINFGVLYGMSAHRLSQELGIPYEEAAAFIQRYFQSYPKVKAWIEKTLEEGRTRGYVETLFGRRRYVPDLNARVKSVREAAERMAFNMPVQGTAADLMKLAMVRLFPQLREVGARMLLQVHDELLLEAPKERAEEVAALAKEVMEGVWPLAVPLEVEVGIGEDWLAAKG

SEQ ID NO: 1927 - DNA, 2529 bp, synthetic construct
  misc_feature 1..2529: note = Variant of DNA polymerase I from Thermus sp. strain 2.9
  source 1..2529: mol_type = other DNA
atgcggcatcatcatcatcatggcggtagcggcatgttaccgttgttcgaacctaaaggtcgcgtgcttctggttgatggccatcatctcgcgtatcgtaacttctttgccctgaaaggattaaccaccagccgtggcgagccggtacagggtgtctacggctttgcaaagtcgctcctgaaagctctgaaagaagacggtgatgtggtgattgttgtctttgatgcgaaagcgccaagttttcgccacgaagcgtacgaagcttacaaagccgggcgtgctccaacgccggaagactttcctcgccaattggcgcttatgaaggaattagtggatttgcttggcctcgaacgcttggaagttcccggtttcgaggcagacgacgtattagcgactctcgcaaagaaagccgaacgtgagggctatgaagtccagatcttgacagcagatcgcgatcttttccagcttttatctccgcgcatctcggtgttacacccggaagggcatcgtatcaccccggaatggctctgggagaaatatggtttgcgtcccgaacaatgggtggattttcgcgccttagcaggcgatccgagcgacaatattccgggagttaaaggtatcggcgagaagacggcgctcaagctccttaaagaatgggggtcgttggagaacttgcttaagaatttagatcaggtcaaaccagagtcagtgcgtgagaagattcttgcacacctcgaagacctcaaattaagccgcgaattgtcccgtgtacgcaccgatttgccgctcgaagttgatttccgtggccgccgcgaacctgactgggagggtcttaaagcgtttttagagcgtcttgaatttggttcgctcttgcatgaattcggccttttagaaagcccgttaccagccgaagaagcaccttggccaccgcccgaaggcgcgtttttaggttaccgtttgagtcgcccggaaccgatgtgggccgaattattggctcttgcagcgtctgcccagggacgtgtgtatcgcgcggaagaccctcatggtgcgctccgcggcctcaaagaagtccgtggactccttgccaaagacttagctgttgttgcattgcgcgaaggtcttgatttacctccgactgatgatccaatgcttcttgcgtacctcttggacccgtcaaacacgacgcccgaaggcgtagcccgtcgttacggcggcgagtggaccgaagatgcaggcgagcgcgcgttattggccgaacgtttgcacgccaatttattaggacgtttgcaaggcgaggaacgtctcctctggctttacgaagaagtggagaaaccattgagtcgcgtgctcgcgcatatggaagctaccggtgtcaaattagacgtggcgtatttggaggcactcagccttgaagttgctgccgaaatgcgccgcttggaggaagaagtattccgtttagcaggccactccttttatcttaattctcgcgatcagttagaacgtgtgttgttcgatgaacttggtctccctcctatcggcaagacagagaagaccggtaaacgtagcacttcagcggcggttttagaagctcttcgcgaagtccatcccattgtggacaagatcttgcagtaccgcgaactcgcgaaattgaaaggcacctatattgaccctcttccggcattagtccacccgaaaacgggacgcctccatacccgcttcaaccaaacagccacggcgaccggtcgtttgtcctcctctgatccaaaccttcagaatattccagtacgtaccccattgggccagaagatccgccgcgcgtttgtagctgaggagggttggcgtttagtggccctcgattatagccaaattgaattacgtgtccttgcccatctttctggcgatgagaacctcatccgcgtgtttcaggaaggcaaagacattcacactcaaacggcaagctggatgtttggattatcagctgaagcgatcgatcctttgatgcgtcgtgcagcgaagaccatcaatttcggtgttctctacggtatgagtgcccatcgtttgtcgcaggaattaggcattccctatgaagaagctgcggcgttcattcagcgctactttcaaagctatcccaaagttaaagcatggatcgagaagactctcgaagaaggccgcacacgtggttacgtagagaccttatttggacgtcgccgctatgttcccgatttaaacgctcgcgtgaaatctgtccgtgaagccgccgaacgcatggcgttcaacatgcctgtacagggcacggcagctgacctcatgaaacttgcaatggtgcgcctttttccacaattgcgtgaagttggtgcccgcatgctcttgcaggtccacgatgaactcttgttagaagcgccaaaagagcgtgcggaagaggtggcagccctcgcgaaagaggttatggaaggcgtgtggcccttagcggtgcctcttgaagtcgaagttggtattggcgaggattggttggctgccaaaggataatga

SEQ ID NO: 1928 - protein, 841 aa, synthetic construct
  REGION 1..841: note = Variant of DNA polymerase I from Thermus sp. strain 2.9
MRHHHHHGGSGMLPLFEPKGRVLLVDGHHLAYRNFFALKGLTTSRGEPVQGVYGFAKSLLKALKEDGDVVIVVFDAKAPSFRHEAYEAYKAGRAPTPEDFPRQLALMKELVDLLGLERLEVPGFEADDVLATLAKKAEREGYEVQILTADRDLFQLLSPRISVLHPEGHRITPEWLWEKYGLRPEQWVDFRALAGDPSDNIPGVKGIGEKTALKLLKEWGSLENLLKNLDQVKPESVREKILAHLEDLKLSRELSRVRTDLPLEVDFRGRREPDWEGLKAFLERLEFGSLLHEFGLLESPLPAEEAPWPPPEGAFLGYRLSRPEPMWAELLALAASAQGRVYRAEDPHGALRGLKEVRGLLAKDLAVVALREGLDLPPTDDPMLLAYLLDPSNTTPEGVARRYGGEWTEDAGERALLAERLHANLLGRLQGEERLLWLYEEVEKPLSRVLAHMEATGVKLDVAYLEALSLEVAAEMRRLEEEVFRLAGHSFYLNSRDQLERVLFDELGLPPIGKTEKTGKRSTSAAVLEALREVHPIVDKILQYRELAKLKGTYIDPLPALVHPKTGRLHTRFNQTATATGRLSSSDPNLQNIPVRTPLGQKIRRAFVAEEGWRLVALDYSQIELRVLAHLSGDENLIRVFQEGKDIHTQTASWMFGLSAEAIDPLMRRAAKTINFGVLYGMSAHRLSQELGIPYEEAAAFIQRYFQSYPKVKAWIEKTLEEGRTRGYVETLFGRRRYVPDLNARVKSVREAAERMAFNMPVQGTAADLMKLAMVRLFPQLREVGARMLLQVHDELLLEAPKERAEEVAALAKEVMEGVWPLAVPLEVEVGIGEDWLAAKG

SEQ ID NO: 1929 - DNA, 2529 bp, synthetic construct
  misc_feature 1..2529: note = Variant of DNA polymerase I from Thermus sp. strain 2.9
  source 1..2529: mol_type = other DNA
atgcaccatcatcatcatcatggcggtagcggcatgttaccgttgttcgaacctaaaggtcgcgtgcttctggttgatggccatcatctcgcgtatcgtaacttctttgccctgaaaggattaaccaccagccgtggcgagccggtacagggtgtctacggctttgcaaagtcgctcctgaaagctctgaaagaagacggtgatgtggtgattgttgtctttgatgcgaaagcgccaagttttcgccacgaagcgtacgaagcttacaaagccgggcgtgctccaacgccggaagactttcctcgccaattggcgcttatgaaggaattagtggatttgcttggcctcgaacgcttggaagttcccggtttcgaggcagacgacgtattagcgactctcgcaaagaaagccgaacgtgagggctatgaagtccagatcttgacagcagatcgcgatcttttccagcttttatctccgcgcatctcggtgttacacccggaagggcatcgtatcaccccggaatggctctgggagaaatatggtttgcgtcccgaacaatgggtggattttcgcgccttagcaggcgatccgagcgacaatattccgggagttaaaggtatcggcgagaagacggcgctcaagctccttaaagaatgggggtcgttggagaacttgcttaagaatttagatcaggtcaaaccagagtcagtgcgtgagaagattcttgcacacctcgaagacctcaaattaagccgcgaattgtcccgtgtacgcaccgatttgccgctcgaagttgatttccgtggccgccgcgaacctgactgggagggtcttaaagcgtttttagagcgtcttgaatttggttcgctcttgcatgaattcggccttttagaaagcccgttaccagccgaagaagcaccttggccaccgcccgaaggcgcgtttttaggttaccgtttgagtcgcccggaaccgatgtgggccgaattattggctcttgcagcgtctgcccagggacgtgtgtatcgcgcggaagaccctcatggtgcgctccgcggcctcaaagaagtccgtggactccttgccaaagacttagctgttgttgcattgcgcgaaggtcttgatttacctccgactgatgatccaatgcttcttgcgtacctcttggacccgtcaaacacgacgcccgaaggcgtagcccgtcgttacggcggcgagtggaccgaagatgcaggcgagcgcgcgttattggccgaacgtttgcacgccaatttattaggacgtttgcaaggcgaggaaaagctcctctggctttacgaagaagtggagaaaccattgagtcgcgtgctcgcgcatatggaagctaccggtgtcaaattagacgtggcgtatttggaggcactcagccttgaagttgctgccgaaatgcgccgcttggaggaagaagtattccgtttagcaggccactccttttatcttaattctcgcgatcagttagaacgtgtgttgttcgatgaacttggtctccctcctatcggcaagacagagaagaccggtaaacgtagcacttcagcggcggttttagaagctcttcgcgaagtccatcccattgtggacaagatcttgcagtaccgcgaactcgcgaaattgaaaggcacctatattgaccctcttccggcattagtccacccgaaaacgggacgcctccatacccgcttcaaccaaacagccacggcgaccggtcgtttgtcctcctctgatccaaaccttcagaatattccagtacgtaccccattgggccagaagatccgccgcgcgtttgtagctgaggagggttggcgtttagtggccctcgattatagccaaattgaattacgtgtccttgcccatctttctggcgatgagaacctcatccgcgtgtttcaggaaggcaaagacattcacactcaaacggcaagctggatgtttggattatcagctgaagcgatcgatcctttgatgcgtcgtgcagcgaagaccatcaatttcggtgttctctacggtatgagtgcccatcgtttgtcgcaggaattaggcattccctatgaagaagctgcggcgttcattcagcgctactttcaaagctatcccaaagttaaagcatggatcgagaagactctcgaagaaggccgcacacgtggttacgtagagaccttatttggacgtcgccgctatgttcccgatttaaacgctcgcgtgaaatctgtccgtgaagccgccgaacgcatggcgttcaacatgcctgtacagggcacggcagctgacctcatgaaacttgcaatggtgcgcctttttccacaattgcgtgaagttggtgcccgcatgctcttgcaggtccacgatgaactcttgttagaagcgccaaaagagcgtgcggaagaggtggcagccctcgcgaaagaggttatggaaggcgtgtggcccttagcggtgcctcttgaagtcgaagttggtattggcgaggattggttggctgccaaaggataatga

SEQ ID NO: 1930 - protein, 841 aa, synthetic construct
  REGION 1..841: note = Variant of DNA polymerase I from Thermus sp. strain 2.9
MHHHHHHGGSGMLPLFEPKGRVLLVDGHHLAYRNFFALKGLTTSRGEPVQGVYGFAKSLLKALKEDGDVVIVVFDAKAPSFRHEAYEAYKAGRAPTPEDFPRQLALMKELVDLLGLERLEVPGFEADDVLATLAKKAEREGYEVQILTADRDLFQLLSPRISVLHPEGHRITPEWLWEKYGLRPEQWVDFRALAGDPSDNIPGVKGIGEKTALKLLKEWGSLENLLKNLDQVKPESVREKILAHLEDLKLSRELSRVRTDLPLEVDFRGRREPDWEGLKAFLERLEFGSLLHEFGLLESPLPAEEAPWPPPEGAFLGYRLSRPEPMWAELLALAASAQGRVYRAEDPHGALRGLKEVRGLLAKDLAVVALREGLDLPPTDDPMLLAYLLDPSNTTPEGVARRYGGEWTEDAGERALLAERLHANLLGRLQGEEKLLWLYEEVEKPLSRVLAHMEATGVKLDVAYLEALSLEVAAEMRRLEEEVFRLAGHSFYLNSRDQLERVLFDELGLPPIGKTEKTGKRSTSAAVLEALREVHPIVDKILQYRELAKLKGTYIDPLPALVHPKTGRLHTRFNQTATATGRLSSSDPNLQNIPVRTPLGQKIRRAFVAEEGWRLVALDYSQIELRVLAHLSGDENLIRVFQEGKDIHTQTASWMFGLSAEAIDPLMRRAAKTINFGVLYGMSAHRLSQELGIPYEEAAAFIQRYFQSYPKVKAWIEKTLEEGRTRGYVETLFGRRRYVPDLNARVKSVREAAERMAFNMPVQGTAADLMKLAMVRLFPQLREVGARMLLQVHDELLLEAPKERAEEVAALAKEVMEGVWPLAVPLEVEVGIGEDWLAAKG

SEQ ID NO: 1931 - DNA, 2529 bp, synthetic construct
  misc_feature 1..2529: note = Variant of DNA polymerase I from Thermus sp. strain 2.9
  source 1..2529: mol_type = other DNA
atgcaccatcatcatcatcatggcggtagcggcatgttaccgttgttcgaacctaaaggtcgcgtgcttctggttgatggccatcatctcgcgtatcgtaacttctttgccctgaaaggattaaccaccagccgtggcgagccggtacagggtgtctacggctttgcaaagtcgctcctgaaagctctgaaagaagacggtgatgtggtgattgttgtctttgatgcgaaagcgccaagttttcgccacgaagcgtacgaagcttacaaagccgggcgtgctccaacgccggaagactttcctcgccaattggcgcttatgaaggaattagtggatttgcttggcctcgaacgcttggaagttcccggtttcgaggcagacgacgtattagcgactctcgcaaagaaagccgaacgtgagggctatgaagtccagatcttgacagcagatcgcgatcttttccagcttttatctccgcgcatctcggtgttacacccggaagggcatcgtatcaccccggaatggctctgggagaaatatggtttgcgtcccgaacaatgggtggattttcgcgccttagcaggcgatccgagcgacaatattccgggagttaaaggtatcggcgagaagacggcgctcaagctccttaaagaatgggggtcgttggagaacttgcttaagaatttagatcaggtcaaaccagagtcagtgcgtgagaagattcttgcacacctcgaagacctcaaattaagccgcgaattgtcccgtgtacgcaccgatttgccgctcgaagttgatttccgtggccgccgcgaacctgactgggagggtcttaaagcgtttttagagcgtcttgaatttggttcgctcttgcatgaattcggccttttagaaagcccgttaccagccgaagaagcaccttggccaccgcccgaaggcgcgtttttaggttaccgtttgagtcgcccggaaccgatgtgggccgaattattggctcttgcagcgtctgcccagggacgtgtgtatcgcgcggaagaccctcatggtgcgctccgcggcctcaaagaagtccgtggactccttgccaaagacttagctgttgttgcattgcgcgaaggtcttgatttacctccgactgatgatccaatgcttcttgcgtacctcttggacccgtcaaacacgacgcccgaaggcgtagcccgtcgttacggcggcgagtggaccgaagatgcaggcgagcgcgcgttattggccgaacgtttgcacgccaatttattaggacgtttgcaaggcgaggaacgtctcctctggctttacgaagaagtggagaaaccattgagtcgcgtgctcgcgcatatggaagctaccggtgtcaaattagacgtggcgtatttggaggcactcagccttgaagttgctgccgaaatgcgccgcttggaggaagaagtattccgtttagcaggccactccttttatcttaattctcgcgatcagttagaacgtgtgttgttcgatgaacttggtctccctcctatcggcaagacagagaagaccggtaaacgtagcacttcagcggcggttttagaagctcttcgcgaagtccatcccattgtggacaagatcttgcagtaccgcgaactcgcgaaattgaaaggcacctatattgaccctcttccggcattagtccacccgaaaacgggacgcctccatacccgcttcaaccaaacagccacggcgaccggtcgtttgtcctcctctgatccaaaccttcagaatattccagtacgtaccccattgggccagaagatccgccgcgcgtttgtagctgaggagggttggcgtttagtggccctcgattatagccaaattgaattacgtgtccttgcccatctttctggcgatgagaacctcatccgcgtgtttcaggaaggcaaagacattcacactcaaacggcaagctggatgtttggagagtcagctgaagcgatcgatcctttgatgcgtcgtgcagcgaagaccatcaatttcggtgttctctacggtatgagtgcccatcgtttgtcgcaggaattaggcattccctatgaagaagctgcggcgttcattcagcgctactttcaaagctatcccaaagttaaagcatggatcgagaagactctcgaagaaggccgcacacgtggttacgtagagaccttatttggacgtcgccgctatgttcccgatttaaacgctcgcgtgaaatctgtccgtgaagccgccgaacgcatggcgttcaacatgcctgtacagggcacggcagctgacctcatgaaacttgcaatggtgcgcctttttccacaattgcgtgaagttggtgcccgcatgctcttgcaggtccacgatgaactcttgttagaagcgccaaaagagcgtgcggaagaggtggcagccctcgcgaaagaggttatggaaggcgtgtggcccttagcggtgcctcttgaagtcgaagttggtattggcgaggattggttggctgccaaaggataatga

SEQ ID NO: 1932 - protein, 841 aa, synthetic construct
  REGION 1..841: note = Variant of DNA polymerase I from Thermus sp. strain 2.9
MHHHHHHGGSGMLPLFEPKGRVLLVDGHHLAYRNFFALKGLTTSRGEPVQGVYGFAKSLLKALKEDGDVVIVVFDAKAPSFRHEAYEAYKAGRAPTPEDFPRQLALMKELVDLLGLERLEVPGFEADDVLATLAKKAEREGYEVQILTADRDLFQLLSPRISVLHPEGHRITPEWLWEKYGLRPEQWVDFRALAGDPSDNIPGVKGIGEKTALKLLKEWGSLENLLKNLDQVKPESVREKILAHLEDLKLSRELSRVRTDLPLEVDFRGRREPDWEGLKAFLERLEFGSLLHEFGLLESPLPAEEAPWPPPEGAFLGYRLSRPEPMWAELLALAASAQGRVYRAEDPHGALRGLKEVRGLLAKDLAVVALREGLDLPPTDDPMLLAYLLDPSNTTPEGVARRYGGEWTEDAGERALLAERLHANLLGRLQGEERLLWLYEEVEKPLSRVLAHMEATGVKLDVAYLEALSLEVAAEMRRLEEEVFRLAGHSFYLNSRDQLERVLFDELGLPPIGKTEKTGKRSTSAAVLEALREVHPIVDKILQYRELAKLKGTYIDPLPALVHPKTGRLHTRFNQTATATGRLSSSDPNLQNIPVRTPLGQKIRRAFVAEEGWRLVALDYSQIELRVLAHLSGDENLIRVFQEGKDIHTQTASWMFGESAEAIDPLMRRAAKTINFGVLYGMSAHRLSQELGIPYEEAAAFIQRYFQSYPKVKAWIEKTLEEGRTRGYVETLFGRRRYVPDLNARVKSVREAAERMAFNMPVQGTAADLMKLAMVRLFPQLREVGARMLLQVHDELLLEAPKERAEEVAALAKEVMEGVWPLAVPLEVEVGIGEDWLAAKG

SEQ ID NO: 1933 - DNA, 2529 bp, synthetic construct
  misc_feature 1..2529: note = Variant of DNA polymerase I from Thermus sp. strain 2.9
  source 1..2529: mol_type = other DNA
atgcaccatcatcatcatcatggcggtagcggcatgttaccgttgttcgaacctaaaggtcgcgtgcttctggttgatggccatcatctcgcgtatcgtaacttctttgccctgaaaggattaaccaccagccgtggcgagccggtacagggtgtctacggctttgcaaagtcgctcctgaaagctctgaaagaagacggtgatgtggtgattgttgtctttgatgcgaaagcgccaagttttcgccacgaagcgtacgaagcttacaaagccgggcgtgctccaacgccggaagactttcctcgccaattggcgcttatgaaggaattagtggatttgcttggcctcgaacgcttggaagttcccggtttcgaggcagacgacgtattagcgactctcgcaaagaaagccgaacgtgagggctatgaagtccagatcttgacagcagatcgcgatcttttccagcttttatctccgcgcatctcggtgttacacccggaagggcatcgtatcaccccggaatggctctgggagaaatatggtttgcgtcccgaacaatgggtggattttcgcgccttagcaggcgatccgagcgacaatattccgggagttaaaggtatcggcgagaagacggcgctcaagctccttaaagaatgggggtcgttggagaacttgcttaagaatttagatcaggtcaaaccagagtcagtgcgtgagaagattcttgcacacctcgaagacctcaaattaagccgcgaattgtcccgtgtacgcaccgatttgccgctcgaagttgatttccgtggccgccgcgaacctgactgggagggtcttaaagcgtttttagagcgtcttgaatttggttcgctcttgcatgaattcggccttttagaaagcccgttaccagccgaagaagcaccttggccaccgcccgaaggcgcgtttttaggttaccgtttgagtcgcccggaaccgatgtgggccgaattattggctcttgcagcgtctgcccagggacgtgtgtatcgcgcggaagaccctcatggtgcgctccgcggcctcaaagaagtccgtggactccttgccaaagacttagctgttgttgcattgcgcgaaggtcttgatttacctccgactgatgatccaatgcttcttgcgtacctcttggacccgtcaaacacgacgcccgaaggcgtagcccgtcgttacggcggcgagtggaccgaagatgcaggcgagcgcgcgttattggccgaacgtttgcacgccaatttattaggacgtttgcaaggcgaggaacgtctcctctggctttacgaagaagtggagaaaccattgagtcgcgtgctcgcgcatatggaagctaccggtgtcaaattagacgtggcgtatttggaggcactcagccttgaagttgctgccgaaatgcgccgcttggagggtgaagtattccgtttagcaggccactccttttatcttaattctcgcgatcagttagaacgtgtgttgttcgatgaacttggtctccctcctatcggcaagacagagaagaccggtaaacgtagcacttcagcggcggttttagaagctcttcgcgaagtccatcccattgtggacaagatcttgcagtaccgcgaactcgcgaaattgaaaggcacctatattgaccctcttccggcattagtccacccgaaaacgggacgcctccatacccgcttcaaccaaacagccacggcgaccggtcgtttgtcctcctctgatccaaaccttcagaatattccagtacgtaccccattgggccagaagatccgccgcgcgtttgtagctgaggagggttggcgtttagtggccctcgattatagccaaattgaattacgtgtccttgcccatctttctggcgatgagaacctcatccgcgtgtttcaggaaggcaaagacattcacactcaaacggcaagctggatgtttggattatcagctgaagcgatcgatcctttgatgcgtcgtgcagcgaagaccatcaatttcggtgttctctacggtatgagtgcccatcgtttgtcgcaggaattaggcattccctatgaagaagctgcggcgttcattcagcgctactttcaaagctatcccaaagttaaagcatggatcgagaagactctcgaagaaggccgcacacgtggttacgtagagaccttatttggacgtcgccgctatgttcccgatttaaacgctcgcgtgaaatctgtccgtgaagccgccgaacgcatggcgttcaacatgcctgtacagggcacggcagctgacctcatgaaacttgcaatggtgcgcctttttccacaattgcgtgaagttggtgcccgcatgctcttgcaggtccacgatgaactcttgttagaagcgccaaaagagcgtgcggaagaggtggcagccctcgcgaaagaggttatggaaggcgtgtggcccttagcggtgcctcttgaagtcgaagttggtattggcgaggattggttggctgccaaaggataatga

SEQ ID NO: 1934 - protein, 841 aa, synthetic construct
  REGION 1..841: note = Variant of DNA polymerase I from Thermus sp. strain 2.9
MHHHHHHGGSGMLPLFEPKGRVLLVDGHHLAYRNFFALKGLTTSRGEPVQGVYGFAKSLLKALKEDGDVVIVVFDAKAPSFRHEAYEAYKAGRAPTPEDFPRQLALMKELVDLLGLERLEVPGFEADDVLATLAKKAEREGYEVQILTADRDLFQLLSPRISVLHPEGHRITPEWLWEKYGLRPEQWVDFRALAGDPSDNIPGVKGIGEKTALKLLKEWGSLENLLKNLDQVKPESVREKILAHLEDLKLSRELSRVRTDLPLEVDFRGRREPDWEGLKAFLERLEFGSLLHEFGLLESPLPAEEAPWPPPEGAFLGYRLSRPEPMWAELLALAASAQGRVYRAEDPHGALRGLKEVRGLLAKDLAVVALREGLDLPPTDDPMLLAYLLDPSNTTPEGVARRYGGEWTEDAGERALLAERLHANLLGRLQGEERLLWLYEEVEKPLSRVLAHMEATGVKLDVAYLEALSLEVAAEMRRLEGEVFRLAGHSFYLNSRDQLERVLFDELGLPPIGKTEKTGKRSTSAAVLEALREVHPIVDKILQYRELAKLKGTYIDPLPALVHPKTGRLHTRFNQTATATGRLSSSDPNLQNIPVRTPLGQKIRRAFVAEEGWRLVALDYSQIELRVLAHLSGDENLIRVFQEGKDIHTQTASWMFGLSAEAIDPLMRRAAKTINFGVLYGMSAHRLSQELGIPYEEAAAFIQRYFQSYPKVKAWIEKTLEEGRTRGYVETLFGRRRYVPDLNARVKSVREAAERMAFNMPVQGTAADLMKLAMVRLFPQLREVGARMLLQVHDELLLEAPKERAEEVAALAKEVMEGVWPLAVPLEVEVGIGEDWLAAKG

SEQ ID NO: 1935 - DNA, 2529 bp, synthetic construct
  misc_feature 1..2529: note = Variant of DNA polymerase I from Thermus sp. strain 2.9
  source 1..2529: mol_type = other DNA
atgcaccatcatcatcatcatggcggtagcggcatgttaccgttgttcgaacctaaaggtcgcgtgcttctggttgatggccatcatctcgcgtatcgtaacttctttgccctgaaaggattaaccaccagccgtggcgagccggtacagggtgtctacggctttgcaaagtcgctcctgaaagctctgaaagaagacggtgatgtggtgattgttgtctttgatgcgaaagcgccaagttttcgccacgaagcgtacgaagcttacaaagccgggcgtgctccaacgccggaagactttcctcgccaattggcgcttatgaaggaattagtggatttgcttggcctcgaacgcttggaagttcccggtttcgaggcagacgacgtattagcgactctcgcaaagaaagccgaacgtgagggctatgaagtccagatcttgacagcagatcgcgatcttttccagcttttatctccgcgcatctcggtgttacacccggaagggcatcgtatcaccccggaatggctctgggagaaatatggtttgcgtcccgaacaatgggtggattttcgcgccttagcaggcgatccgagcgacaatattccgggagttaaaggtatcggcgagaagacggcgctcaagctccttaaagaatgggggtcgttggagaacttgcttaagaatttagatcaggtcaaaccagagtcagtgcgtgagaagattcttgcacacctcgaagacctcaaattaagccgcgaattgtcccgtgtacgcaccgatttgccgctcgaagttgatttccgtggccgccgcgaacctgactgggagggtcttaaagcgtttttagagcgtcttgaatttggttcgctcttgcatgaattcggccttttagaaagcccgttaccagccgaagaagcaccttggccaccgcccgaaggcgcgtttttaggttaccgtttgagtcgcccggaaccgatgtgggccgaattattggctcttgcagcgtctgcccagggacgtgtgtatcgcgcggaagaccctcatggtgcgctccgcggcctcaaagaagtccgtggactccttgccaaagacttagctgttgttgcattgcgcgaaggtcttgatttacctccgactgatgatccaatgcttcttgcgtacctcttggacccgtcaaacacgacgcccgaaggcgtagcccgtcgttacggcggcgagtggaccgaagatgcaggcgagcgcgcgttattggccgaacgtttgcacgccaatttattaggacgtttgcaaggcgaggaacgtctcctctggctttacgaagaagtggagaaaccattgagtcgcgtgctcgcgcatatggaagctaccggtgtcaaattagacgtggcgtatttggaggcactcagccttgaagttgctgccgaaatgcgccgcttggaggaagaagtattccgtttagcaggccactccttttatcttaattctcgcgatcagttagaacgtgtgttgttcgatgaacttggtctccctcctatcggcaagacagagaagttgggtaaacgtagcacttcagcggcggttttagaagctcttcgcgaagtccatcccattgtggacaagatcttgcagtaccgcgaactcgcgaaattgaaaggcacctatattgaccctcttccggcattagtccacccgaaaacgggacgcctccatacccgcttcaaccaaacagccacggcgaccggtcgtttgtcctcctctgatccaaaccttcagaatattccagtacgtaccccattgggccagaagatccgccgcgcgtttgtagctgaggagggttggcgtttagtggccctcgattatagccaaattgaattacgtgtccttgcccatctttctggcgatgagaacctcatccgcgtgtttcaggaaggcaaagacattcacactcaaacggcaagctggatgtttggattatcagctgaagcgatcgatcctttgatgcgtcgtgcagcgaagaccatcaatttcggtgttctctacggtatgagtgcccatcgtttgtcgcaggaattaggcattccctatgaagaagctgcggcgttcattcagcgctactttcaaagctatcccaaagttaaagcatggatcgagaagactctcgaagaaggccgcacacgtggttacgtagagaccttatttggacgtcgccgctatgttcccgatttaaacgctcgcgtgaaatctgtccgtgaagccgccgaacgcatggcgttcaacatgcctgtacagggcacggcagctgacctcatgaaacttgcaatggtgcgcctttttccacaattgcgtgaagttggtgcccgcatgctcttgcaggtccacgatgaactcttgttagaagcgccaaaagagcgtgcggaagaggtggcagccctcgcgaaagaggttatggaaggcgtgtggcccttagcggtgcctcttgaagtcgaagttggtattggcgaggattggttggctgccaaaggataatga

SEQ ID NO: 1936 - protein, 841 aa, synthetic construct
  REGION 1..841: note = Variant of DNA polymerase I from Thermus sp. strain 2.9
MHHHHHHGGSGMLPLFEPKGRVLLVDGHHLAYRNFFALKGLTTSRGEPVQGVYGFAKSLLKALKEDGDVVIVVFDAKAPSFRHEAYEAYKAGRAPTPEDFPRQLALMKELVDLLGLERLEVPGFEADDVLATLAKKAEREGYEVQILTADRDLFQLLSPRISVLHPEGHRITPEWLWEKYGLRPEQWVDFRALAGDPSDNIPGVKGIGEKTALKLLKEWGSLENLLKNLDQVKPESVREKILAHLEDLKLSRELSRVRTDLPLEVDFRGRREPDWEGLKAFLERLEFGSLLHEFGLLESPLPAEEAPWPPPEGAFLGYRLSRPEPMWAELLALAASAQGRVYRAEDPHGALRGLKEVRGLLAKDLAVVALREGLDLPPTDDPMLLAYLLDPSNTTPEGVARRYGGEWTEDAGERALLAERLHANLLGRLQGEERLLWLYEEVEKPLSRVLAHMEATGVKLDVAYLEALSLEVAAEMRRLEEEVFRLAGHSFYLNSRDQLERVLFDELGLPPIGKTEKLGKRSTSAAVLEALREVHPIVDKILQYRELAKLKGTYIDPLPALVHPKTGRLHTRFNQTATATGRLSSSDPNLQNIPVRTPLGQKIRRAFVAEEGWRLVALDYSQIELRVLAHLSGDENLIRVFQEGKDIHTQTASWMFGLSAEAIDPLMRRAAKTINFGVLYGMSAHRLSQELGIPYEEAAAFIQRYFQSYPKVKAWIEKTLEEGRTRGYVETLFGRRRYVPDLNARVKSVREAAERMAFNMPVQGTAADLMKLAMVRLFPQLREVGARMLLQVHDELLLEAPKERAEEVAALAKEVMEGVWPLAVPLEVEVGIGEDWLAAKG

SEQ ID NO: 1937 - DNA, 2529 bp, synthetic construct
  misc_feature 1..2529: note = Variant of DNA polymerase I from Thermus sp. strain 2.9
  source 1..2529: mol_type = other DNA
atgcaccatcatcatcatcatggcggtagcggcatgttaccgttgttcgaacctaaaggtcgcgtgcttctggttgatggccatcatctcgcgtatcgtaacttctttgccctgaaaggattaaccaccagccgtggcgagccggtacagggtgtctacggctttgcaaagtcgctcctgaaagctctgaaagaagacggtgatgtggtgattgttgtctttgatgcgaaagcgccaagttttcgccacgaagcgtacgaagcttacaaagccgggcgtgctccaacgccggaagactttcctcgccaattggcgcttatgaaggaattagtggatttgcttggcctcgaacgcttggaagttcccggtttcgaggcagacgacgtattagcgactctcgcaaagaaagccgaacgtgagggctatgaagtccagatcttgacagcagatcgcgatcttttccagcttttatctccgcgcatctcggtgttacacccggaagggagtcgtatcaccccggaatggctctgggagaaatatggtttgcgtcccgaacaatgggtggattttcgcgccttagcaggcgatccgagcgacaatattccgggagttaaaggtatcggcgagaagacggcgctcaagctccttaaagaatgggggtcgttggagaacttgcttaagaatttagatcaggtcaaaccagagtcagtgcgtgagaagattcttgcacacctcgaagacctcaaattaagccgcgaattgtcccgtgtacgcaccgatttgccgctcgaagttgatttccgtggccgccgcgaacctgactgggagggtcttaaagcgtttttagagcgtcttgaatttggttcgctcttgcatgaattcggccttttagaaagcccgttaccagccgaagaagcaccttggccaccgcccgaaggcgcgtttttaggttaccgtttgagtcgcccggaaccgatgtgggccgaattattggctcttgcagcgtctgcccagggacgtgtgtatcgcgcggaagaccctcatggtgcgctccgcggcctcaaagaagtccgtggactccttgccaaagacttagctgttgttgcattgcgcgaaggtcttgatttacctccgactgatgatccaatgcttcttgcgtacctcttggacccgtcaaacacgacgcccgaaggcgtagcccgtcgttacggcggcgagtggaccgaagatgcaggcgagcgcgcgttattggccgaacgtttgcacgccaatttattaggacgtttgcaaggcgaggaacgtctcctctggctttacgaagaagtggagaaaccattgagtcgcgtgctcgcgcatatggaagctaccggtgtcaaattagacgtggcgtatttggaggcactcagccttgaagttgctgccgaaatgcgccgcttggaggaagaagtattccgtttagcaggccactccttttatcttaattctcgcgatcagttagaacgtgtgttgttcgatgaacttggtctccctcctatcggcaagacagagaagaccggtaaacgtagcacttcagcggcggttttagaagctcttcgcgaagtccatcccattgtggacaagatcttgcagtaccgcgaactcgcgaaattgaaaggcacctatattgaccctcttccggcattagtccacccgaaaacgggacgcctccatacccgcttcaaccaaacagccacggcgaccggtcgtttgtcctcctctgatccaaaccttcagaatattccagtacgtaccccattgggccagaagatccgccgcgcgtttgtagctgaggagggttggcgtttagtggccctcgattatagccaaattgaattacgtgtccttgcccatctttctggcgatgagaacctcatccgcgtgtttcaggaaggcaaagacattcacactcaaacggcaagctggatgtttggattatcagctgaagcgatcgatcctttgatgcgtcgtgcagcgaagaccatcaatttcggtgttctctacggtatgagtgcccatcgtttgtcgcaggaattaggcattccctatgaagaagctgcggcgttcattcagcgctactttcaaagctatcccaaagttaaagcatggatcgagaagactctcgaagaaggccgcacacgtggttacgtagagaccttatttggacgtcgccgctatgttcccgatttaaacgctcgcgtgaaatctgtccgtgaagccgccgaacgcatggcgttcaacatgcctgtacagggcacggcagctgacctcatgaaacttgcaatggtgcgcctttttccacaattgcgtgaagttggtgcccgcatgctcttgcaggtccacgatgaactcttgttagaagcgccaaaagagcgtgcggaagaggtggcagccctcgcgaaagaggttatggaaggcgtgtggcccttagcggtgcctcttgaagtcgaagttggtattggcgaggattggttggctgccaaaggataatga

SEQ ID NO: 1938 - protein, 841 aa, synthetic construct
  REGION 1..841: note = Variant of DNA polymerase I from Thermus sp. strain 2.9
MHHHHHHGGSGMLPLFEPKGRVLLVDGHHLAYRNFFALKGLTTSRGEPVQGVYGFAKSLLKALKEDGDVVIVVFDAKAPSFRHEAYEAYKAGRAPTPEDFPRQLALMKELVDLLGLERLEVPGFEADDVLATLAKKAEREGYEVQILTADRDLFQLLSPRISVLHPEGSRITPEWLWEKYGLRPEQWVDFRALAGDPSDNIPGVKGIGEKTALKLLKEWGSLENLLKNLDQVKPESVREKILAHLEDLKLSRELSRVRTDLPLEVDFRGRREPDWEGLKAFLERLEFGSLLHEFGLLESPLPAEEAPWPPPEGAFLGYRLSRPEPMWAELLALAASAQGRVYRAEDPHGALRGLKEVRGLLAKDLAVVALREGLDLPPTDDPMLLAYLLDPSNTTPEGVARRYGGEWTEDAGERALLAERLHANLLGRLQGEERLLWLYEEVEKPLSRVLAHMEATGVKLDVAYLEALSLEVAAEMRRLEEEVFRLAGHSFYLNSRDQLERVLFDELGLPPIGKTEKTGKRSTSAAVLEALREVHPIVDKILQYRELAKLKGTYIDPLPALVHPKTGRLHTRFNQTATATGRLSSSDPNLQNIPVRTPLGQKIRRAFVAEEGWRLVALDYSQIELRVLAHLSGDENLIRVFQEGKDIHTQTASWMFGLSAEAIDPLMRRAAKTINFGVLYGMSAHRLSQELGIPYEEAAAFIQRYFQSYPKVKAWIEKTLEEGRTRGYVETLFGRRRYVPDLNARVKSVREAAERMAFNMPVQGTAADLMKLAMVRLFPQLREVGARMLLQVHDELLLEAPKERAEEVAALAKEVMEGVWPLAVPLEVEVGIGEDWLAAKG

SEQ ID NO: 1939 - DNA, 2529 bp, synthetic construct
  misc_feature 1..2529: note = Variant of DNA polymerase I from Thermus sp. strain 2.9
  source 1..2529: mol_type = other DNA
atgcaccatcatcatcatcatggcggtagcggcatgttaccgttgttcgaacctaaaggtcgcgtgcttctggttgatggccatcatctcgcgtatcgtaacttctttgccctgaaaggattaaccaccagccgtggcgagccggtacagggtgtctacggctttgcaaagtcgctcctgaaagctctgaaagaagacggtgatgtggtgattgttgtctttgatgcgaaagcgccaagttttcgccacgaagcgtacgaagcttacaaagccgggcgtgctccaacgccggaagactttcctcgccaattggcgcttatgaaggaattagtggatttgcttggcctcgaacgcttggaagttcccggtttcgaggcagacgacgtattagcgactctcgcaaagaaagccgaacgtgagggctatgaagtccagatcttgacagcagatcgcgatcttttccagcttttatctccgcgcatctcggtgttacacccggaagggcatcgtatcaccccggaatggctctgggagaaatatggtttgcgtcccgaacaatgggtggattttcgcgccttagcaggcgatccgagcgacaatattccgggagttaaaggtatcggcgagaagacggcgctcaagctccttaaagaatgggggtcgttggagaacttgcttaagaatttagatcaggtcaaaccagagtcagtgcgtgagaagattcttgcacacctcgaagacctcaaattaagccgcgaattgtcccgtgtacgcaccgatttgccgctcgaagttgatttccgtggccgccgcgaacctgactgggagggtcttaaagcgtttttagagcgtcttgaatttggttcgctcttgcatgaattcggccttttagaaagcccgttaccagccgaagaagcaccttggccaccgcccgaaggcgcgtttttaggttaccgtttgagtcgcccggaaccgatgtgggccgaattacaggctcttgcagcgtctgcccagggacgtgtgtatcgcgcggaagaccctcatggtgcgctccgcggcctcaaagaagtccgtggactccttgccaaagacttagctgttgttgcattgcgcgaaggtcttgatttacctccgactgatgatccaatgcttcttgcgtacctcttggacccgtcaaacacgacgcccgaaggcgtagcccgtcgttacggcggcgagtggaccgaagatgcaggcgagcgcgcgttattggccgaacgtttgcacgccaatttattaggacgtttgcaaggcgaggaacgtctcctctggctttacgaagaagtggagaaaccattgagtcgcgtgctcgcgcatatggaagctaccggtgtcaaattagacgtggcgtatttggaggcactcagccttgaagttgctgccgaaatgcgccgcttggaggaagaagtattccgtttagcaggccactccttttatcttaattctcgcgatcagttagaacgtgtgttgttcgatgaacttggtctccctcctatcggcaagacagagaagaccggtaaacgtagcacttcagcggcggttttagaagctcttcgcgaagtccatcccattgtggacaagatcttgcagtaccgcgaactcgcgaaattgaaaggcacctatattgaccctcttccggcattagtccacccgaaaacgggacgcctccatacccgcttcaaccaaacagccacggcgaccggtcgtttgtcctcctctgatccaaaccttcagaatattccagtacgtaccccattgggccagaagatccgccgcgcgtttgtagctgaggagggttggcgtttagtggccctcgattatagccaaattgaattacgtgtccttgcccatctttctggcgatgagaacctcatccgcgtgtttcaggaaggcaaagacattcacactcaaacggcaagctggatgtttggattatcagctgaagcgatcgatcctttgatgcgtcgtgcagcgaagaccatcaatttcggtgttctctacggtatgagtgcccatcgtttgtcgcaggaattaggcattccctatgaagaagctgcggcgttcattcagcgctactttcaaagctatcccaaagttaaagcatggatcgagaagactctcgaagaaggccgcacacgtggttacgtagagaccttatttggacgtcgccgctatgttcccgatttaaacgctcgcgtgaaatctgtccgtgaagccgccgaacgcatggcgttcaacatgcctgtacagggcacggcagctgacctcatgaaacttgcaatggtgcgcctttttccacaattgcgtgaagttggtgcccgcatgctcttgcaggtccacgatgaactcttgttagaagcgccaaaagagcgtgcggaagaggtggcagccctcgcgaaagaggttatggaaggcgtgtggcccttagcggtgcctcttgaagtcgaagttggtattggcgaggattggttggctgccaaaggataatga

SEQ ID NO: 1940 - protein, 841 aa, synthetic construct
  REGION 1..841: note = Variant of DNA polymerase I from Thermus sp. strain 2.9
MHHHHHHGGSGMLPLFEPKGRVLLVDGHHLAYRNFFALKGLTTSRGEPVQGVYGFAKSLLKALKEDGDVVIVVFDAKAPSFRHEAYEAYKAGRAPTPEDFPRQLALMKELVDLLGLERLEVPGFEADDVLATLAKKAEREGYEVQILTADRDLFQLLSPRISVLHPEGHRITPEWLWEKYGLRPEQWVDFRALAGDPSDNIPGVKGIGEKTALKLLKEWGSLENLLKNLDQVKPESVREKILAHLEDLKLSRELSRVRTDLPLEVDFRGRREPDWEGLKAFLERLEFGSLLHEFGLLESPLPAEEAPWPPPEGAFLGYRLSRPEPMWAELQALAASAQGRVYRAEDPHGALRGLKEVRGLLAKDLAVVALREGLDLPPTDDPMLLAYLLDPSNTTPEGVARRYGGEWTEDAGERALLAERLHANLLGRLQGEERLLWLYEEVEKPLSRVLAHMEATGVKLDVAYLEALSLEVAAEMRRLEEEVFRLAGHSFYLNSRDQLERVLFDELGLPPIGKTEKTGKRSTSAAVLEALREVHPIVDKILQYRELAKLKGTYIDPLPALVHPKTGRLHTRFNQTATATGRLSSSDPNLQNIPVRTPLGQKIRRAFVAEEGWRLVALDYSQIELRVLAHLSGDENLIRVFQEGKDIHTQTASWMFGLSAEAIDPLMRRAAKTINFGVLYGMSAHRLSQELGIPYEEAAAFIQRYFQSYPKVKAWIEKTLEEGRTRGYVETLFGRRRYVPDLNARVKSVREAAERMAFNMPVQGTAADLMKLAMVRLFPQLREVGARMLLQVHDELLLEAPKERAEEVAALAKEVMEGVWPLAVPLEVEVGIGEDWLAAKG

SEQ ID NO: 1941 - DNA, 2529 bp, synthetic construct
  misc_feature 1..2529: note = Variant of DNA polymerase I from Thermus sp. strain 2.9
  source 1..2529: mol_type = other DNA
atgcaccatcatcatcatcatggcggtagcggcatgttaccgttgttcgaacctaaaggtcgcgtgcttctggttgatggccatcatctcgcgtatcgtaacttctttgccctgaaaggattaaccaccagccgtggcgagccggtacagggtgtctacggctttgcaaagtcgctcctgaaagctctgaaatcggacggtgatgtggtgattgttgtctttgatgcgaaagcgccaagttttcgccacgaagcgtacgaagcttacaaagccgggcgtgctccaacgccggaagactttcctcgccaattggcgcttatgaaggaattagtggatttgcttggcctcgaacgcttggaagttcccggtttcgaggcagacgacgtattagcgactctcgcaaagaaagccgaacgtgagggctatgaagtccagatcttgacagcagatcgcgatcttttccagcttttatctccgcgcatctcggtgttacacccggaagggcatcgtatcaccccggaatggctctgggagaaatatggtttgcgtcccgaacaatgggtggattttcgcgccttagcaggcgatccgagcgacaatattccgggagttaaaggtatcggcgagaagacggcgctcaagctccttaaagaatgggggtcgttggagaacttgcttaagaatttagatcaggtcaaaccagagtcagtgcgtgagaagattcttgcacacctcgaagacctcaaattaagccgcgaattgtcccgtgtacgcaccgatttgccgctcgaagttgatttccgtggccgccgcgaacctgactgggagggtcttaaagcgtttttagagcgtcttgaatttggttcgctcttgcatgaattcggccttttagaaagcccgttaccagccgaagaagcaccttggccaccgcccgaaggcgcgtttttaggttaccgtttgagtcgcccggaaccgatgtgggccgaattattggctcttgcagcgtctgcccagggacgtgtgtatcgcgcggaagaccctcatggtgcgctccgcggcctcaaagaagtccgtggactccttgccaaagacttagctgttgttgcattgcgcgaaggtcttgatttacctccgactgatgatccaatgcttcttgcgtacctcttggacccgtcaaacacgacgcccgaaggcgtagcccgtcgttacggcggcgagtggaccgaagatgcaggcgagcgcgcgttattggccgaacgtttgcacgccaatttattaggacgtttgcaaggcgaggaacgtctcctctggctttacgaagaagtggagaaaccattgagtcgcgtgctcgcgcatatggaagctaccggtgtcaaattagacgtggcgtatttggaggcactcagccttgaagttgctgccgaaatgcgccgcttggaggaagaagtattccgtttagcaggccactccttttatcttaattctcgcgatcagttagaacgtgtgttgttcgatgaacttggtctccctcctatcggcaagacagagaagaccggtaaacgtagcacttcagcggcggttttagaagctcttcgcgaagtccatcccattgtggacaagatcttgcagtaccgcgaactcgcgaaattgaaaggcacctatattgaccctcttccggcattagtccacccgaaaacgggacgcctccatacccgcttcaaccaaacagccacggcgaccggtcgtttgtcctcctctgatccaaaccttcagaatattccagtacgtaccccattgggccagaagatccgccgcgcgtttgtagctgaggagggttggcgtttagtggccctcgattatagccaaattgaattacgtgtccttgcccatctttctggcgatgagaacctcatccgcgtgtttcaggaaggcaaagacattcacactcaaacggcaagctggatgtttggattatcagctgaagcgatcgatcctttgatgcgtcgtgcagcgaagaccatcaatttcggtgttctctacggtatgagtgcccatcgtttgtcgcaggaattaggcattccctatgaagaagctgcggcgttcattcagcgctactttcaaagctatcccaaagttaaagcatggatcgagaagactctcgaagaaggccgcacacgtggttacgtagagaccttatttggacgtcgccgctatgttcccgatttaaacgctcgcgtgaaatctgtccgtgaagccgccgaacgcatggcgttcaacatgcctgtacagggcacggcagctgacctcatgaaacttgcaatggtgcgcctttttccacaattgcgtgaagttggtgcccgcatgctcttgcaggtccacgatgaactcttgttagaagcgccaaaagagcgtgcggaagaggtggcagccctcgcgaaagaggttatggaaggcgtgtggcccttagcggtgcctcttgaagtcgaagttggtattggcgaggattggttggctgccaaaggataatga

SEQ ID NO: 1942 - protein, 841 aa, synthetic construct
  REGION 1..841: note = Variant of DNA polymerase I from Thermus sp. strain 2.9
MHHHHHHGGSGMLPLFEPKGRVLLVDGHHLAYRNFFALKGLTTSRGEPVQGVYGFAKSLLKALKSDGDVVIVVFDAKAPSFRHEAYEAYKAGRAPTPEDFPRQLALMKELVDLLGLERLEVPGFEADDVLATLAKKAEREGYEVQILTADRDLFQLLSPRISVLHPEGHRITPEWLWEKYGLRPEQWVDFRALAGDPSDNIPGVKGIGEKTALKLLKEWGSLENLLKNLDQVKPESVREKILAHLEDLKLSRELSRVRTDLPLEVDFRGRREPDWEGLKAFLERLEFGSLLHEFGLLESPLPAEEAPWPPPEGAFLGYRLSRPEPMWAELLALAASAQGRVYRAEDPHGALRGLKEVRGLLAKDLAVVALREGLDLPPTDDPMLLAYLLDPSNTTPEGVARRYGGEWTEDAGERALLAERLHANLLGRLQGEERLLWLYEEVEKPLSRVLAHMEATGVKLDVAYLEALSLEVAAEMRRLEEEVFRLAGHSFYLNSRDQLERVLFDELGLPPIGKTEKTGKRSTSAAVLEALREVHPIVDKILQYRELAKLKGTYIDPLPALVHPKTGRLHTRFNQTATATGRLSSSDPNLQNIPVRTPLGQKIRRAFVAEEGWRLVALDYSQIELRVLAHLSGDENLIRVFQEGKDIHTQTASWMFGLSAEAIDPLMRRAAKTINFGVLYGMSAHRLSQELGIPYEEAAAFIQRYFQSYPKVKAWIEKTLEEGRTRGYVETLFGRRRYVPDLNARVKSVREAAERMAFNMPVQGTAADLMKLAMVRLFPQLREVGARMLLQVHDELLLEAPKERAEEVAALAKEVMEGVWPLAVPLEVEVGIGEDWLAAKG

SEQ ID NO: 1943 - DNA, 2529 bp, synthetic construct
  misc_feature 1..2529: note = Variant of DNA polymerase I from Thermus sp. strain 2.9
  source 1..2529: mol_type = other DNA
atgcaccatcatcatcatcatggcggtagcggcatgttaccgttgttcgaacctaaaggtcgcgtgcttctggttgatggccatcatctcgcgtatcgtaacttctttgccctgaaaggattaaccaccagccgtggcgagccggtacagggtgtctacggctttgcaaagtcgctcctgaaagctctgaaagaagacggtgatgtggtgattgttgtctttgatgcgaaagcgccaagttttcgccacgaagcgtacgaagcttacaaagccgggcgtgctccaacgccggaagactttcctcgccaattggcgcttatgaaggaattagtggatttgcttggcctcgaacgcttggaagttcccggtttcgaggcagacgacgtattagcgactctcgcaaagaaagccgaacgtgagggctatgaagtccagatcttgacagcagatcgcgatcttttccagcttttatctccgcgcatctcggtgttacacccggaagggcatcgtatcaccccggaatggctctgggagaaatatggtttgcgtcccgaacaatgggtggattttcgcgccttagcaggcgatccgagcgacaatattccgggagttaaaggtatcggcgagaagacggcgctcaagctccttaaagaatgggggtcgttggagaacttgcttaagaatttagatcaggtcaaaccagagtcagtgcgtgagaagattcttgcacacctcgaagacctcaaattaagccgcgaattgtcccgtgtacgcaccgatttgccgctcgaagttgatttccgtggccgccgcgaacctgactgggagggtcttaaagcgtttttagagcgtcttgaatttggttcgctcttgcatgaattcggccttttatcgagcccgttaccagccgaagaagcaccttggccaccgcccgaaggcgcgtttttaggttaccgtttgagtcgcccggaaccgatgtgggccgaattattggctcttgcagcgtctgcccagggacgtgtgtatcgcgcggaagaccctcatggtgcgctccgcggcctcaaagaagtccgtggactccttgccaaagacttagctgttgttgcattgcgcgaaggtcttgatttacctccgactgatgatccaatgcttcttgcgtacctcttggacccgtcaaacacgacgcccgaaggcgtagcccgtcgttacggcggcgagtggaccgaagatgcaggcgagcgcgcgttattggccgaacgtttgcacgccaatttattaggacgtttgcaaggcgaggaacgtctcctctggctttacgaagaagtggagaaaccattgagtcgcgtgctcgcgcatatggaagctaccggtgtcaaattagacgtggcgtatttggaggcactcagccttgaagttgctgccgaaatgcgccgcttggaggaagaagtattccgtttagcaggccactccttttatcttaattctcgcgatcagttagaacgtgtgttgttcgatgaacttggtctccctcctatcggcaagacagagaagaccggtaaacgtagcacttcagcggcggttttagaagctcttcgcgaagtccatcccattgtggacaagatcttgcagtaccgcgaactcgcgaaattgaaaggcacctatattgaccctcttccggcattagtccacccgaaaacgggacgcctccatacccgcttcaaccaaacagccacggcgaccggtcgtttgtcctcctctgatccaaaccttcagaatattccagtacgtaccccattgggccagaagatccgccgcgcgtttgtagctgaggagggttggcgtttagtggccctcgattatagccaaattgaattacgtgtccttgcccatctttctggcgatgagaacctcatccgcgtgtttcaggaaggcaaagacattcacactcaaacggcaagctggatgtttggattatcagctgaagcgatcgatcctttgatgcgtcgtgcagcgaagaccatcaatttcggtgttctctacggtatgagtgcccatcgtttgtcgcaggaattaggcattccctatgaagaagctgcggcgttcattcagcgctactttcaaagctatcccaaagttaaagcatggatcgagaagactctcgaagaaggccgcacacgtggttacgtagagaccttatttggacgtcgccgctatgttcccgatttaaacgctcgcgtgaaatctgtccgtgaagccgccgaacgcatggcgttcaacatgcctgtacagggcacggcagctgacctcatgaaacttgcaatggtgcgcctttttccacaattgcgtgaagttggtgcccgcatgctcttgcaggtccacgatgaactcttgttagaagcgccaaaagagcgtgcggaagaggtggcagccctcgcgaaagaggttatggaaggcgtgtggcccttagcggtgcctcttgaagtcgaagttggtattggcgaggattggttggctgccaaaggataatga

SEQ ID NO: 1944 - protein, 841 aa, synthetic construct
  REGION 1..841: note = Variant of DNA polymerase I from Thermus sp. strain 2.9
MHHHHHHGGSGMLPLFEPKGRVLLVDGHHLAYRNFFALKGLTTSRGEPVQGVYGFAKSLLKALKEDGDVVIVVFDAKAPSFRHEAYEAYKAGRAPTPEDFPRQLALMKELVDLLGLERLEVPGFEADDVLATLAKKAEREGYEVQILTADRDLFQLLSPRISVLHPEGHRITPEWLWEKYGLRPEQWVDFRALAGDPSDNIPGVKGIGEKTALKLLKEWGSLENLLKNLDQVKPESVREKILAHLEDLKLSRELSRVRTDLPLEVDFRGRREPDWEGLKAFLERLEFGSLLHEFGLLSSPLPAEEAPWPPPEGAFLGYRLSRPEPMWAELLALAASAQGRVYRAEDPHGALRGLKEVRGLLAKDLAVVALREGLDLPPTDDPMLLAYLLDPSNTTPEGVARRYGGEWTEDAGERALLAERLHANLLGRLQGEERLLWLYEEVEKPLSRVLAHMEATGVKLDVAYLEALSLEVAAEMRRLEEEVFRLAGHSFYLNSRDQLERVLFDELGLPPIGKTEKTGKRSTSAAVLEALREVHPIVDKILQYRELAKLKGTYIDPLPALVHPKTGRLHTRFNQTATATGRLSSSDPNLQNIPVRTPLGQKIRRAFVAEEGWRLVALDYSQIELRVLAHLSGDENLIRVFQEGKDIHTQTASWMFGLSAEAIDPLMRRAAKTINFGVLYGMSAHRLSQELGIPYEEAAAFIQRYFQSYPKVKAWIEKTLEEGRTRGYVETLFGRRRYVPDLNARVKSVREAAERMAFNMPVQGTAADLMKLAMVRLFPQLREVGARMLLQVHDELLLEAPKERAEEVAALAKEVMEGVWPLAVPLEVEVGIGEDWLAAKG

SEQ ID NO: 1945 - DNA, 2529 bp, synthetic construct
  misc_feature 1..2529: note = Variant of DNA polymerase I from Thermus sp. strain 2.9
  source 1..2529: mol_type = other DNA
atgcaccatcatcatcatcatggcggtagcggcatgttaccgttgttcgaacctaaaggtcgcgtgcttctggttgatggccatcatctcgcgtatcgtaacttctttgccctgaaaggattaaccaccagccgtggcgagccggtacagggtgtctacggctttgcaaagtcgctcctgaaagctctgaaagaagacggtgatgtggtgattgttgtctttgatgcgaaagcgccaagttttcgccacgaagcgtacgaagcttacaaagccgggcgtgctccaacgccggaagactttcctcgccaattggcgcttatgaaggaattagtggatttgcttggcctcgaacgcttggaagttcccggtttcgaggcagacgacgtattagcgactctcgcaaagaaagccgaacgtgagggctatgaagtccagatcttgacagcagatcgcgatcttttccagcttttatctccgcgcatctcggtgttacacccggaagggcatcgtatcaccccggaatggctctgggagaaatatggtttgcgtcccgaacaatgggtggattttcgcgccttagcaggcgatccgagcgacaatattccgggagttaaaggtatcggcgagaagacggcgctcaagctccttaaagaatgggggtcgttggagaacttgcttaagaatttagatcaggtcaaaccagagtcagtgcgtgagaagattcttgcacacctcgaagacctcaaattaagccgcgaattgtcccgtgtacgcaccgatttgccgctcgaagttgatttccgtggccgccgcgaacctgactgggagggtcttaaagcgtttttagagcgtcttgaatttggttcgctcttgcatgaattcggccttttagaaagcccgttaccagccgaagaagcaccttggccaccgcccgaaggcgcgtttttaggttaccgtttgagtcgcccggaaccgatgtgggccgaattattggctcttgcagcgtctgcccagggacgtgtgtatcgcgcggaagaccctcatggtgcgctccgcggcctcaaagaagtccgtggactccttgccaaagacttagctgttgttgcattgcgcgaaggtcttgatttacctccgactgatgatccaatgcttcttgcgtacctcttggacccgtcaaacacgacgcccgaaggcgtagcccgtcgttacggcggcgagtggaccgaagatgcaggcgagcgcgcgttattggccgaacgtttgcacgccaatttattaggacgtttgcaaggcgaggaacgtctcctctggctttacgaagaagtggagaaaccattgagtcgcgtgctcgcgcatatggaagctaccggtgtcaaattagacgtggcgtatttggaggcactcagccttgaagttgctgccgaaatgcgccgcttggaggaagaagtattccgtttagcaggccactccttttatcttaattctcgcgatcagttagaacgtgtgttgttcgatgaacttggtctccctcctatcggcaagacagagaagaccggtaaacgtagcacttcagcggcggttttagaagctcttcgcgaagtccatcccattgtggacaagatcttgcagtaccgcgaactcgcgaaattgaaaggcacctatattgaccctcttccggcattagtccacccgaaaacgggacgcctccatacccgcttcaaccaaacagccacggcgaccggtcgtttgtcctcctctgatccaaaccttcagaatattccagtacgtaccccattgggccagaagatccgccgcgcgtttgtagctgaggagggttggcgtttagtggccctcgattatagccaaattgaattacgtgtccttgcccatctttctggcgatgagaacctcatccgcgtgtttcaggaaggcatggacattcacactcaaacggcaagctggatgtttggattatcagctgaagcgatcgatcctttgatgcgtcgtgcagcgaagaccatcaatttcggtgttctctacggtatgagtgcccatcgtttgtcgcaggaattaggcattccctatgaagaagctgcggcgttcattcagcgctactttcaaagctatcccaaagttaaagcatggatcgagaagactctcgaagaaggccgcacacgtggttacgtagagaccttatttggacgtcgccgctatgttcccgatttaaacgctcgcgtgaaatctgtccgtgaagccgccgaacgcatggcgttcaacatgcctgtacagggcacggcagctgacctcatgaaacttgcaatggtgcgcctttttccacaattgcgtgaagttggtgcccgcatgctcttgcaggtccacgatgaactcttgttagaagcgccaaaagagcgtgcggaagaggtggcagccctcgcgaaagaggttatggaaggcgtgtggcccttagcggtgcctcttgaagtcgaagttggtattggcgaggattggttggctgccaaaggataatga

SEQ ID NO: 1946 - protein, 841 aa, synthetic construct
  REGION 1..841: note = Variant of DNA polymerase I from Thermus sp. strain 2.9
MHHHHHHGGSGMLPLFEPKGRVLLVDGHHLAYRNFFALKGLTTSRGEPVQGVYGFAKSLLKALKEDGDVVIVVFDAKAPSFRHEAYEAYKAGRAPTPEDFPRQLALMKELVDLLGLERLEVPGFEADDVLATLAKKAEREGYEVQILTADRDLFQLLSPRISVLHPEGHRITPEWLWEKYGLRPEQWVDFRALAGDPSDNIPGVKGIGEKTALKLLKEWGSLENLLKNLDQVKPESVREKILAHLEDLKLSRELSRVRTDLPLEVDFRGRREPDWEGLKAFLERLEFGSLLHEFGLLESPLPAEEAPWPPPEGAFLGYRLSRPEPMWAELLALAASAQGRVYRAEDPHGALRGLKEVRGLLAKDLAVVALREGLDLPPTDDPMLLAYLLDPSNTTPEGVARRYGGEWTEDAGERALLAERLHANLLGRLQGEERLLWLYEEVEKPLSRVLAHMEATGVKLDVAYLEALSLEVAAEMRRLEEEVFRLAGHSFYLNSRDQLERVLFDELGLPPIGKTEKTGKRSTSAAVLEALREVHPIVDKILQYRELAKLKGTYIDPLPALVHPKTGRLHTRFNQTATATGRLSSSDPNLQNIPVRTPLGQKIRRAFVAEEGWRLVALDYSQIELRVLAHLSGDENLIRVFQEGMDIHTQTASWMFGLSAEAIDPLMRRAAKTINFGVLYGMSAHRLSQELGIPYEEAAAFIQRYFQSYPKVKAWIEKTLEEGRTRGYVETLFGRRRYVPDLNARVKSVREAAERMAFNMPVQGTAADLMKLAMVRLFPQLREVGARMLLQVHDELLLEAPKERAEEVAALAKEVMEGVWPLAVPLEVEVGIGEDWLAAKG

SEQ ID NO: 1947 - DNA, 2529 bp, synthetic construct
  misc_feature 1..2529: note = Variant of DNA polymerase I from Thermus sp. strain 2.9
  source 1..2529: mol_type = other DNA
atgcaccatcatcatcatcatggcggtagcggcatgttaccgttgttcgaacctaaaggtcgcgtgcttctggttgatggccatcatctcgcgtatcgtaacttctttgccctgaaaggattaaccaccagccgtggcgagccggtacagggtgtctacggctttgcaaagtcgctcctgaaagctctgaaagaagacggtgatgtggtgattgttgtctttgatgcgaaagcgccaagttttcgccacgaagcgtacgaagcttacaaagccgggcgtgctccaacgccggaagactttcctcgccaattggcgcttatgaaggaattagtggatttgcttggcctcgaacgcttggaagttcccggtttcgaggcagacgacgtattagcgactctcgcaaagaaagccgaacgtgagggctatgaagtccagatcttgacagcagatcgcgatcttttccagcttttatctccgcgcatctcggtgttacacccggaagggcatcgtatcaccccggaatggctctgggagaaatatggtttgcgtcccgaacaatgggtggattttcgcgccttagcaggcgatccgagcgacaatattccgggagttaaaggtatcggcgagaagacggcgctcaagctccttaaagaatgggggtcgttggagaacttgcttaagaatttagatcaggtcaaaccagagtcagtgcgtgagaagattcttgcacacctcgaagacctcaaattaagccgcgaattgtcccgtgtacgcaccgatttgccgctcgaagttgatttccgtggccgccgcgaacctgactgggagggtcttaaagcgtttttagagcgtcttgaatttggttcgctcttgcatgaattcggccttttagaaagctttttaccagccgaagaagcaccttggccaccgcccgaaggcgcgtttttaggttaccgtttgagtcgcccggaaccgatgtgggccgaattattggctcttgcagcgtctgcccagggacgtgtgtatcgcgcggaagaccctcatggtgcgctccgcggcctcaaagaagtccgtggactccttgccaaagacttagctgttgttgcattgcgcgaaggtcttgatttacctccgactgatgatccaatgcttcttgcgtacctcttggacccgtcaaacacgacgcccgaaggcgtagcccgtcgttacggcggcgagtggaccgaagatgcaggcgagcgcgcgttattggccgaacgtttgcacgccaatttattaggacgtttgcaaggcgaggaacgtctcctctggctttacgaagaagtggagaaaccattgagtcgcgtgctcgcgcatatggaagctaccggtgtcaaattagacgtggcgtatttggaggcactcagccttgaagttgctgccgaaatgcgccgcttggaggaagaagtattccgtttagcaggccactccttttatcttaattctcgcgatcagttagaacgtgtgttgttcgatgaacttggtctccctcctatcggcaagacagagaagaccggtaaacgtagcacttcagcggcggttttagaagctcttcgcgaagtccatcccattgtggacaagatcttgcagtaccgcgaactcgcgaaattgaaaggcacctatattgaccctcttccggcattagtccacccgaaaacgggacgcctccatacccgcttcaaccaaacagccacggcgaccggtcgtttgtcctcctctgatccaaaccttcagaatattccagtacgtaccccattgggccagaagatccgccgcgcgtttgtagctgaggagggttggcgtttagtggccctcgattatagccaaattgaattacgtgtccttgcccatctttctggcgatgagaacctcatccgcgtgtttcaggaaggcaaagacattcacactcaaacggcaagctggatgtttggattatcagctgaagcgatcgatcctttgatgcgtcgtgcagcgaagaccatcaatttcggtgttctctacggtatgagtgcccatcgtttgtcgcaggaattaggcattccctatgaagaagctgcggcgttcattcagcgctactttcaaagctatcccaaagttaaagcatggatcgagaagactctcgaagaaggccgcacacgtggttacgtagagaccttatttggacgtcgccgctatgttcccgatttaaacgctcgcgtgaaatctgtccgtgaagccgccgaacgcatggcgttcaacatgcctgtacagggcacggcagctgacctcatgaaacttgcaatggtgcgcctttttccacaattgcgtgaagttggtgcccgcatgctcttgcaggtccacgatgaactcttgttagaagcgccaaaagagcgtgcggaagaggtggcagccctcgcgaaagaggttatggaaggcgtgtggcccttagcggtgcctcttgaagtcgaagttggtattggcgaggattggttggctgccaaaggataatga

SEQ ID NO: 1948 - protein, 841 aa, synthetic construct
  REGION 1..841: note = Variant of DNA polymerase I from Thermus sp. strain 2.9
MHHHHHHGGSGMLPLFEPKGRVLLVDGHHLAYRNFFALKGLTTSRGEPVQGVYGFAKSLLKALKEDGDVVIVVFDAKAPSFRHEAYEAYKAGRAPTPEDFPRQLALMKELVDLLGLERLEVPGFEADDVLATLAKKAEREGYEVQILTADRDLFQLLSPRISVLHPEGHRITPEWLWEKYGLRPEQWVDFRALAGDPSDNIPGVKGIGEKTALKLLKEWGSLENLLKNLDQVKPESVREKILAHLEDLKLSRELSRVRTDLPLEVDFRGRREPDWEGLKAFLERLEFGSLLHEFGLLESFLPAEEAPWPPPEGAFLGYRLSRPEPMWAELLALAASAQGRVYRAEDPHGALRGLKEVRGLLAKDLAVVALREGLDLPPTDDPMLLAYLLDPSNTTPEGVARRYGGEWTEDAGERALLAERLHANLLGRLQGEERLLWLYEEVEKPLSRVLAHMEATGVKLDVAYLEALSLEVAAEMRRLEEEVFRLAGHSFYLNSRDQLERVLFDELGLPPIGKTEKTGKRSTSAAVLEALREVHPIVDKILQYRELAKLKGTYIDPLPALVHPKTGRLHTRFNQTATATGRLSSSDPNLQNIPVRTPLGQKIRRAFVAEEGWRLVALDYSQIELRVLAHLSGDENLIRVFQEGKDIHTQTASWMFGLSAEAIDPLMRRAAKTINFGVLYGMSAHRLSQELGIPYEEAAAFIQRYFQSYPKVKAWIEKTLEEGRTRGYVETLFGRRRYVPDLNARVKSVREAAERMAFNMPVQGTAADLMKLAMVRLFPQLREVGARMLLQVHDELLLEAPKERAEEVAALAKEVMEGVWPLAVPLEVEVGIGEDWLAAKG

SEQ ID NO: 1949 - DNA, 2529 bp, synthetic construct
  misc_feature 1..2529: note = Variant of DNA polymerase I from Thermus sp. strain 2.9
  source 1..2529: mol_type = other DNA
atgcaccatcatcatcatcatggcggtagcggcatgttaccgttgttcgaacctaaaggtcgcgtgcttctggttgatggccatcatctcgcgtatcgtaacttctttgccctgaaaggattaaccaccagccgtggcgagccggtacagggtgtctacggctttgcaaagtcgctcctgaaagctctgaaagaagacggtgatgtggtgattgttgtctttgatgcgaaagcgccaagttttcgccacgaagcgtacgaagcttacaaagccgggcgtgctccaacgccggaagactttcctcgccaattggcgcttatgaaggaattagtggatttgcttggcctcgaacgcttggaagttcccggtttcgaggcagacgacgtattagcgactctcgcaaagaaagccgaacgtgagggctatgaagtccagatcttgacagcagatcgcgatcttttccagcttttatctccgcgcatctcggtgttacacccggaagggcatcgtatcaccccggaatggctctgggagaaatatggtttgcgtcccgaacaatgggtggattttcgcgccttagcaggcgatccgagcgacaatattccgggagttaaaggtatcggcgagaagacggcgctcaagctccttaaagaatgggggtcgttggagaacttgcttaagaatttagatcaggtcaaaccagagtcagtgcgtgagaagattcttgcacacctcgaagacctcaaattaagccgcgaattgtcccgtgtacgcaccgatttgccgctcgaagttgatttccgtggccgccgcgaacctgactgggagggtcttaaagcgtttttagagcgtcttgaatttggttcgctcttgcatgaattcggccttttagaaagcccgttaccagccgaagaagcaccttggccaccgcccgaaggcgcgtttttaggttaccgtttgagtcgcccggaaccgatgtgggccgaattattggctcttgcagcgtctgcccagggacgtgtgtatcgcgcggaagaccctcatggtgcgctccgcggcctcaaagaagtccgtggactccttgccaaagacttagctgttgttgcattgcgcgaaggtcttgatttacctccgactgatgatccaatgcttcttgcgtacctcttggacccgtcaaacacgacgcccgaaggcgtagcccgtcgttacggcggcgagtggaccgaagatgcaggcgagcgcgcgttattggccgaacgtttgcacgccaatttattaggacgtttgcaaggcgaggaacgtctcctctggctttacgaagaagtggagaaaccattgagtcgcgtgctcgcgcatatggaagctaccggtgtcaaattagacgtggcgtatttggaggcactcagccttgaagttgctgccgaaatgcgccgcttggaggaagaagtattccgtttagcaggccactccttttatcttaattctcgcgatcagttagaacgtgtgttgttcgatgaacttggtctccctcctatcggcaagacagagaagaccggtaaacgtagcacttcagcggcggttttagaagctcttcgcgaagtccatcccattgtggacaagatcttgcagtaccgcgaactcgcgaaattgaaaggcacctatattgaccctcttccggcattagtccacccgaaaacgggacgcctccatacccgcttcaaccaaacagccacggcgaccggtcgtttgtcctcctctgatccaaaccttcagaatattccagtacgtaccccattgggccagaagatccgccgcgcgtttgtagctgaggagggttggcgtttagtggccctcgattatagccaaattgaattacgtgtccttgcccatctttctggcgatgagaacctcatccgcgtgtttcaggaaggcaaagacattcacactcaaacggcaagctggatgtttggattatcagctgaagcgatcgatcctaatatgcgtcgtgcagcgaagaccatcaatttcggtgttctctacggtatgagtgcccatcgtttgtcgcaggaattaggcattccctatgaagaagctgcggcgttcattcagcgctactttcaaagctatcccaaagttaaagcatggatcgagaagactctcgaagaaggccgcacacgtggttacgtagagaccttatttggacgtcgccgctatgttcccgatttaaacgctcgcgtgaaatctgtccgtgaagccgccgaacgcatggcgttcaacatgcctgtacagggcacggcagctgacctcatgaaacttgcaatggtgcgcctttttccacaattgcgtgaagttggtgcccgcatgctcttgcaggtccacgatgaactcttgttagaagcgccaaaagagcgtgcggaagaggtggcagccctcgcgaaagaggttatggaaggcgtgtggcccttagcggtgcctcttgaagtcgaagttggtattggcgaggattggttggctgccaaaggataatga

SEQ ID NO: 1950 - protein, 841 aa, synthetic construct
  REGION 1..841: note = Variant of DNA polymerase I from Thermus sp. strain 2.9
MHHHHHHGGSGMLPLFEPKGRVLLVDGHHLAYRNFFALKGLTTSRGEPVQGVYGFAKSLLKALKEDGDVVIVVFDAKAPSFRHEAYEAYKAGRAPTPEDFPRQLALMKELVDLLGLERLEVPGFEADDVLATLAKKAEREGYEVQILTADRDLFQLLSPRISVLHPEGHRITPEWLWEKYGLRPEQWVDFRALAGDPSDNIPGVKGIGEKTALKLLKEWGSLENLLKNLDQVKPESVREKILAHLEDLKLSRELSRVRTDLPLEVDFRGRREPDWEGLKAFLERLEFGSLLHEFGLLESPLPAEEAPWPPPEGAFLGYRLSRPEPMWAELLALAASAQGRVYRAEDPHGALRGLKEVRGLLAKDLAVVALREGLDLPPTDDPMLLAYLLDPSNTTPEGVARRYGGEWTEDAGERALLAERLHANLLGRLQGEERLLWLYEEVEKPLSRVLAHMEATGVKLDVAYLEALSLEVAAEMRRLEEEVFRLAGHSFYLNSRDQLERVLFDELGLPPIGKTEKTGKRSTSAAVLEALREVHPIVDKILQYRELAKLKGTYIDPLPALVHPKTGRLHTRFNQTATATGRLSSSDPNLQNIPVRTPLGQKIRRAFVAEEGWRLVALDYSQIELRVLAHLSGDENLIRVFQEGKDIHTQTASWMFGLSAEAIDPNMRRAAKTINFGVLYGMSAHRLSQELGIPYEEAAAFIQRYFQSYPKVKAWIEKTLEEGRTRGYVETLFGRRRYVPDLNARVKSVREAAERMAFNMPVQGTAADLMKLAMVRLFPQLREVGARMLLQVHDELLLEAPKERAEEVAALAKEVMEGVWPLAVPLEVEVGIGEDWLAAKG

SEQ ID NO: 1951 - DNA, 2529 bp, synthetic construct
  misc_feature 1..2529: note = Variant of DNA polymerase I from Thermus sp. strain 2.9
  source 1..2529: mol_type = other DNA
atgcaccatcatcatcatcatggcggtagcggcatgttaccgttgttcgaacctaaaggtcgcgtgcttctggttgatggccatcatctcgcgtatcgtaacttctttgccctgaaaggattaaccaccagccgtggcgagccggtacagggtgtctacggctttgcaaagtcgctcctgaaagctctgaaagaagacggtgatgtggtgattgttgtctttgatgcgaaagcgccaagttttcgccacgaagcgtacgaagcttacaaagccgggcgtgctccaacgccggaagactttcctcgccaattggcgcttatgaaggaattagtggatttgcttggcctcgaacgcttggaagttcccggtttcgaggcagacgacgtattagcgactctcgcaaagaaagccgaacgtgagggctatgaagtccagatcttgacagcagatcgcgatcttttccagcttttatctccgcgcatctcggtgttacacccggaagggcatcgtatcaccccggaatggctctgggagaaatatggtttgcgtcccgaacaatgggtggattttcgcgccttagcaggcgatccgagcgacaatattccgggagttaaaggtatcggcgagaagacggcgctcaagctccttaaagaatgggggtcgttggagaacttgcttaagaatttagatcaggtcaaaccagagtcagtgcgtgagaagattcttgcacacctcgaagacctcaaattaagccgcgaattgtcccgtgtacgcaccgatttgccgctcgaagttgatttccgtggccgccgcgaacctgactgggagggtcttaaagcgtttttagagcgtcttgaatttggttcgctcttgcatgaattcggccttttagaaagcccgttaccagccgaagaagcaccttggccaccgcccgaaggcgcgtttttaggttaccgtttgagtcgcccggaaccgatgtgggccgaattattggctcttgcagcgtctgcccagggacgtgtgtatcgcgcggaagaccctcatggtgcgctccgcggcctcaaagaagtccgtggactccttgccaaagacttagctgttgttgcattgcgcgaaggtcttgatttacctccgactgatgatccaatgcttcttgcgtacctcttggacccgtcaaacacgacgcccgaaggcgtagcccgtcgttacggcggcgagtggaccgaagatgcaggcgagcgcgcgttattggccgaacgtttgcacgccaatttattaggacgtttgcaaggcgaggaacgtctcctctggctttacgaagaagtggagaaaccattgagtcgcgtgctcgcgcatatggaagctaccggtgtcaaattagacgtggcgtatttggaggcactcagccttgaagttgctgccgaaatgcgccgcttggaggaagaagtattccgtttagcaggccacaggttttatcttaattctcgcgatcagttagaacgtgtgttgttcgatgaacttggtctccctcctatcggcaagacagagaagaccggtaaacgtagcacttcagcggcggttttagaagctcttcgcgaagtccatcccattgtggacaagatcttgcagtaccgcgaactcgcgaaattgaaaggcacctatattgaccctcttccggcattagtccacccgaaaacgggacgcctccatacccgcttcaaccaaacagccacggcgaccggtcgtttgtcctcctctgatccaaaccttcagaatattccagtacgtaccccattgggccagaagatccgccgcgcgtttgtagctgaggagggttggcgtttagtggccctcgattatagccaaattgaattacgtgtccttgcccatctttctggcgatgagaacctcatccgcgtgtttcaggaaggcaaagacattcacactcaaacggcaagctggatgtttggattatcagctgaagcgatcgatcctttgatgcgtcgtgcagcgaagaccatcaatttcggtgttctctacggtatgagtgcccatcgtttgtcgcaggaattaggcattccctatgaagaagctgcggcgttcattcagcgctactttcaaagctatcccaaagttaaagcatggatcgagaagactctcgaagaaggccgcacacgtggttacgtagagaccttatttggacgtcgccgctatgttcccgatttaaacgctcgcgtgaaatctgtccgtgaagccgccgaacgcatggcgttcaacatgcctgtacagggcacggcagctgacctcatgaaacttgcaatggtgcgcctttttccacaattgcgtgaagttggtgcccgcatgctcttgcaggtccacgatgaactcttgttagaagcgccaaaagagcgtgcggaagaggtggcagccctcgcgaaagaggttatggaaggcgtgtggcccttagcggtgcctcttgaagtcgaagttggtattggcgaggattggttggctgccaaaggataatga

SEQ ID NO: 1952 - protein, 841 aa, synthetic construct
  REGION 1..841: note = Variant of DNA polymerase I from Thermus sp. strain 2.9
MHHHHHHGGSGMLPLFEPKGRVLLVDGHHLAYRNFFALKGLTTSRGEPVQGVYGFAKSLLKALKEDGDVVIVVFDAKAPSFRHEAYEAYKAGRAPTPEDFPRQLALMKELVDLLGLERLEVPGFEADDVLATLAKKAEREGYEVQILTADRDLFQLLSPRISVLHPEGHRITPEWLWEKYGLRPEQWVDFRALAGDPSDNIPGVKGIGEKTALKLLKEWGSLENLLKNLDQVKPESVREKILAHLEDLKLSRELSRVRTDLPLEVDFRGRREPDWEGLKAFLERLEFGSLLHEFGLLESPLPAEEAPWPPPEGAFLGYRLSRPEPMWAELLALAASAQGRVYRAEDPHGALRGLKEVRGLLAKDLAVVALREGLDLPPTDDPMLLAYLLDPSNTTPEGVARRYGGEWTEDAGERALLAERLHANLLGRLQGEERLLWLYEEVEKPLSRVLAHMEATGVKLDVAYLEALSLEVAAEMRRLEEEVFRLAGHRFYLNSRDQLERVLFDELGLPPIGKTEKTGKRSTSAAVLEALREVHPIVDKILQYRELAKLKGTYIDPLPALVHPKTGRLHTRFNQTATATGRLSSSDPNLQNIPVRTPLGQKIRRAFVAEEGWRLVALDYSQIELRVLAHLSGDENLIRVFQEGKDIHTQTASWMFGLSAEAIDPLMRRAAKTINFGVLYGMSAHRLSQELGIPYEEAAAFIQRYFQSYPKVKAWIEKTLEEGRTRGYVETLFGRRRYVPDLNARVKSVREAAERMAFNMPVQGTAADLMKLAMVRLFPQLREVGARMLLQVHDELLLEAPKERAEEVAALAKEVMEGVWPLAVPLEVEVGIGEDWLAAKG

SEQ ID NO: 1953 - DNA, 2529 bp, synthetic construct
  misc_feature 1..2529: note = Variant of DNA polymerase I from Thermus sp. strain 2.9
  source 1..2529: mol_type = other DNA
atgcaccatcatcatcatcatggcggtagcggcatgttaccgttgttcgaacctaaaggtcgcgtgcttctggttgatggccatcatctcgcgtatcgtaacttctttgccagtaaaggattaaccaccagccgtggcgagccggtacagggtgtctacggctttgcaaagtcgctcctgaaagctctgaaagaagacggtgatgtggtgattgttgtctttgatgcgaaagcgccaagttttcgccacgaagcgtacgaagcttacaaagccgggcgtgctccaacgccggaagactttcctcgccaattggcgcttatgaaggaattagtggatttgcttggcctcgaacgcttggaagttcccggtttcgaggcagacgacgtattagcgactctcgcaaagaaagccgaacgtgagggctatgaagtccagatcttgacagcagatcgcgatcttttccagcttttatctccgcgcatctcggtgttacacccggaagggcatcgtatcaccccggaatggctctgggagaaatatggtttgcgtcccgaacaatgggtggattttcgcgccttagcaggcgatccgagcgacaatattccgggagttaaaggtatcggcgagaagacggcgctcaagctccttaaagaatgggggtcgttggagaacttgcttaagaatttagatcaggtcaaaccagagtcagtgcgtgagaagattcttgcacacctcgaagacctcaaattaagccgcgaattgtcccgtgtacgcaccgatttgccgctcgaagttgatttccgtggccgccgcgaacctgactgggagggtcttaaagcgtttttagagcgtcttgaatttggttcgctcttgcatgaattcggccttttagaaagcccgttaccagccgaagaagcaccttggccaccgcccgaaggcgcgtttttaggttaccgtttgagtcgcccggaaccgatgtgggccgaattattggctcttgcagcgtctgcccagggacgtgtgtatcgcgcggaagaccctcatggtgcgctccgcggcctcaaagaagtccgtggactccttgccaaagacttagctgttgttgcattgcgcgaaggtcttgatttacctccgactgatgatccaatgcttcttgcgtacctcttggacccgtcaaacacgacgcccgaaggcgtagcccgtcgttacggcggcgagtggaccgaagatgcaggcgagcgcgcgttattggccgaacgtttgcacgccaatttattaggacgtttgcaaggcgaggaacgtctcctctggctttacgaagaagtggagaaaccattgagtcgcgtgctcgcgcatatggaagctaccggtgtcaaattagacgtggcgtatttggaggcactcagccttgaagttgctgccgaaatgcgccgcttggaggaagaagtattccgtttagcaggccactccttttatcttaattctcgcgatcagttagaacgtgtgttgttcgatgaacttggtctccctcctatcggcaagacagagaagaccggtaaacgtagcacttcagcggcggttttagaagctcttcgcgaagtccatcccattgtggacaagatcttgcagtaccgcgaactcgcgaaattgaaaggcacctatattgaccctcttccggcattagtccacccgaaaacgggacgcctccatacccgcttcaaccaaacagccacggcgaccggtcgtttgtcctcctctgatccaaaccttcagaatattccagtacgtaccccattgggccagaagatccgccgcgcgtttgtagctgaggagggttggcgtttagtggccctcgattatagccaaattgaattacgtgtccttgcccatctttctggcgatgagaacctcatccgcgtgtttcaggaaggcaaagacattcacactcaaacggcaagctggatgtttggattatcagctgaagcgatcgatcctttgatgcgtcgtgcagcgaagaccatcaatttcggtgttctctacggtatgagtgcccatcgtttgtcgcaggaattaggcattccctatgaagaagctgcggcgttcattcagcgctactttcaaagctatcccaaagttaaagcatggatcgagaagactctcgaagaaggccgcacacgtggttacgtagagaccttatttggacgtcgccgctatgttcccgatttaaacgctcgcgtgaaatctgtccgtgaagccgccgaacgcatggcgttcaacatgcctgtacagggcacggcagctgacctcatgaaacttgcaatggtgcgcctttttccacaattgcgtgaagttggtgcccgcatgctcttgcaggtccacgatgaactcttgttagaagcgccaaaagagcgtgcggaagaggtggcagccctcgcgaaagaggttatggaaggcgtgtggcccttagcggtgcctcttgaagtcgaagttggtattggcgaggattggttggctgccaaaggataatga

SEQ ID NO: 1954 - protein, 841 aa, synthetic construct
  REGION 1..841: note = Variant of DNA polymerase I from Thermus sp. strain 2.9
MHHHHHHGGSGMLPLFEPKGRVLLVDGHHLAYRNFFASKGLTTSRGEPVQGVYGFAKSLLKALKEDGDVVIVVFDAKAPSFRHEAYEAYKAGRAPTPEDFPRQLALMKELVDLLGLERLEVPGFEADDVLATLAKKAEREGYEVQILTADRDLFQLLSPRISVLHPEGHRITPEWLWEKYGLRPEQWVDFRALAGDPSDNIPGVKGIGEKTALKLLKEWGSLENLLKNLDQVKPESVREKILAHLEDLKLSRELSRVRTDLPLEVDFRGRREPDWEGLKAFLERLEFGSLLHEFGLLESPLPAEEAPWPPPEGAFLGYRLSRPEPMWAELLALAASAQGRVYRAEDPHGALRGLKEVRGLLAKDLAVVALREGLDLPPTDDPMLLAYLLDPSNTTPEGVARRYGGEWTEDAGERALLAERLHANLLGRLQGEERLLWLYEEVEKPLSRVLAHMEATGVKLDVAYLEALSLEVAAEMRRLEEEVFRLAGHSFYLNSRDQLERVLFDELGLPPIGKTEKTGKRSTSAAVLEALREVHPIVDKILQYRELAKLKGTYIDPLPALVHPKTGRLHTRFNQTATATGRLSSSDPNLQNIPVRTPLGQKIRRAFVAEEGWRLVALDYSQIELRVLAHLSGDENLIRVFQEGKDIHTQTASWMFGLSAEAIDPLMRRAAKTINFGVLYGMSAHRLSQELGIPYEEAAAFIQRYFQSYPKVKAWIEKTLEEGRTRGYVETLFGRRRYVPDLNARVKSVREAAERMAFNMPVQGTAADLMKLAMVRLFPQLREVGARMLLQVHDELLLEAPKERAEEVAALAKEVMEGVWPLAVPLEVEVGIGEDWLAAKG

SEQ ID NO: 1955 - DNA, 2529 bp, synthetic construct
  misc_feature 1..2529: note = Variant of DNA polymerase I from Thermus sp. strain 2.9
  source 1..2529: mol_type = other DNA
atgcaccatcatcatcatcatggcggtagcggcatgttaccgttgttcgaacctaaaggtcgcgtgcttctggttgatggccatcatctcgcgtatcgtaacttctttgccctgaaaggattaaccaccagccgtggcgagccggtacagggtgtctacggctttgcaaagtcgctcctgaaagctctgaaagaagacggtgatgtggtgattgttgtctttgatgcgaaagcgccaagttttcgccacgaagcgtacgaagcttacaaagccgggcgtgctccaacgccggaagactttcctcgccaattggcgcttatgaaggaattagtggatttgcttggcctcgaacgcttggaagttcccggtttcgaggcagacgacgtattagcgactctcgcaaagaaagccgaacgtatgggctatgaagtccagatcttgacagcagatcgcgatcttttccagcttttatctccgcgcatctcggtgttacacccggaagggcatcgtatcaccccggaatggctctgggagaaatatggtttgcgtcccgaacaatgggtggattttcgcgccttagcaggcgatccgagcgacaatattccgggagttaaaggtatcggcgagaagacggcgctcaagctccttaaagaatgggggtcgttggagaacttgcttaagaatttagatcaggtcaaaccagagtcagtgcgtgagaagattcttgcacacctcgaagacctcaaattaagccgcgaattgtcccgtgtacgcaccgatttgccgctcgaagttgatttccgtggccgccgcgaacctgactgggagggtcttaaagcgtttttagagcgtcttgaatttggttcgctcttgcatgaattcggccttttagaaagcccgttaccagccgaagaagcaccttggccaccgcccgaaggcgcgtttttaggttaccgtttgagtcgcccggaaccgatgtgggccgaattattggctcttgcagcgtctgcccagggacgtgtgtatcgcgcggaagaccctcatggtgcgctccgcggcctcaaagaagtccgtggactccttgccaaagacttagctgttgttgcattgcgcgaaggtcttgatttacctccgactgatgatccaatgcttcttgcgtacctcttggacccgtcaaacacgacgcccgaaggcgtagcccgtcgttacggcggcgagtggaccgaagatgcaggcgagcgcgcgttattggccgaacgtttgcacgccaatttattaggacgtttgcaaggcgaggaacgtctcctctggctttacgaagaagtggagaaaccattgagtcgcgtgctcgcgcatatggaagctaccggtgtcaaattagacgtggcgtatttggaggcactcagccttgaagttgctgccgaaatgcgccgcttggaggaagaagtattccgtttagcaggccactccttttatcttaattctcgcgatcagttagaacgtgtgttgttcgatgaacttggtctccctcctatcggcaagacagagaagaccggtaaacgtagcacttcagcggcggttttagaagctcttcgcgaagtccatcccattgtggacaagatcttgcagtaccgcgaactcgcgaaattgaaaggcacctatattgaccctcttccggcattagtccacccgaaaacgggacgcctccatacccgcttcaaccaaacagccacggcgaccggtcgtttgtcctcctctgatccaaaccttcagaatattccagtacgtaccccattgggccagaagatccgccgcgcgtttgtagctgaggagggttggcgtttagtggccctcgattatagccaaattgaattacgtgtccttgcccatctttctggcgatgagaacctcatccgcgtgtttcaggaaggcaaagacattcacactcaaacggcaagctggatgtttggattatcagctgaagcgatcgatcctttgatgcgtcgtgcagcgaagaccatcaatttcggtgttctctacggtatgagtgcccatcgtttgtcgcaggaattaggcattccctatgaagaagctgcggcgttcattcagcgctactttcaaagctatcccaaagttaaagcatggatcgagaagactctcgaagaaggccgcacacgtggttacgtagagaccttatttggacgtcgccgctatgttcccgatttaaacgctcgcgtgaaatctgtccgtgaagccgccgaacgcatggcgttcaacatgcctgtacagggcacggcagctgacctcatgaaacttgcaatggtgcgcctttttccacaattgcgtgaagttggtgcccgcatgctcttgcaggtccacgatgaactcttgttagaagcgccaaaagagcgtgcggaagaggtggcagccctcgcgaaagaggttatggaaggcgtgtggcccttagcggtgcctcttgaagtcgaagttggtattggcgaggattggttggctgccaaaggataatga

SEQ ID NO: 1956 - protein, 841 aa, synthetic construct
  REGION 1..841: note = Variant of DNA polymerase I from Thermus sp. strain 2.9
MHHHHHHGGSGMLPLFEPKGRVLLVDGHHLAYRNFFALKGLTTSRGEPVQGVYGFAKSLLKALKEDGDVVIVVFDAKAPSFRHEAYEAYKAGRAPTPEDFPRQLALMKELVDLLGLERLEVPGFEADDVLATLAKKAERMGYEVQILTADRDLFQLLSPRISVLHPEGHRITPEWLWEKYGLRPEQWVDFRALAGDPSDNIPGVKGIGEKTALKLLKEWGSLENLLKNLDQVKPESVREKILAHLEDLKLSRELSRVRTDLPLEVDFRGRREPDWEGLKAFLERLEFGSLLHEFGLLESPLPAEEAPWPPPEGAFLGYRLSRPEPMWAELLALAASAQGRVYRAEDPHGALRGLKEVRGLLAKDLAVVALREGLDLPPTDDPMLLAYLLDPSNTTPEGVARRYGGEWTEDAGERALLAERLHANLLGRLQGEERLLWLYEEVEKPLSRVLAHMEATGVKLDVAYLEALSLEVAAEMRRLEEEVFRLAGHSFYLNSRDQLERVLFDELGLPPIGKTEKTGKRSTSAAVLEALREVHPIVDKILQYRELAKLKGTYIDPLPALVHPKTGRLHTRFNQTATATGRLSSSDPNLQNIPVRTPLGQKIRRAFVAEEGWRLVALDYSQIELRVLAHLSGDENLIRVFQEGKDIHTQTASWMFGLSAEAIDPLMRRAAKTINFGVLYGMSAHRLSQELGIPYEEAAAFIQRYFQSYPKVKAWIEKTLEEGRTRGYVETLFGRRRYVPDLNARVKSVREAAERMAFNMPVQGTAADLMKLAMVRLFPQLREVGARMLLQVHDELLLEAPKERAEEVAALAKEVMEGVWPLAVPLEVEVGIGEDWLAAKG

SEQ ID NO: 1957 - DNA, 2529 bp, synthetic construct
  misc_feature 1..2529: note = Variant of DNA polymerase I from Thermus sp. strain 2.9
  source 1..2529: mol_type = other DNA
atgcaccatcatcatcatcatggcggtagcggcatgttaccgttgttcgaacctaaaggtcgcgtgcttctggttgatggccatcatctcgcgtatcgtaacttctttgccctgaaaggattaaccaccagccgtggcgagccggtacagggtgtctacggctttgcaaagtcgctcctgaaagctctgaaagaagacggtgatgtggtgattgttgtctttgatgcgaaagcgccaagttttcgccacgaagcgtacgaagcttacaaagccgggcgtgctccaacgccggaagactttcctcgccaattggcgcttatgaaggaattagtggatttgcttggcctcgaacgcttggaagttcccggtttcgaggcagacgacgtattagcgactctcgcaaagaaagccgaacgtgagggctatgaagtccagatcttgacagcagatcgcgatcttttccagcttttatctccgcgcatctcggtgttacacccggaagggcatcgtatcaccccggaatggctctgggagaaatatggtttgcgtcccgaacaatgggtggattttcgcgccttagcaggcgatccgagcgacaatattccgggagttaaaggtatcggcgagaagacggcgctcaagctccttaaagaatgggggtcgttggagaacttgcttaagaatttagatcaggtcaaaccagagtcagtgcgtgagaagattcttgcacacctcgaagacctcaaattaagccgcgaattgtcccgtgtacgcaccgatttgccgctcgaagttgatttccgtggccgccgcgaacctgactgggagggtcttaaagcgtttttagagcgtcttgaatttggttcgctcttgcatgaattcggccttttagaaagcccgttaccagccgaagaagcaccttggccaccgcccgaaggcgcgtttttaggttaccgtttgagtcgcccggaaccgatgtgggccagtttattggctcttgcagcgtctgcccagggacgtgtgtatcgcgcggaagaccctcatggtgcgctccgcggcctcaaagaagtccgtggactccttgccaaagacttagctgttgttgcattgcgcgaaggtcttgatttacctccgactgatgatccaatgcttcttgcgtacctcttggacccgtcaaacacgacgcccgaaggcgtagcccgtcgttacggcggcgagtggaccgaagatgcaggcgagcgcgcgttattggccgaacgtttgcacgccaatttattaggacgtttgcaaggcgaggaacgtctcctctggctttacgaagaagtggagaaaccattgagtcgcgtgctcgcgcatatggaagctaccggtgtcaaattagacgtggcgtatttggaggcactcagccttgaagttgctgccgaaatgcgccgcttggaggaagaagtattccgtttagcaggccactccttttatcttaattctcgcgatcagttagaacgtgtgttgttcgatgaacttggtctccctcctatcggcaagacagagaagaccggtaaacgtagcacttcagcggcggttttagaagctcttcgcgaagtccatcccattgtggacaagatcttgcagtaccgcgaactcgcgaaattgaaaggcacctatattgaccctcttccggcattagtccacccgaaaacgggacgcctccatacccgcttcaaccaaacagccacggcgaccggtcgtttgtcctcctctgatccaaaccttcagaatattccagtacgtaccccattgggccagaagatccgccgcgcgtttgtagctgaggagggttggcgtttagtggccctcgattatagccaaattgaattacgtgtccttgcccatctttctggcgatgagaacctcatccgcgtgtttcaggaaggcaaagacattcacactcaaacggcaagctggatgtttggattatcagctgaagcgatcgatcctttgatgcgtcgtgcagcgaagaccatcaatttcggtgttctctacggtatgagtgcccatcgtttgtcgcaggaattaggcattccctatgaagaagctgcggcgttcattcagcgctactttcaaagctatcccaaagttaaagcatggatcgagaagactctcgaagaaggccgcacacgtggttacgtagagaccttatttggacgtcgccgctatgttcccgatttaaacgctcgcgtgaaatctgtccgtgaagccgccgaacgcatggcgttcaacatgcctgtacagggcacggcagctgacctcatgaaacttgcaatggtgcgcctttttccacaattgcgtgaagttggtgcccgcatgctcttgcaggtccacgatgaactcttgttagaagcgccaaaagagcgtgcggaagaggtggcagccctcgcgaaagaggttatggaaggcgtgtggcccttagcggtgcctcttgaagtcgaagttggtattggcgaggattggttggctgccaaaggataatga

SEQ ID NO: 1958 - protein, 841 aa, synthetic construct
  REGION 1..841: note = Variant of DNA polymerase I from Thermus sp. strain 2.9
MHHHHHHGGSGMLPLFEPKGRVLLVDGHHLAYRNFFALKGLTTSRGEPVQGVYGFAKSLLKALKEDGDVVIVVFDAKAPSFRHEAYEAYKAGRAPTPEDFPRQLALMKELVDLLGLERLEVPGFEADDVLATLAKKAEREGYEVQILTADRDLFQLLSPRISVLHPEGHRITPEWLWEKYGLRPEQWVDFRALAGDPSDNIPGVKGIGEKTALKLLKEWGSLENLLKNLDQVKPESVREKILAHLEDLKLSRELSRVRTDLPLEVDFRGRREPDWEGLKAFLERLEFGSLLHEFGLLESPLPAEEAPWPPPEGAFLGYRLSRPEPMWASLLALAASAQGRVYRAEDPHGALRGLKEVRGLLAKDLAVVALREGLDLPPTDDPMLLAYLLDPSNTTPEGVARRYGGEWTEDAGERALLAERLHANLLGRLQGEERLLWLYEEVEKPLSRVLAHMEATGVKLDVAYLEALSLEVAAEMRRLEEEVFRLAGHSFYLNSRDQLERVLFDELGLPPIGKTEKTGKRSTSAAVLEALREVHPIVDKILQYRELAKLKGTYIDPLPALVHPKTGRLHTRFNQTATATGRLSSSDPNLQNIPVRTPLGQKIRRAFVAEEGWRLVALDYSQIELRVLAHLSGDENLIRVFQEGKDIHTQTASWMFGLSAEAIDPLMRRAAKTINFGVLYGMSAHRLSQELGIPYEEAAAFIQRYFQSYPKVKAWIEKTLEEGRTRGYVETLFGRRRYVPDLNARVKSVREAAERMAFNMPVQGTAADLMKLAMVRLFPQLREVGARMLLQVHDELLLEAPKERAEEVAALAKEVMEGVWPLAVPLEVEVGIGEDWLAAKG

SEQ ID NO: 1959 - DNA, 2529 bp, synthetic construct
  misc_feature 1..2529: note = Variant of DNA polymerase I from Thermus sp. strain 2.9
  source 1..2529: mol_type = other DNA
atgcaccatcatcatcatcatggcggtagcggcatgttaccgttgttcgaacctaaaggtcgcgtgcttctggttgatggccatcatctcgcgtatcgtaacttctttgccctgaaaggattaaccaccagccgtggcgagccggtacagggtgtctacggctttgcaaagtcgctcctgaaagctctgaaagaagacggtgatgtggtgattgttgtctttgatgcgaaagcgccaagttttcgccacgaagcgtacgaagcttacaaagccgggcgtgctccaacgccggaagactttcctcgccaattggcgcttatgaaggaattagtggatttgcttggcctcgaacgcttggaagttcccggtttcgaggcagacgacgtattagcgactctcgcaaagaaagccgaacgtgagggctatgaagtccagatcttgacagcagatcgcgatcttttccagcttttatctccgcgcatctcggtgttacacccggaagggcatcgtatcaccccggaatggctctgggagaaatatggtttgcgtcccgaacaatgggtggattttcgcgccttagcaggcgatccgagcgacaatattccgggagttaaaggtatcggcgagaagacggcgctcaagctccttaaagaatgggggtcgttggagaacttgcttaagaatttagatcaggtcaaaccagagtcagtgcgtgagaagattcttgcacacctcgaagacctcaaattaagccgcgaattgtcccgtgtacgcaccgatttgccgctcgaagttgatttccgtggccgccgcgaacctgactgggagggtcttaaagcgtttttagagcgtcttgaatttggttcgctcttgcatgaattcggccttttagaaagcccgttaccagccgaagaagcaccttggccaccgcccgaaggcgcgtttttaggttaccgtttgagtcgcccggaaccgatgtgggccgaattattggctcttgcagcgtctgcccagggacgtgtgtatcgcgcggaagaccctcatggtgcgctccgcggcctcaaagaagtccgtggactccttgccaaagacttagctgttgttgcattgcgcgaaggtcttgatttacctccgactgatgatccaatgcttcttgcgtacctcttggacccgtcaaacacgacgcccgaaggcgtagcccgtcgttacggcggcgagtggaccgaagatgcaggcgagcgcgcgttattggccgaacgtttgcacgccaatttattaggacgtttgcaaggcgaggaacgtctcctctggctttacgaagaagtggagaaaccattgagtcgcgtgctcgcgcatatggaagctaccggtgtcaaattagacgtggcgtatttggaggcactcagccttgaagttgctgccgaaatgcgccgcttggaggaagaagtattccgtttagcaggccactccttttatcttaattctcgcgatcagttagaacgtgtgttgttcgatgaacttggtctccctcctatcggcaagacagagaagaccggtaaacgtagcacttcagcggcggttttagaagctcttcgcgaagtccatcccattgtggacaagatcttgcagtaccgcgaactcgcgaaattgaaaggcacctatattgaccctcttccggcattagtccacccgaaaacgggacgcctccatacccgcttcaaccaaacagccacggcgaccggtcgtttgtcctcctctgatccaaaccttcagaatattccagtacgtaccccattgggccagaagatccgccgcgcgtttgtagctgaggagggttggcgtttagtggccctcgattatagccaaattgaattacgtgtccttgcccatctttctggcgatgagaacctcatccgcgtgtttcaggaaggcaaagacattcacactcaaacggcaagctggatgtttggattatcagctgaagcgatcgatcctttgatgcgtcgtgcagcgaagaccatcaatttcggtgttctctacggtatgagtgcccatcgtttgtcgcaggaattaggcattccctatgaagaagctgcggcgttcattcagcgctactttcaaagctatcccaaagttaaagcatggatcgagaagactctcgttgaaggccgcacacgtggttacgtagagaccttatttggacgtcgccgctatgttcccgatttaaacgctcgcgtgaaatctgtccgtgaagccgccgaacgcatggcgttcaacatgcctgtacagggcacggcagctgacctcatgaaacttgcaatggtgcgcctttttccacaattgcgtgaagttggtgcccgcatgctcttgcaggtccacgatgaactcttgttagaagcgccaaaagagcgtgcggaagaggtggcagccctcgcgaaagaggttatggaaggcgtgtggcccttagcggtgcctcttgaagtcgaagttggtattggcgaggattggttggctgccaaaggataatga

SEQ ID NO: 1960 - protein, 841 aa, synthetic construct
  REGION 1..841: note = Variant of DNA polymerase I from Thermus sp. strain 2.9
MHHHHHHGGSGMLPLFEPKGRVLLVDGHHLAYRNFFALKGLTTSRGEPVQGVYGFAKSLLKALKEDGDVVIVVFDAKAPSFRHEAYEAYKAGRAPTPEDFPRQLALMKELVDLLGLERLEVPGFEADDVLATLAKKAEREGYEVQILTADRDLFQLLSPRISVLHPEGHRITPEWLWEKYGLRPEQWVDFRALAGDPSDNIPGVKGIGEKTALKLLKEWGSLENLLKNLDQVKPESVREKILAHLEDLKLSRELSRVRTDLPLEVDFRGRREPDWEGLKAFLERLEFGSLLHEFGLLESPLPAEEAPWPPPEGAFLGYRLSRPEPMWAELLALAASAQGRVYRAEDPHGALRGLKEVRGLLAKDLAVVALREGLDLPPTDDPMLLAYLLDPSNTTPEGVARRYGGEWTEDAGERALLAERLHANLLGRLQGEERLLWLYEEVEKPLSRVLAHMEATGVKLDVAYLEALSLEVAAEMRRLEEEVFRLAGHSFYLNSRDQLERVLFDELGLPPIGKTEKTGKRSTSAAVLEALREVHPIVDKILQYRELAKLKGTYIDPLPALVHPKTGRLHTRFNQTATATGRLSSSDPNLQNIPVRTPLGQKIRRAFVAEEGWRLVALDYSQIELRVLAHLSGDENLIRVFQEGKDIHTQTASWMFGLSAEAIDPLMRRAAKTINFGVLYGMSAHRLSQELGIPYEEAAAFIQRYFQSYPKVKAWIEKTLVEGRTRGYVETLFGRRRYVPDLNARVKSVREAAERMAFNMPVQGTAADLMKLAMVRLFPQLREVGARMLLQVHDELLLEAPKERAEEVAALAKEVMEGVWPLAVPLEVEVGIGEDWLAAKG

SEQ ID NO: 1961 - DNA, 2529 bp, synthetic construct
  misc_feature 1..2529: note = Variant of DNA polymerase I from Thermus sp. strain 2.9
  source 1..2529: mol_type = other DNA
atgcaccatcatcatcatcatggcggtagcggcatgttaccgttgttcgaacctaaaggtcgcgtgcttctggttgatggccatcatctcgcgtatcgtaacttctttgccctgaaaggattaaccaccagccgtggcgagccggtacagggtgtctacggctttgcaaagtcgctcctgaaagctctgaaagaagacggtgatgtggtgattgttgtctttgatgcgaaagcgccaagttttcgccacgaagcgtacgaagcttacaaagccgggcgtgctccaacgccggaagactttcctcgccaattggcgcttatgaaggaattagtggatttgcttggcctcgaacgcttggaagttcccggtttcgaggcagacgacgtattagcgactctcgcaaagaaagccgaacgtgagggctatgaagtccagatcttgacagcagatcgcgatcttttccagcttttatctccgcgcatctcggtgttacacccggaagggcatcgtatcaccccggaatggctctgggagaaatatggtttgcgtcccgaacaatgggtggattttcgcgccttagcaggcgatccgagcgacaatattccgggagttaaaggtatcggcgagaagacggcgctcaagctccttaaagaatgggggtcgttggagaacttgcttaagaatttagatcaggtcaaaccagagtcagtgcgtgagaagattcttgcacacctcgaagacctcaaattaagccgcgaattgtcccgtgtacgcaccgatttgccgctcgaagttgatttccgtggccgccgcgaacctgactgggagggtcttaaagcgtttttagagcgtcttgaatttggttcgctcttgcatgaattcggccttttagaaagcccgttaccagccgtggaagcaccttggccaccgcccgaaggcgcgtttttaggttaccgtttgagtcgcccggaaccgatgtgggccgaattattggctcttgcagcgtctgcccagggacgtgtgtatcgcgcggaagaccctcatggtgcgctccgcggcctcaaagaagtccgtggactccttgccaaagacttagctgttgttgcattgcgcgaaggtcttgatttacctccgactgatgatccaatgcttcttgcgtacctcttggacccgtcaaacacgacgcccgaaggcgtagcccgtcgttacggcggcgagtggaccgaagatgcaggcgagcgcgcgttattggccgaacgtttgcacgccaatttattaggacgtttgcaaggcgaggaacgtctcctctggctttacgaagaagtggagaaaccattgagtcgcgtgctcgcgcatatggaagctaccggtgtcaaattagacgtggcgtatttggaggcactcagccttgaagttgctgccgaaatgcgccgcttggaggaagaagtattccgtttagcaggccactccttttatcttaattctcgcgatcagttagaacgtgtgttgttcgatgaacttggtctccctcctatcggcaagacagagaagaccggtaaacgtagcacttcagcggcggttttagaagctcttcgcgaagtccatcccattgtggacaagatcttgcagtaccgcgaactcgcgaaattgaaaggcacctatattgaccctcttccggcattagtccacccgaaaacgggacgcctccatacccgcttcaaccaaacagccacggcgaccggtcgtttgtcctcctctgatccaaaccttcagaatattccagtacgtaccccattgggccagaagatccgccgcgcgtttgtagctgaggagggttggcgtttagtggccctcgattatagccaaattgaattacgtgtccttgcccatctttctggcgatgagaacctcatccgcgtgtttcaggaaggcaaagacattcacactcaaacggcaagctggatgtttggattatcagctgaagcgatcgatcctttgatgcgtcgtgcagcgaagaccatcaatttcggtgttctctacggtatgagtgcccatcgtttgtcgcaggaattaggcattccctatgaagaagctgcggcgttcattcagcgctactttcaaagctatcccaaagttaaagcatggatcgagaagactctcgaagaaggccgcacacgtggttacgtagagaccttatttggacgtcgccgctatgttcccgatttaaacgctcgcgtgaaatctgtccgtgaagccgccgaacgcatggcgttcaacatgcctgtacagggcacggcagctgacctcatgaaacttgcaatggtgcgcctttttccacaattgcgtgaagttggtgcccgcatgctcttgcaggtccacgatgaactcttgttagaagcgccaaaagagcgtgcggaagaggtggcagccctcgcgaaagaggttatggaaggcgtgtggcccttagcggtgcctcttgaagtcgaagttggtattggcgaggattggttggctgccaaaggataatga

SEQ ID NO: 1962 - protein, 841 aa, synthetic construct
  REGION 1..841: note = Variant of DNA polymerase I from Thermus sp. strain 2.9
MHHHHHHGGSGMLPLFEPKGRVLLVDGHHLAYRNFFALKGLTTSRGEPVQGVYGFAKSLLKALKEDGDVVIVVFDAKAPSFRHEAYEAYKAGRAPTPEDFPRQLALMKELVDLLGLERLEVPGFEADDVLATLAKKAEREGYEVQILTADRDLFQLLSPRISVLHPEGHRITPEWLWEKYGLRPEQWVDFRALAGDPSDNIPGVKGIGEKTALKLLKEWGSLENLLKNLDQVKPESVREKILAHLEDLKLSRELSRVRTDLPLEVDFRGRREPDWEGLKAFLERLEFGSLLHEFGLLESPLPAVEAPWPPPEGAFLGYRLSRPEPMWAELLALAASAQGRVYRAEDPHGALRGLKEVRGLLAKDLAVVALREGLDLPPTDDPMLLAYLLDPSNTTPEGVARRYGGEWTEDAGERALLAERLHANLLGRLQGEERLLWLYEEVEKPLSRVLAHMEATGVKLDVAYLEALSLEVAAEMRRLEEEVFRLAGHSFYLNSRDQLERVLFDELGLPPIGKTEKTGKRSTSAAVLEALREVHPIVDKILQYRELAKLKGTYIDPLPALVHPKTGRLHTRFNQTATATGRLSSSDPNLQNIPVRTPLGQKIRRAFVAEEGWRLVALDYSQIELRVLAHLSGDENLIRVFQEGKDIHTQTASWMFGLSAEAIDPLMRRAAKTINFGVLYGMSAHRLSQELGIPYEEAAAFIQRYFQSYPKVKAWIEKTLEEGRTRGYVETLFGRRRYVPDLNARVKSVREAAERMAFNMPVQGTAADLMKLAMVRLFPQLREVGARMLLQVHDELLLEAPKERAEEVAALAKEVMEGVWPLAVPLEVEVGIGEDWLAAKG

SEQ ID NO: 1963 - DNA, 2529 bp, synthetic construct
  misc_feature 1..2529: note = Variant of DNA polymerase I from Thermus sp. strain 2.9
  source 1..2529: mol_type = other DNA
atgcaccatcatcatcatcatggcggtagcggcatgttaccgttgttcgaacctaaaggtcgcgtgcttctggttgatggccatcatctcgcgtatcgtaacttctttgccctgaaaggattaaccaccagccgtggcgagccggtacagggtgtctacggctttgcaaagtcgctcctgaaagctctgaaagaagacggtgatgtggtgattgttgtctttgatgcgaaagcgccaagttttcgccacgaagcgtacgaagcttacaaagccgggcgtgctccaacgccggaagactttcctcgccaattggcgcttatgaaggaattagtggatttgcttggcctcgaacgcttggaagttcccggtttcgaggcagacgacgtattagcgactctcgcaaagaaagccgaacgtgagggctatgaagtccagatcttgacagcagatcgcgatcttttccagcttttatctccgcgcatctcggtgttacacccggaagggcatcgtatcaccccggaatggctctgggagaaatatggtttgcgtcccgaacaatgggtggattttcgcgccttagcaggcgatccgagcgacaatattccgggagttaaaggtatcggcgagaagacggcgctcaagctccttaaagaatgggggtcgttggagaacttgcttaagaatttagatcaggtcaaaccagagtcagtgcgtgagaagattcttgcacacctcgaagacctcaaattaagccgcgaattgtcccgtgtacgcaccgatttgccgctcgaagttgatttccgtggccgccgcgaacctgactgggagggtcttaaagcgtttttagagcgtcttgaatttggttcgctcttgcatgaattcggccttttagaaagcccgttaccagccgaagaagcaccttggccaccgcccgaaggcgcgtttttaggttaccgtttgagtcgcccggaaccgatgtgggccgaattattggctcttgcagcgtctgcccagggacgtgtgtatcgcgcggaagaccctcatggtgcgctccgcggcctcaaagaagtccgtggactccttgccaaagacttagctgttgttgcattgcgcgaaggtcttgatttacctccgactgatgatccaatgcttcttgcgtacctcttggacccgtcaaacacgacgcccgaaggcgtagcccgtcgttacggcggcgagtggaccgaagatgcaggcgagcgcgcgttattggccgaacgtttgcacgccaatttattaggacgtttgcaaggcgaggaacgtctcctctggctttacgaagaagtggagaaaccattgagtcgcgtgctcgcgcatatggaagctaccggtgtcaaattagacgtggcgtatttggaggcactcagccttgaagttgctgccgaaatgcgccgcttggaggaagaagtattccgtttagcaggccactccttttatcttaattctcgcgatcagttagaacgtgtgttgttcgatgaacttggtctccctcctatcggcaagacagagaagaccggtaaacgtagcacttcagcggcggttttagaagctcttcgcgaagtccatcccattgtggacaagatcttgcagtaccgcgaactcgcgaaattgaaaggcacctatattgaccctcttccggcattagtccacccgaaaacgggacgcctccatacccgcttcaaccaaacagccacggcgaccggtcgtttgtcctcctctgatccaaaccttcagaatattccagtacgtaccccattgggccagaagatccgccgcgcgtttgtagctgaggagggttggcgtttagtggccctcgattatagccaaattgaattacgtgtccttgcccatctttctggcgatgagaacctcatccgcgtgtttcaggaaggcaaagacattcacactcaaacggcaagctggatgtttggattatcagctgaagcgatcgatcctttgatgcgtcgtgcagcgaagaccatcaatttcggtgttctctacggtatgagtgccacgcgtttgtcgcaggaattaggcattccctatgaagaagctgcggcgttcattcagcgctactttcaaagctatcccaaagttaaagcatggatcgagaagactctcgaagaaggccgcacacgtggttacgtagagaccttatttggacgtcgccgctatgttcccgatttaaacgctcgcgtgaaatctgtccgtgaagccgccgaacgcatggcgttcaacatgcctgtacagggcacggcagctgacctcatgaaacttgcaatggtgcgcctttttccacaattgcgtgaagttggtgcccgcatgctcttgcaggtccacgatgaactcttgttagaagcgccaaaagagcgtgcggaagaggtggcagccctcgcgaaagaggttatggaaggcgtgtggcccttagcggtgcctcttgaagtcgaagttggtattggcgaggattggttggctgccaaaggataatga

SEQ ID NO: 1964 - protein, 841 aa, synthetic construct
  REGION 1..841: note = Variant of DNA polymerase I from Thermus sp. strain 2.9
MHHHHHHGGSGMLPLFEPKGRVLLVDGHHLAYRNFFALKGLTTSRGEPVQGVYGFAKSLLKALKEDGDVVIVVFDAKAPSFRHEAYEAYKAGRAPTPEDFPRQLALMKELVDLLGLERLEVPGFEADDVLATLAKKAEREGYEVQILTADRDLFQLLSPRISVLHPEGHRITPEWLWEKYGLRPEQWVDFRALAGDPSDNIPGVKGIGEKTALKLLKEWGSLENLLKNLDQVKPESVREKILAHLEDLKLSRELSRVRTDLPLEVDFRGRREPDWEGLKAFLERLEFGSLLHEFGLLESPLPAEEAPWPPPEGAFLGYRLSRPEPMWAELLALAASAQGRVYRAEDPHGALRGLKEVRGLLAKDLAVVALREGLDLPPTDDPMLLAYLLDPSNTTPEGVARRYGGEWTEDAGERALLAERLHANLLGRLQGEERLLWLYEEVEKPLSRVLAHMEATGVKLDVAYLEALSLEVAAEMRRLEEEVFRLAGHSFYLNSRDQLERVLFDELGLPPIGKTEKTGKRSTSAAVLEALREVHPIVDKILQYRELAKLKGTYIDPLPALVHPKTGRLHTRFNQTATATGRLSSSDPNLQNIPVRTPLGQKIRRAFVAEEGWRLVALDYSQIELRVLAHLSGDENLIRVFQEGKDIHTQTASWMFGLSAEAIDPLMRRAAKTINFGVLYGMSATRLSQELGIPYEEAAAFIQRYFQSYPKVKAWIEKTLEEGRTRGYVETLFGRRRYVPDLNARVKSVREAAERMAFNMPVQGTAADLMKLAMVRLFPQLREVGARMLLQVHDELLLEAPKERAEEVAALAKEVMEGVWPLAVPLEVEVGIGEDWLAAKG

SEQ ID NO: 1965 - DNA, 2529 bp, synthetic construct
  misc_feature 1..2529: note = Variant of DNA polymerase I from Thermus sp. strain 2.9
  source 1..2529: mol_type = other DNA
atgcaccatcatcatcatcatggcggtagcggcatgttaccgttgttcgaacctaaaggtcgcgtgcttctggttgatggccatcatctcgcgtatcgtaacttctttgccctgaaaggattaaccaccagccgtggcgagccggtacagggtgtctacggctttgcaaagtcgctcctgaaagctctgaaagaagacggtgatgtggtgattgttgtctttgatgcgaaagcgccaagttttcgccacgaagcgtacgaagcttacaaagccgggcgtgctccaacgccggaagactttcctcgccaattggcgcttatgaaggaattagtggatttgcttggcctcgaacgcttggaagttcccggtttcgaggcagacgacgtattagcgactctcgcaaagaaagccgaacgtgagggctatgaagtccagatcttgacagcagatcgcgatcttttccagcttttatctccgcgcatctcggtgttacacccggaagggcatcgtatcaccccggaatggctctgggagaaatatggtttgcgtcccgaacaatgggtggattttcgcgccttagcaggcgatccgagcgacaatattccgggagttaaaggtatcggcgagaagacggcgctcaagctccttaaagaatgggggtcgttggagaacttgcttaagaatttagatcaggtcaaaccagagtcagtgcgtgagaagattcttgcacacctcgaagacctcaaattaagccgcgaattgtcccgtgtacgcaccgatttgccgctcgaagttgatttccgtggccgccgcgaacctgactgggagggtcttaaagcgtttttagagcgtcttgaatttggttcgctcttgcatgaattcggccttttagaaagcccgttaccagccgaagaagcaccttggccaccgcccgaaggcgcgtttttaggttaccgtttgagtcgcccggaaccgatgtgggccgaattattggctcttgcagcgtctgcccagggacgtgtgtatcgcgcggaagaccctcatggtgcgctccgcggcctcaaagaagtccgtggactccttgccaaagacttagctgttgttgcattgcgcgaaggtcttgatttacctccgactgatgatccaatgcttcttgcgtacctcttggacccgtcaaacacgacgcccgaaggcgtagcccgtcgttacggcggcgagtggaccgaagatgcaggcgagcgcgcgttattggccgaacgtttgcacgccaatttattaggacgtttgcaaggcgaggaacgtctcctctggctttacgaagaagtggagaaaccattgagtcgcgtgctcgcgcatatggaagctaccggtgtcaaattagacgtggcgtatttggaggcactcagccttgaagttgctgccgaaatgcgccgcttggaggaagaagtattccgtttagcaggccactccttttatcttaattctcgcgatcagttagaacgtgtgttgttcgatgaacttggtctccctcctatcggcaagacagagaagaccggtaaacgtagcacttcagcggcggttttagaagctcttcgcgaagtccatcccattgtggacaagatcttggcgtaccgcgaactcgcgaaattgaaaggcacctatattgaccctcttccggcattagtccacccgaaaacgggacgcctccatacccgcttcaaccaaacagccacggcgaccggtcgtttgtcctcctctgatccaaaccttcagaatattccagtacgtaccccattgggccagaagatccgccgcgcgtttgtagctgaggagggttggcgtttagtggccctcgattatagccaaattgaattacgtgtccttgcccatctttctggcgatgagaacctcatccgcgtgtttcaggaaggcaaagacattcacactcaaacggcaagctggatgtttggattatcagctgaagcgatcgatcctttgatgcgtcgtgcagcgaagaccatcaatttcggtgttctctacggtatgagtgcccatcgtttgtcgcaggaattaggcattccctatgaagaagctgcggcgttcattcagcgctactttcaaagctatcccaaagttaaagcatggatcgagaagactctcgaagaaggccgcacacgtggttacgtagagaccttatttggacgtcgccgctatgttcccgatttaaacgctcgcgtgaaatctgtccgtgaagccgccgaacgcatggcgttcaacatgcctgtacagggcacggcagctgacctcatgaaacttgcaatggtgcgcctttttccacaattgcgtgaagttggtgcccgcatgctcttgcaggtccacgatgaactcttgttagaagcgccaaaagagcgtgcggaagaggtggcagccctcgcgaaagaggttatggaaggcgtgtggcccttagcggtgcctcttgaagtcgaagttggtattggcgaggattggttggctgccaaaggataatga

SEQ ID NO: 1966 - protein, 841 aa, synthetic construct
  REGION 1..841: note = Variant of DNA polymerase I from Thermus sp. strain 2.9
MHHHHHHGGSGMLPLFEPKGRVLLVDGHHLAYRNFFALKGLTTSRGEPVQGVYGFAKSLLKALKEDGDVVIVVFDAKAPSFRHEAYEAYKAGRAPTPEDFPRQLALMKELVDLLGLERLEVPGFEADDVLATLAKKAEREGYEVQILTADRDLFQLLSPRISVLHPEGHRITPEWLWEKYGLRPEQWVDFRALAGDPSDNIPGVKGIGEKTALKLLKEWGSLENLLKNLDQVKPESVREKILAHLEDLKLSRELSRVRTDLPLEVDFRGRREPDWEGLKAFLERLEFGSLLHEFGLLESPLPAEEAPWPPPEGAFLGYRLSRPEPMWAELLALAASAQGRVYRAEDPHGALRGLKEVRGLLAKDLAVVALREGLDLPPTDDPMLLAYLLDPSNTTPEGVARRYGGEWTEDAGERALLAERLHANLLGRLQGEERLLWLYEEVEKPLSRVLAHMEATGVKLDVAYLEALSLEVAAEMRRLEEEVFRLAGHSFYLNSRDQLERVLFDELGLPPIGKTEKTGKRSTSAAVLEALREVHPIVDKILAYRELAKLKGTYIDPLPALVHPKTGRLHTRFNQTATATGRLSSSDPNLQNIPVRTPLGQKIRRAFVAEEGWRLVALDYSQIELRVLAHLSGDENLIRVFQEGKDIHTQTASWMFGLSAEAIDPLMRRAAKTINFGVLYGMSAHRLSQELGIPYEEAAAFIQRYFQSYPKVKAWIEKTLEEGRTRGYVETLFGRRRYVPDLNARVKSVREAAERMAFNMPVQGTAADLMKLAMVRLFPQLREVGARMLLQVHDELLLEAPKERAEEVAALAKEVMEGVWPLAVPLEVEVGIGEDWLAAKG

SEQ ID NO: 1967 - DNA, 2529 bp, synthetic construct
  misc_feature 1..2529: note = Variant of DNA polymerase I from Thermus sp. strain 2.9
  source 1..2529: mol_type = other DNA
atgcaccatcatcatcatcatggcggtagcggcatgttaccgttgttcgaacctaaaggtcgcgtgcttctggttgatggccatcatctcgcgtatcgtaacttctttgccctgaaaggattaaccaccagccgtggcgagccggtacagggtgtctacggctttgcaaagtcgctcctgaaagctctgaaagaagacggtgatgtggtgattgttgtctttgatgcgaaagcgccaagttttcgccacgaagcgtacgaagcttacaaagccgggcgtgctccaacgccggaagactttcctcgccaattggcgcttatgaaggaattagtggatttgcttggcctcgaacgcttggaagttcccggtttcgaggcagacgacgtattagcgactctcgcaaagaaagccgaacgtgagggctatgaagtccagatcttgacagcagatcgcgatcttttccagcttttatctccgcgcatctcggtgttacacccggaagggcatcgtatcaccccggaatggctctgggagaaatatggtttgcgtcccgaacaatgggtggattttcgcgccttagcaggcgatccgagcgacaatattccgggagttaaaggtatcggcgagaagacggcgctcaagctccttaaagaatgggggtcgttggagaacttgcttaagaatttagatcaggtcaaaccagagtcagtgcgtgagaagattcttgcacacctcgaagacctcaaattaagccgcgaattgtcccgtgtacgcaccgatttgccgctcgaagttgatttccgtggccgccgcgaacctgactgggagggtcttaaagcgtttttagagcgtcttgaatttggttcgctcttgcatgaattcggccttttagaaagcccgttaccagccgaagaagcaccttggccaccgcccgaaggcgcgtttttaggttaccgtttgagtcgcccggaaccgatgtgggccgaattattggctcttgcagcgtctgcccagggacgtgtgtatcgcgcggaagaccctcatggtgcgctccgcggcctcaaagaagtccgtggactccttgccaaagacttagctgttgttgcattgcgcgaaggtcttgatttacctccgactgatgatccaatgcttcttgcgtacctcttggacccgtcaaacacgacgcccgaaggcgtagcccgtcgttacggcggcgagtggaccgaagatgcaggcgagcgcgcgttattggccgaacgtttgcacgccaatttattaggacgtttgcaaggcgaggaacgtctcctctggctttacgaagaagtggagaaaccattgagtcgcgtgctcgcgcatatggaagctaccggtgtcaaattagacgtggcgtatttggaggcactcagccttgaagttgctgccgaaatgcgccgcttggaggaagaagtattccgtttagcaggccactccttttatcttaattctcgcgatcagttagaacgtgtgttgttcgatgaacttggtctccctcctatcggcaagacagagaagaccggtaaacgtagcacttcagcggcggttttagaagctcttcgcgaagtccatcccattgtggacaagatcttggcttaccgcgaactcgcgaaattgaaaggcacctatattgaccctcttccggcattagtccacccgaaaacgggacgcctccatacccgcttcaaccaaacagccacggcgaccggtcgtttgtcctcctctgatccaaaccttcagaatattccagtacgtaccccattgggccagaagatccgccgcgcgtttgtagctgaggagggttggcgtttagtggccctcgattatagccaaattgaattacgtgtccttgcccatctttctggcgatgagaacctcatccgcgtgtttcaggaaggcaaagacattcacactcaaacggcaagctggatgtttggattatcagctgaagcgatcgatcctttgatgcgtcgtgcagcgaagaccatcaatttcggtgttctctacggtatgagtgcccatcgtttgtcgcaggaattaggcattccctatgaagaagctgcggcgttcattcagcgctactttcaaagctatcccaaagttaaagcatggatcgagaagactctcgaagaaggccgcacacgtggttacgtagagaccttatttggacgtcgccgctatgttcccgatttaaacgctcgcgtgaaatctgtccgtgaagccgccgaacgcatggcgttcaacatgcctgtacagggcacggcagctgacctcatgaaacttgcaatggtgcgcctttttccacaattgcgtgaagttggtgcccgcatgctcttgcaggtccacgatgaactcttgttagaagcgccaaaagagcgtgcggaagaggtggcagccctcgcgaaagaggttatggaaggcgtgtggcccttagcggtgcctcttgaagtcgaagttggtattggcgaggattggttggctgccaaaggataatga

SEQ ID NO: 1968 - protein, 841 aa, synthetic construct; identical to SEQ ID NO: 1966
  REGION 1..841: note = Variant of DNA polymerase I from Thermus sp. strain 2.9

SEQ ID NO: 1969 - DNA, 2529 bp, synthetic construct
  misc_feature 1..2529: note = Variant of DNA polymerase I from Thermus sp. strain 2.9
  source 1..2529: mol_type = other DNA
atgcaccatcatttgcatcatggcggtagcggcatgttaccgttgttcgaacctaaaggtcgcgtgcttctggttgatggccatcatctcgcgtatcgtaacttctttgccctgaaaggattaaccaccagccgtggcgagccggtacagggtgtctacggctttgcaaagtcgctcctgaaagctctgaaagaagacggtgatgtggtgattgttgtctttgatgcgaaagcgccaagttttcgccacgaagcgtacgaagcttacaaagccgggcgtgctccaacgccggaagactttcctcgccaattggcgcttatgaaggaattagtggatttgcttggcctcgaacgcttggaagttcccggtttcgaggcagacgacgtattagcgactctcgcaaagaaagccgaacgtgagggctatgaagtccagatcttgacagcagatcgcgatcttttccagcttttatctccgcgcatctcggtgttacacccggaagggcatcgtatcaccccggaatggctctgggagaaatatggtttgcgtcccgaacaatgggtggattttcgcgccttagcaggcgatccgagcgacaatattccgggagttaaaggtatcggcgagaagacggcgctcaagctccttaaagaatgggggtcgttggagaacttgcttaagaatttagatcaggtcaaaccagagtcagtgcgtgagaagattcttgcacacctcgaagacctcaaattaagccgcgaattgtcccgtgtacgcaccgatttgccgctcgaagttgatttccgtggccgccgcgaacctgactgggagggtcttaaagcgtttttagagcgtcttgaatttggttcgctcttgcatgaattcggccttttagaaagcccgttaccagccgaagaagcaccttggccaccgcccgaaggcgcgtttttaggttaccgtttgagtcgcccggaaccgatgtgggccgaattattggctcttgcagcgtctgcccagggacgtgtgtatcgcgcggaagaccctcatggtgcgctccgcggcctcaaagaagtccgtggactccttgccaaagacttagctgttgttgcattgcgcgaaggtcttgatttacctccgactgatgatccaatgcttcttgcgtacctcttggacccgtcaaacacgacgcccgaaggcgtagcccgtcgttacggcggcgagtggaccgaagatgcaggcgagcgcgcgttattggccgaacgtttgcacgccaatttattaggacgtttgcaaggcgaggaacgtctcctctggctttacgaagaagtggagaaaccattgagtcgcgtgctcgcgcatatggaagctaccggtgtcaaattagacgtggcgtatttggaggcactcagccttgaagttgctgccgaaatgcgccgcttggaggaagaagtattccgtttagcaggccactccttttatcttaattctcgcgatcagttagaacgtgtgttgttcgatgaacttggtctccctcctatcggcaagacagagaagaccggtaaacgtagcacttcagcggcggttttagaagctcttcgcgaagtccatcccattgtggacaagatcttgcagtaccgcgaactcgcgaaattgaaaggcacctatattgaccctcttccggcattagtccacccgaaaacgggacgcctccatacccgcttcaaccaaacagccacggcgaccggtcgtttgtcctcctctgatccaaaccttcagaatattccagtacgtaccccattgggccagaagatccgccgcgcgtttgtagctgaggagggttggcgtttagtggccctcgattatagccaaattgaattacgtgtccttgcccatctttctggcgatgagaacctcatccgcgtgtttcaggaaggcaaagacattcacactcaaacggcaagctggatgtttggattatcagctgaagcgatcgatcctttgatgcgtcgtgcagcgaagaccatcaatttcggtgttctctacggtatgagtgcccatcgtttgtcgcaggaattaggcattccctatgaagaagctgcggcgttcattcagcgctactttcaaagctatcccaaagttaaagcatggatcgagaagactctcgaagaaggccgcacacgtggttacgtagagaccttatttggacgtcgccgctatgttcccgatttaaacgctcgcgtgaaatctgtccgtgaagccgccgaacgcatggcgttcaacatgcctgtacagggcacggcagctgacctcatgaaacttgcaatggtgcgcctttttccacaattgcgtgaagttggtgcccgcatgctcttgcaggtccacgatgaactcttgttagaagcgccaaaagagcgtgcggaagaggtggcagccctcgcgaaagaggttatggaaggcgtgtggcccttagcggtgcctcttgaagtcgaagttggtattggcgaggattggttggctgccaaaggataatga

SEQ ID NO: 1970 - protein, 841 aa, synthetic construct
  REGION 1..841: note = Variant of DNA polymerase I from Thermus sp. strain 2.9
MHHHLHHGGSGMLPLFEPKGRVLLVDGHHLAYRNFFALKGLTTSRGEPVQGVYGFAKSLLKALKEDGDVVIVVFDAKAPSFRHEAYEAYKAGRAPTPEDFPRQLALMKELVDLLGLERLEVPGFEADDVLATLAKKAEREGYEVQILTADRDLFQLLSPRISVLHPEGHRITPEWLWEKYGLRPEQWVDFRALAGDPSDNIPGVKGIGEKTALKLLKEWGSLENLLKNLDQVKPESVREKILAHLEDLKLSRELSRVRTDLPLEVDFRGRREPDWEGLKAFLERLEFGSLLHEFGLLESPLPAEEAPWPPPEGAFLGYRLSRPEPMWAELLALAASAQGRVYRAEDPHGALRGLKEVRGLLAKDLAVVALREGLDLPPTDDPMLLAYLLDPSNTTPEGVARRYGGEWTEDAGERALLAERLHANLLGRLQGEERLLWLYEEVEKPLSRVLAHMEATGVKLDVAYLEALSLEVAAEMRRLEEEVFRLAGHSFYLNSRDQLERVLFDELGLPPIGKTEKTGKRSTSAAVLEALREVHPIVDKILQYRELAKLKGTYIDPLPALVHPKTGRLHTRFNQTATATGRLSSSDPNLQNIPVRTPLGQKIRRAFVAEEGWRLVALDYSQIELRVLAHLSGDENLIRVFQEGKDIHTQTASWMFGLSAEAIDPLMRRAAKTINFGVLYGMSAHRLSQELGIPYEEAAAFIQRYFQSYPKVKAWIEKTLEEGRTRGYVETLFGRRRYVPDLNARVKSVREAAERMAFNMPVQGTAADLMKLAMVRLFPQLREVGARMLLQVHDELLLEAPKERAEEVAALAKEVMEGVWPLAVPLEVEVGIGEDWLAAKG

SEQ ID NO: 1971 - DNA, 2529 bp, synthetic construct
  misc_feature 1..2529: note = Variant of DNA polymerase I from Thermus sp. strain 2.9
  source 1..2529: mol_type = other DNA
atgcaccatcatcatcatcatggcggtagcggcatgttaccgttgttcgaacctaaaggtcgcgtgcttctggttgatggccatcatctcgcgtatcgtaacttctttgccctgaaaggattaaccaccagccgtggcgagccggtacagggtgtctacggctttgcaaagtcgctcctgaaagctctgaaagaagacggtgatgtggtgattgttgtctttgatgcgaaagcgccaagttttcgccacgaagcgtacgaagcttacaaagccgggcgtgctccaacgccggaagactttcctcgccaattggcgcttatgaaggaattagtggatttgcttggcctcgaacgcttggaagttcccggtttcgaggcagacgacgtattagcgactctcgcaaagaaagccgaacgtgagggctatgaagtccagatcttgacagcagatcgcgatcttttccagcttttatctccgcgcatctcggtgttacacccggaagggcatcgtatcaccccggaatggctctgggagaaatatggtttgcgtcccgaacaatgggtggattttcgcgccttagcaggcgatccgagcgacaatattccgggagttaaaggtatcggcgagaagacggcgctcaagctccttaaagaatgggggtcgttggagaacttgcttaagaatttagatcaggtcaaaccagagtcagtgcgtgagaagattcttgcacacctcgaagacctcaaattaagccgcgaattgtcccgtgtacgcaccgatttgccgctcgaagttgatttccgtggccgccgcgaacctgactgggagggtcttaaagcgtttttagagcgtcttgaatttggttcgctcttgcatgaattcggccttttagaaagcccgttaccagccgaagaagcaccttggccaccgcccgaaggcgcgtttttaggttaccgtttgagtcgcccggaaccgatgtgggccgaattaggggctcttgcagcgtctgcccagggacgtgtgtatcgcgcggaagaccctcatggtgcgctccgcggcctcaaagaagtccgtggactccttgccaaagacttagctgttgttgcattgcgcgaaggtcttgatttacctccgactgatgatccaatgcttcttgcgtacctcttggacccgtcaaacacgacgcccgaaggcgtagcccgtcgttacggcggcgagtggaccgaagatgcaggcgagcgcgcgttattggccgaacgtttgcacgccaatttattaggacgtttgcaaggcgaggaacgtctcctctggctttacgaagaagtggagaaaccattgagtcgcgtgctcgcgcatatggaagctaccggtgtcaaattagacgtggcgtatttggaggcactcagccttgaagttgctgccgaaatgcgccgcttggaggaagaagtattccgtttagcaggccactccttttatcttaattctcgcgatcagttagaacgtgtgttgttcgatgaacttggtctccctcctatcggcaagacagagaagaccggtaaacgtagcacttcagcggcggttttagaagctcttcgcgaagtccatcccattgtggacaagatcttgcagtaccgcgaactcgcgaaattgaaaggcacctatattgaccctcttccggcattagtccacccgaaaacgggacgcctccatacccgcttcaaccaaacagccacggcgaccggtcgtttgtcctcctctgatccaaaccttcagaatattccagtacgtaccccattgggccagaagatccgccgcgcgtttgtagctgaggagggttggcgtttagtggccctcgattatagccaaattgaattacgtgtccttgcccatctttctggcgatgagaacctcatccgcgtgtttcaggaaggcaaagacattcacactcaaacggcaagctggatgtttggattatcagctgaagcgatcgatcctttgatgcgtcgtgcagcgaagaccatcaatttcggtgttctctacggtatgagtgcccatcgtttgtcgcaggaattaggcattccctatgaagaagctgcggcgttcattcagcgctactttcaaagctatcccaaagttaaagcatggatcgagaagactctcgaagaaggccgcacacgtggttacgtagagaccttatttggacgtcgccgctatgttcccgatttaaacgctcgcgtgaaatctgtccgtgaagccgccgaacgcatggcgttcaacatgcctgtacagggcacggcagctgacctcatgaaacttgcaatggtgcgcctttttccacaattgcgtgaagttggtgcccgcatgctcttgcaggtccacgatgaactcttgttagaagcgccaaaagagcgtgcggaagaggtggcagccctcgcgaaagaggttatggaaggcgtgtggcccttagcggtgcctcttgaagtcgaagttggtattggcgaggattggttggctgccaaaggataatga

SEQ ID NO: 1972 - protein, 841 aa, synthetic construct
  REGION 1..841: note = Variant of DNA polymerase I from Thermus sp. strain 2.9
MHHHHHHGGSGMLPLFEPKGRVLLVDGHHLAYRNFFALKGLTTSRGEPVQGVYGFAKSLLKALKEDGDVVIVVFDAKAPSFRHEAYEAYKAGRAPTPEDFPRQLALMKELVDLLGLERLEVPGFEADDVLATLAKKAEREGYEVQILTADRDLFQLLSPRISVLHPEGHRITPEWLWEKYGLRPEQWVDFRALAGDPSDNIPGVKGIGEKTALKLLKEWGSLENLLKNLDQVKPESVREKILAHLEDLKLSRELSRVRTDLPLEVDFRGRREPDWEGLKAFLERLEFGSLLHEFGLLESPLPAEEAPWPPPEGAFLGYRLSRPEPMWAELGALAASAQGRVYRAEDPHGALRGLKEVRGLLAKDLAVVALREGLDLPPTDDPMLLAYLLDPSNTTPEGVARRYGGEWTEDAGERALLAERLHANLLGRLQGEERLLWLYEEVEKPLSRVLAHMEATGVKLDVAYLEALSLEVAAEMRRLEEEVFRLAGHSFYLNSRDQLERVLFDELGLPPIGKTEKTGKRSTSAAVLEALREVHPIVDKILQYRELAKLKGTYIDPLPALVHPKTGRLHTRFNQTATATGRLSSSDPNLQNIPVRTPLGQKIRRAFVAEEGWRLVALDYSQIELRVLAHLSGDENLIRVFQEGKDIHTQTASWMFGLSAEAIDPLMRRAAKTINFGVLYGMSAHRLSQELGIPYEEAAAFIQRYFQSYPKVKAWIEKTLEEGRTRGYVETLFGRRRYVPDLNARVKSVREAAERMAFNMPVQGTAADLMKLAMVRLFPQLREVGARMLLQVHDELLLEAPKERAEEVAALAKEVMEGVWPLAVPLEVEVGIGEDWLAAKG

SEQ ID NO: 1973 - DNA, 2529 bp, synthetic construct
  misc_feature 1..2529: note = Variant of DNA polymerase I from Thermus sp. strain 2.9
  source 1..2529: mol_type = other DNA
atgcaccatcatcatcatcatggcggtagcggcatgttaccgttgttcgaacctaaaggtcgcgtgcttctggttgatggccatcatctcgcgtatcgtaacttctttgccctgaaaggattaaccaccagccgtggcgagccggtacagggtgtctacggctttgcaaagtcgctcctgaaagctctgaaagaagacggtgatgtggtgattgttgtctttgatgcgaaagcgccaagttttcgccacgaagcgtacgaagcttacaaagccgggcgtgctccaacgccggaagactttcctcgccaattggcgcttatgaaggaattagtggatttgcttggcctcgaacgcttggaagttcccggtttcgaggcagacgacgtattagcgactctcgcaaagaaagccgaacgtgagggctatgaagtccagatcttgacagcagatcgcgatcttttccagcttttatctccgcgcatctcggtgttacacccggaagggcatcgtatcaccccggaatggctctgggagaaatatggtttgcgtcccgaacaatgggtggattttcgcgccttagcaggcgatccgagcgacaatattccgggagttaaaggtatcggcgagaagacggcgctcaagctccttaaagaatgggggtcgttggagaacttgcttaagaatttagatcaggtcaaaccagagtcagtgcgtgagaagattcttgcacacctcgaagacctcaaattaagccgcgaattgtcccgtgtacgcaccgatttgccgctcgaagttgatttccgtggccgccgcgaacctgactgggagggtcttaaagcgtttttagagcgtcttgaatttggttcgctcttgcatgaattcggccttttagaaagcccgttaccagccgaagaagcaccttggccaccgcccgaaggcgcgtttttaggttaccgtttgagtcgcccggaaccgatgtgggccgaattattggctcttgcagcgtctgcccagggacgtgtgtatcgcgcggaagaccctcatggtgcgctccgcggcctcaaagaagtccgtggactccttgccaaagacttagctgttgttgcattgcgcgaaggtcttgatttacctccgactgatgatccaatgcttcttgcgtacctcttggacccgtcaaacacgacgcccgaaggcgtagcccgtcgttacggcggcgagtggaccgaagatgcaggcgagcgcgcgttattggccgaacgtttgcacgccaatttattaggacgtttgcaaggcgaggaacgtctcctctggctttacgaagaagtggagaaaccattgagtcgcgtgctcgcgcatatggaagctaccggtgtcaaattagacgtggcgtatttggaggcactcagccttgaagttgctgccgaaatgcgccgcttggaggaagaagtattccgtttagcaggccactccttttatcttaattctcgcgatcagttagaacgtgtgttgttcgatgaacttggtctccctcctatcggcaagacagagaagaccggtaaacgtagcacttcagcggcggttttagaagctcttcgcgaagtccatcccattgtggacaagatcttgcagtaccgcgaactcgcgaaattgaaaggcacctatattgaccctcttccggcattagtccacccgaaaacgggacgcctccatacccgcttcaaccaaacagccacggcgaccggtcgtttgtcctcctctgatccaaaccttcagaatattccagtacgtaccccattgggccagaagatccgccgcgcgtttgtagctgaggagggttggcgtttagtggccctcgattatagccaaattgaattacgtgtccttgcccatctttctggcgatgagaacctcatccgcgtgtttcaggaaggcaaagacattcacactcaaacggcaagctggatgtttggattatcagctgaagcgatcgatcctttgatgcgtcgtgcagcgaagaccatcaatttcggtgttctctacggtatgagtgcccatcgtttgtcgcaggaattaggcattccctatgaagaagctgcggcgttcattcagcgctactttcaaagctatcccaaagttaaagcatggatcgagaagactctcgaagaaggccgcacacgtggttacgtagagaccttatttggacgtcgccgctatgttcccgatttaaacgctcgcgtgaaatctgtccgtgaagccgccgaacgcatggcgttcaacatgcctgtacagggcacggcagctgacctcatgaaacttgcaatggtgcgcctttttccacaattggcggaagttggtgcccgcatgctcttgcaggtccacgatgaactcttgttagaagcgccaaaagagcgtgcggaagaggtggcagccctcgcgaaagaggttatggaaggcgtgtggcccttagcggtgcctcttgaagtcgaagttggtattggcgaggattggttggctgccaaaggataatga

SEQ ID NO: 1974 - protein, 841 aa, synthetic construct
  REGION 1..841: note = Variant of DNA polymerase I from Thermus sp. strain 2.9
MHHHHHHGGSGMLPLFEPKGRVLLVDGHHLAYRNFFALKGLTTSRGEPVQGVYGFAKSLLKALKEDGDVVIVVFDAKAPSFRHEAYEAYKAGRAPTPEDFPRQLALMKELVDLLGLERLEVPGFEADDVLATLAKKAEREGYEVQILTADRDLFQLLSPRISVLHPEGHRITPEWLWEKYGLRPEQWVDFRALAGDPSDNIPGVKGIGEKTALKLLKEWGSLENLLKNLDQVKPESVREKILAHLEDLKLSRELSRVRTDLPLEVDFRGRREPDWEGLKAFLERLEFGSLLHEFGLLESPLPAEEAPWPPPEGAFLGYRLSRPEPMWAELLALAASAQGRVYRAEDPHGALRGLKEVRGLLAKDLAVVALREGLDLPPTDDPMLLAYLLDPSNTTPEGVARRYGGEWTEDAGERALLAERLHANLLGRLQGEERLLWLYEEVEKPLSRVLAHMEATGVKLDVAYLEALSLEVAAEMRRLEEEVFRLAGHSFYLNSRDQLERVLFDELGLPPIGKTEKTGKRSTSAAVLEALREVHPIVDKILQYRELAKLKGTYIDPLPALVHPKTGRLHTRFNQTATATGRLSSSDPNLQNIPVRTPLGQKIRRAFVAEEGWRLVALDYSQIELRVLAHLSGDENLIRVFQEGKDIHTQTASWMFGLSAEAIDPLMRRAAKTINFGVLYGMSAHRLSQELGIPYEEAAAFIQRYFQSYPKVKAWIEKTLEEGRTRGYVETLFGRRRYVPDLNARVKSVREAAERMAFNMPVQGTAADLMKLAMVRLFPQLAEVGARMLLQVHDELLLEAPKERAEEVAALAKEVMEGVWPLAVPLEVEVGIGEDWLAAKG

SEQ ID NO: 1975 - DNA, 2529 bp, synthetic construct
  misc_feature 1..2529: note = Variant of DNA polymerase I from Thermus sp. strain 2.9
  source 1..2529: mol_type = other DNA
atgcaccatcatcatcatcatggcggtagcggcatgttaccgttgttcgaacctaaaggtcgcgtgcttctggttgatggccatcatctcgcgtatcgtaacttctttgccctgaaaggattaaccaccagccgtggcgagccggtacagggtgtctacggctttgcaaagtcgctcctgaaagctctgaaagaagacggtgatgtggtgattgttgtctttgatgcgaaagcgccaagttttcgccacgaagcgtacgaagcttacaaagccgggcgtgctccaacgccggaagactttcctcgccaattggcgcttatgaaggaattagtggatttgcttggcctcgaacgcttggaagttcccggtttcgaggcagacgacgtattagcgactctcgcaaagaaagccgaacgtgagggctatgaagtccagatcttgacagcagatcgcgatcttttccagcttttatctccgcgcatctcggtgttacacccggaagggcatcgtatcaccccggaatggctctgggagaaatatggtttgcgtcccgaacaatgggtggattttcgcgccttagcaggcgatccgagcgacaatattccgggagttaaaggtatcggcgagaagacggcgctcaagctccttaaagaatgggggtcgttggagaacttgcttaagaatttagggcaggtcaaaccagagtcagtgcgtgagaagattcttgcacacctcgaagacctcaaattaagccgcgaattgtcccgtgtacgcaccgatttgccgctcgaagttgatttccgtggccgccgcgaacctgactgggagggtcttaaagcgtttttagagcgtcttgaatttggttcgctcttgcatgaattcggccttttagaaagcccgttaccagccgaagaagcaccttggccaccgcccgaaggcgcgtttttaggttaccgtttgagtcgcccggaaccgatgtgggccgaattattggctcttgcagcgtctgcccagggacgtgtgtatcgcgcggaagaccctcatggtgcgctccgcggcctcaaagaagtccgtggactccttgccaaagacttagctgttgttgcattgcgcgaaggtcttgatttacctccgactgatgatccaatgcttcttgcgtacctcttggacccgtcaaacacgacgcccgaaggcgtagcccgtcgttacggcggcgagtggaccgaagatgcaggcgagcgcgcgttattggccgaacgtttgcacgccaatttattaggacgtttgcaaggcgaggaacgtctcctctggctttacgaagaagtggagaaaccattgagtcgcgtgctcgcgcatatggaagctaccggtgtcaaattagacgtggcgtatttggaggcactcagccttgaagttgctgccgaaatgcgccgcttggaggaagaagtattccgtttagcaggccactccttttatcttaattctcgcgatcagttagaacgtgtgttgttcgatgaacttggtctccctcctatcggcaagacagagaagaccggtaaacgtagcacttcagcggcggttttagaagctcttcgcgaagtccatcccattgtggacaagatcttgcagtaccgcgaactcgcgaaattgaaaggcacctatattgaccctcttccggcattagtccacccgaaaacgggacgcctccatacccgcttcaaccaaacagccacggcgaccggtcgtttgtcctcctctgatccaaaccttcagaatattccagtacgtaccccattgggccagaagatccgccgcgcgtttgtagctgaggagggttggcgtttagtggccctcgattatagccaaattgaattacgtgtccttgcccatctttctggcgatgagaacctcatccgcgtgtttcaggaaggcaaagacattcacactcaaacggcaagctggatgtttggattatcagctgaagcgatcgatcctttgatgcgtcgtgcagcgaagaccatcaatttcggtgttctctacggtatgagtgcccatcgtttgtcgcaggaattaggcattccctatgaagaagctgcggcgttcattcagcgctactttcaaagctatcccaaagttaaagcatggatcgagaagactctcgaagaaggccgcacacgtggttacgtagagaccttatttggacgtcgccgctatgttcccgatttaaacgctcgcgtgaaatctgtccgtgaagccgccgaacgcatggcgttcaacatgcctgtacagggcacggcagctgacctcatgaaacttgcaatggtgcgcctttttccacaattgcgtgaagttggtgcccgcatgctcttgcaggtccacgatgaactcttgttagaagcgccaaaagagcgtgcggaagaggtggcagccctcgcgaaagaggttatggaaggcgtgtggcccttagcggtgcctcttgaagtcgaagttggtattggcgaggattggttggctgccaaaggataatga

SEQ ID NO: 1976 - protein, 841 aa, synthetic construct
  REGION 1..841: note = Variant of DNA polymerase I from Thermus sp. strain 2.9
MHHHHHHGGSGMLPLFEPKGRVLLVDGHHLAYRNFFALKGLTTSRGEPVQGVYGFAKSLLKALKEDGDVVIVVFDAKAPSFRHEAYEAYKAGRAPTPEDFPRQLALMKELVDLLGLERLEVPGFEADDVLATLAKKAEREGYEVQILTADRDLFQLLSPRISVLHPEGHRITPEWLWEKYGLRPEQWVDFRALAGDPSDNIPGVKGIGEKTALKLLKEWGSLENLLKNLGQVKPESVREKILAHLEDLKLSRELSRVRTDLPLEVDFRGRREPDWEGLKAFLERLEFGSLLHEFGLLESPLPAEEAPWPPPEGAFLGYRLSRPEPMWAELLALAASAQGRVYRAEDPHGALRGLKEVRGLLAKDLAVVALREGLDLPPTDDPMLLAYLLDPSNTTPEGVARRYGGEWTEDAGERALLAERLHANLLGRLQGEERLLWLYEEVEKPLSRVLAHMEATGVKLDVAYLEALSLEVAAEMRRLEEEVFRLAGHSFYLNSRDQLERVLFDELGLPPIGKTEKTGKRSTSAAVLEALREVHPIVDKILQYRELAKLKGTYIDPLPALVHPKTGRLHTRFNQTATATGRLSSSDPNLQNIPVRTPLGQKIRRAFVAEEGWRLVALDYSQIELRVLAHLSGDENLIRVFQEGKDIHTQTASWMFGLSAEAIDPLMRRAAKTINFGVLYGMSAHRLSQELGIPYEEAAAFIQRYFQSYPKVKAWIEKTLEEGRTRGYVETLFGRRRYVPDLNARVKSVREAAERMAFNMPVQGTAADLMKLAMVRLFPQLREVGARMLLQVHDELLLEAPKERAEEVAALAKEVMEGVWPLAVPLEVEVGIGEDWLAAKG

SEQ ID NO: 1977 - DNA, 2529 bp, synthetic construct
  misc_feature 1..2529: note = Variant of DNA polymerase I from Thermus sp. strain 2.9
  source 1..2529: mol_type = other DNA
atgcaccatcatcatcatcatggcggtagcggcatgttaccgttgttcgaacctaaaggtcgcgtgcttctggttgatggccatcatctcgcgtatcgtaacttctttgccctgaaaggattaaccaccagccgtggcgagccggtacagggtgtctacggctttgcaaagtcgctcctgaaagctctgaaagaagacggtgatgtggtgattgttgtctttgatgcgaaagcgccaagttttcgccacgaagcgtacgaagcttacaaagccgggcgtgctccaacgccggaagactttcctcgccaattggcgcttatgaaggaattagtggatttgcttggcctcgaacgcttggaagttcccggtttcgaggcagacgacgtattagcgactctcgcaaagaaagccgaacgtgagggctatgaagtccagatcttgacagcagatcgcgatcttttccagcttttatctccgcgcatctcggtgttacacccggaagggcatcgtatcaccccggaatggctctgggagaaatatggtttgcgtcccgaacaatgggtggattttcgcgccttagcaggcgatccgagcgacaatattccgggagttaaaggtatcggcgagaagacggcgctcaagctccttaaagaatgggggtcgttggagaacttgcttaagaatttagatcaggtcaaaccagagtcagtgcgtgagaagattcttgcacacctcgaagacctcaaattaagccgcgaattgtcccgtgtacgcaccgatttgccgctcgaagttgatttccgtggccgccgcgaacctgactgggagggtcttaaagcgtttttagagcgtcttgaatttggttcgctcttgcatgaattcggccttttagaaagcccgttaccagccgaagaagcaccttggccaccgcccgaaggcgcgtttttaggttaccgtttgagtcgcccggaaccgatgtgggccgaattattggctcttgcagcgtctgcccagggacgtgtgtatcgcgcggaagaccctcatggtgcgctccgcggcctcaaagaagtccgtggactccttgccaaagacttagctgttgttgcattgcgcgaaggtcttgatttacctccgactgatgatccaatgcttcttgcgtacctcttggacccgtcaaacacgacgcccgaaggcgtagcccgtcgttacggcggcgagtggaccgaagatgcaggcgagcgcgcgttattggccgaacgtttgcacgccaatttattaggacgtttgcaaggcgaggaacgtctcctctggctttacgaagaagtggagaaaccattgagtcgcgtgctcgcgcatatggaagctaccggtgtcaaattagacgtggcgtatttggaggcactcagccttgaagttgctgccgaaatgcgccgcttggaggaagaagtattccgtttagcaggccactccttttatcttaattctcgcgatcagttagaacgtgtgttgttcgatgaacttggtctccctcctatcggcaagacagagaagaccggtaaacgtagcacttcagcggcggttttagaagctcttcgcgaagtccatcccattgtggacaagatcttgcagtaccgcgaactcgcgaaattgaaaggcacctatattgaccctcttccggcattagtccacccgaaaacgggacgcctccatacccgcttcaaccaaacagccacggcgaccggtcgtttgtcctcctctgatccaaaccttcagaatattccagtacgtaccccattgggccagaagatccgccgcgcgtttgtagctgaggagggttggcgtttagtggccctcgattatagccaaattgaattacgtgtccttgcccatctttctggcgatgagaacctcatccgcgtgtttcaggaaggcaaagacattcacactcaaacggcaagctggatgtttggattatcagctgaagcgatcgatcctttgatgcgtcgtgcagcgaagaccatcaatttcggtgttctctacggtatgagtgcccatcgtttgtcgcaggaattaggcattccctatgaagaagctgcggcgttcattcagcgctactttcaaagctatcccaaagttaaagcatggatcgagaagactctccgggaaggccgcacacgtggttacgtagagaccttatttggacgtcgccgctatgttcccgatttaaacgctcgcgtgaaatctgtccgtgaagccgccgaacgcatggcgttcaacatgcctgtacagggcacggcagctgacctcatgaaacttgcaatggtgcgcctttttccacaattgcgtgaagttggtgcccgcatgctcttgcaggtccacgatgaactcttgttagaagcgccaaaagagcgtgcggaagaggtggcagccctcgcgaaagaggttatggaaggcgtgtggcccttagcggtgcctcttgaagtcgaagttggtattggcgaggattggttggctgccaaaggataatga

SEQ ID NO: 1978 - protein, 841 aa, synthetic construct
  REGION 1..841: note = Variant of DNA polymerase I from Thermus sp. strain 2.9
MHHHHHHGGSGMLPLFEPKGRVLLVDGHHLAYRNFFALKGLTTSRGEPVQGVYGFAKSLLKALKEDGDVVIVVFDAKAPSFRHEAYEAYKAGRAPTPEDFPRQLALMKELVDLLGLERLEVPGFEADDVLATLAKKAEREGYEVQILTADRDLFQLLSPRISVLHPEGHRITPEWLWEKYGLRPEQWVDFRALAGDPSDNIPGVKGIGEKTALKLLKEWGSLENLLKNLDQVKPESVREKILAHLEDLKLSRELSRVRTDLPLEVDFRGRREPDWEGLKAFLERLEFGSLLHEFGLLESPLPAEEAPWPPPEGAFLGYRLSRPEPMWAELLALAASAQGRVYRAEDPHGALRGLKEVRGLLAKDLAVVALREGLDLPPTDDPMLLAYLLDPSNTTPEGVARRYGGEWTEDAGERALLAERLHANLLGRLQGEERLLWLYEEVEKPLSRVLAHMEATGVKLDVAYLEALSLEVAAEMRRLEEEVFRLAGHSFYLNSRDQLERVLFDELGLPPIGKTEKTGKRSTSAAVLEALREVHPIVDKILQYRELAKLKGTYIDPLPALVHPKTGRLHTRFNQTATATGRLSSSDPNLQNIPVRTPLGQKIRRAFVAEEGWRLVALDYSQIELRVLAHLSGDENLIRVFQEGKDIHTQTASWMFGLSAEAIDPLMRRAAKTINFGVLYGMSAHRLSQELGIPYEEAAAFIQRYFQSYPKVKAWIEKTLREGRTRGYVETLFGRRRYVPDLNARVKSVREAAERMAFNMPVQGTAADLMKLAMVRLFPQLREVGARMLLQVHDELLLEAPKERAEEVAALAKEVMEGVWPLAVPLEVEVGIGEDWLAAKG

SEQ ID NO: 1979 - DNA, 2529 bp, synthetic construct
  misc_feature 1..2529: note = Variant of DNA polymerase I from Thermus sp. strain 2.9
  source 1..2529: mol_type = other DNA
atgcaccatcatcatcatcatggcggtagcggcatgttaccgttgttcgaacctaaaggtcgcgtgcttctggttgatggccatcatctcgcgtatcgtaacttctttgccctgaaaggattaaccaccagccgtggcgagccggtacagggtgtctacggctttgcaaagtcgctcctgaaagctctgaaagaagacggtgatgtggtgattgttgtctttgatgcgaaagcgccaagttttcgccacgaagcgtacgaagcttacaaagccgggcgtgctccaacgccggaagactttcctcgccaattggcgcttatgaaggaattagtggatttgcttggcctcgaacgcttggaagttcccggtttcgaggcagacgacgtattagcgactctcgcaaagaaagccgaacgtgagggctatgaagtccagatcttgacagcagatcgcgatcttttccagcttttatctccgcgcatctcggtgttacacccggaagggcatcgtatcaccccggaatggctctgggagaaatatggtttgcgtcccgaacaatgggtggattttcgcgccttagcaggcgatccgagcgacaatattccgggagttaaaggtatcggcgagaagacggcgctcaagctccttaaagaatgggggtcgttggagaacttgcttaagaatttagatcaggtcaaaccagagtcagtgcgtgagaagattcttgcacacctcgaagacctcaaattaagccgcgaattgtcccgtgtacgcaccgatttgccgctcgaagttgatttccgtggccgccgcgaacctgactgggagggtcttaaagcgtttttagagcgtcttgaatttggttcgctcttgcatgaattcggccttttagaaagcccgttaccagccgaagaagcaccttggccaccgcccgaaggcgcgtttttaggttaccgtttgagtcgcccggaaccgatgtgggccgaattattggctcttgcagcgtctgcccagggacgtgtgtatcgcgcggaagaccctcatggtgcgctccgcggcctcaaagaagtccgtggactccttgccaaagacttagctgttgttgcattgcgcgaaggtcttgatttacctccgactgatgatccaatgcttcttgcgtacctcttggacccgtcaaacacgacgcccgaaggcgtagcccgtcgttacggcggcgagtggaccgaagatgcaggcgagcgcgcgttattggccgaacgtttgcacgccaatttattaggacgtttgcaaggcgaggaacgtctcctctggctttacgaagaagtggagaaaccattgagtcgcgtgctcgcgcatatggaagctaccggtgtcaaattagacgtggcgtatttggaggcactcagccttgaagttgctgccgaaatgcgccgcttggaggaagaagtattccgtttagcaggccactccttttatcttaattctcgcgatcagttagaacgtgtgttgttcgatgaacttggtctccctcctatcggcaagacagagaagaccggtaaacgtagcacttcagcggcggttttagaagctcttcgcgaagtccatcccattgtggacaagatcttgcagtaccgcgaactcgcgaaattgaaaggcacctatattgaccctcttccggggttagtccacccgaaaacgggacgcctccatacccgcttcaaccaaacagccacggcgaccggtcgtttgtcctcctctgatccaaaccttcagaatattccagtacgtaccccattgggccagaagatccgccgcgcgtttgtagctgaggagggttggcgtttagtggccctcgattatagccaaattgaattacgtgtccttgcccatctttctggcgatgagaacctcatccgcgtgtttcaggaaggcaaagacattcacactcaaacggcaagctggatgtttggattatcagctgaagcgatcgatcctttgatgcgtcgtgcagcgaagaccatcaatttcggtgttctctacggtatgagtgcccatcgtttgtcgcaggaattaggcattccctatgaagaagctgcggcgttcattcagcgctactttcaaagctatcccaaagttaaagcatggatcgagaagactctcgaagaaggccgcacacgtggttacgtagagaccttatttggacgtcgccgctatgttcccgatttaaacgctcgcgtgaaatctgtccgtgaagccgccgaacgcatggcgttcaacatgcctgtacagggcacggcagctgacctcatgaaacttgcaatggtgcgcctttttccacaattgcgtgaagttggtgcccgcatgctcttgcaggtccacgatgaactcttgttagaagcgccaaaagagcgtgcggaagaggtggcagccctcgcgaaagaggttatggaaggcgtgtggcccttagcggtgcctcttgaagtcgaagttggtattggcgaggattggttggctgccaaaggataatga

SEQ ID NO: 1980 - protein, 841 aa, synthetic construct; identical to SEQ ID NO: 1914
  REGION 1..841: note = Variant of DNA polymerase I from Thermus sp. strain 2.9

SEQ ID NO: 1981 - DNA, 2529 bp, synthetic construct
  misc_feature 1..2529: note = Variant of DNA polymerase I from Thermus sp. strain 2.9
  source 1..2529: mol_type = other DNA
atggtgcatcatcatcatcatggcggtagcggcatgttaccgttgttcgaacctaaaggtcgcgtgcttctggttgatggccatcatctcgcgtatcgtaacttctttgccctgaaaggattaaccaccagccgtggcgagccggtacagggtgtctacggctttgcaaagtcgctcctgaaagctctgaaagaagacggtgatgtggtgattgttgtctttgatgcgaaagcgccaagttttcgccacgaagcgtacgaagcttacaaagccgggcgtgctccaacgccggaagactttcctcgccaattggcgcttatgaaggaattagtggatttgcttggcctcgaacgcttggaagttcccggtttcgaggcagacgacgtattagcgactctcgcaaagaaagccgaacgtgagggctatgaagtccagatcttgacagcagatcgcgatcttttccagcttttatctccgcgcatctcggtgttacacccggaagggcatcgtatcaccccggaatggctctgggagaaatatggtttgcgtcccgaacaatgggtggattttcgcgccttagcaggcgatccgagcgacaatattccgggagttaaaggtatcggcgagaagacggcgctcaagctccttaaagaatgggggtcgttggagaacttgcttaagaatttagatcaggtcaaaccagagtcagtgcgtgagaagattcttgcacacctcgaagacctcaaattaagccgcgaattgtcccgtgtacgcaccgatttgccgctcgaagttgatttccgtggccgccgcgaacctgactgggagggtcttaaagcgtttttagagcgtcttgaatttggttcgctcttgcatgaattcggccttttagaaagcccgttaccagccgaagaagcaccttggccaccgcccgaaggcgcgtttttaggttaccgtttgagtcgcccggaaccgatgtgggccgaattattggctcttgcagcgtctgcccagggacgtgtgtatcgcgcggaagaccctcatggtgcgctccgcggcctcaaagaagtccgtggactccttgccaaagacttagctgttgttgcattgcgcgaaggtcttgatttacctccgactgatgatccaatgcttcttgcgtacctcttggacccgtcaaacacgacgcccgaaggcgtagcccgtcgttacggcggcgagtggaccgaagatgcaggcgagcgcgcgttattggccgaacgtttgcacgccaatttattaggacgtttgcaaggcgaggaacgtctcctctggctttacgaagaagtggagaaaccattgagtcgcgtgctcgcgcatatggaagctaccggtgtcaaattagacgtggcgtatttggaggcactcagccttgaagttgctgccgaaatgcgccgcttggaggaagaagtattccgtttagcaggccactccttttatcttaattctcgcgatcagttagaacgtgtgttgttcgatgaacttggtctccctcctatcggcaagacagagaagaccggtaaacgtagcacttcagcggcggttttagaagctcttcgcgaagtccatcccattgtggacaagatcttgcagtaccgcgaactcgcgaaattgaaaggcacctatattgaccctcttccggcattagtccacccgaaaacgggacgcctccatacccgcttcaaccaaacagccacggcgaccggtcgtttgtcctcctctgatccaaaccttcagaatattccagtacgtaccccattgggccagaagatccgccgcgcgtttgtagctgaggagggttggcgtttagtggccctcgattatagccaaattgaattacgtgtccttgcccatctttctggcgatgagaacctcatccgcgtgtttcaggaaggcaaagacattcacactcaaacggcaagctggatgtttggattatcagctgaagcgatcgatcctttgatgcgtcgtgcagcgaagaccatcaatttcggtgttctctacggtatgagtgcccatcgtttgtcgcaggaattaggcattccctatgaagaagctgcggcgttcattcagcgctactttcaaagctatcccaaagttaaagcatggatcgagaagactctcgaagaaggccgcacacgtggttacgtagagaccttatttggacgtcgccgctatgttcccgatttaaacgctcgcgtgaaatctgtccgtgaagccgccgaacgcatggcgttcaacatgcctgtacagggcacggcagctgacctcatgaaacttgcaatggtgcgcctttttccacaattgcgtgaagttggtgcccgcatgctcttgcaggtccacgatgaactcttgttagaagcgccaaaagagcgtgcggaagaggtggcagccctcgcgaaagaggttatggaaggcgtgtggcccttagcggtgcctcttgaagtcgaagttggtattggcgaggattggttggctgccaaaggataatga

SEQ ID NO: 1982 - protein, 841 aa, synthetic construct
  REGION 1..841: note = Variant of DNA polymerase I from Thermus sp. strain 2.9
MVHHHHHGGSGMLPLFEPKGRVLLVDGHHLAYRNFFALKGLTTSRGEPVQGVYGFAKSLLKALKEDGDVVIVVFDAKAPSFRHEAYEAYKAGRAPTPEDFPRQLALMKELVDLLGLERLEVPGFEADDVLATLAKKAEREGYEVQILTADRDLFQLLSPRISVLHPEGHRITPEWLWEKYGLRPEQWVDFRALAGDPSDNIPGVKGIGEKTALKLLKEWGSLENLLKNLDQVKPESVREKILAHLEDLKLSRELSRVRTDLPLEVDFRGRREPDWEGLKAFLERLEFGSLLHEFGLLESPLPAEEAPWPPPEGAFLGYRLSRPEPMWAELLALAASAQGRVYRAEDPHGALRGLKEVRGLLAKDLAVVALREGLDLPPTDDPMLLAYLLDPSNTTPEGVARRYGGEWTEDAGERALLAERLHANLLGRLQGEERLLWLYEEVEKPLSRVLAHMEATGVKLDVAYLEALSLEVAAEMRRLEEEVFRLAGHSFYLNSRDQLERVLFDELGLPPIGKTEKTGKRSTSAAVLEALREVHPIVDKILQYRELAKLKGTYIDPLPALVHPKTGRLHTRFNQTATATGRLSSSDPNLQNIPVRTPLGQKIRRAFVAEEGWRLVALDYSQIELRVLAHLSGDENLIRVFQEGKDIHTQTASWMFGLSAEAIDPLMRRAAKTINFGVLYGMSAHRLSQELGIPYEEAAAFIQRYFQSYPKVKAWIEKTLEEGRTRGYVETLFGRRRYVPDLNARVKSVREAAERMAFNMPVQGTAADLMKLAMVRLFPQLREVGARMLLQVHDELLLEAPKERAEEVAALAKEVMEGVWPLAVPLEVEVGIGEDWLAAKG

SEQ ID NO: 1983 - DNA, 2529 bp, synthetic construct
  misc_feature 1..2529: note = Variant of DNA polymerase I from Thermus sp. strain 2.9
  source 1..2529: mol_type = other DNA
atgcaccatcatcatcatcatggcggtagcggcatgttaccgttgttcgaacctaaaggtcgcgtgcttctggttgatggccatcatctcgcgtatcgtaacttctttgccctgaaaggattaaccaccagccgtggcgagccggtacagggtgtctacggctttgcaaagtcgctcctgaaagctctgaaagaagacggtgatgtggtgattgttgtctttgatgcgaaagcgccaagttttcgccacgaagcgtacgaagcttacaaagccgggcgtgctccaacgccggaagactttcctcgccaattggcgcttatgaaggaattagtggatttgcttggcctcgaacgcttggaagttcccggtttcgaggcagacgacgtattagcgactctcgcaaagaaagccgaacgtgagggctatgaagtccagatcttgacagcagatcgcgatcttttccagcttttatctccgcgcatctcggtgttacacccggaagggcatcgtatcaccccggaatggctctgggagaaatatggtttgcgtcccgaacaatgggtggattttcgcgccttagcaggcgatccgagcgacaatattccgggagttaaaggtatcggcgagaagacggcgctcaagctccttaaagaatgggggtcgttggagaacttgcttaagaatttagatcaggtcaaaccagagtcagtgcgtgagaagattcttgcacacctcgaagacctcaaattaagccgcgaattgtcccgtgtacgcaccgatttgccgctcgaagttgatttccgtggccgccgcgaacctgactgggagggtcttaaagcgtttttagagcgtcttgaatttggttcgctcttgcatgaattcggccttttagaaagcccgttaccagccgaagaagcaccttggccaccgcccgaaggcgcgtttttaggttaccgtttgagtcgcccggaaccgatgtgggccgaattattggctcttgcagcgtctgcccagggacgtgtgtatcgcgcggaagaccctcatggtgcgctccgcggcctcaaagaagtccgtggactccttgccaaagacttagctgttgttgcattgcgcgaaggtcttgatttacctccgactgatgatccaatgcttcttgcgtacctcttggacccgtcaaacacgacgcccgaaggcgtagcccgtcgttacggcggcgagtggaccgaagatgcaggcgagcgcgcgttattggccgaacgtttgcacgccaatttattaggacgtttgcaaggcgaggaacgtctcctctggctttacgaagaagtggagaaaccattgagtcgcgtgctcgcgcatatggaagctaccggtgtcaaattagacgtggcgtatttggaggcactcagccttgaagttgctgccgaaatgcgccgcttggaggaagaagtattccgtttagcaggccactccttttatcttaattctcgcgatcagttagaacgtgtgttgttcgatgaacttggtctccctcctatcggcaagacagagaagaccggtaaacgtagcacttcagcggcggttttagaagctcttcgcgaagtccatcccattgtggacaagatcttgcagtaccgcgaactcgcgaaattgaaaggcacctatattgaccctcttccggcattagtccacccgaaaacgggacgcctccatacccgcttcaaccaaacagccacggcgaccggtcgtttgtcctcctctgatccaaaccttcagaatattccagtacgtaccccattgggccagaagatccgccgcgcgtttgtagctgaggagggttggcgtttagtggccctcgattatagccaaattgaattacgtgtccttgcccatctttctggcgatgagaacctcatccgcgtgtttcaggaaggcaaagacattcacactcaaacggcaagctggatgtttggattatcagctgaagcgatcgatcctttgatgcgtcgtgcagcgaagaccatcaatttcggtgttctctacggtatgagtgcccatcgtttgtcgcaggaattaggcattccctatgaagaagctgcggcgttcattcagcgctactttcaaagctatcccaaagttaaagcatggatcgagaagactctcgaagaaggccgcacacgtggttacgtagagaccttatttggacgtcgccgctatgttcccgatttaaacgctcgcgtgaaatctgtccgtgaagccgccgaacgcatggcgttcaacatgcctgtacagggcacggcagctgacctcatgaaacttgcaatggtgcgcctttttccacaattgcgtgaagttggtgcccgcatgctcttgcaggtccacgatgaactcttgttagaagcgccaaaagagcgtgcggaagaggtggcagccctcgcgaaaatggttatggaaggcgtgtggcccttagcggtgcctcttgaagtcgaagttggtattggcgaggattggttggctgccaaaggataatga

SEQ ID NO: 1984 - protein, 841 aa, synthetic construct
  REGION 1..841: note = Variant of DNA polymerase I from Thermus sp. strain 2.9
MHHHHHHGGSGMLPLFEPKGRVLLVDGHHLAYRNFFALKGLTTSRGEPVQGVYGFAKSLLKALKEDGDVVIVVFDAKAPSFRHEAYEAYKAGRAPTPEDFPRQLALMKELVDLLGLERLEVPGFEADDVLATLAKKAEREGYEVQILTADRDLFQLLSPRISVLHPEGHRITPEWLWEKYGLRPEQWVDFRALAGDPSDNIPGVKGIGEKTALKLLKEWGSLENLLKNLDQVKPESVREKILAHLEDLKLSRELSRVRTDLPLEVDFRGRREPDWEGLKAFLERLEFGSLLHEFGLLESPLPAEEAPWPPPEGAFLGYRLSRPEPMWAELLALAASAQGRVYRAEDPHGALRGLKEVRGLLAKDLAVVALREGLDLPPTDDPMLLAYLLDPSNTTPEGVARRYGGEWTEDAGERALLAERLHANLLGRLQGEERLLWLYEEVEKPLSRVLAHMEATGVKLDVAYLEALSLEVAAEMRRLEEEVFRLAGHSFYLNSRDQLERVLFDELGLPPIGKTEKTGKRSTSAAVLEALREVHPIVDKILQYRELAKLKGTYIDPLPALVHPKTGRLHTRFNQTATATGRLSSSDPNLQNIPVRTPLGQKIRRAFVAEEGWRLVALDYSQIELRVLAHLSGDENLIRVFQEGKDIHTQTASWMFGLSAEAIDPLMRRAAKTINFGVLYGMSAHRLSQELGIPYEEAAAFIQRYFQSYPKVKAWIEKTLEEGRTRGYVETLFGRRRYVPDLNARVKSVREAAERMAFNMPVQGTAADLMKLAMVRLFPQLREVGARMLLQVHDELLLEAPKERAEEVAALAKMVMEGVWPLAVPLEVEVGIGEDWLAAKG

SEQ ID NO: 1985 - DNA, 2529 bp, synthetic construct
  misc_feature 1..2529: note = Variant of DNA polymerase I from Thermus sp. strain 2.9
  source 1..2529: mol_type = other DNA
atgcaccatcatcatcatcatggcggtagcggcatgttaccgttgttcgaacctaaaggtcgcgtgcttctggttgatggccatcatctcgcgtatcgtaacttctttgccctgaaaggattaaccaccagccgtggcgagccggtacagggtgtctacggctttgcaaagtcgctcctgaaagctctgaaagaagacggtgatgtggtgattgttgtctttgatgcgaaagcgccaagttttcgccacgaagcgtacgaagcttacaaagccgggcgtgctccaacgccggaagactttcctcgccaattggcgcttatgaaggaattagtggatttgcttggcctcgaacgcttggaagttcccggtttcgaggcagacgacgtattagcgactctcgcaaagaaagccgaacgtgagggctatgaagtccagatcttgacagcagatcgcgatcttttccagcttttatctccgcgcatctcggtgttacacccggaagggcatcgtatcaccccggaatggctctgggagaaatatggtttgcgtcccgaacaatgggtggattttcgcgccttagcaggcgatccgagcgacaatattccgggagttaaaggtatcggcgagaagacggcgctcaagctccttaaagaatgggggtcgttggagaacttgcttaagaatttagatcaggtcaaaccagagtcagtgcgtgagaagattcttgcacacctcgaagacctcaaattaagccgcgaattgtcccgtgtacgcaccgatttgccgctcgaagttgatttccgtggccgccgcgaacctgactgggagggtcttaaagcgtttttagagcgtcttgaatttggttcgctcttgcatgaattcggccttttagaaagcccgttaccagccgaagaagcaccttggccaccgcccgaaggcgcgtttttaggttaccgtttgagtcgcccggaaccgatgtgggccgaattattggctcttgcagcgtctgcccagggacgtgtgtatcgcgcggaagaccctcatggtgcgctccgcggcctcaaagaagtccgtggactccttgccaaagacttagctgttgttgcattgcgcgaaggtcttgatttacctccgactgatgatccaatgcttcttgcgtacctcttggacccgtcaaacacgacgcccgaaggcgtagcccgtcgttacggcggcgggtggaccgaagatgcaggcgagcgcgcgttattggccgaacgtttgcacgccaatttattaggacgtttgcaaggcgaggaacgtctcctctggctttacgaagaagtggagaaaccattgagtcgcgtgctcgcgcatatggaagctaccggtgtcaaattagacgtggcgtatttggaggcactcagccttgaagttgctgccgaaatgcgccgcttggaggaagaagtattccgtttagcaggccactccttttatcttaattctcgcgatcagttagaacgtgtgttgttcgatgaacttggtctccctcctatcggcaagacagagaagaccggtaaacgtagcacttcagcggcggttttagaagctcttcgcgaagtccatcccattgtggacaagatcttgcagtaccgcgaactcgcgaaattgaaaggcacctatattgaccctcttccggcattagtccacccgaaaacgggacgcctccatacccgcttcaaccaaacagccacggcgaccggtcgtttgtcctcctctgatccaaaccttcagaatattccagtacgtaccccattgggccagaagatccgccgcgcgtttgtagctgaggagggttggcgtttagtggccctcgattatagccaaattgaattacgtgtccttgcccatctttctggcgatgagaacctcatccgcgtgtttcaggaaggcaaagacattcacactcaaacggcaagctggatgtttggattatcagctgaagcgatcgatcctttgatgcgtcgtgcagcgaagaccatcaatttcggtgttctctacggtatgagtgcccatcgtttgtcgcaggaattaggcattccctatgaagaagctgcggcgttcattcagcgctactttcaaagctatcccaaagttaaagcatggatcgagaagactctcgaagaaggccgcacacgtggttacgtagagaccttatttggacgtcgccgctatgttcccgatttaaacgctcgcgtgaaatctgtccgtgaagccgccgaacgcatggcgttcaacatgcctgtacagggcacggcagctgacctcatgaaacttgcaatggtgcgcctttttccacaattgcgtgaagttggtgcccgcatgctcttgcaggtccacgatgaactcttgttagaagcgccaaaagagcgtgcggaagaggtggcagccctcgcgaaagaggttatggaaggcgtgtggcccttagcggtgcctcttgaagtcgaagttggtattggcgaggattggttggctgccaaaggataatga

SEQ ID NO: 1986 - protein, 841 aa, synthetic construct
  REGION 1..841: note = Variant of DNA polymerase I from Thermus sp. strain 2.9
MHHHHHHGGSGMLPLFEPKGRVLLVDGHHLAYRNFFALKGLTTSRGEPVQGVYGFAKSLLKALKEDGDVVIVVFDAKAPSFRHEAYEAYKAGRAPTPEDFPRQLALMKELVDLLGLERLEVPGFEADDVLATLAKKAEREGYEVQILTADRDLFQLLSPRISVLHPEGHRITPEWLWEKYGLRPEQWVDFRALAGDPSDNIPGVKGIGEKTALKLLKEWGSLENLLKNLDQVKPESVREKILAHLEDLKLSRELSRVRTDLPLEVDFRGRREPDWEGLKAFLERLEFGSLLHEFGLLESPLPAEEAPWPPPEGAFLGYRLSRPEPMWAELLALAASAQGRVYRAEDPHGALRGLKEVRGLLAKDLAVVALREGLDLPPTDDPMLLAYLLDPSNTTPEGVARRYGGGWTEDAGERALLAERLHANLLGRLQGEERLLWLYEEVEKPLSRVLAHMEATGVKLDVAYLEALSLEVAAEMRRLEEEVFRLAGHSFYLNSRDQLERVLFDELGLPPIGKTEKTGKRSTSAAVLEALREVHPIVDKILQYRELAKLKGTYIDPLPALVHPKTGRLHTRFNQTATATGRLSSSDPNLQNIPVRTPLGQKIRRAFVAEEGWRLVALDYSQIELRVLAHLSGDENLIRVFQEGKDIHTQTASWMFGLSAEAIDPLMRRAAKTINFGVLYGMSAHRLSQELGIPYEEAAAFIQRYFQSYPKVKAWIEKTLEEGRTRGYVETLFGRRRYVPDLNARVKSVREAAERMAFNMPVQGTAADLMKLAMVRLFPQLREVGARMLLQVHDELLLEAPKERAEEVAALAKEVMEGVWPLAVPLEVEVGIGEDWLAAKG

SEQ ID NO: 1987 - DNA, 2529 bp, synthetic construct
  misc_feature 1..2529: note = Variant of DNA polymerase I from Thermus sp. strain 2.9
  source 1..2529: mol_type = other DNA
atgcaccatcatcatcatcatggcggtagcggcatgttaccgttgttcgaacctaaaggtcgcgtgcttctggttgatggccatcatctcgcgtatcgtaacttctttgccctgaaaggattaaccaccagccgtggcgagccggtacagggtgtctacggctttgcaaagtcgctcctgaaagctctgaaagaagacggtgatgtggtgattgttgtctttgatgcgaaagcgccaagttttcgccacgaagcgtacgaagcttacaaagccgggcgtgctccaacgccggaagactttcctcgccaattggcgcttatgaaggaattagtggatttgcttggcctcgaacgcttggaagttcccggtttcgaggcagacgacgtattagcgactctcgcaaagaaagccgaacgtgagggctatgaagtccagatcttgacagcagatcgcgatcttttccagcttttatctccgcgcatctcggtgttacacccggaagggcatcgtatcaccccggaatggctctgggagaaatatggtttgcgtcccgaacaatgggtggattttcgcgccttagcaggcgatccgagcgacaatattccgggagttaaaggtatcggcgagaagacggcgctcaagctccttaaagaatgggggtcgttggagaacttgcttaagaatttagatcaggtcaaaccagagtcagtgcgtgagaagattcttgcacacctcgaagacctcaaattaagccgcgaattgtcccgtgtacgcaccgatttgccgctcgaagttgatttccgtggccgccgcgaacctgactgggagggtcttaaagcgtttttagagggtcttgaatttggttcgctcttgcatgaattcggccttttagaaagcccgttaccagccgaagaagcaccttggccaccgcccgaaggcgcgtttttaggttaccgtttgagtcgcccggaaccgatgtgggccgaattattggctcttgcagcgtctgcccagggacgtgtgtatcgcgcggaagaccctcatggtgcgctccgcggcctcaaagaagtccgtggactccttgccaaagacttagctgttgttgcattgcgcgaaggtcttgatttacctccgactgatgatccaatgcttcttgcgtacctcttggacccgtcaaacacgacgcccgaaggcgtagcccgtcgttacggcggcgagtggaccgaagatgcaggcgagcgcgcgttattggccgaacgtttgcacgccaatttattaggacgtttgcaaggcgaggaacgtctcctctggctttacgaagaagtggagaaaccattgagtcgcgtgctcgcgcatatggaagctaccggtgtcaaattagacgtggcgtatttggaggcactcagccttgaagttgctgccgaaatgcgccgcttggaggaagaagtattccgtttagcaggccactccttttatcttaattctcgcgatcagttagaacgtgtgttgttcgatgaacttggtctccctcctatcggcaagacagagaagaccggtaaacgtagcacttcagcggcggttttagaagctcttcgcgaagtccatcccattgtggacaagatcttgcagtaccgcgaactcgcgaaattgaaaggcacctatattgaccctcttccggcattagtccacccgaaaacgggacgcctccatacccgcttcaaccaaacagccacggcgaccggtcgtttgtcctcctctgatccaaaccttcagaatattccagtacgtaccccattgggccagaagatccgccgcgcgtttgtagctgaggagggttggcgtttagtggccctcgattatagccaaattgaattacgtgtccttgcccatctttctggcgatgagaacctcatccgcgtgtttcaggaaggcaaagacattcacactcaaacggcaagctggatgtttggattatcagctgaagcgatcgatcctttgatgcgtcgtgcagcgaagaccatcaatttcggtgttctctacggtatgagtgcccatcgtttgtcgcaggaattaggcattccctatgaagaagctgcggcgttcattcagcgctactttcaaagctatcccaaagttaaagcatggatcgagaagactctcgaagaaggccgcacacgtggttacgtagagaccttatttggacgtcgccgctatgttcccgatttaaacgctcgcgtgaaatctgtccgtgaagccgccgaacgcatggcgttcaacatgcctgtacagggcacggcagctgacctcatgaaacttgcaatggtgcgcctttttccacaattgcgtgaagttggtgcccgcatgctcttgcaggtccacgatgaactcttgttagaagcgccaaaagagcgtgcggaagaggtggcagccctcgcgaaagaggttatggaaggcgtgtggcccttagcggtgcctcttgaagtcgaagttggtattggcgaggattggttggctgccaaaggataatga

SEQ ID NO: 1988 - protein, 841 aa, synthetic construct
  REGION 1..841: note = Variant of DNA polymerase I from Thermus sp. strain 2.9
MHHHHHHGGSGMLPLFEPKGRVLLVDGHHLAYRNFFALKGLTTSRGEPVQGVYGFAKSLLKALKEDGDVVIVVFDAKAPSFRHEAYEAYKAGRAPTPEDFPRQLALMKELVDLLGLERLEVPGFEADDVLATLAKKAEREGYEVQILTADRDLFQLLSPRISVLHPEGHRITPEWLWEKYGLRPEQWVDFRALAGDPSDNIPGVKGIGEKTALKLLKEWGSLENLLKNLDQVKPESVREKILAHLEDLKLSRELSRVRTDLPLEVDFRGRREPDWEGLKAFLEGLEFGSLLHEFGLLESPLPAEEAPWPPPEGAFLGYRLSRPEPMWAELLALAASAQGRVYRAEDPHGALRGLKEVRGLLAKDLAVVALREGLDLPPTDDPMLLAYLLDPSNTTPEGVARRYGGEWTEDAGERALLAERLHANLLGRLQGEERLLWLYEEVEKPLSRVLAHMEATGVKLDVAYLEALSLEVAAEMRRLEEEVFRLAGHSFYLNSRDQLERVLFDELGLPPIGKTEKTGKRSTSAAVLEALREVHPIVDKILQYRELAKLKGTYIDPLPALVHPKTGRLHTRFNQTATATGRLSSSDPNLQNIPVRTPLGQKIRRAFVAEEGWRLVALDYSQIELRVLAHLSGDENLIRVFQEGKDIHTQTASWMFGLSAEAIDPLMRRAAKTINFGVLYGMSAHRLSQELGIPYEEAAAFIQRYFQSYPKVKAWIEKTLEEGRTRGYVETLFGRRRYVPDLNARVKSVREAAERMAFNMPVQGTAADLMKLAMVRLFPQLREVGARMLLQVHDELLLEAPKERAEEVAALAKEVMEGVWPLAVPLEVEVGIGEDWLAAKG

SEQ ID NO: 1989 - DNA, 2529 bp, synthetic construct
  misc_feature 1..2529: note = Variant of DNA polymerase I from Thermus sp. strain 2.9
  source 1..2529: mol_type = other DNA
atgcaccatcatcatcatcatggcggtagcggcatgttaccgttgttcgaacctaaaggtcgcgtgcttctggttgatggccatcatctcgcgtatcgtaacttctttgccctgaaaggattaaccaccagccgtggcgagccggtacagggtgtctacggctttgcaaagtcgctcctgaaagctctgaaagaagacggtgatgtggtgattgttgtctttgatgcgaaagcgccaagttttcgccacgaagcgtacgaagcttacaaagccgggcgtgctccaacgccggaagactttcctcgccaattggcgcttatgaaggaattagtggatttgcttggcctcgaacgcttggaagttcccggtttcgaggcagacgacgtattagcgactctcgcaaagaaagccgaacgtgagggctatgaagtccagatcttgacagcagatcgcgatcttttccagcttttatctccgcgcatctcggtgttacacccggaagggcatcgtatcaccccggaatggctctgggagaaatatggtttgcgtcccgaacaatgggtggattttcgcgccttagcaggcgatccgagcgacaatattccgggagttaaaggtatcggcgagaagacggcgctcaagctccttaaagaatgggggtcgttggagaacttgcttaagaatttagatcaggtcaaaccagagtcagtgcgtgagaagattcttgcacacctcgaagacctcaaattaagccgcgaattgtcccgtgtacgcaccgatttgccgctcgaagttgatttccgtggccgccgcgaacctgactgggagggtcttaaagcgtttttagagcgtcttgaatttggttcgctcttgcatgaattcggccttttagaaagcccgttaccagccgaagaagcaccttggccaccgggggaaggcgcgtttttaggttaccgtttgagtcgcccggaaccgatgtgggccgaattattggctcttgcagcgtctgcccagggacgtgtgtatcgcgcggaagaccctcatggtgcgctccgcggcctcaaagaagtccgtggactccttgccaaagacttagctgttgttgcattgcgcgaaggtcttgatttacctccgactgatgatccaatgcttcttgcgtacctcttggacccgtcaaacacgacgcccgaaggcgtagcccgtcgttacggcggcgagtggaccgaagatgcaggcgagcgcgcgttattggccgaacgtttgcacgccaatttattaggacgtttgcaaggcgaggaacgtctcctctggctttacgaagaagtggagaaaccattgagtcgcgtgctcgcgcatatggaagctaccggtgtcaaattagacgtggcgtatttggaggcactcagccttgaagttgctgccgaaatgcgccgcttggaggaagaagtattccgtttagcaggccactccttttatcttaattctcgcgatcagttagaacgtgtgttgttcgatgaacttggtctccctcctatcggcaagacagagaagaccggtaaacgtagcacttcagcggcggttttagaagctcttcgcgaagtccatcccattgtggacaagatcttgcagtaccgcgaactcgcgaaattgaaaggcacctatattgaccctcttccggcattagtccacccgaaaacgggacgcctccatacccgcttcaaccaaacagccacggcgaccggtcgtttgtcctcctctgatccaaaccttcagaatattccagtacgtaccccattgggccagaagatccgccgcgcgtttgtagctgaggagggttggcgtttagtggccctcgattatagccaaattgaattacgtgtccttgcccatctttctggcgatgagaacctcatccgcgtgtttcaggaaggcaaagacattcacactcaaacggcaagctggatgtttggattatcagctgaagcgatcgatcctttgatgcgtcgtgcagcgaagaccatcaatttcggtgttctctacggtatgagtgcccatcgtttgtcgcaggaattaggcattccctatgaagaagctgcggcgttcattcagcgctactttcaaagctatcccaaagttaaagcatggatcgagaagactctcgaagaaggccgcacacgtggttacgtagagaccttatttggacgtcgccgctatgttcccgatttaaacgctcgcgtgaaatctgtccgtgaagccgccgaacgcatggcgttcaacatgcctgtacagggcacggcagctgacctcatgaaacttgcaatggtgcgcctttttccacaattgcgtgaagttggtgcccgcatgctcttgcaggtccacgatgaactcttgttagaagcgccaaaagagcgtgcggaagaggtggcagccctcgcgaaagaggttatggaaggcgtgtggcccttagcggtgcctcttgaagtcgaagttggtattggcgaggattggttggctgccaaaggataatga

SEQ ID NO: 1990 - protein, 841 aa, synthetic construct
  REGION 1..841: note = Variant of DNA polymerase I from Thermus sp. strain 2.9
MHHHHHHGGSGMLPLFEPKGRVLLVDGHHLAYRNFFALKGLTTSRGEPVQGVYGFAKSLLKALKEDGDVVIVVFDAKAPSFRHEAYEAYKAGRAPTPEDFPRQLALMKELVDLLGLERLEVPGFEADDVLATLAKKAEREGYEVQILTADRDLFQLLSPRISVLHPEGHRITPEWLWEKYGLRPEQWVDFRALAGDPSDNIPGVKGIGEKTALKLLKEWGSLENLLKNLDQVKPESVREKILAHLEDLKLSRELSRVRTDLPLEVDFRGRREPDWEGLKAFLERLEFGSLLHEFGLLESPLPAEEAPWPPGEGAFLGYRLSRPEPMWAELLALAASAQGRVYRAEDPHGALRGLKEVRGLLAKDLAVVALREGLDLPPTDDPMLLAYLLDPSNTTPEGVARRYGGEWTEDAGERALLAERLHANLLGRLQGEERLLWLYEEVEKPLSRVLAHMEATGVKLDVAYLEALSLEVAAEMRRLEEEVFRLAGHSFYLNSRDQLERVLFDELGLPPIGKTEKTGKRSTSAAVLEALREVHPIVDKILQYRELAKLKGTYIDPLPALVHPKTGRLHTRFNQTATATGRLSSSDPNLQNIPVRTPLGQKIRRAFVAEEGWRLVALDYSQIELRVLAHLSGDENLIRVFQEGKDIHTQTASWMFGLSAEAIDPLMRRAAKTINFGVLYGMSAHRLSQELGIPYEEAAAFIQRYFQSYPKVKAWIEKTLEEGRTRGYVETLFGRRRYVPDLNARVKSVREAAERMAFNMPVQGTAADLMKLAMVRLFPQLREVGARMLLQVHDELLLEAPKERAEEVAALAKEVMEGVWPLAVPLEVEVGIGEDWLAAKG

SEQ ID NO: 1991 - DNA, 2529 bp, synthetic construct
  misc_feature 1..2529: note = Variant of DNA polymerase I from Thermus sp. strain 2.9
  source 1..2529: mol_type = other DNA
atgcaccatcatcatcatcatggcggtagcggcatgttaccgttgttcgaacctaaaggtcgcgtgcttctggttgatggccatcatctcgcgtatcgtaacttctttgccctgaaaggattaaccaccagccgtggcgagccggtacagggtgtctacggctttgcaaagtcgctcctgaaagctctgaaagaagacggtgatgtggtgattgttgtctttgatgcgaaagcgccaagttttcgccacgaagcgtacgaagcttacaaagccgggcgtgctccaacgccggaagactttcctcgccaattggcgcttatgaaggaattagtggatttgcttggcctcgaacgcttggaagttcccggtttcgaggcagacgacgtattagcgactctcgcaaagaaagccgaacgtgagggctatgaagtccagatcttgacagcagatcgcgatcttttccagcttttatctccgcgcatctcggtgttacacccggaagggcatcgtatcaccccggaatggctctgggagaaatatggtttgcgtcccgaacaatgggtggattttcgcgccttagcaggcgatccgagcgacaatattccgggagttaaaggtatcggcgagaagacggcgctcaagctccttaaagaatgggggtcgttggagaacttgcttaagaatttagatcaggtcaaaccagagtcagtgcgtgagaagattcttgcacacctcgaagacctcaaattaagccgcgaattgtcccgtgtacgcaccgatttgccgctcgaagttgatttccgtggccgccgcgaacctgactgggagggtcttaaagcgtttttagagcgtcttgaatttggttcgctcttgcatgaattcggccttttagaaagcccgttaccagccgaagaagcaccttggccaccgcccgaaggcgcgtttttaggttaccgtttgagtcgcccggaaccgatgtgggccgaattattggctcttgcagcgtctgcccagggacgtgtgtatcgcgcggaagaccctcatggtgcgctccgcggcctcaaagaagtccgtggactccttgccaaagacttagctgttgttgcattgcgcgaaggtcttgatttacctccgactgatgatccaatgcttcttgcgtacctcttggacccgtcaaacacgacgcccgaaggcgtagcccgtcgttacggcggcgagtggaccgaagatgcaggcgagcgcgcgttattggccgaacgtttgcacgccaatttattaggacgtttgcaaggcgaggaacgtctcctctggctttacgaagaagtggagaaaccattgagtcgcgtgctcgcgcatatggaagctaccggtgtcaaattagacgtggcgtatttggaggcactcagccttgaagttgctgccgaaatgcgccgcttggaggaagaagtattccgtttagcaggccactccttttatcttaattctcgcgatcagttagaacgtgtgttgttcgatgaacttggtctccctcctatcggcaagacagagaagaccggtaaacgtagcacttcagcggcggttttagaagctcttcgcgaagtccatcccattgtggacaagatcttgcagtaccgcgaactcgcgaaattgaaaggcacctatattgaccctcttccggcattagtccacccgaaaacgggacgcctccatacccgcttcaaccaaacagccacggcgaccggtcgtttgtcctcctctgatccaaaccttcagaatattccagtacgtaccccattgggccagaagatccgccgcgcgtttgtagctgaggagggttggcgtttagtggccctcgattatagccaaattgaattacgtgtccttgcccatctttctggcgatgagaacctcatccgcgtgtttcaggaaggcaaagacattcacactcaaacggcaagctggatgtttggattatcagctgaagcgatcgatcctttgatgcgtcgtgcagcgaagaccatcaatttcggtgttctctacggtatgagtgcccatcgtttgtcgcaggaattaggcattccctatgaagaagctgcggcgttcattcagcgctactttcaaagctatcccaaagttaaagcatggatcgagaagactctcgaagaaggccgcacacgtggttacgtagagaccttatttggacgtcgccgctatgttcccgatttaaacgctcgcgtgaaatctgtccgtgaagccgccgaacgcatggcgttcaacatgcctgtacagggcacggcagctgacctcatgaaacttgcaatggtgcgcctttttccacaattgcgtgaagttggtgcccgcatgctcttgcaggtccacgatgaactcttgttagaagcgccaaaagagcgtgcggaaggtgtggcagccctcgcgaaagaggttatggaaggcgtgtggcccttagcggtgcctcttgaagtcgaagttggtattggcgaggattggttggctgccaaaggataatga

SEQ ID NO: 1992 - protein, 841 aa, synthetic construct
  REGION 1..841: note = Variant of DNA polymerase I from Thermus sp. strain 2.9
MHHHHHHGGSGMLPLFEPKGRVLLVDGHHLAYRNFFALKGLTTSRGEPVQGVYGFAKSLLKALKEDGDVVIVVFDAKAPSFRHEAYEAYKAGRAPTPEDFPRQLALMKELVDLLGLERLEVPGFEADDVLATLAKKAEREGYEVQILTADRDLFQLLSPRISVLHPEGHRITPEWLWEKYGLRPEQWVDFRALAGDPSDNIPGVKGIGEKTALKLLKEWGSLENLLKNLDQVKPESVREKILAHLEDLKLSRELSRVRTDLPLEVDFRGRREPDWEGLKAFLERLEFGSLLHEFGLLESPLPAEEAPWPPPEGAFLGYRLSRPEPMWAELLALAASAQGRVYRAEDPHGALRGLKEVRGLLAKDLAVVALREGLDLPPTDDPMLLAYLLDPSNTTPEGVARRYGGEWTEDAGERALLAERLHANLLGRLQGEERLLWLYEEVEKPLSRVLAHMEATGVKLDVAYLEALSLEVAAEMRRLEEEVFRLAGHSFYLNSRDQLERVLFDELGLPPIGKTEKTGKRSTSAAVLEALREVHPIVDKILQYRELAKLKGTYIDPLPALVHPKTGRLHTRFNQTATATGRLSSSDPNLQNIPVRTPLGQKIRRAFVAEEGWRLVALDYSQIELRVLAHLSGDENLIRVFQEGKDIHTQTASWMFGLSAEAIDPLMRRAAKTINFGVLYGMSAHRLSQELGIPYEEAAAFIQRYFQSYPKVKAWIEKTLEEGRTRGYVETLFGRRRYVPDLNARVKSVREAAERMAFNMPVQGTAADLMKLAMVRLFPQLREVGARMLLQVHDELLLEAPKERAEGVAALAKEVMEGVWPLAVPLEVEVGIGEDWLAAKG

SEQ ID NO: 1993 - DNA, 2529 bp, synthetic construct
  misc_feature 1..2529: note = Variant of DNA polymerase I from Thermus sp. strain 2.9
  source 1..2529: mol_type = other DNA
atgcaccatcatcatcatcatggcggtagcggcatgttaccgttgttcgaacctaaaggtcgcgtgcttctggttgatggccatcatctcgcgtatcgtaacttctttgccctgaaaggattaaccaccagccgtggcgagccggtacagggtgtctacggctttgcaaagtcgctcctgaaagctctgaaagaagacggtgatgtggtgattgttgtctttgatgcgaaagcgccaagttttcgccacgaagcgtacgaagcttacaaagccgggcgtgctccaacgccggaagactttcctcgccaattggcgcttatgaaggaattagtggatttgcttggcctcgaacgcttggaagttcccggtttcgaggcagacgacgtattagcgactctcgcaaagaaagccgaacgtgagggctatgaagtccagatcttgacagcagatcgcgatcttttccagcttttatctccgcgcatctcggtgttacacccggaagggcatcgtatcaccccggaatggctctgggagaaatatggtttgcgtcccgaacaatgggtggattttcgcgccttagcaggcgatccgagcgacaatattccgggagttaaaggtatcggcgagaagacggcgctcaagctccttaaagaatgggggtcgttggagaacttgcttaagaatttagatcaggtcaaaccagagtcagtgcgtgagaagattgcggcacacctcgaagacctcaaattaagccgcgaattgtcccgtgtacgcaccgatttgccgctcgaagttgatttccgtggccgccgcgaacctgactgggagggtcttaaagcgtttttagagcgtcttgaatttggttcgctcttgcatgaattcggccttttagaaagcccgttaccagccgaagaagcaccttggccaccgcccgaaggcgcgtttttaggttaccgtttgagtcgcccggaaccgatgtgggccgaattattggctcttgcagcgtctgcccagggacgtgtgtatcgcgcggaagaccctcatggtgcgctccgcggcctcaaagaagtccgtggactccttgccaaagacttagctgttgttgcattgcgcgaaggtcttgatttacctccgactgatgatccaatgcttcttgcgtacctcttggacccgtcaaacacgacgcccgaaggcgtagcccgtcgttacggcggcgagtggaccgaagatgcaggcgagcgcgcgttattggccgaacgtttgcacgccaatttattaggacgtttgcaaggcgaggaacgtctcctctggctttacgaagaagtggagaaaccattgagtcgcgtgctcgcgcatatggaagctaccggtgtcaaattagacgtggcgtatttggaggcactcagccttgaagttgctgccgaaatgcgccgcttggaggaagaagtattccgtttagcaggccactccttttatcttaattctcgcgatcagttagaacgtgtgttgttcgatgaacttggtctccctcctatcggcaagacagagaagaccggtaaacgtagcacttcagcggcggttttagaagctcttcgcgaagtccatcccattgtggacaagatcttgcagtaccgcgaactcgcgaaattgaaaggcacctatattgaccctcttccggcattagtccacccgaaaacgggacgcctccatacccgcttcaaccaaacagccacggcgaccggtcgtttgtcctcctctgatccaaaccttcagaatattccagtacgtaccccattgggccagaagatccgccgcgcgtttgtagctgaggagggttggcgtttagtggccctcgattatagccaaattgaattacgtgtccttgcccatctttctggcgatgagaacctcatccgcgtgtttcaggaaggcaaagacattcacactcaaacggcaagctggatgtttggattatcagctgaagcgatcgatcctttgatgcgtcgtgcagcgaagaccatcaatttcggtgttctctacggtatgagtgcccatcgtttgtcgcaggaattaggcattccctatgaagaagctgcggcgttcattcagcgctactttcaaagctatcccaaagttaaagcatggatcgagaagactctcgaagaaggccgcacacgtggttacgtagagaccttatttggacgtcgccgctatgttcccgatttaaacgctcgcgtgaaatctgtccgtgaagccgccgaacgcatggcgttcaacatgcctgtacagggcacggcagctgacctcatgaaacttgcaatggtgcgcctttttccacaattgcgtgaagttggtgcccgcatgctcttgcaggtccacgatgaactcttgttagaagcgccaaaagagcgtgcggaagaggtggcagccctcgcgaaagaggttatggaaggcgtgtggcccttagcggtgcctcttgaagtcgaagttggtattggcgaggattggttggctgccaaaggataatga

SEQ ID NO: 1994 - protein, 841 aa, synthetic construct
  REGION 1..841: note = Variant of DNA polymerase I from Thermus sp. strain 2.9
MHHHHHHGGSGMLPLFEPKGRVLLVDGHHLAYRNFFALKGLTTSRGEPVQGVYGFAKSLLKALKEDGDVVIVVFDAKAPSFRHEAYEAYKAGRAPTPEDFPRQLALMKELVDLLGLERLEVPGFEADDVLATLAKKAEREGYEVQILTADRDLFQLLSPRISVLHPEGHRITPEWLWEKYGLRPEQWVDFRALAGDPSDNIPGVKGIGEKTALKLLKEWGSLENLLKNLDQVKPESVREKIAAHLEDLKLSRELSRVRTDLPLEVDFRGRREPDWEGLKAFLERLEFGSLLHEFGLLESPLPAEEAPWPPPEGAFLGYRLSRPEPMWAELLALAASAQGRVYRAEDPHGALRGLKEVRGLLAKDLAVVALREGLDLPPTDDPMLLAYLLDPSNTTPEGVARRYGGEWTEDAGERALLAERLHANLLGRLQGEERLLWLYEEVEKPLSRVLAHMEATGVKLDVAYLEALSLEVAAEMRRLEEEVFRLAGHSFYLNSRDQLERVLFDELGLPPIGKTEKTGKRSTSAAVLEALREVHPIVDKILQYRELAKLKGTYIDPLPALVHPKTGRLHTRFNQTATATGRLSSSDPNLQNIPVRTPLGQKIRRAFVAEEGWRLVALDYSQIELRVLAHLSGDENLIRVFQEGKDIHTQTASWMFGLSAEAIDPLMRRAAKTINFGVLYGMSAHRLSQELGIPYEEAAAFIQRYFQSYPKVKAWIEKTLEEGRTRGYVETLFGRRRYVPDLNARVKSVREAAERMAFNMPVQGTAADLMKLAMVRLFPQLREVGARMLLQVHDELLLEAPKERAEEVAALAKEVMEGVWPLAVPLEVEVGIGEDWLAAKG

SEQ ID NO: 1995 - DNA, 2529 bp, synthetic construct
  misc_feature 1..2529: note = Variant of DNA polymerase I from Thermus sp. strain 2.9
  source 1..2529: mol_type = other DNA
atgcaccatcatcatcatcatggcggtagcggcatgttaccgttgttcgaacctaaaggtcgcgtgcttctggttgatggccatcatctcgcgtatcgtaacttctttgccctgaaaggattaaccaccagccgtggcgagccggtacagggtgtctacggctttgcaaagtcgctcctgaaagctctgaaacatgacggtgatgtggtgattgttgtctttgatgcgaaagcgccaagttttcgccacgaagcgtacgaagcttacaaagccgggcgtgctccaacgccggaagactttcctcgccaattggcgcttatgaaggaattagtggatttgcttggcctcgaacgcttggaagttcccggtttcgaggcagacgacgtattagcgactctcgcaaagaaagccgaacgtgagggctatgaagtccagatcttgacagcagatcgcgatcttttccagcttttatctccgcgcatctcggtgttacacccggaagggcatcgtatcaccccggaatggctctgggagaaatatggtttgcgtcccgaacaatgggtggattttcgcgccttagcaggcgatccgagcgacaatattccgggagttaaaggtatcggcgagaagacggcgctcaagctccttaaagaatgggggtcgttggagaacttgcttaagaatttagatcaggtcaaaccagagtcagtgcgtgagaagattcttgcacacctcgaagacctcaaattaagccgcgaattgtcccgtgtacgcaccgatttgccgctcgaagttgatttccgtggccgccgcgaacctgactgggagggtcttaaagcgtttttagagcgtcttgaatttggttcgctcttgcatgaattcggccttttagaaagcccgttaccagccgaagaagcaccttggccaccgcccgaaggcgcgtttttaggttaccgtttgagtcgcccggaaccgatgtgggccgaattattggctcttgcagcgtctgcccagggacgtgtgtatcgcgcggaagaccctcatggtgcgctccgcggcctcaaagaagtccgtggactccttgccaaagacttagctgttgttgcattgcgcgaaggtcttgatttacctccgactgatgatccaatgcttcttgcgtacctcttggacccgtcaaacacgacgcccgaaggcgtagcccgtcgttacggcggcgagtggaccgaagatgcaggcgagcgcgcgttattggccgaacgtttgcacgccaatttattaggacgtttgcaaggcgaggaacgtctcctctggctttacgaagaagtggagaaaccattgagtcgcgtgctcgcgcatatggaagctaccggtgtcaaattagacgtggcgtatttggaggcactcagccttgaagttgctgccgaaatgcgccgcttggaggaagaagtattccgtttagcaggccactccttttatcttaattctcgcgatcagttagaacgtgtgttgttcgatgaacttggtctccctcctatcggcaagacagagaagaccggtaaacgtagcacttcagcggcggttttagaagctcttcgcgaagtccatcccattgtggacaagatcttgcagtaccgcgaactcgcgaaattgaaaggcacctatattgaccctcttccggcattagtccacccgaaaacgggacgcctccatacccgcttcaaccaaacagccacggcgaccggtcgtttgtcctcctctgatccaaaccttcagaatattccagtacgtaccccattgggccagaagatccgccgcgcgtttgtagctgaggagggttggcgtttagtggccctcgattatagccaaattgaattacgtgtccttgcccatctttctggcgatgagaacctcatccgcgtgtttcaggaaggcaaagacattcacactcaaacggcaagctggatgtttggattatcagctgaagcgatcgatcctttgatgcgtcgtgcagcgaagaccatcaatttcggtgttctctacggtatgagtgcccatcgtttgtcgcaggaattaggcattccctatgaagaagctgcggcgttcattcagcgctactttcaaagctatcccaaagttaaagcatggatcgagaagactctcgaagaaggccgcacacgtggttacgtagagaccttatttggacgtcgccgctatgttcccgatttaaacgctcgcgtgaaatctgtccgtgaagccgccgaacgcatggcgttcaacatgcctgtacagggcacggcagctgacctcatgaaacttgcaatggtgcgcctttttccacaattgcgtgaagttggtgcccgcatgctcttgcaggtccacgatgaactcttgttagaagcgccaaaagagcgtgcggaagaggtggcagccctcgcgaaagaggttatggaaggcgtgtggcccttagcggtgcctcttgaagtcgaagttggtattggcgaggattggttggctgccaaaggataatga

SEQ ID NO: 1996 - protein, 841 aa, synthetic construct
  REGION 1..841: note = Variant of DNA polymerase I from Thermus sp. strain 2.9
MHHHHHHGGSGMLPLFEPKGRVLLVDGHHLAYRNFFALKGLTTSRGEPVQGVYGFAKSLLKALKHDGDVVIVVFDAKAPSFRHEAYEAYKAGRAPTPEDFPRQLALMKELVDLLGLERLEVPGFEADDVLATLAKKAEREGYEVQILTADRDLFQLLSPRISVLHPEGHRITPEWLWEKYGLRPEQWVDFRALAGDPSDNIPGVKGIGEKTALKLLKEWGSLENLLKNLDQVKPESVREKILAHLEDLKLSRELSRVRTDLPLEVDFRGRREPDWEGLKAFLERLEFGSLLHEFGLLESPLPAEEAPWPPPEGAFLGYRLSRPEPMWAELLALAASAQGRVYRAEDPHGALRGLKEVRGLLAKDLAVVALREGLDLPPTDDPMLLAYLLDPSNTTPEGVARRYGGEWTEDAGERALLAERLHANLLGRLQGEERLLWLYEEVEKPLSRVLAHMEATGVKLDVAYLEALSLEVAAEMRRLEEEVFRLAGHSFYLNSRDQLERVLFDELGLPPIGKTEKTGKRSTSAAVLEALREVHPIVDKILQYRELAKLKGTYIDPLPALVHPKTGRLHTRFNQTATATGRLSSSDPNLQNIPVRTPLGQKIRRAFVAEEGWRLVALDYSQIELRVLAHLSGDENLIRVFQEGKDIHTQTASWMFGLSAEAIDPLMRRAAKTINFGVLYGMSAHRLSQELGIPYEEAAAFIQRYFQSYPKVKAWIEKTLEEGRTRGYVETLFGRRRYVPDLNARVKSVREAAERMAFNMPVQGTAADLMKLAMVRLFPQLREVGARMLLQVHDELLLEAPKERAEEVAALAKEVMEGVWPLAVPLEVEVGIGEDWLAAKG

SEQ ID NO: 1997 - DNA, 2529 bp, synthetic construct
  misc_feature 1..2529: note = Variant of DNA polymerase I from Thermus sp. strain 2.9
  source 1..2529: mol_type = other DNA
atgcaccatcatcatcatcatggcggtagcggcatgttaccgttgttcgaacctaaaggtcgcgtgcttctggttgatggccatcatctcgcgtatcgtaacttctttgccctgaaaggattaaccaccagccgtggcgagccggtacagggtgtctacggctttgcaaagtcgctcctgaaagctctgaaagaagacggtgatgtggtgattgttgtctttgatgcgaaagcgccaagttttcgccacgaagcgtacgaagcttacaaagccgggcgtgctccaacgccggaagactttcctcgccaattggcgcttatgaaggaattagtggatttgcttggcctcgaacgcttggaagttcccggtttcgaggcagacgacgtattagcgactctcgcaaagaaagccgaacgtgagggctatgaagtccagatcttgacagcagatcgcgatcttttccagcttttatctccgcgcatctcggtgttacacccggaagggcatcgtatcaccccggaatggctctgggagaaatatggtttgcgtcccgaacaatgggtggattttcgcgccttagcaggcgatccgagcgacaatattccgggagttaaaggtatcggcgagaagacggcgctcaagctccttaaagaatgggggtcgttggagaacttgcttaagaatttagatcaggtcaaaccagagtcagtgcgtgagaagattcttgcacacctcgaagacctcaaattaagccgcgaattgtcccgtgtacgcaccgatttgccgctcgaagttgatttccgtggccgccgcgaacctgactgggagggtcttaaagcgtttttagagcgtcttgaatttggttcgctcttgcatgaattcggccttttagaaagcccgttaccagccgaagaagcaccttgggggccgcccgaaggcgcgtttttaggttaccgtttgagtcgcccggaaccgatgtgggccgaattattggctcttgcagcgtctgcccagggacgtgtgtatcgcgcggaagaccctcatggtgcgctccgcggcctcaaagaagtccgtggactccttgccaaagacttagctgttgttgcattgcgcgaaggtcttgatttacctccgactgatgatccaatgcttcttgcgtacctcttggacccgtcaaacacgacgcccgaaggcgtagcccgtcgttacggcggcgagtggaccgaagatgcaggcgagcgcgcgttattggccgaacgtttgcacgccaatttattaggacgtttgcaaggcgaggaacgtctcctctggctttacgaagaagtggagaaaccattgagtcgcgtgctcgcgcatatggaagctaccggtgtcaaattagacgtggcgtatttggaggcactcagccttgaagttgctgccgaaatgcgccgcttggaggaagaagtattccgtttagcaggccactccttttatcttaattctcgcgatcagttagaacgtgtgttgttcgatgaacttggtctccctcctatcggcaagacagagaagaccggtaaacgtagcacttcagcggcggttttagaagctcttcgcgaagtccatcccattgtggacaagatcttgcagtaccgcgaactcgcgaaattgaaaggcacctatattgaccctcttccggcattagtccacccgaaaacgggacgcctccatacccgcttcaaccaaacagccacggcgaccggtcgtttgtcctcctctgatccaaaccttcagaatattccagtacgtaccccattgggccagaagatccgccgcgcgtttgtagctgaggagggttggcgtttagtggccctcgattatagccaaattgaattacgtgtccttgcccatctttctggcgatgagaacctcatccgcgtgtttcaggaaggcaaagacattcacactcaaacggcaagctggatgtttggattatcagctgaagcgatcgatcctttgatgcgtcgtgcagcgaagaccatcaatttcggtgttctctacggtatgagtgcccatcgtttgtcgcaggaattaggcattccctatgaagaagctgcggcgttcattcagcgctactttcaaagctatcccaaagttaaagcatggatcgagaagactctcgaagaaggccgcacacgtggttacgtagagaccttatttggacgtcgccgctatgttcccgatttaaacgctcgcgtgaaatctgtccgtgaagccgccgaacgcatggcgttcaacatgcctgtacagggcacggcagctgacctcatgaaacttgcaatggtgcgcctttttccacaattgcgtgaagttggtgcccgcatgctcttgcaggtccacgatgaactcttgttagaagcgccaaaagagcgtgcggaagaggtggcagccctcgcgaaagaggttatggaaggcgtgtggcccttagcggtgcctcttgaagtcgaagttggtattggcgaggattggttggctgccaaaggataatga

SEQ ID NO: 1998 - protein, 841 aa, synthetic construct
  REGION 1..841: note = Variant of DNA polymerase I from Thermus sp. strain 2.9
MHHHHHHGGSGMLPLFEPKGRVLLVDGHHLAYRNFFALKGLTTSRGEPVQGVYGFAKSLLKALKEDGDVVIVVFDAKAPSFRHEAYEAYKAGRAPTPEDFPRQLALMKELVDLLGLERLEVPGFEADDVLATLAKKAEREGYEVQILTADRDLFQLLSPRISVLHPEGHRITPEWLWEKYGLRPEQWVDFRALAGDPSDNIPGVKGIGEKTALKLLKEWGSLENLLKNLDQVKPESVREKILAHLEDLKLSRELSRVRTDLPLEVDFRGRREPDWEGLKAFLERLEFGSLLHEFGLLESPLPAEEAPWGPPEGAFLGYRLSRPEPMWAELLALAASAQGRVYRAEDPHGALRGLKEVRGLLAKDLAVVALREGLDLPPTDDPMLLAYLLDPSNTTPEGVARRYGGEWTEDAGERALLAERLHANLLGRLQGEERLLWLYEEVEKPLSRVLAHMEATGVKLDVAYLEALSLEVAAEMRRLEEEVFRLAGHSFYLNSRDQLERVLFDELGLPPIGKTEKTGKRSTSAAVLEALREVHPIVDKILQYRELAKLKGTYIDPLPALVHPKTGRLHTRFNQTATATGRLSSSDPNLQNIPVRTPLGQKIRRAFVAEEGWRLVALDYSQIELRVLAHLSGDENLIRVFQEGKDIHTQTASWMFGLSAEAIDPLMRRAAKTINFGVLYGMSAHRLSQELGIPYEEAAAFIQRYFQSYPKVKAWIEKTLEEGRTRGYVETLFGRRRYVPDLNARVKSVREAAERMAFNMPVQGTAADLMKLAMVRLFPQLREVGARMLLQVHDELLLEAPKERAEEVAALAKEVMEGVWPLAVPLEVEVGIGEDWLAAKG

SEQ ID NO: 1999 - DNA, 2529 bp, synthetic construct
  misc_feature 1..2529: note = Variant of DNA polymerase I from Thermus sp. strain 2.9
  source 1..2529: mol_type = other DNA
atgcaccatcatcatcatcatggcggtagcggcatgttaccgttgttcgaacctaaaggtcgcgtgcttctggttgatggccatcatctcgcgtatcgtaacttctttgccctgaaaggattaaccaccagccgtggcgagccggtacagggtgtctacggctttgcaaagtcgctcctgaaagctctgaaaggggacggtgatgtggtgattgttgtctttgatgcgaaagcgccaagttttcgccacgaagcgtacgaagcttacaaagccgggcgtgctccaacgccggaagactttcctcgccaattggcgcttatgaaggaattagtggatttgcttggcctcgaacgcttggaagttcccggtttcgaggcagacgacgtattagcgactctcgcaaagaaagccgaacgtgagggctatgaagtccagatcttgacagcagatcgcgatcttttccagcttttatctccgcgcatctcggtgttacacccggaagggcatcgtatcaccccggaatggctctgggagaaatatggtttgcgtcccgaacaatgggtggattttcgcgccttagcaggcgatccgagcgacaatattccgggagttaaaggtatcggcgagaagacggcgctcaagctccttaaagaatgggggtcgttggagaacttgcttaagaatttagatcaggtcaaaccagagtcagtgcgtgagaagattcttgcacacctcgaagacctcaaattaagccgcgaattgtcccgtgtacgcaccgatttgccgctcgaagttgatttccgtggccgccgcgaacctgactgggagggtcttaaagcgtttttagagcgtcttgaatttggttcgctcttgcatgaattcggccttttagaaagcccgttaccagccgaagaagcaccttggccaccgcccgaaggcgcgtttttaggttaccgtttgagtcgcccggaaccgatgtgggccgaattattggctcttgcagcgtctgcccagggacgtgtgtatcgcgcggaagaccctcatggtgcgctccgcggcctcaaagaagtccgtggactccttgccaaagacttagctgttgttgcattgcgcgaaggtcttgatttacctccgactgatgatccaatgcttcttgcgtacctcttggacccgtcaaacacgacgcccgaaggcgtagcccgtcgttacggcggcgagtggaccgaagatgcaggcgagcgcgcgttattggccgaacgtttgcacgccaatttattaggacgtttgcaaggcgaggaacgtctcctctggctttacgaagaagtggagaaaccattgagtcgcgtgctcgcgcatatggaagctaccggtgtcaaattagacgtggcgtatttggaggcactcagccttgaagttgctgccgaaatgcgccgcttggaggaagaagtattccgtttagcaggccactccttttatcttaattctcgcgatcagttagaacgtgtgttgttcgatgaacttggtctccctcctatcggcaagacagagaagaccggtaaacgtagcacttcagcggcggttttagaagctcttcgcgaagtccatcccattgtggacaagatcttgcagtaccgcgaactcgcgaaattgaaaggcacctatattgaccctcttccggcattagtccacccgaaaacgggacgcctccatacccgcttcaaccaaacagccacggcgaccggtcgtttgtcctcctctgatccaaaccttcagaatattccagtacgtaccccattgggccagaagatccgccgcgcgtttgtagctgaggagggttggcgtttagtggccctcgattatagccaaattgaattacgtgtccttgcccatctttctggcgatgagaacctcatccgcgtgtttcaggaaggcaaagacattcacactcaaacggcaagctggatgtttggattatcagctgaagcgatcgatcctttgatgcgtcgtgcagcgaagaccatcaatttcggtgttctctacggtatgagtgcccatcgtttgtcgcaggaattaggcattccctatgaagaagctgcggcgttcattcagcgctactttcaaagctatcccaaagttaaagcatggatcgagaagactctcgaagaaggccgcacacgtggttacgtagagaccttatttggacgtcgccgctatgttcccgatttaaacgctcgcgtgaaatctgtccgtgaagccgccgaacgcatggcgttcaacatgcctgtacagggcacggcagctgacctcatgaaacttgcaatggtgcgcctttttccacaattgcgtgaagttggtgcccgcatgctcttgcaggtccacgatgaactcttgttagaagcgccaaaagagcgtgcggaagaggtggcagccctcgcgaaagaggttatggaaggcgtgtggcccttagcggtgcctcttgaagtcgaagttggtattggcgaggattggttggctgccaaaggataatga

SEQ ID NO: 2000 - protein, 841 aa, synthetic construct
  REGION 1..841: note = Variant of DNA polymerase I from Thermus sp. strain 2.9
MHHHHHHGGSGMLPLFEPKGRVLLVDGHHLAYRNFFALKGLTTSRGEPVQGVYGFAKSLLKALKGDGDVVIVVFDAKAPSFRHEAYEAYKAGRAPTPEDFPRQLALMKELVDLLGLERLEVPGFEADDVLATLAKKAEREGYEVQILTADRDLFQLLSPRISVLHPEGHRITPEWLWEKYGLRPEQWVDFRALAGDPSDNIPGVKGIGEKTALKLLKEWGSLENLLKNLDQVKPESVREKILAHLEDLKLSRELSRVRTDLPLEVDFRGRREPDWEGLKAFLERLEFGSLLHEFGLLESPLPAEEAPWPPPEGAFLGYRLSRPEPMWAELLALAASAQGRVYRAEDPHGALRGLKEVRGLLAKDLAVVALREGLDLPPTDDPMLLAYLLDPSNTTPEGVARRYGGEWTEDAGERALLAERLHANLLGRLQGEERLLWLYEEVEKPLSRVLAHMEATGVKLDVAYLEALSLEVAAEMRRLEEEVFRLAGHSFYLNSRDQLERVLFDELGLPPIGKTEKTGKRSTSAAVLEALREVHPIVDKILQYRELAKLKGTYIDPLPALVHPKTGRLHTRFNQTATATGRLSSSDPNLQNIPVRTPLGQKIRRAFVAEEGWRLVALDYSQIELRVLAHLSGDENLIRVFQEGKDIHTQTASWMFGLSAEAIDPLMRRAAKTINFGVLYGMSAHRLSQELGIPYEEAAAFIQRYFQSYPKVKAWIEKTLEEGRTRGYVETLFGRRRYVPDLNARVKSVREAAERMAFNMPVQGTAADLMKLAMVRLFPQLREVGARMLLQVHDELLLEAPKERAEEVAALAKEVMEGVWPLAVPLEVEVGIGEDWLAAKG

SEQ ID NO: 2001 - DNA, 2529 bp, synthetic construct
  misc_feature 1..2529: note = Variant of DNA polymerase I from Thermus sp. strain 2.9
  source 1..2529: mol_type = other DNA
atgcaccatcatcatcatcatggcggtagcggcatgttaccgttgttcgaacctaaaggtcgcgtgcttctggttgatggccatcatctcgcgtatcgtaacttctttgccctgaaaggattaaccaccagccgtggcgagccggtacagggtgtctacggctttgcaaagtcgctcctgaaagctctgaaagaagacggtgatgtggtgattgttgtctttgatgcgaaagcgccaagttttcgccacgaagcgtacgaagcttacaaagccgggcgtgctccaacgccggaagactttcctcgccaattggcgcttatgaaggaattagtggatttgcttggcctcgaacgcttggaagttcccggtttcgaggcagacgacgtattagcgactctcgcaaagaaagccgaacgtgagggctatgaagtccagatcttgacagcagatcgcgatcttttccagcttttatctccgcgcatctcggtgttacacccggaagggcatcgtatcaccccggaatggctctgggagaaatatggtttgcgtcccgaacaatgggtggattttcgcgccttagcaggcgatccgagcgacaatattccgggagttaaaggtatcggcgagaagacggcgctcaagctccttaaagaatgggggtcgttggagaacttgcttaagaatttagatcaggtcaaaccagagtcagtgcgtgagaagattcttgcacacctcgaagacctcaaattaagccgcgaattgtcccgtgtacgcaccgatttgccgctcgaagttgatttccgtggccgccgcgaacctgactgggagggtcttaaagcgtttttagagcgtcttgaatttggttcgctcttgcatgaattcggccttttagaaagcccgttaccagccagggaagcaccttggccaccgcccgaaggcgcgtttttaggttaccgtttgagtcgcccggaaccgatgtgggccgaattattggctcttgcagcgtctgcccagggacgtgtgtatcgcgcggaagaccctcatggtgcgctccgcggcctcaaagaagtccgtggactccttgccaaagacttagctgttgttgcattgcgcgaaggtcttgatttacctccgactgatgatccaatgcttcttgcgtacctcttggacccgtcaaacacgacgcccgaaggcgtagcccgtcgttacggcggcgagtggaccgaagatgcaggcgagcgcgcgttattggccgaacgtttgcacgccaatttattaggacgtttgcaaggcgaggaacgtctcctctggctttacgaagaagtggagaaaccattgagtcgcgtgctcgcgcatatggaagctaccggtgtcaaattagacgtggcgtatttggaggcactcagccttgaagttgctgccgaaatgcgccgcttggaggaagaagtattccgtttagcaggccactccttttatcttaattctcgcgatcagttagaacgtgtgttgttcgatgaacttggtctccctcctatcggcaagacagagaagaccggtaaacgtagcacttcagcggcggttttagaagctcttcgcgaagtccatcccattgtggacaagatcttgcagtaccgcgaactcgcgaaattgaaaggcacctatattgaccctcttccggcattagtccacccgaaaacgggacgcctccatacccgcttcaaccaaacagccacggcgaccggtcgtttgtcctcctctgatccaaaccttcagaatattccagtacgtaccccattgggccagaagatccgccgcgcgtttgtagctgaggagggttggcgtttagtggccctcgattatagccaaattgaattacgtgtccttgcccatctttctggcgatgagaacctcatccgcgtgtttcaggaaggcaaagacattcacactcaaacggcaagctggatgtttggattatcagctgaagcgatcgatcctttgatgcgtcgtgcagcgaagaccatcaatttcggtgttctctacggtatgagtgcccatcgtttgtcgcaggaattaggcattccctatgaagaagctgcggcgttcattcagcgctactttcaaagctatcccaaagttaaagcatggatcgagaagactctcgaagaaggccgcacacgtggttacgtagagaccttatttggacgtcgccgctatgttcccgatttaaacgctcgcgtgaaatctgtccgtgaagccgccgaacgcatggcgttcaacatgcctgtacagggcacggcagctgacctcatgaaacttgcaatggtgcgcctttttccacaattgcgtgaagttggtgcccgcatgctcttgcaggtccacgatgaactcttgttagaagcgccaaaagagcgtgcggaagaggtggcagccctcgcgaaagaggttatggaaggcgtgtggcccttagcggtgcctcttgaagtcgaagttggtattggcgaggattggttggctgccaaaggataatga

SEQ ID NO: 2002 - protein, 841 aa, synthetic construct
  REGION 1..841: note = Variant of DNA polymerase I from Thermus sp. strain 2.9
MHHHHHHGGSGMLPLFEPKGRVLLVDGHHLAYRNFFALKGLTTSRGEPVQGVYGFAKSLLKALKEDGDVVIVVFDAKAPSFRHEAYEAYKAGRAPTPEDFPRQLALMKELVDLLGLERLEVPGFEADDVLATLAKKAEREGYEVQILTADRDLFQLLSPRISVLHPEGHRITPEWLWEKYGLRPEQWVDFRALAGDPSDNIPGVKGIGEKTALKLLKEWGSLENLLKNLDQVKPESVREKILAHLEDLKLSRELSRVRTDLPLEVDFRGRREPDWEGLKAFLERLEFGSLLHEFGLLESPLPAREAPWPPPEGAFLGYRLSRPEPMWAELLALAASAQGRVYRAEDPHGALRGLKEVRGLLAKDLAVVALREGLDLPPTDDPMLLAYLLDPSNTTPEGVARRYGGEWTEDAGERALLAERLHANLLGRLQGEERLLWLYEEVEKPLSRVLAHMEATGVKLDVAYLEALSLEVAAEMRRLEEEVFRLAGHSFYLNSRDQLERVLFDELGLPPIGKTEKTGKRSTSAAVLEALREVHPIVDKILQYRELAKLKGTYIDPLPALVHPKTGRLHTRFNQTATATGRLSSSDPNLQNIPVRTPLGQKIRRAFVAEEGWRLVALDYSQIELRVLAHLSGDENLIRVFQEGKDIHTQTASWMFGLSAEAIDPLMRRAAKTINFGVLYGMSAHRLSQELGIPYEEAAAFIQRYFQSYPKVKAWIEKTLEEGRTRGYVETLFGRRRYVPDLNARVKSVREAAERMAFNMPVQGTAADLMKLAMVRLFPQLREVGARMLLQVHDELLLEAPKERAEEVAALAKEVMEGVWPLAVPLEVEVGIGEDWLAAKG

SEQ ID NO: 2003 - DNA, 2529 bp, synthetic construct
  misc_feature 1..2529: note = Variant of DNA polymerase I from Thermus sp. strain 2.9
  source 1..2529: mol_type = other DNA
atgcaccatcatcatcatcatggcggtagcggcatgttaccgttgttcgaacctaaaggtcgcgtgcttctggttgatggccatcatctcgcgtatcgtaacttctttgccctgaaaggattaaccaccagccgtggcgagccggtacagggtgtctacggctttgcaaagtcgctcctgaaagctctgaaagaagacggtgatgtggtgattgttgtctttgatgcgaaagcgccaagttttcgccacgaagcgtacgaagcttacaaagccgggcgtgctccaacgccggaagactttcctcgccaattggcgcttatgaaggaattagtggatttgcttggcctcgaacgcttggaagttcccggtttcgaggcagacgacgtattagcgactctcgcaaagaaagccgaacgtgagggctatgaagtccagatcttgacagcagatcgcgatcttttccagcttttatctccgcgcatctcggtgttacacccggaagggcatcgtatcaccccggaatggctctgggagaaatatggtttgcgtcccgaacaatgggtggattttcgcgccttagcaggcgatccgagcgacaatattccgggagttaaaggtatcggcgagaagacggcgctcaagctccttaaagaatgggggtcgttggagaacttgcttaagaatttagatcaggtcaaaccagagtcagtgcgtgagaagattcgggcacacctcgaagacctcaaattaagccgcgaattgtcccgtgtacgcaccgatttgccgctcgaagttgatttccgtggccgccgcgaacctgactgggagggtcttaaagcgtttttagagcgtcttgaatttggttcgctcttgcatgaattcggccttttagaaagcccgttaccagccgaagaagcaccttggccaccgcccgaaggcgcgtttttaggttaccgtttgagtcgcccggaaccgatgtgggccgaattattggctcttgcagcgtctgcccagggacgtgtgtatcgcgcggaagaccctcatggtgcgctccgcggcctcaaagaagtccgtggactccttgccaaagacttagctgttgttgcattgcgcgaaggtcttgatttacctccgactgatgatccaatgcttcttgcgtacctcttggacccgtcaaacacgacgcccgaaggcgtagcccgtcgttacggcggcgagtggaccgaagatgcaggcgagcgcgcgttattggccgaacgtttgcacgccaatttattaggacgtttgcaaggcgaggaacgtctcctctggctttacgaagaagtggagaaaccattgagtcgcgtgctcgcgcatatggaagctaccggtgtcaaattagacgtggcgtatttggaggcactcagccttgaagttgctgccgaaatgcgccgcttggaggaagaagtattccgtttagcaggccactccttttatcttaattctcgcgatcagttagaacgtgtgttgttcgatgaacttggtctccctcctatcggcaagacagagaagaccggtaaacgtagcacttcagcggcggttttagaagctcttcgcgaagtccatcccattgtggacaagatcttgcagtaccgcgaactcgcgaaattgaaaggcacctatattgaccctcttccggcattagtccacccgaaaacgggacgcctccatacccgcttcaaccaaacagccacggcgaccggtcgtttgtcctcctctgatccaaaccttcagaatattccagtacgtaccccattgggccagaagatccgccgcgcgtttgtagctgaggagggttggcgtttagtggccctcgattatagccaaattgaattacgtgtccttgcccatctttctggcgatgagaacctcatccgcgtgtttcaggaaggcaaagacattcacactcaaacggcaagctggatgtttggattatcagctgaagcgatcgatcctttgatgcgtcgtgcagcgaagaccatcaatttcggtgttctctacggtatgagtgcccatcgtttgtcgcaggaattaggcattccctatgaagaagctgcggcgttcattcagcgctactttcaaagctatcccaaagttaaagcatggatcgagaagactctcgaagaaggccgcacacgtggttacgtagagaccttatttggacgtcgccgctatgttcccgatttaaacgctcgcgtgaaatctgtccgtgaagccgccgaacgcatggcgttcaacatgcctgtacagggcacggcagctgacctcatgaaacttgcaatggtgcgcctttttccacaattgcgtgaagttggtgcccgcatgctcttgcaggtccacgatgaactcttgttagaagcgccaaaagagcgtgcggaagaggtggcagccctcgcgaaagaggttatggaaggcgtgtggcccttagcggtgcctcttgaagtcgaagttggtattggcgaggattggttggctgccaaaggataatga

SEQ ID NO: 2004 - protein, 841 aa, synthetic construct
  REGION 1..841: note = Variant of DNA polymerase I from Thermus sp. strain 2.9
MHHHHHHGGSGMLPLFEPKGRVLLVDGHHLAYRNFFALKGLTTSRGEPVQGVYGFAKSLLKALKEDGDVVIVVFDAKAPSFRHEAYEAYKAGRAPTPEDFPRQLALMKELVDLLGLERLEVPGFEADDVLATLAKKAEREGYEVQILTADRDLFQLLSPRISVLHPEGHRITPEWLWEKYGLRPEQWVDFRALAGDPSDNIPGVKGIGEKTALKLLKEWGSLENLLKNLDQVKPESVREKIRAHLEDLKLSRELSRVRTDLPLEVDFRGRREPDWEGLKAFLERLEFGSLLHEFGLLESPLPAEEAPWPPPEGAFLGYRLSRPEPMWAELLALAASAQGRVYRAEDPHGALRGLKEVRGLLAKDLAVVALREGLDLPPTDDPMLLAYLLDPSNTTPEGVARRYGGEWTEDAGERALLAERLHANLLGRLQGEERLLWLYEEVEKPLSRVLAHMEATGVKLDVAYLEALSLEVAAEMRRLEEEVFRLAGHSFYLNSRDQLERVLFDELGLPPIGKTEKTGKRSTSAAVLEALREVHPIVDKILQYRELAKLKGTYIDPLPALVHPKTGRLHTRFNQTATATGRLSSSDPNLQNIPVRTPLGQKIRRAFVAEEGWRLVALDYSQIELRVLAHLSGDENLIRVFQEGKDIHTQTASWMFGLSAEAIDPLMRRAAKTINFGVLYGMSAHRLSQELGIPYEEAAAFIQRYFQSYPKVKAWIEKTLEEGRTRGYVETLFGRRRYVPDLNARVKSVREAAERMAFNMPVQGTAADLMKLAMVRLFPQLREVGARMLLQVHDELLLEAPKERAEEVAALAKEVMEGVWPLAVPLEVEVGIGEDWLAAKG

SEQ ID NO: 2005 - DNA, 2529 bp, synthetic construct
  misc_feature 1..2529: note = Variant of DNA polymerase I from Thermus sp. strain 2.9
  source 1..2529: mol_type = other DNA
atgcaccatcatcatcatcatggcggtagcggcatgttaccgttgttcgaacctaaaggtcgcgtgcttctggttgatggccatcatctcgcgtatcgtaacttctttgccctgaaaaggttaaccaccagccgtggcgagccggtacagggtgtctacggctttgcaaagtcgctcctgaaagctctgaaagaagacggtgatgtggtgattgttgtctttgatgcgaaagcgccaagttttcgccacgaagcgtacgaagcttacaaagccgggcgtgctccaacgccggaagactttcctcgccaattggcgcttatgaaggaattagtggatttgcttggcctcgaacgcttggaagttcccggtttcgaggcagacgacgtattagcgactctcgcaaagaaagccgaacgtgagggctatgaagtccagatcttgacagcagatcgcgatcttttccagcttttatctccgcgcatctcggtgttacacccggaagggcatcgtatcaccccggaatggctctgggagaaatatggtttgcgtcccgaacaatgggtggattttcgcgccttagcaggcgatccgagcgacaatattccgggagttaaaggtatcggcgagaagacggcgctcaagctccttaaagaatgggggtcgttggagaacttgcttaagaatttagatcaggtcaaaccagagtcagtgcgtgagaagattcttgcacacctcgaagacctcaaattaagccgcgaattgtcccgtgtacgcaccgatttgccgctcgaagttgatttccgtggccgccgcgaacctgactgggagggtcttaaagcgtttttagagcgtcttgaatttggttcgctcttgcatgaattcggccttttagaaagcccgttaccagccgaagaagcaccttggccaccgcccgaaggcgcgtttttaggttaccgtttgagtcgcccggaaccgatgtgggccgaattattggctcttgcagcgtctgcccagggacgtgtgtatcgcgcggaagaccctcatggtgcgctccgcggcctcaaagaagtccgtggactccttgccaaagacttagctgttgttgcattgcgcgaaggtcttgatttacctccgactgatgatccaatgcttcttgcgtacctcttggacccgtcaaacacgacgcccgaaggcgtagcccgtcgttacggcggcgagtggaccgaagatgcaggcgagcgcgcgttattggccgaacgtttgcacgccaatttattaggacgtttgcaaggcgaggaacgtctcctctggctttacgaagaagtggagaaaccattgagtcgcgtgctcgcgcatatggaagctaccggtgtcaaattagacgtggcgtatttggaggcactcagccttgaagttgctgccgaaatgcgccgcttggaggaagaagtattccgtttagcaggccactccttttatcttaattctcgcgatcagttagaacgtgtgttgttcgatgaacttggtctccctcctatcggcaagacagagaagaccggtaaacgtagcacttcagcggcggttttagaagctcttcgcgaagtccatcccattgtggacaagatcttgcagtaccgcgaactcgcgaaattgaaaggcacctatattgaccctcttccggcattagtccacccgaaaacgggacgcctccatacccgcttcaaccaaacagccacggcgaccggtcgtttgtcctcctctgatccaaaccttcagaatattccagtacgtaccccattgggccagaagatccgccgcgcgtttgtagctgaggagggttggcgtttagtggccctcgattatagccaaattgaattacgtgtccttgcccatctttctggcgatgagaacctcatccgcgtgtttcaggaaggcaaagacattcacactcaaacggcaagctggatgtttggattatcagctgaagcgatcgatcctttgatgcgtcgtgcagcgaagaccatcaatttcggtgttctctacggtatgagtgcccatcgtttgtcgcaggaattaggcattccctatgaagaagctgcggcgttcattcagcgctactttcaaagctatcccaaagttaaagcatggatcgagaagactctcgaagaaggccgcacacgtggttacgtagagaccttatttggacgtcgccgctatgttcccgatttaaacgctcgcgtgaaatctgtccgtgaagccgccgaacgcatggcgttcaacatgcctgtacagggcacggcagctgacctcatgaaacttgcaatggtgcgcctttttccacaattgcgtgaagttggtgcccgcatgctcttgcaggtccacgatgaactcttgttagaagcgccaaaagagcgtgcggaagaggtggcagccctcgcgaaagaggttatggaaggcgtgtggcccttagcggtgcctcttgaagtcgaagttggtattggcgaggattggttggctgccaaaggataatga

SEQ ID NO: 2006 - protein, 841 aa, synthetic construct; identical to SEQ ID NO: 1910
  REGION 1..841: note = Variant of DNA polymerase I from Thermus sp. strain 2.9

SEQ ID NO: 2007 - DNA, 2529 bp, synthetic construct
  misc_feature 1..2529: note = Variant of DNA polymerase I from Thermus sp. strain 2.9
  source 1..2529: mol_type = other DNA
atgcaccatcatcatcatcatggcggtagcggcatgttaccgttgttcgaacctaaaggtcgcgtgcttctggttgatggccatcatctcgcgtatcgtaacttctttgccctgaaaggattaaccaccagccgtggcgagccggtacagggtgtctacggctttgcaaagtcgctcctgaaagctctgaaagaagacggtgatgtggtgattgttgtctttgatgcgaaagcgccaagttttcgccacgaagcgtacgaagcttacaaagccgggcgtgctccaacgccggaagactttcctcgccaattggcgcttatgaaggaattagtggatttgcttggcctcgaacgcttggaagttcccggtttcgaggcagacgacgtattagcgactctcgcaaagaaagccgaacgtgagggctatgaagtccagatcttgacagcagatcgcgatcttttccagcttttatctccgcgcatctcggtgttacacccggaagggcatcgtatcaccccggaatggctctgggagaaatatggtttgcgtcccgaacaatgggtggattttcgcgccttagcaggcgatccgagcgacaatattccgggagttaaaggtatcggcgagaagacggcgctcaagctccttaaagaatgggggtcgttggagaacttgcttaagaatttagatcaggtcaaaccagagtcagtgcgtgagaagattcttgcacacctcgaagacctcaaattaagccgcgaattgtcccgtgtacgcaccgatttgccgctcgaagttgatttccgtggccgccgcgaacctgactgggagggtcttaaagcgtttttagagcgtcttgaatttggttcgctcttgcatgaattcggccttttagaaagcccgttaccagccgaagaagcaccttggccaccgcccgaaggcgcgtttttaggttaccgtttgagtcgcccggaaccgatgtgggccgaattattggctcttgcagcgtctgcccagggacgtgtgtatcgcgcggaagaccctcatggtgcgctccgcggcctcaaagaagtccgtggactccttgccaaagacttagctgttgttgcattgcgcgaaggtcttgatttacctccgactgatgatccaatgcttcttgcgtacctcttggacccgtcaaacacgacgcccgaaggcgtagcccgtcgttacggcggcgagtggaccgaagatgcaggcgagcgcgcgttattggccgaacgtttgcacgccaatttattaggacgtttgcaaggcgaggaacgtctcctctggctttacgaagaagtggagaaaccattgagtcgcgtgctcgcgcatatggaagctaccggtgtcaaattagacgtggcgtatttggaggcactcagccttgaagttgctgccgaaatgcgccgcttggaggaagaagtattccgtttagcaggccactccttttatcttaattctcgcgatcagttagaacgtgtgttgttcgatgaacttggtctccctcctatcggcaagacagagaagaccggtaaacgtagcacttcagcggcggttttagaagctcttcgcgaagtccatcccattgtggacaagatcttgaggtaccgcgaactcgcgaaattgaaaggcacctatattgaccctcttccggcattagtccacccgaaaacgggacgcctccatacccgcttcaaccaaacagccacggcgaccggtcgtttgtcctcctctgatccaaaccttcagaatattccagtacgtaccccattgggccagaagatccgccgcgcgtttgtagctgaggagggttggcgtttagtggccctcgattatagccaaattgaattacgtgtccttgcccatctttctggcgatgagaacctcatccgcgtgtttcaggaaggcaaagacattcacactcaaacggcaagctggatgtttggattatcagctgaagcgatcgatcctttgatgcgtcgtgcagcgaagaccatcaatttcggtgttctctacggtatgagtgcccatcgtttgtcgcaggaattaggcattccctatgaagaagctgcggcgttcattcagcgctactttcaaagctatcccaaagttaaagcatggatcgagaagactctcgaagaaggccgcacacgtggttacgtagagaccttatttggacgtcgccgctatgttcccgatttaaacgctcgcgtgaaatctgtccgtgaagccgccgaacgcatggcgttcaacatgcctgtacagggcacggcagctgacctcatgaaacttgcaatggtgcgcctttttccacaattgcgtgaagttggtgcccgcatgctcttgcaggtccacgatgaactcttgttagaagcgccaaaagagcgtgcggaagaggtggcagccctcgcgaaagaggttatggaaggcgtgtggcccttagcggtgcctcttgaagtcgaagttggtattggcgaggattggttggctgccaaaggataatga

SEQ ID NO: 2008 - protein, 841 aa, synthetic construct
  REGION 1..841: note = Variant of DNA polymerase I from Thermus sp. strain 2.9
MHHHHHHGGSGMLPLFEPKGRVLLVDGHHLAYRNFFALKGLTTSRGEPVQGVYGFAKSLLKALKEDGDVVIVVFDAKAPSFRHEAYEAYKAGRAPTPEDFPRQLALMKELVDLLGLERLEVPGFEADDVLATLAKKAEREGYEVQILTADRDLFQLLSPRISVLHPEGHRITPEWLWEKYGLRPEQWVDFRALAGDPSDNIPGVKGIGEKTALKLLKEWGSLENLLKNLDQVKPESVREKILAHLEDLKLSRELSRVRTDLPLEVDFRGRREPDWEGLKAFLERLEFGSLLHEFGLLESPLPAEEAPWPPPEGAFLGYRLSRPEPMWAELLALAASAQGRVYRAEDPHGALRGLKEVRGLLAKDLAVVALREGLDLPPTDDPMLLAYLLDPSNTTPEGVARRYGGEWTEDAGERALLAERLHANLLGRLQGEERLLWLYEEVEKPLSRVLAHMEATGVKLDVAYLEALSLEVAAEMRRLEEEVFRLAGHSFYLNSRDQLERVLFDELGLPPIGKTEKTGKRSTSAAVLEALREVHPIVDKILRYRELAKLKGTYIDPLPALVHPKTGRLHTRFNQTATATGRLSSSDPNLQNIPVRTPLGQKIRRAFVAEEGWRLVALDYSQIELRVLAHLSGDENLIRVFQEGKDIHTQTASWMFGLSAEAIDPLMRRAAKTINFGVLYGMSAHRLSQELGIPYEEAAAFIQRYFQSYPKVKAWIEKTLEEGRTRGYVETLFGRRRYVPDLNARVKSVREAAERMAFNMPVQGTAADLMKLAMVRLFPQLREVGARMLLQVHDELLLEAPKERAEEVAALAKEVMEGVWPLAVPLEVEVGIGEDWLAAKG

SEQ ID NO: 2009 - DNA, 2529 bp, synthetic construct
  misc_feature 1..2529: note = Variant of DNA polymerase I from Thermus sp. strain 2.9
  source 1..2529: mol_type = other DNA
atgcaccatcatcatcatcatggcggtagcggcatgttaccgttgttcgaacctaaaggtcgcgtgcttctggttgatggccatcatctcgcgtatcgtaacttctttgccctgaaaggattaaccaccagccgtggcgagccggtacagggtgtctacggctttgcaaagtcgctcctgaaagctctgaaagaagacggtgatgtggtgattgttgtctttgatgcgaaagcgccaagttttcgccacgaagcgtacgaagcttacaaagccgggcgtgctccaacgccggaagactttcctcgccaattggcgcttatgaaggaattagtggatttgcttggcctcgaacgcttggaagttcccggtttcgaggcagacgacgtattagcgactctcgcaaagaaagccgaacgtgagggctatgaagtccagatcttgacagcagatcgcgatcttttccagcttttatctccgcgcatctcggtgttacacccggaagggcatcgtatcaccccggaatggctctgggagaaatatggtttgcgtcccgaacaatgggtggattttcgcgccttagcaggcgatccgagcgacaatattccgggagttaaaggtatcggcgagaagacggcgctcaagctccttaaagaatgggggtcgttggagaacttgcttaagaatttagatcaggtcaaaccagagtcagtgcgtgagaagattcttgcacacctcgaagacctcaaattaagccgcgaattgtcccgtgtacgcaccgatttgccgctcgaagttgatttccgtggccgccgcgaacctgactgggagggtcttaaagcgtttttagagcgtcttgaatttggttcgctcttgcatgaattcggccttttagaaagcccgttaccagccgaagaagcaccttggccaccgcccgaaggcgcgtttttaggttaccgtttgagtcgcccggaaccgatgtgggccgaattattggctcttgcagcgtctgcccagggacgtgtgtatcgcgcggaagaccctcatggtgcgctccgcggcctcaaagaagtccgtggactccttgccaaagacttagctgttgttgcattgcgcgaaggtcttgatttacctccgactgatgatccaatgcttcttgcgtacctcttggacccgtcaaacacgacgcccgaaggcgtagcccgtcgttacggcggcgagtggaccgaagatgcaggcgagcgcgcgttattggccgaacgtttgcacgccaatttattaggacgtttgcaaggcgaggaacgtctcctctggctttacgaagaagtggagaaaccattgagtcgcgtgctcgcgcatatggaagctaccggtgtcaaattagacgtggcgtatttggaggcactcagccttgaagttgctgccgaaatgcgccgcttggaggaagaagtattccgtttagcaggccactccttttatcttaattctcgcgatcagttagaacgtgtgttgttcgatgaacttggtctccctcctatcggcaagacagagaagaccggtaaacgtagcacttcagcggcggttttagaagctcttcgcgaagtccatcccattgtggacaagatcttgcagtaccgcgaactcgcgaaattgaaaggcacctatattgaccctcttccggcattagtccacccgaaaacgggacgcctccatacccgcttcaaccaaacagccacggcgaccggtcgtttgtcctcctctgatccaaaccttcagaatattccagtacgtaccccattgggccagaagatccgccgcgcgtttgtagctgaggagggttggcgtttagtggccctcgattatagccaaattgaattacgtgtccttgcccatctttctggcgatgagaacctcatccgcgtgtttcaggaaggcaaagacattcacactcaaacggcaagctggatgtttggattatcagctgaagcgatcgatcctttgatgcgtcgtgcagcgaagaccatcaatttcggtgttctctacggtatgagtgcccatcgtttgtcgcaggaattaggcattccctatgaagaagctgcggcgttcattcagcgctactttcaaagctatcccaaagttaaagcatggatcgagaagactctcgaagaaggccgcacacgtggttacgtagagaccttatttggacgtcgccgctatgttctggatttaaacgctcgcgtgaaatctgtccgtgaagccgccgaacgcatggcgttcaacatgcctgtacagggcacggcagctgacctcatgaaacttgcaatggtgcgcctttttccacaattgcgtgaagttggtgcccgcatgctcttgcaggtccacgatgaactcttgttagaagcgccaaaagagcgtgcggaagaggtggcagccctcgcgaaagaggttatggaaggcgtgtggcccttagcggtgcctcttgaagtcgaagttggtattggcgaggattggttggctgccaaaggataatga

SEQ ID NO: 2010 - protein, 841 aa, synthetic construct
  REGION 1..841: note = Variant of DNA polymerase I from Thermus sp. strain 2.9
MHHHHHHGGSGMLPLFEPKGRVLLVDGHHLAYRNFFALKGLTTSRGEPVQGVYGFAKSLLKALKEDGDVVIVVFDAKAPSFRHEAYEAYKAGRAPTPEDFPRQLALMKELVDLLGLERLEVPGFEADDVLATLAKKAEREGYEVQILTADRDLFQLLSPRISVLHPEGHRITPEWLWEKYGLRPEQWVDFRALAGDPSDNIPGVKGIGEKTALKLLKEWGSLENLLKNLDQVKPESVREKILAHLEDLKLSRELSRVRTDLPLEVDFRGRREPDWEGLKAFLERLEFGSLLHEFGLLESPLPAEEAPWPPPEGAFLGYRLSRPEPMWAELLALAASAQGRVYRAEDPHGALRGLKEVRGLLAKDLAVVALREGLDLPPTDDPMLLAYLLDPSNTTPEGVARRYGGEWTEDAGERALLAERLHANLLGRLQGEERLLWLYEEVEKPLSRVLAHMEATGVKLDVAYLEALSLEVAAEMRRLEEEVFRLAGHSFYLNSRDQLERVLFDELGLPPIGKTEKTGKRSTSAAVLEALREVHPIVDKILQYRELAKLKGTYIDPLPALVHPKTGRLHTRFNQTATATGRLSSSDPNLQNIPVRTPLGQKIRRAFVAEEGWRLVALDYSQIELRVLAHLSGDENLIRVFQEGKDIHTQTASWMFGLSAEAIDPLMRRAAKTINFGVLYGMSAHRLSQELGIPYEEAAAFIQRYFQSYPKVKAWIEKTLEEGRTRGYVETLFGRRRYVLDLNARVKSVREAAERMAFNMPVQGTAADLMKLAMVRLFPQLREVGARMLLQVHDELLLEAPKERAEEVAALAKEVMEGVWPLAVPLEVEVGIGEDWLAAKG

SEQ ID NO: 2011 - DNA, 2529 bp, synthetic construct
  misc_feature 1..2529: note = Variant of DNA polymerase I from Thermus sp. strain 2.9
  source 1..2529: mol_type = other DNA
atgcaccatcatcatcatcatggcggtagcggcatgttaccgttgttcgaacctaaaggtcgcgtgcttctggttgatggccatcatctcgcgtatcgtaacttctttgccctgaaaggattaaccaccagccgtggcgagccggtacagggtgtctacggctttgcaaagtcgctcctgaaagctctgaaagaagacggtgatgtggtgattgttgtctttgatgcgaaagcgccaagttttcgccacgaagcgtacgaagcttacaaagccgggcgtgctccaacgccggaagactttcctcgccaattggcgcttatgaaggaattagtggatttgcttggcctcgaacgcttggaagttcccggtttcgaggcagacgacgtattagcgactctcgcaaagaaagccgaacgtgagggctatgaagtccagatcttgacagcagatcgcgatcttttccagcttttatctccgcgcatctcggtgttacacccggaagggcatcgtatcaccccggaatggctctgggagaaatatggtttgcgtcccgaacaatgggtggattttcgcgccttagcaggcgatccgagcgacaatattccgggagttaaaggtatcggcgagaagacggcgctcaagctccttaaagaatgggggtcgttggagaacttgcttaagaatttagatcaggtcaaaccagagtcagtgcgtgagaagattcttgcacacctcgaagacctcaaattaagccgcgaattgtcccgtgtacgcaccgatttgccgctcgaagttgatttccgtggccgccgcgaacctgactgggagggtcttaaagcgtttttagagcgtcttgaatttggttcgctcttgcatgaattcggccttttagaaagcccgttaccagccgaagaagcaccttggccaccgcccgaaggcgcgtttttaggttaccgtttgagtcgcccggaaccgatgtgggccgaattattggctcttgcagcgtctgcccagggacgtgtgtatcgcgcggaagaccctcatggtgcgctccgcggcctcaaagaagtccgtggactccttgccaaagacttagctgttgttgcattgcgcgaaggtcttgatttacctccgactgatgatccaatgcttcttgcgtacctcttggacccgtcaaacacgacgcccgaaggcgtagcccgtcgttacggcggcgagtggaccgaagatgcaggcgagcgcgcgttattggccgaacgtttgcacgccaatttattaggacgtttgcaaggcgaggaacgtctcctctggctttacgaagaagtggagaaaccattgagtcgcgtgctcgcgcatatggaagctaccggtgtcaaattagacgtggcgtatttggaggcactcagccttgaagttgctgccgaaatgcgccgcttggaggaagaagtattccgtttagcaggccactccttttatcttaattctcgcgatcagttagaacgtgtgttgttcgatgaacttggtctccctcctatcggcaagacagagaagaccggtaaacgtagcacttcagcggcggttttagaagctcttcgcgaagtccatcccattgtggacaagatcttgcagtaccgcgaactcgcgaaattgaaaggcacctatattgaccctcttccggcattagtccacccgaaaacgggacgcctccatacccgcttcaaccaaacagccacggcgaccggtcgtttgtcctcctctgatccaaaccttcagaatattccagtacgtaccccattgggccagaagatccgccgcgcgtttgtagctgaggagggttggcgtttagtggccctcgattatagccaaattgaattacgtgtccttgcccatctttctggcgatgagaacctcatccgcgtgtttcaggaaggcaaagacattcacactcaaacggcaagctggatgtttggacagtcagctgaagcgatcgatcctttgatgcgtcgtgcagcgaagaccatcaatttcggtgttctctacggtatgagtgcccatcgtttgtcgcaggaattaggcattccctatgaagaagctgcggcgttcattcagcgctactttcaaagctatcccaaagttaaagcatggatcgagaagactctcgaagaaggccgcacacgtggttacgtagagaccttatttggacgtcgccgctatgttcccgatttaaacgctcgcgtgaaatctgtccgtgaagccgccgaacgcatggcgttcaacatgcctgtacagggcacggcagctgacctcatgaaacttgcaatggtgcgcctttttccacaattgcgtgaagttggtgcccgcatgctcttgcaggtccacgatgaactcttgttagaagcgccaaaagagcgtgcggaagaggtggcagccctcgcgaaagaggttatggaaggcgtgtggcccttagcggtgcctcttgaagtcgaagttggtattggcgaggattggttggctgccaaaggataatga

SEQ ID NO: 2012 - protein, 841 aa, synthetic construct
  REGION 1..841: note = Variant of DNA polymerase I from Thermus sp. strain 2.9
MHHHHHHGGSGMLPLFEPKGRVLLVDGHHLAYRNFFALKGLTTSRGEPVQGVYGFAKSLLKALKEDGDVVIVVFDAKAPSFRHEAYEAYKAGRAPTPEDFPRQLALMKELVDLLGLERLEVPGFEADDVLATLAKKAEREGYEVQILTADRDLFQLLSPRISVLHPEGHRITPEWLWEKYGLRPEQWVDFRALAGDPSDNIPGVKGIGEKTALKLLKEWGSLENLLKNLDQVKPESVREKILAHLEDLKLSRELSRVRTDLPLEVDFRGRREPDWEGLKAFLERLEFGSLLHEFGLLESPLPAEEAPWPPPEGAFLGYRLSRPEPMWAELLALAASAQGRVYRAEDPHGALRGLKEVRGLLAKDLAVVALREGLDLPPTDDPMLLAYLLDPSNTTPEGVARRYGGEWTEDAGERALLAERLHANLLGRLQGEERLLWLYEEVEKPLSRVLAHMEATGVKLDVAYLEALSLEVAAEMRRLEEEVFRLAGHSFYLNSRDQLERVLFDELGLPPIGKTEKTGKRSTSAAVLEALREVHPIVDKILQYRELAKLKGTYIDPLPALVHPKTGRLHTRFNQTATATGRLSSSDPNLQNIPVRTPLGQKIRRAFVAEEGWRLVALDYSQIELRVLAHLSGDENLIRVFQEGKDIHTQTASWMFGQSAEAIDPLMRRAAKTINFGVLYGMSAHRLSQELGIPYEEAAAFIQRYFQSYPKVKAWIEKTLEEGRTRGYVETLFGRRRYVPDLNARVKSVREAAERMAFNMPVQGTAADLMKLAMVRLFPQLREVGARMLLQVHDELLLEAPKERAEEVAALAKEVMEGVWPLAVPLEVEVGIGEDWLAAKG

SEQ ID NO: 2013 - DNA, 2529 bp, synthetic construct
  misc_feature 1..2529: note = Variant of DNA polymerase I from Thermus sp. strain 2.9
  source 1..2529: mol_type = other DNA
atgcaccatcatcatcatcatggcggtagcggcatgttaccgttgttcgaacctaaaggtcgcgtgcttctggttgatggccatcatctcgcgtatcgtaacttctttgccctgaaaggattaaccaccagccgtggcgagccggtacagggtgtctacggctttgcaaagtcgctcctgaaagctctgaaagaagacggtgatgtggtgattgttgtctttgatgcgaaagcgccaagttttcgccacgaagcgtacgaagcttacaaagccgggcgtgctccaacgccggaagactttcctcgccaattggcgcttatgaaggaattagtggatttgcttggcctcgaacgcttggaagttcccggtttcgaggcagacgacgtattagcgactctcgcaaagaaagccgaacgtgagggctatgaagtccagatcttgacagcagatcgcgatcttttccagcttttatctccgcgcatctcggtgttacacccggaagggcatcgtatcaccccggaatggctctgggagaaatatggtttgcgtcccgaacaatgggtggattttcgcgccttagcaggcgatccgagcgacaatattccgggagttaaaggtatcggcgagaagacggcgctcaagctccttaaagaatgggggtcgttggagaacttgcttaagaatttagatcaggtcaaaccagagtcagtgcgtgagaagattcttgcacacctcgaagacctcaaattaagccgcgaattgtcccgtgtacgcaccgatttgccgctcgaagttgatttccgtggccgccgcgaacctgactgggagggtcttaaagcgtttttagagcgtcttgaatttggttcgctcttgcatgaattcggccttttagaaagcccgttaccagccgaagaagcaccttggccaccgcccgaaggcgcgtttttaggttaccgtttgagtcgcccggaaccgatgtgggccgaattattggctcttgcagcgtctgcccagggacgtgtgtatcgcgcggaagaccctcatggtgcgctccgcggcctcaaagaagtccgtggactccttgccaaagacttagctgttgttgcattgcgcgaaggtcttgatttacctccgactgatgatccaatgcttcttgcgtacctcttggacccgtcaaacacgacgcccgaaggcgtagcccgtcgttacggcggcgagtggaccgaagatgcaggcgagcgcgcgttattggccgaacgtttgcacgccaatttattaggacgtttgcaaggcgaggaacgtctcctctggctttacgaagaagtggagaaaccattgagtcgcgtgctcgcgcatatggaagctaccggtgtcaaattagacgtggcgtatttggaggcactcagccttgaagttgctgccgaaatgcgccgcttggaggaagaagtattccgtttagcaggccactccttttatcttaattctcgcgatcagttagaacgtgtgttgttcgatgaacttggtctccctcctatcggcaagacagagaagaccggtaaacgtagcacttcagcggcggttttagaagctcttcgcgaagtccatcccattgtggacaagatcttgcagtaccgcgaactcgcgaaattgaaaggcacctatattgaccctcttccggcattagtccacccgaaaacgggacgcctccatacccgcttcaaccaaacagccacggcgaccggtcgtttgtcctcctctgatccaaaccttcagaatattccagtacgtaccccattgggccagaagatccgccgcgcgtttgtagctgaggagggttggcgtttagtggccctcgattatagccaaattgaattacgtgtccttgcccatctttctggcgatgagaacctcatccgcgtgtttcaggaaggcaaagacattcacactcaaacggcaagctggatgtttggattatcagctgaagcgatcgatcctttgatgcgtcgtgcagcgaagaccatcaatttcggtgttctctacggtatgagtgcctttcgtttgtcgcaggaattaggcattccctatgaagaagctgcggcgttcattcagcgctactttcaaagctatcccaaagttaaagcatggatcgagaagactctcgaagaaggccgcacacgtggttacgtagagaccttatttggacgtcgccgctatgttcccgatttaaacgctcgcgtgaaatctgtccgtgaagccgccgaacgcatggcgttcaacatgcctgtacagggcacggcagctgacctcatgaaacttgcaatggtgcgcctttttccacaattgcgtgaagttggtgcccgcatgctcttgcaggtccacgatgaactcttgttagaagcgccaaaagagcgtgcggaagaggtggcagccctcgcgaaagaggttatggaaggcgtgtggcccttagcggtgcctcttgaagtcgaagttggtattggcgaggattggttggctgccaaaggataatga

SEQ ID NO: 2014 - protein, 841 aa, synthetic construct
  REGION 1..841: note = Variant of DNA polymerase I from Thermus sp. strain 2.9
MHHHHHHGGSGMLPLFEPKGRVLLVDGHHLAYRNFFALKGLTTSRGEPVQGVYGFAKSLLKALKEDGDVVIVVFDAKAPSFRHEAYEAYKAGRAPTPEDFPRQLALMKELVDLLGLERLEVPGFEADDVLATLAKKAEREGYEVQILTADRDLFQLLSPRISVLHPEGHRITPEWLWEKYGLRPEQWVDFRALAGDPSDNIPGVKGIGEKTALKLLKEWGSLENLLKNLDQVKPESVREKILAHLEDLKLSRELSRVRTDLPLEVDFRGRREPDWEGLKAFLERLEFGSLLHEFGLLESPLPAEEAPWPPPEGAFLGYRLSRPEPMWAELLALAASAQGRVYRAEDPHGALRGLKEVRGLLAKDLAVVALREGLDLPPTDDPMLLAYLLDPSNTTPEGVARRYGGEWTEDAGERALLAERLHANLLGRLQGEERLLWLYEEVEKPLSRVLAHMEATGVKLDVAYLEALSLEVAAEMRRLEEEVFRLAGHSFYLNSRDQLERVLFDELGLPPIGKTEKTGKRSTSAAVLEALREVHPIVDKILQYRELAKLKGTYIDPLPALVHPKTGRLHTRFNQTATATGRLSSSDPNLQNIPVRTPLGQKIRRAFVAEEGWRLVALDYSQIELRVLAHLSGDENLIRVFQEGKDIHTQTASWMFGLSAEAIDPLMRRAAKTINFGVLYGMSAFRLSQELGIPYEEAAAFIQRYFQSYPKVKAWIEKTLEEGRTRGYVETLFGRRRYVPDLNARVKSVREAAERMAFNMPVQGTAADLMKLAMVRLFPQLREVGARMLLQVHDELLLEAPKERAEEVAALAKEVMEGVWPLAVPLEVEVGIGEDWLAAKG

SEQ ID NO: 2015 - DNA, 2529 bp, synthetic construct
  misc_feature 1..2529: note = Variant of DNA polymerase I from Thermus sp. strain 2.9
  source 1..2529: mol_type = other DNA
atgcaccatcatcatcatcatggcggtagcggcatgttaccgttgttcgaacctaaaggtcgcgtgcttctggttgatggccatcatctcgcgtatcgtaacttctttgccctgaaaggattaaccaccagccgtggcgagccggtacagggtgtctacggctttgcaaagtcgctcctgaaagctctgaaagaagacggtgatgtggtgattgttgtctttgatgcgaaagcgccaagttttcgccacgaagcgtacgaagcttacaaagccgggcgtgctccaacgccggaagactttcctcgccaattggcgcttatgaaggaattagtggatttgcttggcctcgaacgcttggaagttcccggtttcgaggcagacgacgtattagcgactctcgcaaagaaagccgaacgtgagggctatgaagtccagatcttgacagcagatcgcgatcttttccagcttttatctccgcgcatctcggtgttacacccggaagggcatcgtatcaccccggaatggctctgggagaaatatggtttgcgtcccgaacaatgggtggattttcgcgccttagcaggcgatccgagcgacaatattccgggagttaaaggtatcggcgagaagacggcgctcaagctccttaaagaatgggggtcgttggagaacttgcttaagaatttagatcaggtcaaaccagagtcagtgcgtgagaagattcttgcacacctcgaagacctcaaattaagccgcgaattgtcccgtgtacgcaccgatttgccgctcgaagttgatttccgtggccgccgcgaacctgactgggagggtcttaaagcgtttttagagcgtcttgaatttggttcgctcttgcatgaattcggccttttagaaagcccgttaccagccgaagaagcaccttggccaccgcccgaaggcgcgtttttaggttaccgtttgagtcgcccggaaccgatgtgggccgaattattggctcttgcagcgtctgcccagggacgtgtgtatcgcgcggaagaccctcatggtgcgctccgcggcctcaaagaagtccgtggactccttgccaaagacttagctgttgttgcattgcgcgaaggtcttgatttacctccgactgatgatccaatgcttcttgcgtacctcttggacccgtcaaacacgacgcccgaaggcgtagcccgtcgttacggcggcgagtggaccgaagatgcaggcgagcgcgcgttattggccgaacgtttgcacgccaatttattaggacgtttgcaaggcgaggaacgtctcctctggctttacgaaagggtggagaaaccattgagtcgcgtgctcgcgcatatggaagctaccggtgtcaaattagacgtggcgtatttggaggcactcagccttgaagttgctgccgaaatgcgccgcttggaggaagaagtattccgtttagcaggccactccttttatcttaattctcgcgatcagttagaacgtgtgttgttcgatgaacttggtctccctcctatcggcaagacagagaagaccggtaaacgtagcacttcagcggcggttttagaagctcttcgcgaagtccatcccattgtggacaagatcttgcagtaccgcgaactcgcgaaattgaaaggcacctatattgaccctcttccggcattagtccacccgaaaacgggacgcctccatacccgcttcaaccaaacagccacggcgaccggtcgtttgtcctcctctgatccaaaccttcagaatattccagtacgtaccccattgggccagaagatccgccgcgcgtttgtagctgaggagggttggcgtttagtggccctcgattatagccaaattgaattacgtgtccttgcccatctttctggcgatgagaacctcatccgcgtgtttcaggaaggcaaagacattcacactcaaacggcaagctggatgtttggattatcagctgaagcgatcgatcctttgatgcgtcgtgcagcgaagaccatcaatttcggtgttctctacggtatgagtgcccatcgtttgtcgcaggaattaggcattccctatgaagaagctgcggcgttcattcagcgctactttcaaagctatcccaaagttaaagcatggatcgagaagactctcgaagaaggccgcacacgtggttacgtagagaccttatttggacgtcgccgctatgttcccgatttaaacgctcgcgtgaaatctgtccgtgaagccgccgaacgcatggcgttcaacatgcctgtacagggcacggcagctgacctcatgaaacttgcaatggtgcgcctttttccacaattgcgtgaagttggtgcccgcatgctcttgcaggtccacgatgaactcttgttagaagcgccaaaagagcgtgcggaagaggtggcagccctcgcgaaagaggttatggaaggcgtgtggcccttagcggtgcctcttgaagtcgaagttggtattggcgaggattggttggctgccaaaggataatga

SEQ ID NO: 2016 - protein, 841 aa, synthetic construct
  REGION 1..841: note = Variant of DNA polymerase I from Thermus sp. strain 2.9
MHHHHHHGGSGMLPLFEPKGRVLLVDGHHLAYRNFFALKGLTTSRGEPVQGVYGFAKSLLKALKEDGDVVIVVFDAKAPSFRHEAYEAYKAGRAPTPEDFPRQLALMKELVDLLGLERLEVPGFEADDVLATLAKKAEREGYEVQILTADRDLFQLLSPRISVLHPEGHRITPEWLWEKYGLRPEQWVDFRALAGDPSDNIPGVKGIGEKTALKLLKEWGSLENLLKNLDQVKPESVREKILAHLEDLKLSRELSRVRTDLPLEVDFRGRREPDWEGLKAFLERLEFGSLLHEFGLLESPLPAEEAPWPPPEGAFLGYRLSRPEPMWAELLALAASAQGRVYRAEDPHGALRGLKEVRGLLAKDLAVVALREGLDLPPTDDPMLLAYLLDPSNTTPEGVARRYGGEWTEDAGERALLAERLHANLLGRLQGEERLLWLYERVEKPLSRVLAHMEATGVKLDVAYLEALSLEVAAEMRRLEEEVFRLAGHSFYLNSRDQLERVLFDELGLPPIGKTEKTGKRSTSAAVLEALREVHPIVDKILQYRELAKLKGTYIDPLPALVHPKTGRLHTRFNQTATATGRLSSSDPNLQNIPVRTPLGQKIRRAFVAEEGWRLVALDYSQIELRVLAHLSGDENLIRVFQEGKDIHTQTASWMFGLSAEAIDPLMRRAAKTINFGVLYGMSAHRLSQELGIPYEEAAAFIQRYFQSYPKVKAWIEKTLEEGRTRGYVETLFGRRRYVPDLNARVKSVREAAERMAFNMPVQGTAADLMKLAMVRLFPQLREVGARMLLQVHDELLLEAPKERAEEVAALAKEVMEGVWPLAVPLEVEVGIGEDWLAAKG

SEQ ID NO: 2017 - DNA, 2529 bp, synthetic construct
  misc_feature 1..2529: note = Variant of DNA polymerase I from Thermus sp. strain 2.9
  source 1..2529: mol_type = other DNA
atgcaccatcatcatcatcatggcggtagcggcatgttaccgttgttcgaacctaaaggtcgcgtgcttctggttgatggccatcatctcgcgtatcgtaacttctttgccctgaaaggattaaccaccagccgtggcgagccggtacagggtgtctacggctttgcaaagtcgctcctgaaagctctgaaagaagacggtgatgtggtgattgttgtctttgatgcgaaagcgccaagttttcgccacgaagcgtacgaagcttacaaagccgggcgtgctccaacgccggaagactttcctcgccaattggcgcttatgaaggaattagtggatttgcttggcctcgaacgcttggaagttcccggtttcgaggcagacgacgtattagcgactctcgcaaagaaagccgaacgtgagggctatgaagtccagatcttgacagcagatcgcgatcttttccagcttttatctccgcgcatctcggtgttacacccggaagggcatcgtatcaccccggaatggctctgggagaaatatggtttgcgtcccgaacaatgggtggattttcgcgccttagcaggcgatccgagcgacaatattccgggagttaaaggtatcggcgagaagacggcgctcaagctccttaaagaatgggggtcgttggagaacttgcttaagaatttagatcaggtcaaaccagagtcagtgcgtgagaagattcttgcacacctcgaagacctcaaattaagccgcgaattgtcccgtgtacgcaccgatttgccgctcgaagttgatttccgtggccgccgcgaacctgactgggagggtcttaaagcgtttttagagcgtcttgaatttggttcgctcttgcatgaattcggccttttagaaagccggttaccagccgaagaagcaccttggccaccgcccgaaggcgcgtttttaggttaccgtttgagtcgcccggaaccgatgtgggccgaattattggctcttgcagcgtctgcccagggacgtgtgtatcgcgcggaagaccctcatggtgcgctccgcggcctcaaagaagtccgtggactccttgccaaagacttagctgttgttgcattgcgcgaaggtcttgatttacctccgactgatgatccaatgcttcttgcgtacctcttggacccgtcaaacacgacgcccgaaggcgtagcccgtcgttacggcggcgagtggaccgaagatgcaggcgagcgcgcgttattggccgaacgtttgcacgccaatttattaggacgtttgcaaggcgaggaacgtctcctctggctttacgaagaagtggagaaaccattgagtcgcgtgctcgcgcatatggaagctaccggtgtcaaattagacgtggcgtatttggaggcactcagccttgaagttgctgccgaaatgcgccgcttggaggaagaagtattccgtttagcaggccactccttttatcttaattctcgcgatcagttagaacgtgtgttgttcgatgaacttggtctccctcctatcggcaagacagagaagaccggtaaacgtagcacttcagcggcggttttagaagctcttcgcgaagtccatcccattgtggacaagatcttgcagtaccgcgaactcgcgaaattgaaaggcacctatattgaccctcttccggcattagtccacccgaaaacgggacgcctccatacccgcttcaaccaaacagccacggcgaccggtcgtttgtcctcctctgatccaaaccttcagaatattccagtacgtaccccattgggccagaagatccgccgcgcgtttgtagctgaggagggttggcgtttagtggccctcgattatagccaaattgaattacgtgtccttgcccatctttctggcgatgagaacctcatccgcgtgtttcaggaaggcaaagacattcacactcaaacggcaagctggatgtttggattatcagctgaagcgatcgatcctttgatgcgtcgtgcagcgaagaccatcaatttcggtgttctctacggtatgagtgcccatcgtttgtcgcaggaattaggcattccctatgaagaagctgcggcgttcattcagcgctactttcaaagctatcccaaagttaaagcatggatcgagaagactctcgaagaaggccgcacacgtggttacgtagagaccttatttggacgtcgccgctatgttcccgatttaaacgctcgcgtgaaatctgtccgtgaagccgccgaacgcatggcgttcaacatgcctgtacagggcacggcagctgacctcatgaaacttgcaatggtgcgcctttttccacaattgcgtgaagttggtgcccgcatgctcttgcaggtccacgatgaactcttgttagaagcgccaaaagagcgtgcggaagaggtggcagccctcgcgaaagaggttatggaaggcgtgtggcccttagcggtgcctcttgaagtcgaagttggtattggcgaggattggttggctgccaaaggataatga

SEQ ID NO: 2018 - protein, 841 aa, synthetic construct; identical to SEQ ID NO: 1702
  REGION 1..841: note = Variant of DNA polymerase I from Thermus sp. strain 2.9

SEQ ID NO: 2019 - DNA, 2529 bp, synthetic construct
  misc_feature 1..2529: note = Variant of DNA polymerase I from Thermus sp. strain 2.9
  source 1..2529: mol_type = other DNA
atgcaccatcatcatcatcatggcggtagcggcatgttaccgttgttcgaacctaaaggtcgcgtgcttctggttgatggccatcatctcgcgtatcgtaacttctttgccctgaaaggattaaccaccagccgtggcgagccggtacagggtgtctacggctttgcaaagtcgctcctgaaagctctgaaagaagacggtgatgtggtgattgttgtctttgatgcgaaagcgccaagttttcgccacgaagcgtacgaagcttacaaagccgggcgtgctccaacgccggaagactttcctcgccaattggcgcttatgaaggaattagtggatttgcttggcctcgaacgcttggaagttcccggtttcgaggcagacgacgtattagcgactctcgcaaagaaagccgaacgtgagggctatgaagtccagatcttgacagcagatcgcgatcttttccagcttttatctccgcgcatctcggtgttacacccggaagggcatcgtatcaccccggaatggctctgggagaaatatggtttgcgtcccgaacaatgggtggattttcgcgccttagcaggcgatccgagcgacaatattccgggagttaaaggtatcggcgagaagacggcgctcaagctccttaaagaatgggggtcgttggagaacttgcttaagaatttagatcaggtcaaaccagagtcagtgcgtgagaagattcttgcacacctcgaagacctcaaattaagccgcgaattgtcccgtgtacgcaccgatttgccgctcgaagttgatttccgtggccgccgcgaacctgactgggagggtcttaaagcgtttttagagcgtcttgaatttggttcgctcttgcatgaattcggccttttagaaagcccgttaccagccgaagaagcaccttggccaccgcccgaaggcgcgtttttaggttaccgtttgagtcgcccggaaccgatgtgggccgaattattggctcttgcagcgtctgcccagggacgtgtgtatcgcgcggaagaccctcatggtgcgctccgcggcctcaaagaagtccgtggactccttgccaaagacttagctgttgttgcattgcgcgaaggtcttgagttacctccgactgatgatccaatgcttcttgcgtacctcttggacccgtcaaacacgacgcccgaaggcgtagcccgtcgttacggcggcgagtggaccgaagatgcaggcgagcgcgcgttattggccgaacgtttgcacgccaatttattaggacgtttgcaaggcgaggaacgtctcctctggctttacgaagaagtggagaaaccattgagtcgcgtgctcgcgcatatggaagctaccggtgtcaaattagacgtggcgtatttggaggcactcagccttgaagttgctgccgaaatgcgccgcttggaggaagaagtattccgtttagcaggccactccttttatcttaattctcgcgatcagttagaacgtgtgttgttcgatgaacttggtctccctcctatcggcaagacagagaagaccggtaaacgtagcacttcagcggcggttttagaagctcttcgcgaagtccatcccattgtggacaagatcttgcagtaccgcgaactcgcgaaattgaaaggcacctatattgaccctcttccggcattagtccacccgaaaacgggacgcctccatacccgcttcaaccaaacagccacggcgaccggtcgtttgtcctcctctgatccaaaccttcagaatattccagtacgtaccccattgggccagaagatccgccgcgcgtttgtagctgaggagggttggcgtttagtggccctcgattatagccaaattgaattacgtgtccttgcccatctttctggcgatgagaacctcatccgcgtgtttcaggaaggcaaagacattcacactcaaacggcaagctggatgtttggattatcagctgaagcgatcgatcctttgatgcgtcgtgcagcgaagaccatcaatttcggtgttctctacggtatgagtgcccatcgtttgtcgcaggaattaggcattccctatgaagaagctgcggcgttcattcagcgctactttcaaagctatcccaaagttaaagcatggatcgagaagactctcgaagaaggccgcacacgtggttacgtagagaccttatttggacgtcgccgctatgttcccgatttaaacgctcgcgtgaaatctgtccgtgaagccgccgaacgcatggcgttcaacatgcctgtacagggcacggcagctgacctcatgaaacttgcaatggtgcgcctttttccacaattgcgtgaagttggtgcccgcatgctcttgcaggtccacgatgaactcttgttagaagcgccaaaagagcgtgcggaagaggtggcagccctcgcgaaagaggttatggaaggcgtgtggcccttagcggtgcctcttgaagtcgaagttggtattggcgaggattggttggctgccaaaggataatga

SEQ ID NO: 2020 - protein, 841 aa, synthetic construct
  REGION 1..841: note = Variant of DNA polymerase I from Thermus sp. strain 2.9
MHHHHHHGGSGMLPLFEPKGRVLLVDGHHLAYRNFFALKGLTTSRGEPVQGVYGFAKSLLKALKEDGDVVIVVFDAKAPSFRHEAYEAYKAGRAPTPEDFPRQLALMKELVDLLGLERLEVPGFEADDVLATLAKKAEREGYEVQILTADRDLFQLLSPRISVLHPEGHRITPEWLWEKYGLRPEQWVDFRALAGDPSDNIPGVKGIGEKTALKLLKEWGSLENLLKNLDQVKPESVREKILAHLEDLKLSRELSRVRTDLPLEVDFRGRREPDWEGLKAFLERLEFGSLLHEFGLLESPLPAEEAPWPPPEGAFLGYRLSRPEPMWAELLALAASAQGRVYRAEDPHGALRGLKEVRGLLAKDLAVVALREGLELPPTDDPMLLAYLLDPSNTTPEGVARRYGGEWTEDAGERALLAERLHANLLGRLQGEERLLWLYEEVEKPLSRVLAHMEATGVKLDVAYLEALSLEVAAEMRRLEEEVFRLAGHSFYLNSRDQLERVLFDELGLPPIGKTEKTGKRSTSAAVLEALREVHPIVDKILQYRELAKLKGTYIDPLPALVHPKTGRLHTRFNQTATATGRLSSSDPNLQNIPVRTPLGQKIRRAFVAEEGWRLVALDYSQIELRVLAHLSGDENLIRVFQEGKDIHTQTASWMFGLSAEAIDPLMRRAAKTINFGVLYGMSAHRLSQELGIPYEEAAAFIQRYFQSYPKVKAWIEKTLEEGRTRGYVETLFGRRRYVPDLNARVKSVREAAERMAFNMPVQGTAADLMKLAMVRLFPQLREVGARMLLQVHDELLLEAPKERAEEVAALAKEVMEGVWPLAVPLEVEVGIGEDWLAAKG

SEQ ID NO: 2021 - DNA, 2529 bp, synthetic construct
  misc_feature 1..2529: note = Variant of DNA polymerase I from Thermus sp. strain 2.9
  source 1..2529: mol_type = other DNA
atgcaccatcatcatcatcatggcggtagcggcatgttaccgttgttcgaacctaaaggtcgcgtgcttctggttgatggccatcatctcgcgtatcgtaacttctttgccctgaaaggattaaccaccagccgtggcgagccggtacagggtgtctacggctttgcaaagtcgctcctgaaagctctgaaagaagacggtgatgtggtgattgttgtctttgatgcgaaagcgccaagttttcgccacgaagcgtacgaagcttacaaagccgggcgtgctccaacgccggaagactttcctcgccaattggcgcttatgaaggaattagtggatttgcttggcctcgaacgcttggaagttcccggtttcgaggcagacgacgtattagcgactctcgcaaagaaagccgaacgtgagggctatgaagtccagatcttgacagcagatcgcgatcttttccagcttttatctccgcgcatctcggtgttacacccggaagggcatcgtatcaccccggaatggctctgggagaaatatggtttgcgtcccgaacaatgggtggattttcgcgccttagcaggcgatccgagcgacaatattccgggagttaaaggtatcggcgagaagacggcgctcaagctccttaaagaatgggggtcgttggagaacttgcttaagaatttagatcaggtcaaaccagagtcagtgcgtgagaagattcttgcacacctcgaagacctcaaattaagccgcgaattgtcccgtgtacgcaccgatttgccgctcgaagttgatttccgtggccgccgcgaacctgactgggagggtcttaaagcgtttttagagcgtcttgaatttggttcgctcttgcatgaattcggccttttagaaagcccgttaccagccgaagaagcaccttggccaccgcccgaaggcgcgtttttaggttaccgtttgagtcgcccggaaccgatgtgggccgaattattggctcttgcagcgtctgcccagggacgtgtgtatcgcgcggaagaccctcatggtgcgctccgcggcctcaaagaagtccgtggactccttgccaaagacttagctgttgttgcattgcgcgaaggtcttgatttacctccgactgatgatccaatgcttcttgcgtacctcttggacccgtcaaacacgacgcccgaaggcgtagcccgtcgttacggcggcgagtggaccgaagatgcaggcgagcgcgcgttattggccgaacgtttgcacgccaatttattaggacgtttgcaaggcgaggaacgtctcctctggctttacgaagaagtggagaaaccattgagtcgcgtgctcgcgcatatggaagctaccggtgtcaaattagacgtggcgtatttggaggcactcagccttgaagttgctgccgaaatgcgccgcttggaggaagaagtattccgtttagcaggccactccttttatcttaattctcgcgatcagttagaacgtgtgttgttcgatgaacttggtctccctcctatcggcaagacagagaagaccggtaaacgtagcacttcagcggcggttttagaagctcttcgcgaagtccatcccattgtggacaagatcttgcagtaccgcgaactcgcgaaattgaaaggcacctatattgaccctcttccggcattagtccacccgaaaacgggacgcctccatacccgcttcaaccaaacagccacggcgaccggtcgtttgtcctcctctgatccaaaccttcagaatattccagtacgtaccccattgggccagaagatccgccgcgcgtttgtagctgaggagggttggcgtttagtggccctcgattatagccaaattgaattacgtgtccttgcccatctttctggcgatgagaacctcatccgcgtgtttcaggaaggcaaagacattcacactcaaacggcaagctggatgtttggattatcagctgaagcgatcgatcctttgatgcgtcgtgcagcgaagaccatcaatttcggtgttctctacggtatgagtgcccatcgtttgtcgcaggaattaggcattccctatgaagaagctgcggcgttcattcagcgctactttcaaagctatcccaaagttaaagcatggatcgagaagactctcgatgaaggccgcacacgtggttacgtagagaccttatttggacgtcgccgctatgttcccgatttaaacgctcgcgtgaaatctgtccgtgaagccgccgaacgcatggcgttcaacatgcctgtacagggcacggcagctgacctcatgaaacttgcaatggtgcgcctttttccacaattgcgtgaagttggtgcccgcatgctcttgcaggtccacgatgaactcttgttagaagcgccaaaagagcgtgcggaagaggtggcagccctcgcgaaagaggttatggaaggcgtgtggcccttagcggtgcctcttgaagtcgaagttggtattggcgaggattggttggctgccaaaggataatga

SEQ ID NO: 2022 - protein, 841 aa, synthetic construct
  REGION 1..841: note = Variant of DNA polymerase I from Thermus sp. strain 2.9
MHHHHHHGGSGMLPLFEPKGRVLLVDGHHLAYRNFFALKGLTTSRGEPVQGVYGFAKSLLKALKEDGDVVIVVFDAKAPSFRHEAYEAYKAGRAPTPEDFPRQLALMKELVDLLGLERLEVPGFEADDVLATLAKKAEREGYEVQILTADRDLFQLLSPRISVLHPEGHRITPEWLWEKYGLRPEQWVDFRALAGDPSDNIPGVKGIGEKTALKLLKEWGSLENLLKNLDQVKPESVREKILAHLEDLKLSRELSRVRTDLPLEVDFRGRREPDWEGLKAFLERLEFGSLLHEFGLLESPLPAEEAPWPPPEGAFLGYRLSRPEPMWAELLALAASAQGRVYRAEDPHGALRGLKEVRGLLAKDLAVVALREGLDLPPTDDPMLLAYLLDPSNTTPEGVARRYGGEWTEDAGERALLAERLHANLLGRLQGEERLLWLYEEVEKPLSRVLAHMEATGVKLDVAYLEALSLEVAAEMRRLEEEVFRLAGHSFYLNSRDQLERVLFDELGLPPIGKTEKTGKRSTSAAVLEALREVHPIVDKILQYRELAKLKGTYIDPLPALVHPKTGRLHTRFNQTATATGRLSSSDPNLQNIPVRTPLGQKIRRAFVAEEGWRLVALDYSQIELRVLAHLSGDENLIRVFQEGKDIHTQTASWMFGLSAEAIDPLMRRAAKTINFGVLYGMSAHRLSQELGIPYEEAAAFIQRYFQSYPKVKAWIEKTLDEGRTRGYVETLFGRRRYVPDLNARVKSVREAAERMAFNMPVQGTAADLMKLAMVRLFPQLREVGARMLLQVHDELLLEAPKERAEEVAALAKEVMEGVWPLAVPLEVEVGIGEDWLAAKG

SEQ ID NO: 2023 - DNA, 2529 bp, synthetic construct
  misc_feature 1..2529: note = Variant of DNA polymerase I from Thermus sp. strain 2.9
  source 1..2529: mol_type = other DNA
atgcaccatcatcatcatcatggcggtagcggcatgttaccgttgttcgaacctaaaggtcgcgtgcttctggttgatggccatcatctcgcgtatcgtaacttctttgccctgaaaggattaaccaccagccgtggcgagccggtacagggtgtctacggctttgcaaagtcgctcctgaaagctctgaaagaagacggtgatgtggtgattgttgtctttgatgcgaaagcgccaagttttcgccacgaagcgtacgaagcttacaaagccgggcgtgctccaacgccggaagactttcctcgccaattggcgcttatgaaggaattagtggatttgcttggcctcgaacgcttggaagttcccggtttcgaggcagacgacgtattagcgactctcgcaaagaaagccgaacgtgagggctatgaagtccagatcttgacagcagatcgcgatcttttccagcttttatctccgcgcatctcggtgttacacccggaagggcatcgtatcaccccggaatggctctgggagaaatatggtttgcgtcccgaacaatgggtggattttcgcgccttagcaggcgatccgagcgacaatattccgggagttaaaggtatcggcgagaagacggcgctcaagctccttaaagaatgggggtcgttggagaacttgcttaagaatttagatcaggtcaaaccagagtcagtgcgtgagaagattcttgcacacctcgaagacctcaaattaagccgcgaattgtcccgtgtacgcaccgatttgccgctcgaagttgatttccgtggccgccgcgaacctgactgggagggtcttaaagcgtttttagagcgtcttgaatttggttcgctcttgcatgaattcggccttttagaaagcccgttaccagccgaagaagcaccttggccaccgcccgaaggcgcgtttttaggttaccgtttgagtcgcccggaaccgatgtgggccgaattattggctcttgcagcgtctgcccagggacgtgtgtatcgcgcggaagaccctcatggtgcgctccgcggcctcaaagaagtccgtggactccttgccaaagacttagctgttgttgcattgcgcgaaggtcttgatttacctccgactgatgatccaatgcttcttgcgtacctcttggacccgtcaaacacgacgcccgaaggcgtagcccgtcgttacggcggcgagtggaccgaagatgcaggcgagcgcgcgttattggccgaacgtttgcacgccaatttattaggacgtttgcaaggcgaggaacgtctcctctggctttacgaagaagtggagaaaccattgagtcgcgtgctcgcgcatatggaagctaccggtgtcaaattagacgtggcgtatttggaggcactcagccttgaagttgctgccgaaatgcgccgcttggaggaagaagtattccgtttagcaggccactccttttatcttaattctcgcgatcagttagaacgtgtgttgttcgatgaacttggtctccctcctatcggcaagacagagaagaccggtaaacgtagcacttcagcggcggttttagaagctcttcgcgaagtccatcccattgtggacaagatcttgcagtaccgcgaactcgcgaaattgaaaggcacctatattgaccctcttccggcattagtccacccgaaaacgggacgcctccatacccgcttcaaccaaacagccacggcgaccggtcgtttgtcctcctctgatccaaaccttcagaatattccagtacgtaccccattgggccagaagatccgccgcgcgtttgtagctgaggagggttggcgtttagtggccctcgattatagccaaattgaattacgtgtccttgcccatctttctggcgatgagaacctcatccgcgtgtttcaggaaggcaaagacattcacactcaaacggcaagctggatgtttggattatcagctgaagcgatcgatcctttgatgcgtcgtgcagcgaagaccatcaatttcggtgttctctacggtatgagtgcccatcgtttgtcgcaggaattaggcattccctatgaagaagctgcggcgttcattcagcgctactttcaaagctatcccaaagttaaagcatggatcgagaagactctcatggaaggccgcacacgtggttacgtagagaccttatttggacgtcgccgctatgttcccgatttaaacgctcgcgtgaaatctgtccgtgaagccgccgaacgcatggcgttcaacatgcctgtacagggcacggcagctgacctcatgaaacttgcaatggtgcgcctttttccacaattgcgtgaagttggtgcccgcatgctcttgcaggtccacgatgaactcttgttagaagcgccaaaagagcgtgcggaagaggtggcagccctcgcgaaagaggttatggaaggcgtgtggcccttagcggtgcctcttgaagtcgaagttggtattggcgaggattggttggctgccaaaggataatga

SEQ ID NO: 2024 - protein, 841 aa, synthetic construct
  REGION 1..841: note = Variant of DNA polymerase I from Thermus sp. strain 2.9
MHHHHHHGGSGMLPLFEPKGRVLLVDGHHLAYRNFFALKGLTTSRGEPVQGVYGFAKSLLKALKEDGDVVIVVFDAKAPSFRHEAYEAYKAGRAPTPEDFPRQLALMKELVDLLGLERLEVPGFEADDVLATLAKKAEREGYEVQILTADRDLFQLLSPRISVLHPEGHRITPEWLWEKYGLRPEQWVDFRALAGDPSDNIPGVKGIGEKTALKLLKEWGSLENLLKNLDQVKPESVREKILAHLEDLKLSRELSRVRTDLPLEVDFRGRREPDWEGLKAFLERLEFGSLLHEFGLLESPLPAEEAPWPPPEGAFLGYRLSRPEPMWAELLALAASAQGRVYRAEDPHGALRGLKEVRGLLAKDLAVVALREGLDLPPTDDPMLLAYLLDPSNTTPEGVARRYGGEWTEDAGERALLAERLHANLLGRLQGEERLLWLYEEVEKPLSRVLAHMEATGVKLDVAYLEALSLEVAAEMRRLEEEVFRLAGHSFYLNSRDQLERVLFDELGLPPIGKTEKTGKRSTSAAVLEALREVHPIVDKILQYRELAKLKGTYIDPLPALVHPKTGRLHTRFNQTATATGRLSSSDPNLQNIPVRTPLGQKIRRAFVAEEGWRLVALDYSQIELRVLAHLSGDENLIRVFQEGKDIHTQTASWMFGLSAEAIDPLMRRAAKTINFGVLYGMSAHRLSQELGIPYEEAAAFIQRYFQSYPKVKAWIEKTLMEGRTRGYVETLFGRRRYVPDLNARVKSVREAAERMAFNMPVQGTAADLMKLAMVRLFPQLREVGARMLLQVHDELLLEAPKERAEEVAALAKEVMEGVWPLAVPLEVEVGIGEDWLAAKG

SEQ ID NO: 2025 - DNA, 2529 bp, synthetic construct
  misc_feature 1..2529: note = Variant of DNA polymerase I from Thermus sp. strain 2.9
  source 1..2529: mol_type = other DNA
atgcaccatcatcatcatcatggcggtagcggcatgttaccgttgttcgaacctaaaggtcgcgtgcttctggttgatggccatcatctcgcgtatcgtaacttctttgccggtaaaggattaaccaccagccgtggcgagccggtacagggtgtctacggctttgcaaagtcgctcctgaaagctctgaaagaagacggtgatgtggtgattgttgtctttgatgcgaaagcgccaagttttcgccacgaagcgtacgaagcttacaaagccgggcgtgctccaacgccggaagactttcctcgccaattggcgcttatgaaggaattagtggatttgcttggcctcgaacgcttggaagttcccggtttcgaggcagacgacgtattagcgactctcgcaaagaaagccgaacgtgagggctatgaagtccagatcttgacagcagatcgcgatcttttccagcttttatctccgcgcatctcggtgttacacccggaagggcatcgtatcaccccggaatggctctgggagaaatatggtttgcgtcccgaacaatgggtggattttcgcgccttagcaggcgatccgagcgacaatattccgggagttaaaggtatcggcgagaagacggcgctcaagctccttaaagaatgggggtcgttggagaacttgcttaagaatttagatcaggtcaaaccagagtcagtgcgtgagaagattcttgcacacctcgaagacctcaaattaagccgcgaattgtcccgtgtacgcaccgatttgccgctcgaagttgatttccgtggccgccgcgaacctgactgggagggtcttaaagcgtttttagagcgtcttgaatttggttcgctcttgcatgaattcggccttttagaaagcccgttaccagccgaagaagcaccttggccaccgcccgaaggcgcgtttttaggttaccgtttgagtcgcccggaaccgatgtgggccgaattattggctcttgcagcgtctgcccagggacgtgtgtatcgcgcggaagaccctcatggtgcgctccgcggcctcaaagaagtccgtggactccttgccaaagacttagctgttgttgcattgcgcgaaggtcttgatttacctccgactgatgatccaatgcttcttgcgtacctcttggacccgtcaaacacgacgcccgaaggcgtagcccgtcgttacggcggcgagtggaccgaagatgcaggcgagcgcgcgttattggccgaacgtttgcacgccaatttattaggacgtttgcaaggcgaggaacgtctcctctggctttacgaagaagtggagaaaccattgagtcgcgtgctcgcgcatatggaagctaccggtgtcaaattagacgtggcgtatttggaggcactcagccttgaagttgctgccgaaatgcgccgcttggaggaagaagtattccgtttagcaggccactccttttatcttaattctcgcgatcagttagaacgtgtgttgttcgatgaacttggtctccctcctatcggcaagacagagaagaccggtaaacgtagcacttcagcggcggttttagaagctcttcgcgaagtccatcccattgtggacaagatcttgcagtaccgcgaactcgcgaaattgaaaggcacctatattgaccctcttccggcattagtccacccgaaaacgggacgcctccatacccgcttcaaccaaacagccacggcgaccggtcgtttgtcctcctctgatccaaaccttcagaatattccagtacgtaccccattgggccagaagatccgccgcgcgtttgtagctgaggagggttggcgtttagtggccctcgattatagccaaattgaattacgtgtccttgcccatctttctggcgatgagaacctcatccgcgtgtttcaggaaggcaaagacattcacactcaaacggcaagctggatgtttggattatcagctgaagcgatcgatcctttgatgcgtcgtgcagcgaagaccatcaatttcggtgttctctacggtatgagtgcccatcgtttgtcgcaggaattaggcattccctatgaagaagctgcggcgttcattcagcgctactttcaaagctatcccaaagttaaagcatggatcgagaagactctcgaagaaggccgcacacgtggttacgtagagaccttatttggacgtcgccgctatgttcccgatttaaacgctcgcgtgaaatctgtccgtgaagccgccgaacgcatggcgttcaacatgcctgtacagggcacggcagctgacctcatgaaacttgcaatggtgcgcctttttccacaattgcgtgaagttggtgcccgcatgctcttgcaggtccacgatgaactcttgttagaagcgccaaaagagcgtgcggaagaggtggcagccctcgcgaaagaggttatggaaggcgtgtggcccttagcggtgcctcttgaagtcgaagttggtattggcgaggattggttggctgccaaaggataatga

SEQ ID NO: 2026 - protein, 841 aa, synthetic construct; identical to SEQ ID NO: 1696
  REGION 1..841: note = Variant of DNA polymerase I from Thermus sp. strain 2.9

SEQ ID NO: 2027 - DNA, 2529 bp, synthetic construct
  misc_feature 1..2529: note = Variant of DNA polymerase I from Thermus sp. strain 2.9
  source 1..2529: mol_type = other DNA
atgcaccatcatcatcatcatggcggtagcggcatgttaccgttgttcgaacctaaaggtcgcgtgcttctggttgatggccatcatctcgcgtatcgtaacttctttgccctgaaaggattaaccaccagccgtggcgagccggtacagggtgtctacggctttgcaaagtcgctcctgaaagctctgaaagaagacggtgatgtggtgattgttgtctttgatgcgaaagcgccaagttttcgccacgaagcgtacgaagcttacaaagccgggcgtgctccaacgccggaagactttcctcgccaattggcgcttatgaaggaattagtggatttgcttggcctcgaacgcttggaagttcccggtttcgaggcagacgacgtattagcgactctcgcaaagaaagccgaacgtgagggctatgaagtccagatcttgacagcagatcgcgatcttttccagcttttatctccgcgcatctcggtgttacacccagaagggcatcgtatcaccccggaatggctctgggagaaatatggtttgcgtcccgaacaatgggtggattttcgcgccttagcaggcgatccgagcgacaatattccgggagttaaaggtatcggcgagaagacggcgctcaagctccttaaagaatgggggtcgttggagaacttgcttaagaatttagatcaggtcaaaccagagtcagtgcgtgagaagattcttgcacacctcgaagacctcaaattaagccgcgaattgtcccgtgtacgcaccgatttgccgctcgaagttgatttccgtggccgccgcgaacctgactgggagggtcttaaagcgtttttagagcgtcttgaatttggttcgctcttgcatgaattcggccttttagaaagcccgttaccagccgaagaagcaccttggccaccgcccgaaggcgcgtttttaggttaccgtttgagtcgcccggaaccgatgtgggccgaattattggctcttgcagcgtctgcccagggacgtgtgtatcgcgcggaagaccctcatggtgcgctccgcggcctcaaagaagtccgtggactccttgccaaagacttagctgttgttgcattgcgcgaaggtcttgatttacctccgactgatgatccaatgcttcttgcgtacctcttggacccgtcaaacacgacgcccgaaggcgtagcccgtcgttacggcggcgagtggaccgaagatgcaggcgagcgcgcgttattggccgaacgtttgcacgccaatttattaggacgtttgcaaggcgaggaacgtctcctctggctttacgaagaagtggagaaaccattgagtcgcgtgctcgcgcatatggaagctaccggtgtcaaattagacgtggcgtatttggaggcactcagccttgaagttgctgccgaaatgcgccgcttggaggaagaagtattccgtttagcaggccactccttttatcttaattctcgcgatcagttagaacgtgtgttgttcgatgaacttggtctccctcctatcggcaagacagagaagatgggtaaacgtagcacttcagcggcggttttagaagctcttcgcgaagtccatcccattgtggacaagatcttgcagtaccgcgaactcgcgaaattgaaaggcacctatattgaccctcttccggcattagtccacccgaaaacgggacgcctccatacccgcttcaaccaaacagccacggcgaccggtcgtttgtcctcctctgatccaaaccttcagaatattccagtacgtaccccattgggccagaagatccgccgcgcgtttgtagctgaggagggttggcgtttagtggccctcgattatagccaaattgaattacgtgtccttgcccatctttctggcgatgagaacctcatccgcgtgtttcaggaaggcaaagacattcacactcaaacggcaagctggatgtttggattatcagctgaagcgatcgatcctttgatgcgtcgtgcagcgaagaccatcaatttcggtgttctctacggtatgagtgcccatcgtttgtcgcaggaattaggcattccctatgaagaagctgcggcgttcattcagcgctactttcaaagctatcccaaagttaaagcatggatcgagaagactctcgaagaaggccgcacacgtggttacgtagagaccttatttggacgtcgccgctatgttcccgatttaaacgctcgcgtgaaatctgtccgtgaagccgccgaacgcatggcgttcaacatgcctgtacagggcacggcagctgacctcatgaaacttgcaatggtgcgcctttttccacaattgcgtgaagttggtgcccgcatgctcttgcaggtccacgatgaactcttgttagaagcgccaaaagagcgtgcggaagaggtggcagccctcgcgaaagaggttatggaaggcgtgtggcccttagcggtgcctcttgaagtcgaagttggtattggcgaggattggttggctgccaaaggataatga

SEQ ID NO: 2028 - protein, 841 aa, synthetic construct
  REGION 1..841: note = Variant of DNA polymerase I from Thermus sp. strain 2.9
MHHHHHHGGSGMLPLFEPKGRVLLVDGHHLAYRNFFALKGLTTSRGEPVQGVYGFAKSLLKALKEDGDVVIVVFDAKAPSFRHEAYEAYKAGRAPTPEDFPRQLALMKELVDLLGLERLEVPGFEADDVLATLAKKAEREGYEVQILTADRDLFQLLSPRISVLHPEGHRITPEWLWEKYGLRPEQWVDFRALAGDPSDNIPGVKGIGEKTALKLLKEWGSLENLLKNLDQVKPESVREKILAHLEDLKLSRELSRVRTDLPLEVDFRGRREPDWEGLKAFLERLEFGSLLHEFGLLESPLPAEEAPWPPPEGAFLGYRLSRPEPMWAELLALAASAQGRVYRAEDPHGALRGLKEVRGLLAKDLAVVALREGLDLPPTDDPMLLAYLLDPSNTTPEGVARRYGGEWTEDAGERALLAERLHANLLGRLQGEERLLWLYEEVEKPLSRVLAHMEATGVKLDVAYLEALSLEVAAEMRRLEEEVFRLAGHSFYLNSRDQLERVLFDELGLPPIGKTEKMGKRSTSAAVLEALREVHPIVDKILQYRELAKLKGTYIDPLPALVHPKTGRLHTRFNQTATATGRLSSSDPNLQNIPVRTPLGQKIRRAFVAEEGWRLVALDYSQIELRVLAHLSGDENLIRVFQEGKDIHTQTASWMFGLSAEAIDPLMRRAAKTINFGVLYGMSAHRLSQELGIPYEEAAAFIQRYFQSYPKVKAWIEKTLEEGRTRGYVETLFGRRRYVPDLNARVKSVREAAERMAFNMPVQGTAADLMKLAMVRLFPQLREVGARMLLQVHDELLLEAPKERAEEVAALAKEVMEGVWPLAVPLEVEVGIGEDWLAAKG

SEQ ID NO: 2029 - DNA, 2529 bp, synthetic construct
  misc_feature 1..2529: note = Variant of DNA polymerase I from Thermus sp. strain 2.9
  source 1..2529: mol_type = other DNA
atgcaccatcatcatcatcatggcggtagcggcatgttaccgttgttcgaacctaaaggtcgcgtgcttctggttgatggccatcatctcgcgtatcgtaacttctttgccctgaaaggattaaccaccagccgtggcgagccggtacagggtgtctacggctttgcaaagtcgctcctgaaagctctgaaagaagacggtgatgtggtgattgttgtctttgatgcgaaagcgccaagttttcgccacgaagcgtacgaagcttacaaagccgggcgtgctccaacgccggaagactttcctcgccaattggcgcttatgaaggaattagtggatttgcttggcctcgaacgcttggaagttcccggtttcgaggcagacgacgtattagcgactctcgcaaagaaagccgaacgtgagggctatgaagtccagatcttgacagcagatcgcgatcttttccagcttttatctccgcgcatctcggtgttacacccggaagggcatcgtatcaccccggaatggctctgggagaaatatggtttgcgtcccgaacaatgggtggattttcgcgccttagcaggcgatccgagcgacaatattccgggagttaaaggtatcggcgagaagacggcgctcaagctccttaaagaatgggggtcgttggagaacttgcttaagaatttagatcaggtcaaaccagagtcagtgcgtgagaagattcttgcacacctcgaagacctcaaattaagccgcgaattgtcccgtgtacgcaccgatttgccgctcgaagttgatttccgtggccgccgcgaacctgactgggagggtcttaaagcgtttttagagcgtcttgaatttggttcgctcttgcatgaattcggccttttagaaagcccgttaccagccgaagaagcaccttggccaccgcccgaaggcgcgtttttaggttaccgtttgagtcgcccggaaccgatgtgggccgaattattggctcttgcagcgtctgcccagggacgtgtgtatcgcgcggaagaccctcatggtgcgctccgcggcctcaaagaagtccgtggactccttgccaaagacttagctgttgttgcattgcgcgaaggtcttgatttacctccgactgatgatccaatgcttcttgcgtacctcttggacccgtcaaacacgacgcccgaaggcgtagcccgtcgttacggcggcgagtggaccgaagatgcaggcgagcgcgcgttattggccgaacgtttgcacgccaatttattaggacgtttgcaaggcgaggaacgtctcctctggctttacgaagaagtggagaaaccattgagtcgcgtgctcgcgcatatggaagctaccggtgtcaaattagacgtggcgtatttggaggcactcagccttgaagttgctgccgaaatgcgccgcttggaggaagaagtattccgtttagcaggccactccttttatcttaattctcgcgatcagttagaacgtgtgttgttcgatgaacttggtctccctcctatcggcaagacagagaagaccggtaaacgtagcacttcagcggcggttttagaagctcttcgcgaagtccatcccattgtggacaagatcttgctgtaccgcgaactcgcgaaattgaaaggcacctatattgaccctcttccggcattagtccacccgaaaacgggacgcctccatacccgcttcaaccaaacagccacggcgaccggtcgtttgtcctcctctgatccaaaccttcagaatattccagtacgtaccccattgggccagaagatccgccgcgcgtttgtagctgaggagggttggcgtttagtggccctcgattatagccaaattgaattacgtgtccttgcccatctttctggcgatgagaacctcatccgcgtgtttcaggaaggcaaagacattcacactcaaacggcaagctggatgtttggattatcagctgaagcgatcgatcctttgatgcgtcgtgcagcgaagaccatcaatttcggtgttctctacggtatgagtgcccatcgtttgtcgcaggaattaggcattccctatgaagaagctgcggcgttcattcagcgctactttcaaagctatcccaaagttaaagcatggatcgagaagactctcgaagaaggccgcacacgtggttacgtagagaccttatttggacgtcgccgctatgttcccgatttaaacgctcgcgtgaaatctgtccgtgaagccgccgaacgcatggcgttcaacatgcctgtacagggcacggcagctgacctcatgaaacttgcaatggtgcgcctttttccacaattgcgtgaagttggtgcccgcatgctcttgcaggtccacgatgaactcttgttagaagcgccaaaagagcgtgcggaagaggtggcagccctcgcgaaagaggttatggaaggcgtgtggcccttagcggtgcctcttgaagtcgaagttggtattggcgaggattggttggctgccaaaggataatga

SEQ ID NO: 2030 - protein, 841 aa, synthetic construct
  REGION 1..841: note = Variant of DNA polymerase I from Thermus sp. strain 2.9
MHHHHHHGGSGMLPLFEPKGRVLLVDGHHLAYRNFFALKGLTTSRGEPVQGVYGFAKSLLKALKEDGDVVIVVFDAKAPSFRHEAYEAYKAGRAPTPEDFPRQLALMKELVDLLGLERLEVPGFEADDVLATLAKKAEREGYEVQILTADRDLFQLLSPRISVLHPEGHRITPEWLWEKYGLRPEQWVDFRALAGDPSDNIPGVKGIGEKTALKLLKEWGSLENLLKNLDQVKPESVREKILAHLEDLKLSRELSRVRTDLPLEVDFRGRREPDWEGLKAFLERLEFGSLLHEFGLLESPLPAEEAPWPPPEGAFLGYRLSRPEPMWAELLALAASAQGRVYRAEDPHGALRGLKEVRGLLAKDLAVVALREGLDLPPTDDPMLLAYLLDPSNTTPEGVARRYGGEWTEDAGERALLAERLHANLLGRLQGEERLLWLYEEVEKPLSRVLAHMEATGVKLDVAYLEALSLEVAAEMRRLEEEVFRLAGHSFYLNSRDQLERVLFDELGLPPIGKTEKTGKRSTSAAVLEALREVHPIVDKILLYRELAKLKGTYIDPLPALVHPKTGRLHTRFNQTATATGRLSSSDPNLQNIPVRTPLGQKIRRAFVAEEGWRLVALDYSQIELRVLAHLSGDENLIRVFQEGKDIHTQTASWMFGLSAEAIDPLMRRAAKTINFGVLYGMSAHRLSQELGIPYEEAAAFIQRYFQSYPKVKAWIEKTLEEGRTRGYVETLFGRRRYVPDLNARVKSVREAAERMAFNMPVQGTAADLMKLAMVRLFPQLREVGARMLLQVHDELLLEAPKERAEEVAALAKEVMEGVWPLAVPLEVEVGIGEDWLAAKG

SEQ ID NO: 2031 - DNA, 2529 bp, synthetic construct
  misc_feature 1..2529: note = Variant of DNA polymerase I from Thermus sp. strain 2.9
  source 1..2529: mol_type = other DNA
atgcaccatcatcatcatcatggcggtagcggcatgttaccgttgttcgaacctaaaggtcgcgtgcttctggttgatggccatcatctcgcgtatcgtaacttctttgccctgaaaggattaaccaccagccgtggcgagccggtacagggtgtctacggctttgcaaagtcgctcctgaaagctctgaaagaagacggtgatgtggtgattgttgtctttgatgcgaaagcgccaagttttcgccacgaagcgtacgaagcttacaaagccgggcgtgctccaacgccggaagactttcctcgccaattggcgcttatgaaggaattagtggatttgcttggcctcgaacgcttggaagttcccggtttcgaggcagacgacgtattagcgactctcgcaaagaaagccgaacgtgagggctatgaagtccagatcttgacagcagatcgcgatcttttccagcttttatctccgcgcatctcggtgttacacccggaagggcatcgtatcaccccggaatggctctgggagaaatatggtttgcgtcccgaacaatgggtggattttcgcgccttagcaggcgatccgagcgacaatattccgggagttaaaggtatcggcgagaagacggcgctcaagctccttaaagaatgggggtcgttggagaacttgcttaagaatttagatcaggtcaaaccagagtcagtgcgtgagaagattcttgcacacctcgaagacctcaaattaagccgcgaattgtcccgtgtacgcaccgatttgccgctcgaagttgatttccgtggccgccgcgaacctgactgggagggtcttaaagcgtttttagagcgtcttgaatttggttcgctcttgcatgaattcggccttttagaaagcccgttaccagccgaagaagcaccttggccaccgcccgaaggcgcgtttttaggttaccgtttgagtcgcccggaaccgatgtgggccgaattattggctcttgcagcgtctgcccagggacgtgtgtatcgcgcggaagaccctcatggtgcgctccgcggcctcaaagaagtccgtggactccttgccaaagacttagctgttgttgcattgcgcgaaggtcttgatttacctccgactgatgatccaatgcttcttgcgtacctcttggacccgtcaaacacgacgcccgaaggcgtagcccgtcgttacggcggcgagtggaccgaagatgcaggcgagcgcgcgttattggccgaacgtttgcacgccaatttattaggacgtttgcaaggcgaggaacgtctcctctggctttacgaagaagtggagaaaccattgagtcgcgtgctcgcgcatatggaagctaccggtgtcaaattagacgtggcgtatttggaggcactcagccttgaagttgctgccgaaatgcgccgcttggaggaagaagtattccgtttagcaggccactccttttatcttaattctcgcgatcagttagaacgtgtgttgttcgatgaacttggtctccctcctatcggcaagacagagaagaccggtaaacgtagcacttcagcggcggttttagaagctcttcgcgaagtccatcccattgtggacaagatcttgcagtaccgcgaactcgcgaaattgaaaggcacctatattgaccctcttccggcattagtccacccgaaaacgggacgcctccatacccgcttcaaccaaacagccacggcgaccggtcgtttgtcctcctctgatccaaaccttcagaatattccagtacgtaccccattgggccagaagatccgccgcgcgtttgtagctgaggagggttggcgtttagtggccctcgattatagccaaattgaattacgtgtccttgcccatctttctggcgatgagaacctcatccgcgtgtttcaggaaggcaaagacattcacactcaaacggcaagctggatgtttggattatcagctgaagcgatcgatcctttgatgcgtcgtgcagcgaagaccatcaatttcggtgttctctacggtatgagtgcccatcgtttgtcgcaggaattaggcattccctatgaagaagctgcggcgttcattcagcgctactttcaaagctatcccaaagttaaagcatggatcgagaagactctcgaagaaggccgcacacgtggttacgtagagaccttatttggacgtcgccgctatgttcccgatttaaacgctcgcgtgaaatctgtccgtgaagccgccgaacgcatggcgttcaacatgcctgtacagggcacggcagctgacctcatgaaacttgcaatggtgcgcctttttccacaattgcgtgaagttggtgcccgcatgctcttgcaggtccacgatgaactcttgttagaagcgccaaaagagcgtgcggaagaggtggcagccctcgcgaaagaggttatggaaggcgtgtggcccttagcggtgcctcttgaagtccgggttggtattggcgaggattggttggctgccaaaggataatga

SEQ ID NO: 2032 - protein, 841 aa, synthetic construct; identical to SEQ ID NO: 1828
  REGION 1..841: note = Variant of DNA polymerase I from Thermus sp. strain 2.9

SEQ ID NO: 2033 - DNA, 2529 bp, synthetic construct
  misc_feature 1..2529: note = Variant of DNA polymerase I from Thermus sp. strain 2.9
  source 1..2529: mol_type = other DNA
atgcaccatcatcatcatcatggcggtagcggcatgttaccgttgttcgaacctaaaggtcgcgtgcttctggttgatggccatcatctcgcgtatcgtaacttctttgccctgaaaggattaaccaccagccgtggcgagccggtacagggtgtctacggctttgcaaagtcgctcctgaaagctctgaaagaagacggtgatgtggtgattgttgtctttgatgcgaaagcgccaagttttcgccacgaagcgtacgaagcttacaaagccgggcgtgctccaacgccggaagactttcctcgccaattggcgcttatgaaggaattagtggatttgcttggcctcgaacgcttggaagttcccggtttcgaggcagacgacgtattagcgactctcgcaaagaaagccgaacgtgagggctatgaagtccagatcttgacagcagatcgcgatcttttccagcttttatctccgcgcatctcggtgttacacccggaagggcatcgtatcaccccggaatggctctgggagaaatatggtttgcgtcccgaacaatgggtggattttcgcgccttagcaggcgatccgagcgacaatattccgggagttaaaggtatcggcgagaagacggcgctcaagctccttaaagaatgggggtcgttggagaacttgcttaagaatttagatcaggtcaaaccagagtcagtgcgtgagaagattcttgcacacctcgaagacctcaaattaagccgcgaattgtcccgtgtacgcaccgatttgccgctcgaagttgatttccgtggccgccgcgaacctgactgggagggtcttaaagcgtttttagagcgtcttgaatttggttcgctcttgcatgaattcggccttttagaaagcccgttaccagccgaagaagcaccttggccaccgcccgaaggcgcgtttttaggttaccgtttgagtcgcccggaaccgatgtgggccgaattattggctcttgcagcgtctgcccagggacgtgtgtatcgcgcggaagaccctcatggtgcgctccgcggcctcaaagaagtccgtggactccttgccaaagacttagctgttgttgcattgcgcgaaggtcttgatttacctccgactgatgatccaatgcttcttgcgtacctcttggacccgtcaaacacgacgcccgaaggcgtagcccgtcgttacggcggcgagtggaccgaagatgcaggcgagcgcgcgttattggccgaacgtttgcacgccaatttattaggacgtttgcaaggcgaggaacgtctcctctggctttacgaagaagtggagaaaccattgagtcgcgtgctcgcgcatatggaagctaccggtgtcaaattagacgtggcgtatttggaggcactcagccttgaagttgctgccgaaatgcgccgcttggaggaagaagtattccgtttagcaggccactccttttatcttaattctcgcgatcagttagaacgtgtgttgttcgatgaacttggtctccctcctatcggcaagacagagaagaccggtaaacgtagcacttcagcggcggttttagaagctcttcgcgaagtccatcccattgtggacaagatcttgcagtaccgcgaactcgcgaaattgaaaggcacctatattgaccctcttccggcattagtccacccgaaaacgggacgcctccatacccgcttcaaccaaacagccacggcgaccggtcgtttgtcctcctctgatccaaaccttcagaatattccagtacgtaccccattgggccagaagatccgccgcgcgtttgtagctgaggagggttggcgtttagtggccctcgattatagccaaattgaattacgtgtccttgcccatctttctggcgatgagaacctcatccgcgtgtttcaggaaggcaaagacattcacactcaaacggcaagctggatgtttggattatcagctgaagcgatcgatcctgggatgcgtcgtgcagcgaagaccatcaatttcggtgttctctacggtatgagtgcccatcgtttgtcgcaggaattaggcattccctatgaagaagctgcggcgttcattcagcgctactttcaaagctatcccaaagttaaagcatggatcgagaagactctcgaagaaggccgcacacgtggttacgtagagaccttatttggacgtcgccgctatgttcccgatttaaacgctcgcgtgaaatctgtccgtgaagccgccgaacgcatggcgttcaacatgcctgtacagggcacggcagctgacctcatgaaacttgcaatggtgcgcctttttccacaattgcgtgaagttggtgcccgcatgctcttgcaggtccacgatgaactcttgttagaagcgccaaaagagcgtgcggaagaggtggcagccctcgcgaaagaggttatggaaggcgtgtggcccttagcggtgcctcttgaagtcgaagttggtattggcgaggattggttggctgccaaaggataatga

SEQ ID NO: 2034 - protein, 841 aa, synthetic construct; identical to SEQ ID NO: 1720
  REGION 1..841: note = Variant of DNA polymerase I from Thermus sp. strain 2.9

SEQ ID NO: 2035 - DNA, 2529 bp, synthetic construct; identical to SEQ ID NO: 1845
  misc_feature 1..2529: note = Variant of DNA polymerase I from Thermus sp. strain 2.9
  source 1..2529: mol_type = other DNA

SEQ ID NO: 2036 - protein, 841 aa, synthetic construct; identical to SEQ ID NO: 1846
  REGION 1..841: note = Variant of DNA polymerase I from Thermus sp. strain 2.9

SEQ ID NO: 2037 - DNA, 2529 bp, synthetic construct
  misc_feature 1..2529: note = Variant of DNA polymerase I from Thermus sp. strain 2.9
  source 1..2529: mol_type = other DNA
atgcaccatcatcatcatcatggcggtagcggcatgttaccgttgttcgaacctaaaggtcgcgtgcttctggttgatggccatcatctcgcgtatcgtaacttctttgccctgaaaggattaaccaccagccgtggcgagccggtacagggtgtctacggctttgcaaagtcgctcctgaaagctctgaaagaagacggtgatgtggtgattgttgtctttgatgcgaaagcgccaatgtttcgccacgaagcgtacgaagcttacaaagccgggcgtgctccaacgccggaagactttcctcgccaattggcgcttatgaaggaattagtggatttgcttggcctcgaacgcttggaagttcccggtttcgaggcagacgacgtattagcgactctcgcaaagaaagccgaacgtgagggctatgaagtccagatcttgacagcagatcgcgatcttttccagcttttatctccgcgcatctcggtgttacacccggaagggcatcgtatcaccccggaatggctctgggagaaatatggtttgcgtcccgaacaatgggtggattttcgcgccttagcaggcgatccgagcgacaatattccgggagttaaaggtatcggcgagaagacggcgctcaagctccttaaagaatgggggtcgttggagaacttgcttaagaatttagatcaggtcaaaccagagtcagtgcgtgagaagattcttgcacacctcgaagacctcaaattaagccgcgaattgtcccgtgtacgcaccgatttgccgctcgaagttgatttccgtggccgccgcgaacctgactgggagggtcttaaagcgtttttagagcgtcttgaatttggttcgctcttgcatgaattcggccttttagaaagcccgttaccagccgaagaagcaccttggccaccgcccgaaggcgcgtttttaggttaccgtttgagtcgcccggaaccgatgtgggccgaattattggctcttgcagcgtctgcccagggacgtgtgtatcgcgcggaagaccctcatggtgcgctccgcggcctcaaagaagtccgtggactccttgccaaagacttagctgttgttgcattgcgcgaaggtcttgatttacctccgactgatgatccaatgcttcttgcgtacctcttggacccgtcaaacacgacgcccgaaggcgtagcccgtcgttacggcggcgagtggaccgaagatgcaggcgagcgcgcgttattggccgaacgtttgcacgccaatttattaggacgtttgcaaggcgaggaacgtctcctctggctttacgaagaagtggagaaaccattgagtcgcgtgctcgcgcatatggaagctaccggtgtcaaattagacgtggcgtatttggaggcactcagccttgaagttgctgccgaaatgcgccgcttggaggaagaagtattccgtttagcaggccactccttttatcttaattctcgcgatcagttagaacgtgtgttgttcgatgaacttggtctccctcctatcggcaagacagagaagaccggtaaacgtagcacttcagcggcggttttagaagctcttcgcgaagtccatcccattgtggacaagatcttgcagtaccgcgaactcgcgaaattgaaaggcacctatattgaccctcttccggcattagtccacccgaaaacgggacgcctccatacccgcttcaaccaaacagccacggcgaccggtcgtttgtcctcctctgatccaaaccttcagaatattccagtacgtaccccattgggccagaagatccgccgcgcgtttgtagctgaggagggttggcgtttagtggccctcgattatagccaaattgaattacgtgtccttgcccatctttctggcgatgagaacctcatccgcgtgtttcaggaaggcaaagacattcacactcaaacggcaagctggatgtttggattatcagctgaagcgatcgatcctttgatgcgtcgtgcagcgaagaccatcaatttcggtgttctctacggtatgagtgcccatcgtttgtcgcaggaattaggcattccctatgaagaagctgcggcgttcattcagcgctactttcaaagctatcccaaagttaaagcatggatcgagaagactctcgaagaaggccgcacacgtggttacgtagagaccttatttggacgtcgccgctatgttcccgatttaaacgctcgcgtgaaatctgtccgtgaagccgccgaacgcatggcgttcaacatgcctgtacagggcacggcagctgacctcatgaaacttgcaatggtgcgcctttttccacaattgcgtgaagttggtgcccgcatgctcttgcaggtccacgatgaactcttgttagaagcgccaaaagagcgtgcggaagaggtggcagccctcgcgaaagaggttatggaaggcgtgtggcccttagcggtgcctcttgaagtcgaagttggtattggcgaggattggttggctgccaaaggataatga

SEQ ID NO: 2038 - protein, 841 aa, synthetic construct
  REGION 1..841: note = Variant of DNA polymerase I from Thermus sp. strain 2.9
MHHHHHHGGSGMLPLFEPKGRVLLVDGHHLAYRNFFALKGLTTSRGEPVQGVYGFAKSLLKALKEDGDVVIVVFDAKAPMFRHEAYEAYKAGRAPTPEDFPRQLALMKELVDLLGLERLEVPGFEADDVLATLAKKAEREGYEVQILTADRDLFQLLSPRISVLHPEGHRITPEWLWEKYGLRPEQWVDFRALAGDPSDNIPGVKGIGEKTALKLLKEWGSLENLLKNLDQVKPESVREKILAHLEDLKLSRELSRVRTDLPLEVDFRGRREPDWEGLKAFLERLEFGSLLHEFGLLESPLPAEEAPWPPPEGAFLGYRLSRPEPMWAELLALAASAQGRVYRAEDPHGALRGLKEVRGLLAKDLAVVALREGLDLPPTDDPMLLAYLLDPSNTTPEGVARRYGGEWTEDAGERALLAERLHANLLGRLQGEERLLWLYEEVEKPLSRVLAHMEATGVKLDVAYLEALSLEVAAEMRRLEEEVFRLAGHSFYLNSRDQLERVLFDELGLPPIGKTEKTGKRSTSAAVLEALREVHPIVDKILQYRELAKLKGTYIDPLPALVHPKTGRLHTRFNQTATATGRLSSSDPNLQNIPVRTPLGQKIRRAFVAEEGWRLVALDYSQIELRVLAHLSGDENLIRVFQEGKDIHTQTASWMFGLSAEAIDPLMRRAAKTINFGVLYGMSAHRLSQELGIPYEEAAAFIQRYFQSYPKVKAWIEKTLEEGRTRGYVETLFGRRRYVPDLNARVKSVREAAERMAFNMPVQGTAADLMKLAMVRLFPQLREVGARMLLQVHDELLLEAPKERAEEVAALAKEVMEGVWPLAVPLEVEVGIGEDWLAAKG

SEQ ID NO: 2039 - DNA, 2529 bp, synthetic construct
  misc_feature 1..2529: note = Variant of DNA polymerase I from Thermus sp. strain 2.9
  source 1..2529: mol_type = other DNA
atgcaccatcatcatcatcatggcggtagcggcatgttaccgttgttcgaacctaaaggtcgcgtgcttctggttgatggccatcatctcgcgtatcgtaacttctttgccctgaaaggattaaccaccagccgtggcgagccggtacagggtgtctacggctttgcaaagtcgctcctgaaagctctgaaagaagacggtgatgtggtgattgttgtctttgatgcgaaagcgccaagttttcgccacgaagcgtacgaagcttacaaagccgggcgtgctccaacgccggaagactttcctcgccaattggcgcttatgaaggaattagtggatttgcttggcctcgaacgcttggaagttcccggtttcgaggcagacgacgtattagcgactctcgcaaagaaagccgaacgtgagggctatgaagtccagatcttgacagcagatcgcgatcttttccagcttttatctccgcgcatctcggtgttacacccggaagggcatcgtatcaccccggaatggctctgggagaaatatggtttgcgtcccgaacaatgggtggattttcgcgccttagcaggcgatccgagcgacaatattccgggagttaaaggtatcggcgagaagacggcgctcaagctccttaaagaatgggggtcgttggagaacttgcttaagaatttagatcaggtcaaaccagagtcagtgcgtgagaagattcttgcacacctcgaagacctcaaattaagccgcgaattgtcccgtgtacgcaccgatttgccgctcgaagttgatttccgtggccgccgcgaacctgactgggagggtcttaaagcgtttttagagcgtcttgaatttggttcgctcttgcatgaattcggccttttagaaagcccgttaccagccgaagaagcaccttggccaccgcccgaaggcgcgtttttaggttaccgtttgagtcgcccggaaccgatgtgggccgaattattggctcttgcagcgtctgcccagggacgtgtgtatcgcgcggaagaccctcatggtgcgctccgcggcctcaaagaagtccgtggactccttgccaaagacttagctgttgttgcattgcgcgaaggtcttgatttacctccgactgatgatccaatgcttcttgcgtacctcttggacccgtcaaacacgacgcccgaaggcgtagcccgtcgttacggcggcgagtggaccgaagatgcaggcgagcgcgcgttattggccgaacgtttgcacgccaatttattaggacgtttgcaaggcgaggaacgtctcctctggctttacgaagaagtggagaaaccattgagtcgcgtgctcgcgcatatggaagctaccggtgtcaaattagacgtggcgtatttggaggcactcagccttgaagttgctgccgaaatgcgccgcttggaggaagaagtattccgtttagcaggccactccttttatcttaattctcgcgatcagttagaacgtgtgttgttcgatgaacttggtctccctcctatcggcaagacagagaagaccggtaaacgtagcacttcagcggcggttttagaagctcttcgcgaagtccatcccattgtggacaagatcttgcagtaccgcgaactcgcgaaattgaaaggcacctatattgaccctcttccggcattagtccacccgaaaacgggacgcctccatacccgcttcaaccaaacagccacggcgaccggtcgtttgtcctcctctgatccaaaccttcagaatattccagtacgtaccccattgggccagaagatccgccgcgcgtttgtagctgaggagggttggcgtttagtggccctcgattatagccaaattgaattacgtgtccttgcccatctttctggcgatgagaacctcatccgcgtgtttcaggaaggcaaagacattcacactcaaacggcaagctggatgtttggattatcagctgaagcgatcgatcctttgatgcgtcgtgcagcgaagaccatcaatttcggtgttctctacggtatgagtgcccatcgtttgtcgcaggaattaggcattccctatgaagaagctgcggcgttcattcagcgctactttcaaagctatcccaaagttaaagcatggatcgagaagactctcgaagaaggccgcacacgtggttacgtagagaccttatttggacgtcgccgctatgttagtgatttaaacgctcgcgtgaaatctgtccgtgaagccgccgaacgcatggcgttcaacatgcctgtacagggcacggcagctgacctcatgaaacttgcaatggtgcgcctttttccacaattgcgtgaagttggtgcccgcatgctcttgcaggtccacgatgaactcttgttagaagcgccaaaagagcgtgcggaagaggtggcagccctcgcgaaagaggttatggaaggcgtgtggcccttagcggtgcctcttgaagtcgaagttggtattggcgaggattggttggctgccaaaggataatga

SEQ ID NO: 2040 - protein, 841 aa, synthetic construct
  REGION 1..841: note = Variant of DNA polymerase I from Thermus sp. strain 2.9
MHHHHHHGGSGMLPLFEPKGRVLLVDGHHLAYRNFFALKGLTTSRGEPVQGVYGFAKSLLKALKEDGDVVIVVFDAKAPSFRHEAYEAYKAGRAPTPEDFPRQLALMKELVDLLGLERLEVPGFEADDVLATLAKKAEREGYEVQILTADRDLFQLLSPRISVLHPEGHRITPEWLWEKYGLRPEQWVDFRALAGDPSDNIPGVKGIGEKTALKLLKEWGSLENLLKNLDQVKPESVREKILAHLEDLKLSRELSRVRTDLPLEVDFRGRREPDWEGLKAFLERLEFGSLLHEFGLLESPLPAEEAPWPPPEGAFLGYRLSRPEPMWAELLALAASAQGRVYRAEDPHGALRGLKEVRGLLAKDLAVVALREGLDLPPTDDPMLLAYLLDPSNTTPEGVARRYGGEWTEDAGERALLAERLHANLLGRLQGEERLLWLYEEVEKPLSRVLAHMEATGVKLDVAYLEALSLEVAAEMRRLEEEVFRLAGHSFYLNSRDQLERVLFDELGLPPIGKTEKTGKRSTSAAVLEALREVHPIVDKILQYRELAKLKGTYIDPLPALVHPKTGRLHTRFNQTATATGRLSSSDPNLQNIPVRTPLGQKIRRAFVAEEGWRLVALDYSQIELRVLAHLSGDENLIRVFQEGKDIHTQTASWMFGLSAEAIDPLMRRAAKTINFGVLYGMSAHRLSQELGIPYEEAAAFIQRYFQSYPKVKAWIEKTLEEGRTRGYVETLFGRRRYVSDLNARVKSVREAAERMAFNMPVQGTAADLMKLAMVRLFPQLREVGARMLLQVHDELLLEAPKERAEEVAALAKEVMEGVWPLAVPLEVEVGIGEDWLAAKG

SEQ ID NO: 2041 - DNA, 2529 bp, synthetic construct
  misc_feature 1..2529: note = Variant of DNA polymerase I from Thermus sp. strain 2.9
  source 1..2529: mol_type = other DNA
atgcaccatcatcatcatcatggcggtagcggcatgttaccgttgttcgaacctaaaggtcgcgtgcttctggttgatggccatcatctcgcgtatcgtaacttctttgccctgaaaggattaaccaccagccgtggcgagccggtacagggtgtctacggctttgcaaagtcgctcctgaaagctctgaaagaagacggtgatgtggtgattgttgtctttgatgcgaaagcgccaagttttcgccacgaagcgtacgaagcttacaaagccgggcgtgctccaacgccggaagactttcctcgccaattggcgcttatgaaggaattagtggatttgcttggcctcgaacgcttggaagttcccggtttcgaggcagacgacgtattagcgactctcgcaaagaaagccgaacgtgagggctatgaagtccagatcttgacagcagatcgcgatcttttccagcttttatctccgcgcatctcggtgttacacccggaagggcatcgtatcaccccggaatggctctgggagaaatatggtttgcgtcccgaacaatgggtggattttcgcgccttagcaggcgatccgagcgacaatattccgggagttaaaggtatcggcgagaagacggcgctcaagctccttaaagaatgggggtcgttggagaacttgcttaagaatttagatcaggtcaaaccagagtcagtgcgtgagaagattcttgcacacctcgaagacctcaaattaagccgcgaattgtcccgtgtacgcaccgatttgccgctcgaagttgatttccgtggccgccgcgaacctgactgggagggtcttaaagcgtttttagagcgtcttgaatttggttcgctcttgcatgaattcggccttttagaaagcccgttaccagccgaagaagcaccttggccaccgcccgaaggcgcgtttttaggttaccgtttgagtcgcccggaaccgatgtgggccgaattattggctcttgcagcgtctgcccagggacgtgtgtatcgcgcggaagaccctcatggtgcgctccgcggcctcaaagaagtccgtggactccttgccaaagacttagctgttgttgcattgcgcgaaggtcttgatttacctccgactgatgatccaatgcttcttgcgtacctcttggacccgtcaaacacgacgcccgaaggcgtagcccgtcgttacggcggcgagtggaccgaagatgcaggcgagcgcgcgttattggccgaacgtttgcacgccaatttattaggacgtttgcaaggcgaggaacgtctcctctggctttacgaagaagtggagaaaccattgagtcgcgtgctcgcgcatatggaagctaccggtgtcaaattagacgtggcgtatttggaggcactcagccttgaagttgctgccgaaatgcgccgcttggaggaagaagtattccgtttagcaggccactccttttatcttaattctcgcgatcagttagaacgtgtgttgttcgatgaacttggtctccctcctatcggcaagacagagaagaccggtaaacgtagcacttcagcggcggttttagaagctcttcgcgaagtccatcccattgtggacaagatcttgcagtaccgcgaactcgcgaaattgaaaggcacctatattgaccctcttccggcattagtccacccgaaaacgggacgcctccatacccgcttcaaccaaacagccacggcgaccggtcgtttgtcctcctctgatccaaaccttcagaatattccagtacgtaccccattgggccagaagatccgccgcgcgtttgtagctgaggagggttggcgtttagtggccctcgattatagccaaattgaattacgtgtccttgcccatctttctggcgatgagaacctcatccgcgtgtttcaggaaggcaaagacattcacactcaaacggcaagctggatgtttggattatcagctgaagcgatcgatcctttgatgcgtcgtgcagcgaagaccatcaatttcggtgttctctacggtatgagtgcccatcgtttgtcgcaggaattaggcattccctatgaagaagctgcggcgttcattcagcgctactttcaaagctatcccaaagttaaagcatggatcgagaagactctcgaagaaggccgcacacgtggttacgtagagaccttatttggacgtcgccgctatgttcccgatttaagtgctcgcgtgaaatctgtccgtgaagccgccgaacgcatggcgttcaacatgcctgtacagggcacggcagctgacctcatgaaacttgcaatggtgcgcctttttccacaattgcgtgaagttggtgcccgcatgctcttgcaggtccacgatgaactcttgttagaagcgccaaaagagcgtgcggaagaggtggcagccctcgcgaaagaggttatggaaggcgtgtggcccttagcggtgcctcttgaagtcgaagttggtattggcgaggattggttggctgccaaaggataatga

SEQ ID NO: 2042 - protein, 841 aa, synthetic construct
  REGION 1..841: note = Variant of DNA polymerase I from Thermus sp. strain 2.9
MHHHHHHGGSGMLPLFEPKGRVLLVDGHHLAYRNFFALKGLTTSRGEPVQGVYGFAKSLLKALKEDGDVVIVVFDAKAPSFRHEAYEAYKAGRAPTPEDFPRQLALMKELVDLLGLERLEVPGFEADDVLATLAKKAEREGYEVQILTADRDLFQLLSPRISVLHPEGHRITPEWLWEKYGLRPEQWVDFRALAGDPSDNIPGVKGIGEKTALKLLKEWGSLENLLKNLDQVKPESVREKILAHLEDLKLSRELSRVRTDLPLEVDFRGRREPDWEGLKAFLERLEFGSLLHEFGLLESPLPAEEAPWPPPEGAFLGYRLSRPEPMWAELLALAASAQGRVYRAEDPHGALRGLKEVRGLLAKDLAVVALREGLDLPPTDDPMLLAYLLDPSNTTPEGVARRYGGEWTEDAGERALLAERLHANLLGRLQGEERLLWLYEEVEKPLSRVLAHMEATGVKLDVAYLEALSLEVAAEMRRLEEEVFRLAGHSFYLNSRDQLERVLFDELGLPPIGKTEKTGKRSTSAAVLEALREVHPIVDKILQYRELAKLKGTYIDPLPALVHPKTGRLHTRFNQTATATGRLSSSDPNLQNIPVRTPLGQKIRRAFVAEEGWRLVALDYSQIELRVLAHLSGDENLIRVFQEGKDIHTQTASWMFGLSAEAIDPLMRRAAKTINFGVLYGMSAHRLSQELGIPYEEAAAFIQRYFQSYPKVKAWIEKTLEEGRTRGYVETLFGRRRYVPDLSARVKSVREAAERMAFNMPVQGTAADLMKLAMVRLFPQLREVGARMLLQVHDELLLEAPKERAEEVAALAKEVMEGVWPLAVPLEVEVGIGEDWLAAKG

SEQ ID NO: 2043 - DNA, 2529 bp, synthetic construct; identical to SEQ ID NO: 1749
  misc_feature 1..2529: note = Variant of DNA polymerase I from Thermus sp. strain 2.9
  source 1..2529: mol_type = other DNA

SEQ ID NO: 2044 - protein, 841 aa, synthetic construct; identical to SEQ ID NO: 1750
  REGION 1..841: note = Variant of DNA polymerase I from Thermus sp. strain 2.9

SEQ ID NO: 2045 - DNA, 2529 bp, synthetic construct
  misc_feature 1..2529: note = Variant of DNA polymerase I from Thermus sp. strain 2.9
  source 1..2529: mol_type = other DNA
atgcaccatcatcatcatcatggcggtagcggcatgttaccgttgttcgaacctaaaggtcgcgtgcttctggttgatggccatcatctcgcgtatcgtaacttctttgccctgaaaggattaaccaccagccgtggcgagccggtacagggtgtctacggctttgcaaagtcgctcctgaaagctctgaaagaagacggtgatgtggtgattgttgtctttgatgcgaaagcgccaagttttcgccacgaagcgtacgaagcttacaaagccgggcgtgctccaacgccggaagactttcctcgccaattggcgcttatgaaggaattagtggatttgcttggcctcgaacgcttggaagttcccggtttcgaggcagacgacgtattagcgactctcgcaaagaaagccgaacgtgagggctatgaagtccagatcttgacagcagatcgcgatcttttccagcttttatctccgcgcatctcggtgttacacccggaagggcatcgtatcaccccggaatggctctgggagaaatatggtttgcgtcccgaacaatgggtggattttcgcgccttagcaggcgatccgagcgacaatattccgggagttaaaggtatcggcgagaagacggcgctcaagctccttaaagaatgggggtcgttggagaacttgcttaagaatttagatcaggtcaaaccagagtcagtgcgtgagaagattcttgcacacctcgaagacctcaaattaagccgcgaattgtcccgtgtacgcaccgatttgccgctcgaagttgatttccgtggccgccgcgaacctgactgggagggtcttaaagcgtttttagagcgtcttgaatttggttcgctcttgcatgaattcggccttttagaaagcccgttaccagccgaagaagcaccttggccaccgcccgaaggcgcgtttttaggttaccgtttgagtcgcccggaaccgatgtgggccgaattattggctcttgcagcgtctgcccagggacgtgtgtatcgcgcggaagaccctcatggtgcgctccgcggcctcaaagaagtccgtggactccttgccaaagacttagctgttgttgcattgcgcgaaggtcttgatttacctccgactgatgatccaatgcttcttgcgtacctcttggacccgtcaaacacgacgcccgaaggcgtagcccgtcgttacggcggcgagtggaccgaagatgcaggcgagcgcgcgttattggccgaacgtttgcacgccaatttattaggacgtttgcaaggcgaggaacgtctcctctggctttacgaagaagtggagaaaccattgagtcgcgtgctcgcgcatatggaagctaccggtgtcaaattagacgtggcgtatttggaggcactcagccttgaagttgctgccgaaatgcgccgcttggaggaagaagtattccgtttagcaggccactccttttatcttaattctcgcgatcagttagaacgtgtgttgttcgatgaacttggtctccctcctatcggcaagacagagaagaccggtaaacgtagcacttcagcggcggttttagaagctcttcgcgaagtccatcccattgtggacaagatcttgcagtaccgcgaactcgcgaaattgaaaggcacctatattgaccctcttccggcattagtccacccgaaaacgggacgcctccatacccgcttcaaccaaacagccacggcgaccggtcgtttgtcctcctctgatccaaaccttcagaatattccagtacgtaccccattgggccagaagatccgccgcgcgtttgtagctgaggagggttggcgtttagtggccctcgattatagccaaattgaattacgtgtccttgcccatctttctggcgatgagaacctcatccgcgtgtttcaggaaggcaaagacattcacactcaaacggcaagctggatgtttggattatcagctgaagcgatcgatcctcagatgcgtcgtgcagcgaagaccatcaatttcggtgttctctacggtatgagtgcccatcgtttgtcgcaggaattaggcattccctatgaagaagctgcggcgttcattcagcgctactttcaaagctatcccaaagttaaagcatggatcgagaagactctcgaagaaggccgcacacgtggttacgtagagaccttatttggacgtcgccgctatgttcccgatttaaacgctcgcgtgaaatctgtccgtgaagccgccgaacgcatggcgttcaacatgcctgtacagggcacggcagctgacctcatgaaacttgcaatggtgcgcctttttccacaattgcgtgaagttggtgcccgcatgctcttgcaggtccacgatgaactcttgttagaagcgccaaaagagcgtgcggaagaggtggcagccctcgcgaaagaggttatggaaggcgtgtggcccttagcggtgcctcttgaagtcgaagttggtattggcgaggattggttggctgccaaaggataatga

SEQ ID NO: 2046 - protein, 841 aa, synthetic construct
  REGION 1..841: note = Variant of DNA polymerase I from Thermus sp. strain 2.9
MHHHHHHGGSGMLPLFEPKGRVLLVDGHHLAYRNFFALKGLTTSRGEPVQGVYGFAKSLLKALKEDGDVVIVVFDAKAPSFRHEAYEAYKAGRAPTPEDFPRQLALMKELVDLLGLERLEVPGFEADDVLATLAKKAEREGYEVQILTADRDLFQLLSPRISVLHPEGHRITPEWLWEKYGLRPEQWVDFRALAGDPSDNIPGVKGIGEKTALKLLKEWGSLENLLKNLDQVKPESVREKILAHLEDLKLSRELSRVRTDLPLEVDFRGRREPDWEGLKAFLERLEFGSLLHEFGLLESPLPAEEAPWPPPEGAFLGYRLSRPEPMWAELLALAASAQGRVYRAEDPHGALRGLKEVRGLLAKDLAVVALREGLDLPPTDDPMLLAYLLDPSNTTPEGVARRYGGEWTEDAGERALLAERLHANLLGRLQGEERLLWLYEEVEKPLSRVLAHMEATGVKLDVAYLEALSLEVAAEMRRLEEEVFRLAGHSFYLNSRDQLERVLFDELGLPPIGKTEKTGKRSTSAAVLEALREVHPIVDKILQYRELAKLKGTYIDPLPALVHPKTGRLHTRFNQTATATGRLSSSDPNLQNIPVRTPLGQKIRRAFVAEEGWRLVALDYSQIELRVLAHLSGDENLIRVFQEGKDIHTQTASWMFGLSAEAIDPQMRRAAKTINFGVLYGMSAHRLSQELGIPYEEAAAFIQRYFQSYPKVKAWIEKTLEEGRTRGYVETLFGRRRYVPDLNARVKSVREAAERMAFNMPVQGTAADLMKLAMVRLFPQLREVGARMLLQVHDELLLEAPKERAEEVAALAKEVMEGVWPLAVPLEVEVGIGEDWLAAKG

SEQ ID NO: 2047 - DNA, 2529 bp, synthetic construct
  misc_feature 1..2529: note = Variant of DNA polymerase I from Thermus sp. strain 2.9
  source 1..2529: mol_type = other DNA
atgcaccatcatcatcatcatggcggtagcggcatgttaccgttgttcgaacctaaaggtcgcgtgcttctggttgatggccatcatctcgcgtatcgtaacttctttgccctgaaaggattaaccaccagccgtggcgagccggtacagggtgtctacggctttgcaaagtcgctcctgaaagctctgaaagaagacggtgatgtggtgattgttgtctttgatgcgaaagcgccaagttttcgccacgaagcgtacgaagcttacaaagccgggcgtgctccaacgccggaagactttcctcgccaattggcgcttatgaaggaattagtggatttgcttggcctcgaacgcttggaagttcccggtttcgaggcagacgacgtattagcgactctcgcaaagaaagccgaacgtgagggctatgaagtccagatcttgacagcagatcgcgatcttttccagcttttatctccgcgcatctcggtgttacacccggaagggcatcgtatcaccccggaatggctctgggagaaatatggtttgcgtcccgaacaatgggtggattttcgcgccttagcaggcgatccgagcgacaatattccgggagttaaaggtatcggcgagaagacggcgctcaagctccttaaagaatgggggtcgttggagaacttgcttaagaatttagatcaggtcaaaccagagtcagtgcgtgagaagattcttgcacacctcgaagacctcaaattaagccgcgaattgtcccgtgtacgcaccgatttgccgctcgaagttgatttccgtggccgccgcgaacctgactgggagggtcttaaagcgtttttagagcgtcttgaatttggttcgctcttgcatgaattcggccttttagaaagcccgttaccagccgaagaagcaccttggccaccgcccgaaggcgcgtttttaggttaccgtttgagtcgcccggaaccgatgtgggccgaattattggctcttgcagcgtctgcccagggacgtgtgtatcgcgcggaagaccctcatggtgcgctccgcggcctcaaagaagtccgtggactccttgccaaagacttagctgttgttgcattgcgcgaaggtcttgatttacctccgactgatgatccaatgcttcttgcgtacctcttggacccgtcaaacacgacgcccgaaggcgtagcccgtcgttacggcggcgagtggaccgaagatgcaggcgagcgcgcgttattggccgaacgtttgcacgccaatttattaggacgtttgcaaggcgaggaacgtctcctctggctttacgaagaagtggagaaaccattgagtcgcgtgctcgcgcatatggaagctaccggtgtcaaattagacgtggcgtatttggaggcactcagccttgaagttgctgccgaaatgcgccgcttggaggaagaagtattccgtttagcaggccactccttttatcttaattctcgcgatcagttagaacgtgtgttgttcgatgaacttggtctccctcctatcggcaagacagagaagaccggtaaacgtagcacttcagcggcggttttagaagctcttcgcgaagtccatcccattgtggacaagatcttgcagtaccgcgaactcgcgaaattgaaaggcacctatattgaccctcttccggcattagtccacccgaaaacgggacgcctccatacccgcttcaaccaaacagccacggcgaccggtcgtttgtcctcctctgatccaaaccttcagaatattccagtacgtaccccattgggccagaagatccgccgcgcgtttgtagctgaggagggttggcgtttagtggccctcgattatagccaaattgaattacgtgtccttgcccatctttctggcgatgagaacctcatccgcgtgtttcaggaaggcaaagacattcacactcaaacggcaagctggatgtttggattatcagctgaagcgatcgatcctttgatgcgtcgtgcagcgaagaccatcaatttcggtgttctctacggtatgagtgcccatcgtttgtcgcaggaattaggcattccctatgaagaagctgcggcgttcattcagcgctactttcaaagctatcccaaagttaaagcatggatcgagaagactctcgaagaaggccgcacacgtggttacgtagagaccttatttggacgtcgccgctatgttcccgatttaaacgctcgcgtgaaatctgtccgtgaagccgccgaacgcatggcgttcaacatgcctgtacagggcacggcagctgacctcatgaaacttgcaatggtgcgcctttttccacaattgcgtgaagttggtgcccgcatgctcttgcaggtccacgatgaactcttgttagaagcgccaaaagagggggcggaagaggtggcagccctcgcgaaagaggttatggaaggcgtgtggcccttagcggtgcctcttgaagtcgaagttggtattggcgaggattggttggctgccaaaggataatga

SEQ ID NO: 2048 - protein, 841 aa, synthetic construct
  REGION 1..841: note = Variant of DNA polymerase I from Thermus sp. strain 2.9
MHHHHHHGGSGMLPLFEPKGRVLLVDGHHLAYRNFFALKGLTTSRGEPVQGVYGFAKSLLKALKEDGDVVIVVFDAKAPSFRHEAYEAYKAGRAPTPEDFPRQLALMKELVDLLGLERLEVPGFEADDVLATLAKKAEREGYEVQILTADRDLFQLLSPRISVLHPEGHRITPEWLWEKYGLRPEQWVDFRALAGDPSDNIPGVKGIGEKTALKLLKEWGSLENLLKNLDQVKPESVREKILAHLEDLKLSRELSRVRTDLPLEVDFRGRREPDWEGLKAFLERLEFGSLLHEFGLLESPLPAEEAPWPPPEGAFLGYRLSRPEPMWAELLALAASAQGRVYRAEDPHGALRGLKEVRGLLAKDLAVVALREGLDLPPTDDPMLLAYLLDPSNTTPEGVARRYGGEWTEDAGERALLAERLHANLLGRLQGEERLLWLYEEVEKPLSRVLAHMEATGVKLDVAYLEALSLEVAAEMRRLEEEVFRLAGHSFYLNSRDQLERVLFDELGLPPIGKTEKTGKRSTSAAVLEALREVHPIVDKILQYRELAKLKGTYIDPLPALVHPKTGRLHTRFNQTATATGRLSSSDPNLQNIPVRTPLGQKIRRAFVAEEGWRLVALDYSQIELRVLAHLSGDENLIRVFQEGKDIHTQTASWMFGLSAEAIDPLMRRAAKTINFGVLYGMSAHRLSQELGIPYEEAAAFIQRYFQSYPKVKAWIEKTLEEGRTRGYVETLFGRRRYVPDLNARVKSVREAAERMAFNMPVQGTAADLMKLAMVRLFPQLREVGARMLLQVHDELLLEAPKEGAEEVAALAKEVMEGVWPLAVPLEVEVGIGEDWLAAKG

SEQ ID NO: 2049 - DNA, 2529 bp, synthetic construct
  misc_feature 1..2529: note = Variant of DNA polymerase I from Thermus sp. strain 2.9
  source 1..2529: mol_type = other DNA
atgcaccatcatcatcatcatggcggtagcggcatgttaccgttgttcgaacctaaaggtcgcgtgcttctggttgatggccatcatctcgcgtatcgtaacttctttgccctgaaaggattaaccaccagccgtggcgagccggtacagggtgtctacggctttgcaaagtcgctcctgaaagctctgaaagaagacggtgatgtggtgattgttgtctttgatgcgaaagcgccaagttttcgccacgaagcgtacgaagcttacaaagccgggcgtgctccaacgccggaagactttcctcgccaattggcgcttatgaaggaattagtggatttgcttggcctcgaacgcttggaagttcccggtttcgaggcagacgacgtattagcgactctcgcaaagaaagccgaacgtgagggctatgaagtccagatcttgacagcagatcgcgatcttttccagcttttatctccgcgcatctcggtgttacacccggaagggcatcgtatcaccccggaatggctctgggagaaatatggtttgcgtcccgaacaatgggtggattttcgcgccttagcaggcgatccgagcgacaatattccgggagttaaaggtatcggcgagaagacggcgctcaagctccttaaagaatgggggtcgttggagaacttgcttaagaatttagatcaggtcaaaccagagtcagtgcgtgagaagattcttgcacacctcgaagacctcaaattaagccgcgaattgtcccgtgtacgcaccgatttgccgctcgaagttgatttccgtggccgccgcgaacctgactgggagggtcttaaagcgtttttagagcgtcttgaatttggttcgctcttgcatgaattcggccttttagaaagcccgttaccagccgaagaagcaccttggccaccgcccgaaggcgcgtttttaggttaccgtttgagtcgcccggaaccgatgtgggccgaattattggctcttgcagcgtctgcccagggacgtgtgtatcgcgcggaagaccctcatggtgcgctccgcggcctcaaagaagtccgtggactccttgccaaagacttagctgttgttgcattgcgcgaaggtcttctgttacctccgactgatgatccaatgcttcttgcgtacctcttggacccgtcaaacacgacgcccgaaggcgtagcccgtcgttacggcggcgagtggaccgaagatgcaggcgagcgcgcgttattggccgaacgtttgcacgccaatttattaggacgtttgcaaggcgaggaacgtctcctctggctttacgaagaagtggagaaaccattgagtcgcgtgctcgcgcatatggaagctaccggtgtcaaattagacgtggcgtatttggaggcactcagccttgaagttgctgccgaaatgcgccgcttggaggaagaagtattccgtttagcaggccactccttttatcttaattctcgcgatcagttagaacgtgtgttgttcgatgaacttggtctccctcctatcggcaagacagagaagaccggtaaacgtagcacttcagcggcggttttagaagctcttcgcgaagtccatcccattgtggacaagatcttgcagtaccgcgaactcgcgaaattgaaaggcacctatattgaccctcttccggcattagtccacccgaaaacgggacgcctccatacccgcttcaaccaaacagccacggcgaccggtcgtttgtcctcctctgatccaaaccttcagaatattccagtacgtaccccattgggccagaagatccgccgcgcgtttgtagctgaggagggttggcgtttagtggccctcgattatagccaaattgaattacgtgtccttgcccatctttctggcgatgagaacctcatccgcgtgtttcaggaaggcaaagacattcacactcaaacggcaagctggatgtttggattatcagctgaagcgatcgatcctttgatgcgtcgtgcagcgaagaccatcaatttcggtgttctctacggtatgagtgcccatcgtttgtcgcaggaattaggcattccctatgaagaagctgcggcgttcattcagcgctactttcaaagctatcccaaagttaaagcatggatcgagaagactctcgaagaaggccgcacacgtggttacgtagagaccttatttggacgtcgccgctatgttcccgatttaaacgctcgcgtgaaatctgtccgtgaagccgccgaacgcatggcgttcaacatgcctgtacagggcacggcagctgacctcatgaaacttgcaatggtgcgcctttttccacaattgcgtgaagttggtgcccgcatgctcttgcaggtccacgatgaactcttgttagaagcgccaaaagagcgtgcggaagaggtggcagccctcgcgaaagaggttatggaaggcgtgtggcccttagcggtgcctcttgaagtcgaagttggtattggcgaggattggttggctgccaaaggataatga

SEQ ID NO: 2050 - protein, 841 aa, synthetic construct
  REGION 1..841: note = Variant of DNA polymerase I from Thermus sp. strain 2.9
MHHHHHHGGSGMLPLFEPKGRVLLVDGHHLAYRNFFALKGLTTSRGEPVQGVYGFAKSLLKALKEDGDVVIVVFDAKAPSFRHEAYEAYKAGRAPTPEDFPRQLALMKELVDLLGLERLEVPGFEADDVLATLAKKAEREGYEVQILTADRDLFQLLSPRISVLHPEGHRITPEWLWEKYGLRPEQWVDFRALAGDPSDNIPGVKGIGEKTALKLLKEWGSLENLLKNLDQVKPESVREKILAHLEDLKLSRELSRVRTDLPLEVDFRGRREPDWEGLKAFLERLEFGSLLHEFGLLESPLPAEEAPWPPPEGAFLGYRLSRPEPMWAELLALAASAQGRVYRAEDPHGALRGLKEVRGLLAKDLAVVALREGLLLPPTDDPMLLAYLLDPSNTTPEGVARRYGGEWTEDAGERALLAERLHANLLGRLQGEERLLWLYEEVEKPLSRVLAHMEATGVKLDVAYLEALSLEVAAEMRRLEEEVFRLAGHSFYLNSRDQLERVLFDELGLPPIGKTEKTGKRSTSAAVLEALREVHPIVDKILQYRELAKLKGTYIDPLPALVHPKTGRLHTRFNQTATATGRLSSSDPNLQNIPVRTPLGQKIRRAFVAEEGWRLVALDYSQIELRVLAHLSGDENLIRVFQEGKDIHTQTASWMFGLSAEAIDPLMRRAAKTINFGVLYGMSAHRLSQELGIPYEEAAAFIQRYFQSYPKVKAWIEKTLEEGRTRGYVETLFGRRRYVPDLNARVKSVREAAERMAFNMPVQGTAADLMKLAMVRLFPQLREVGARMLLQVHDELLLEAPKERAEEVAALAKEVMEGVWPLAVPLEVEVGIGEDWLAAKG

SEQ ID NO: 2051 - DNA, 2529 bp, synthetic construct
  misc_feature 1..2529: note = Variant of DNA polymerase I from Thermus sp. strain 2.9
  source 1..2529: mol_type = other DNA
atgcaccatcatcatcatcatggcggtagcggcatgttaccgttgttcgaacctaaaggtcgcgtgcttctggttgatggccatcatctcgcgtatcgtaacttctttgccctgaaaggattaaccaccagccgtggcgagccggtacagggtgtctacggctttgcaaagtcgctcctgaaagctctgaaagaagacggtgatgtggtgattgttgtctttgatgcgaaagcgccaagttttcgccacgaagcgtacgaagcttacaaagccgggcgtgctccaacgccgggggactttcctcgccaattggcgcttatgaaggaattagtggatttgcttggcctcgaacgcttggaagttcccggtttcgaggcagacgacgtattagcgactctcgcaaagaaagccgaacgtgagggctatgaagtccagatcttgacagcagatcgcgatcttttccagcttttatctccgcgcatctcggtgttacacccggaagggcatcgtatcaccccggaatggctctgggagaaatatggtttgcgtcccgaacaatgggtggattttcgcgccttagcaggcgatccgagcgacaatattccgggagttaaaggtatcggcgagaagacggcgctcaagctccttaaagaatgggggtcgttggagaacttgcttaagaatttagatcaggtcaaaccagagtcagtgcgtgagaagattcttgcacacctcgaagacctcaaattaagccgcgaattgtcccgtgtacgcaccgatttgccgctcgaagttgatttccgtggccgccgcgaacctgactgggagggtcttaaagcgtttttagagcgtcttgaatttggttcgctcttgcatgaattcggccttttagaaagcccgttaccagccgaagaagcaccttggccaccgcccgaaggcgcgtttttaggttaccgtttgagtcgcccggaaccgatgtgggccgaattattggctcttgcagcgtctgcccagggacgtgtgtatcgcgcggaagaccctcatggtgcgctccgcggcctcaaagaagtccgtggactccttgccaaagacttagctgttgttgcattgcgcgaaggtcttgatttacctccgactgatgatccaatgcttcttgcgtacctcttggacccgtcaaacacgacgcccgaaggcgtagcccgtcgttacggcggcgagtggaccgaagatgcaggcgagcgcgcgttattggccgaacgtttgcacgccaatttattaggacgtttgcaaggcgaggaacgtctcctctggctttacgaagaagtggagaaaccattgagtcgcgtgctcgcgcatatggaagctaccggtgtcaaattagacgtggcgtatttggaggcactcagccttgaagttgctgccgaaatgcgccgcttggaggaagaagtattccgtttagcaggccactccttttatcttaattctcgcgatcagttagaacgtgtgttgttcgatgaacttggtctccctcctatcggcaagacagagaagaccggtaaacgtagcacttcagcggcggttttagaagctcttcgcgaagtccatcccattgtggacaagatcttgcagtaccgcgaactcgcgaaattgaaaggcacctatattgaccctcttccggcattagtccacccgaaaacgggacgcctccatacccgcttcaaccaaacagccacggcgaccggtcgtttgtcctcctctgatccaaaccttcagaatattccagtacgtaccccattgggccagaagatccgccgcgcgtttgtagctgaggagggttggcgtttagtggccctcgattatagccaaattgaattacgtgtccttgcccatctttctggcgatgagaacctcatccgcgtgtttcaggaaggcaaagacattcacactcaaacggcaagctggatgtttggattatcagctgaagcgatcgatcctttgatgcgtcgtgcagcgaagaccatcaatttcggtgttctctacggtatgagtgcccatcgtttgtcgcaggaattaggcattccctatgaagaagctgcggcgttcattcagcgctactttcaaagctatcccaaagttaaagcatggatcgagaagactctcgaagaaggccgcacacgtggttacgtagagaccttatttggacgtcgccgctatgttcccgatttaaacgctcgcgtgaaatctgtccgtgaagccgccgaacgcatggcgttcaacatgcctgtacagggcacggcagctgacctcatgaaacttgcaatggtgcgcctttttccacaattgcgtgaagttggtgcccgcatgctcttgcaggtccacgatgaactcttgttagaagcgccaaaagagcgtgcggaagaggtggcagccctcgcgaaagaggttatggaaggcgtgtggcccttagcggtgcctcttgaagtcgaagttggtattggcgaggattggttggctgccaaaggataatga

SEQ ID NO: 2052 - protein, 841 aa, synthetic construct
  REGION 1..841: note = Variant of DNA polymerase I from Thermus sp. strain 2.9
MHHHHHHGGSGMLPLFEPKGRVLLVDGHHLAYRNFFALKGLTTSRGEPVQGVYGFAKSLLKALKEDGDVVIVVFDAKAPSFRHEAYEAYKAGRAPTPGDFPRQLALMKELVDLLGLERLEVPGFEADDVLATLAKKAEREGYEVQILTADRDLFQLLSPRISVLHPEGHRITPEWLWEKYGLRPEQWVDFRALAGDPSDNIPGVKGIGEKTALKLLKEWGSLENLLKNLDQVKPESVREKILAHLEDLKLSRELSRVRTDLPLEVDFRGRREPDWEGLKAFLERLEFGSLLHEFGLLESPLPAEEAPWPPPEGAFLGYRLSRPEPMWAELLALAASAQGRVYRAEDPHGALRGLKEVRGLLAKDLAVVALREGLDLPPTDDPMLLAYLLDPSNTTPEGVARRYGGEWTEDAGERALLAERLHANLLGRLQGEERLLWLYEEVEKPLSRVLAHMEATGVKLDVAYLEALSLEVAAEMRRLEEEVFRLAGHSFYLNSRDQLERVLFDELGLPPIGKTEKTGKRSTSAAVLEALREVHPIVDKILQYRELAKLKGTYIDPLPALVHPKTGRLHTRFNQTATATGRLSSSDPNLQNIPVRTPLGQKIRRAFVAEEGWRLVALDYSQIELRVLAHLSGDENLIRVFQEGKDIHTQTASWMFGLSAEAIDPLMRRAAKTINFGVLYGMSAHRLSQELGIPYEEAAAFIQRYFQSYPKVKAWIEKTLEEGRTRGYVETLFGRRRYVPDLNARVKSVREAAERMAFNMPVQGTAADLMKLAMVRLFPQLREVGARMLLQVHDELLLEAPKERAEEVAALAKEVMEGVWPLAVPLEVEVGIGEDWLAAKG

SEQ ID NO: 2053 - DNA, 2529 bp, synthetic construct
  misc_feature 1..2529: note = Variant of DNA polymerase I from Thermus sp. strain 2.9
  source 1..2529: mol_type = other DNA
atgcaccatcatcatcatcatggcggtagcggcatgttaccgttgttcgaacctaaaggtcgcgtgcttctggttgatggccatcatctcgcgtatcgtaacttctttgccctgaaaggattaaccaccagccgtggcgagccggtacagggtgtctacggctttgcaaagtcgctcctgaaagctctgaaagaagacggtgatgtggtgattgttgtctttgatgcgaaagcgccaagttttcgccacgaagcgtacgaagcttacaaagccgggcgtgctccaacgccggaagactttcctcgccaattggcgcttatgaaggaattagtggatttgcttggcctcgaacgcttggaagttcccggtttcgaggcagacgacgtattagcgactctcgcaaagaaagccgaacgtgagggctatgaagtccagatcttgacagcagatcgcgatcttttccagcttttatctccgcgcatctcggtgttacacccggaagggcatcgtatcaccccggaatggctctgggagaaatatggtttgcgtcccgaacaatgggtggattttcgcgccttagcaggcgatccgagcgacaatattccgggagttaaaggtatcggcgagaagacggcgctcaagctccttaaagaatgggggtcgttggagaacttgcttaagaatttagatcaggtcaaaccagagtcagtgcgtgagaagattcttgcacacctcgaagacctcaaattaagccgcgaattgtcccgtgtacgcaccgatttgccgctcgaagttgatttccgtggccgccgcgaacctgactgggagggtcttaaagcgtttttagagcgtcttgaatttggttcgctcttgcatgaattcggccttttagaaagcccgttaccagccgaagaagcaccttggccaccgcccgaaggcgcgtttttaggttaccgtttgagtcgcccggaaccgatgtgggccgaattattggctcttgcagcgtctgcccagggacgtgtgtatcgcgcggaagaccctcatggtgcgctccgcggcctcaaagaagtccgtggactccttgccaaagacttagctgttgttgcattgcgcgaaggtcttgatttacctccgactgatgatccaatgcttcttgcgtacctcttggacccgtcaaacacgacgcccgaaggcgtagcccgtcgttacggcggcgagtggaccgaagatgcaggcgagcgcgcgttattggccgaacgtttgcacgccaatttattaggacgtttgcaaggcgaggaacgtctcctctggctttactctgaagtggagaaaccattgagtcgcgtgctcgcgcatatggaagctaccggtgtcaaattagacgtggcgtatttggaggcactcagccttgaagttgctgccgaaatgcgccgcttggaggaagaagtattccgtttagcaggccactccttttatcttaattctcgcgatcagttagaacgtgtgttgttcgatgaacttggtctccctcctatcggcaagacagagaagaccggtaaacgtagcacttcagcggcggttttagaagctcttcgcgaagtccatcccattgtggacaagatcttgcagtaccgcgaactcgcgaaattgaaaggcacctatattgaccctcttccggcattagtccacccgaaaacgggacgcctccatacccgcttcaaccaaacagccacggcgaccggtcgtttgtcctcctctgatccaaaccttcagaatattccagtacgtaccccattgggccagaagatccgccgcgcgtttgtagctgaggagggttggcgtttagtggccctcgattatagccaaattgaattacgtgtccttgcccatctttctggcgatgagaacctcatccgcgtgtttcaggaaggcaaagacattcacactcaaacggcaagctggatgtttggattatcagctgaagcgatcgatcctttgatgcgtcgtgcagcgaagaccatcaatttcggtgttctctacggtatgagtgcccatcgtttgtcgcaggaattaggcattccctatgaagaagctgcggcgttcattcagcgctactttcaaagctatcccaaagttaaagcatggatcgagaagactctcgaagaaggccgcacacgtggttacgtagagaccttatttggacgtcgccgctatgttcccgatttaaacgctcgcgtgaaatctgtccgtgaagccgccgaacgcatggcgttcaacatgcctgtacagggcacggcagctgacctcatgaaacttgcaatggtgcgcctttttccacaattgcgtgaagttggtgcccgcatgctcttgcaggtccacgatgaactcttgttagaagcgccaaaagagcgtgcggaagaggtggcagccctcgcgaaagaggttatggaaggcgtgtggcccttagcggtgcctcttgaagtcgaagttggtattggcgaggattggttggctgccaaaggataatga

SEQ ID NO: 2054 - protein, 841 aa, synthetic construct
  REGION 1..841: note = Variant of DNA polymerase I from Thermus sp. strain 2.9
MHHHHHHGGSGMLPLFEPKGRVLLVDGHHLAYRNFFALKGLTTSRGEPVQGVYGFAKSLLKALKEDGDVVIVVFDAKAPSFRHEAYEAYKAGRAPTPEDFPRQLALMKELVDLLGLERLEVPGFEADDVLATLAKKAEREGYEVQILTADRDLFQLLSPRISVLHPEGHRITPEWLWEKYGLRPEQWVDFRALAGDPSDNIPGVKGIGEKTALKLLKEWGSLENLLKNLDQVKPESVREKILAHLEDLKLSRELSRVRTDLPLEVDFRGRREPDWEGLKAFLERLEFGSLLHEFGLLESPLPAEEAPWPPPEGAFLGYRLSRPEPMWAELLALAASAQGRVYRAEDPHGALRGLKEVRGLLAKDLAVVALREGLDLPPTDDPMLLAYLLDPSNTTPEGVARRYGGEWTEDAGERALLAERLHANLLGRLQGEERLLWLYSEVEKPLSRVLAHMEATGVKLDVAYLEALSLEVAAEMRRLEEEVFRLAGHSFYLNSRDQLERVLFDELGLPPIGKTEKTGKRSTSAAVLEALREVHPIVDKILQYRELAKLKGTYIDPLPALVHPKTGRLHTRFNQTATATGRLSSSDPNLQNIPVRTPLGQKIRRAFVAEEGWRLVALDYSQIELRVLAHLSGDENLIRVFQEGKDIHTQTASWMFGLSAEAIDPLMRRAAKTINFGVLYGMSAHRLSQELGIPYEEAAAFIQRYFQSYPKVKAWIEKTLEEGRTRGYVETLFGRRRYVPDLNARVKSVREAAERMAFNMPVQGTAADLMKLAMVRLFPQLREVGARMLLQVHDELLLEAPKERAEEVAALAKEVMEGVWPLAVPLEVEVGIGEDWLAAKG

SEQ ID NO: 2055 - DNA, 2529 bp, synthetic construct
  misc_feature 1..2529: note = Variant of DNA polymerase I from Thermus sp. strain 2.9
  source 1..2529: mol_type = other DNA
atgcctcatcatcatcatcatggcggtagcggcatgttaccgttgttcgaacctaaaggtcgcgtgcttctggttgatggccatcatctcgcgtatcgtaacttctttgccctgaaaggattaaccaccagccgtggcgagccggtacagggtgtctacggctttgcaaagtcgctcctgaaagctctgaaagaagacggtgatgtggtgattgttgtctttgatgcgaaagcgccaagttttcgccacgaagcgtacgaagcttacaaagccgggcgtgctccaacgccggaagactttcctcgccaattggcgcttatgaaggaattagtggatttgcttggcctcgaacgcttggaagttcccggtttcgaggcagacgacgtattagcgactctcgcaaagaaagccgaacgtgagggctatgaagtccagatcttgacagcagatcgcgatcttttccagcttttatctccgcgcatctcggtgttacacccggaagggcatcgtatcaccccggaatggctctgggagaaatatggtttgcgtcccgaacaatgggtggattttcgcgccttagcaggcgatccgagcgacaatattccgggagttaaaggtatcggcgagaagacggcgctcaagctccttaaagaatgggggtcgttggagaacttgcttaagaatttagatcaggtcaaaccagagtcagtgcgtgagaagattcttgcacacctcgaagacctcaaattaagccgcgaattgtcccgtgtacgcaccgatttgccgctcgaagttgatttccgtggccgccgcgaacctgactgggagggtcttaaagcgtttttagagcgtcttgaatttggttcgctcttgcatgaattcggccttttagaaagcccgttaccagccgaagaagcaccttggccaccgcccgaaggcgcgtttttaggttaccgtttgagtcgcccggaaccgatgtgggccgaattattggctcttgcagcgtctgcccagggacgtgtgtatcgcgcggaagaccctcatggtgcgctccgcggcctcaaagaagtccgtggactccttgccaaagacttagctgttgttgcattgcgcgaaggtcttgatttacctccgactgatgatccaatgcttcttgcgtacctcttggacccgtcaaacacgacgcccgaaggcgtagcccgtcgttacggcggcgagtggaccgaagatgcaggcgagcgcgcgttattggccgaacgtttgcacgccaatttattaggacgtttgcaaggcgaggaacgtctcctctggctttacgaagaagtggagaaaccattgagtcgcgtgctcgcgcatatggaagctaccggtgtcaaattagacgtggcgtatttggaggcactcagccttgaagttgctgccgaaatgcgccgcttggaggaagaagtattccgtttagcaggccactccttttatcttaattctcgcgatcagttagaacgtgtgttgttcgatgaacttggtctccctcctatcggcaagacagagaagaccggtaaacgtagcacttcagcggcggttttagaagctcttcgcgaagtccatcccattgtggacaagatcttgcagtaccgcgaactcgcgaaattgaaaggcacctatattgaccctcttccggcattagtccacccgaaaacgggacgcctccatacccgcttcaaccaaacagccacggcgaccggtcgtttgtcctcctctgatccaaaccttcagaatattccagtacgtaccccattgggccagaagatccgccgcgcgtttgtagctgaggagggttggcgtttagtggccctcgattatagccaaattgaattacgtgtccttgcccatctttctggcgatgagaacctcatccgcgtgtttcaggaaggcaaagacattcacactcaaacggcaagctggatgtttggattatcagctgaagcgatcgatcctttgatgcgtcgtgcagcgaagaccatcaatttcggtgttctctacggtatgagtgcccatcgtttgtcgcaggaattaggcattccctatgaagaagctgcggcgttcattcagcgctactttcaaagctatcccaaagttaaagcatggatcgagaagactctcgaagaaggccgcacacgtggttacgtagagaccttatttggacgtcgccgctatgttcccgatttaaacgctcgcgtgaaatctgtccgtgaagccgccgaacgcatggcgttcaacatgcctgtacagggcacggcagctgacctcatgaaacttgcaatggtgcgcctttttccacaattgcgtgaagttggtgcccgcatgctcttgcaggtccacgatgaactcttgttagaagcgccaaaagagcgtgcggaagaggtggcagccctcgcgaaagaggttatggaaggcgtgtggcccttagcggtgcctcttgaagtcgaagttggtattggcgaggattggttggctgccaaaggataatga

SEQ ID NO: 2056 - protein, 841 aa, synthetic construct
  REGION 1..841: note = Variant of DNA polymerase I from Thermus sp. strain 2.9
MPHHHHHGGSGMLPLFEPKGRVLLVDGHHLAYRNFFALKGLTTSRGEPVQGVYGFAKSLLKALKEDGDVVIVVFDAKAPSFRHEAYEAYKAGRAPTPEDFPRQLALMKELVDLLGLERLEVPGFEADDVLATLAKKAEREGYEVQILTADRDLFQLLSPRISVLHPEGHRITPEWLWEKYGLRPEQWVDFRALAGDPSDNIPGVKGIGEKTALKLLKEWGSLENLLKNLDQVKPESVREKILAHLEDLKLSRELSRVRTDLPLEVDFRGRREPDWEGLKAFLERLEFGSLLHEFGLLESPLPAEEAPWPPPEGAFLGYRLSRPEPMWAELLALAASAQGRVYRAEDPHGALRGLKEVRGLLAKDLAVVALREGLDLPPTDDPMLLAYLLDPSNTTPEGVARRYGGEWTEDAGERALLAERLHANLLGRLQGEERLLWLYEEVEKPLSRVLAHMEATGVKLDVAYLEALSLEVAAEMRRLEEEVFRLAGHSFYLNSRDQLERVLFDELGLPPIGKTEKTGKRSTSAAVLEALREVHPIVDKILQYRELAKLKGTYIDPLPALVHPKTGRLHTRFNQTATATGRLSSSDPNLQNIPVRTPLGQKIRRAFVAEEGWRLVALDYSQIELRVLAHLSGDENLIRVFQEGKDIHTQTASWMFGLSAEAIDPLMRRAAKTINFGVLYGMSAHRLSQELGIPYEEAAAFIQRYFQSYPKVKAWIEKTLEEGRTRGYVETLFGRRRYVPDLNARVKSVREAAERMAFNMPVQGTAADLMKLAMVRLFPQLREVGARMLLQVHDELLLEAPKERAEEVAALAKEVMEGVWPLAVPLEVEVGIGEDWLAAKG

SEQ ID NO: 2057 - DNA, 2529 bp, synthetic construct
  misc_feature 1..2529: note = Variant of DNA polymerase I from Thermus sp. strain 2.9
  source 1..2529: mol_type = other DNA
atgcaccatcatcatcatcatggcggtagcggcatgttaccgttgttcgaacctaaaggtcgcgtgcttctggttgatggccatcatctcgcgtatcgtaacttctttgccctgaaaggattaaccaccagccgtggcgagccggtacagggtgtctacggctttgcaaagtcgctcctgaaagctctgaaagaagacggtgatgtggtgattgttgtctttgatgcgaaagcgccaagttttcgccacgaagcgtacgaagcttacaaagccgggcgtgctccaacgccggaagactttcctcgccaattggcgcttatgaaggaattagtggatttgcttggcctcgaacgcttggaagttcccggtttcgaggcagacgacgtattagcgactctcgcaaagaaagccgaacgtgagggctatgaagtccagatcttgacagcagatcgcgatcttttccagcttttatctccgcgcatctcggtgttacacccggaagggcatcgtatcaccccggaatggctctgggagaaatatggtttgcgtcccgaacaatgggtggattttcgcgccttagcaggcgatccgagcgacaatattccgggagttaaaggtatcggcgagaagacggcgctcaagctccttaaagaatgggggtcgttggagaacttgcttaagaatttagatcaggtcaaaccagagtcagtgcgtgagaagattcttgcacacctcgaagacctcaaattaagccgcgaattgtcccgtgtacgcaccgatttgccgctcgaagttgatttccgtggccgccgcgaacctgactgggagggtcttaaagcgtttttagagcgtcttgaatttggttcgctcttgcatgaattcggccttttagaaagcccgttaccagccgaagaagcaccttggccaccgcccgaaggcgcgtttttaggttaccgtttgagtcgcccggaaccgatgtgggccgaattattggctcttgcagcgtctgcccagggacgtgtgtatcgcgcggaagaccctcatggtgcgctccgcggcctcaaagaagtccgtggactccttgccaaagacttagctgttgttgcattgcgcgaaggtcttgatttacctccgactgatgatccaatgcttcttgcgtacctcttggacccgtcaaacacgacgcccgaaggcgtagcccgtcgttacggcggcgagtggaccgaagatgcaggcgagcgcgcgttattggccgaacgtttgcacgccaatttattaggacgtttgcaaggcgaggaacgtctcctctggctttacgaagaagtggagaaaccattgagtcgcgtgctcgcgcatatggaagctaccggtgtcaaattagacgtggcgtatttggaggcactcagccttgaagttgctgccgaaatgcgccgcttggaggaagaagtattccgtttagcaggccactccttttatcttaattctcgcgatcagttagaacgtgtgttgttcgatgaacttggtctccctcctatcggcaagacagagaagaccggtaaacgtagcacttcagcggcggttttagaagctcttcgcgaagtccatcccattgtggacaagatcttgcagtaccgcgaactcgcgaaattgaaaggcacctatattgaccctcttccggcattagtccacccgaaaacgggacgcctccatacccgcttcaaccaaacagccacggcgaccggtcgtttgtcctcctctgatccaaaccttcagaatattccagtacgtaccccattgggccagaagatccgccgcgcgtttgtagctgaggagggttggcgtttagtggccctcgattatagccaaattgaattacgtgtccttgcccatctttctggcgatgagaacctcatccgcgtgtttcaggaaggcaaagacattcacactcaaacggcaagctggatgtttggattatcagctgaagcgatcgatcctttgatgcgtcgtgcagcgaagaccatcaatttcggtgttctctacggtatgagtgcccatcgtttgtcgcaggaattaggcattccctatgaagaagctgcggcgttcattcagcgctactttcaaagctatcccaaagtttcggcatggatcgagaagactctcgaagaaggccgcacacgtggttacgtagagaccttatttggacgtcgccgctatgttcccgatttaaacgctcgcgtgaaatctgtccgtgaagccgccgaacgcatggcgttcaacatgcctgtacagggcacggcagctgacctcatgaaacttgcaatggtgcgcctttttccacaattgcgtgaagttggtgcccgcatgctcttgcaggtccacgatgaactcttgttagaagcgccaaaagagcgtgcggaagaggtggcagccctcgcgaaagaggttatggaaggcgtgtggcccttagcggtgcctcttgaagtcgaagttggtattggcgaggattggttggctgccaaaggataatga

SEQ ID NO: 2058 - protein, 841 aa, synthetic construct
  REGION 1..841: note = Variant of DNA polymerase I from Thermus sp. strain 2.9
MHHHHHHGGSGMLPLFEPKGRVLLVDGHHLAYRNFFALKGLTTSRGEPVQGVYGFAKSLLKALKEDGDVVIVVFDAKAPSFRHEAYEAYKAGRAPTPEDFPRQLALMKELVDLLGLERLEVPGFEADDVLATLAKKAEREGYEVQILTADRDLFQLLSPRISVLHPEGHRITPEWLWEKYGLRPEQWVDFRALAGDPSDNIPGVKGIGEKTALKLLKEWGSLENLLKNLDQVKPESVREKILAHLEDLKLSRELSRVRTDLPLEVDFRGRREPDWEGLKAFLERLEFGSLLHEFGLLESPLPAEEAPWPPPEGAFLGYRLSRPEPMWAELLALAASAQGRVYRAEDPHGALRGLKEVRGLLAKDLAVVALREGLDLPPTDDPMLLAYLLDPSNTTPEGVARRYGGEWTEDAGERALLAERLHANLLGRLQGEERLLWLYEEVEKPLSRVLAHMEATGVKLDVAYLEALSLEVAAEMRRLEEEVFRLAGHSFYLNSRDQLERVLFDELGLPPIGKTEKTGKRSTSAAVLEALREVHPIVDKILQYRELAKLKGTYIDPLPALVHPKTGRLHTRFNQTATATGRLSSSDPNLQNIPVRTPLGQKIRRAFVAEEGWRLVALDYSQIELRVLAHLSGDENLIRVFQEGKDIHTQTASWMFGLSAEAIDPLMRRAAKTINFGVLYGMSAHRLSQELGIPYEEAAAFIQRYFQSYPKVSAWIEKTLEEGRTRGYVETLFGRRRYVPDLNARVKSVREAAERMAFNMPVQGTAADLMKLAMVRLFPQLREVGARMLLQVHDELLLEAPKERAEEVAALAKEVMEGVWPLAVPLEVEVGIGEDWLAAKG

SEQ ID NO: 2059 - DNA, 2529 bp, synthetic construct
  misc_feature 1..2529: note = Variant of DNA polymerase I from Thermus sp. strain 2.9
  source 1..2529: mol_type = other DNA
atgcaccatcatcatcatcatggcggtagcggcatgttaccgttgttcgaacctaaaggtcgcgtgcttctggttgatggccatcatctcgcgtatcgtaacttctttgccctgaaaggattaaccaccagccgtggcgagccggtacagggtgtctacggctttgcaaagtcgctcctgaaagctctgaaagaagacggtgatgtggtgattgttgtctttgatgcgaaagcgccaagttttcgccacgaagcgtacgaagcttacaaagccgggcgtgctccaacgccggaagactttcctcgccaattggcgcttatgaaggaattagtggatttgcttggcctcgaacgcttggaagttcccggtttcgaggcagacgacgtattagcgactctcgcaaagaaagccgaacgtgagggctatgaagtccagatcttgacagcagatcgcgatcttttccagcttttatctccgcgcatctcggtgttacacccggaagggcatcgtatcaccccggaatggctctgggagaaatatggtttgcgtcccgaacaatgggtggattttcgcgccttagcaggcgatccgagcgacaatattccgggagttaaaggtatcggcgagaagacggcgctcaagctccttaaagaatgggggtcgttggagaacttgcttaagaatttagatcaggtcaaaccagagtcagtgcgtgagaagattcttgcacacctcgaagacctcaaattaagccgcgaattgtcccgtgtacgcaccgatttgccgctcgaagttgatttccgtggccgccgcgaacctgactgggagggtcttaaagcgtttttagagcgtcttgaatttggttcgctcttgcatgaattcggccttttagaaagcccgttaccagccgaagaagcaccttggccaccgcccgaaggcgcgtttttaggttaccgtttgagtcgcccggaaccgatgtgggccgaattattggctcttgcagcgtctgcccagggacgtgtgtatcgcgcggaagaccctcatggtgcgctccgcggcctcaaagaagtccgtggactccttgccaaagacttagctgttgttgcattgcgcgaaggtcttgatttacctccgactgatgatccaatgcttcttgcgtacctcttggacccgtcaaacacgacgcccgaaggcgtagcccgtcgttacggcggcgagtggaccgaagatgcaggcgagcgcgcgttattggccgaacgtttgcacgccaatttattaggacgtttgcaaggcgaggaacgtctcctctggctttacgaagaagtggagaaaccattgagtcgcgtgctcgcgcatatggaagctaccggtgtcaaattagacgtggcgtatttggaggcactcagccttgaagttgctgccgaaatgcgccgcttggaggaagaagtattccgtttagcaggccactccttttatcttaattctcgcgatcagttagaacgtgtgttgttcgatgaacttggtctccctcctatcggcaagacagagaagaccggtaaacgtagcacttcagcggcggttttagaagctcttcgcgaagtccatcccattgtggacaagatcttgcagtaccgcgaactcgcgaaattgaaaggcacctatattgaccctcttccggcattagtccacccgaaaacgggacgcctccatacccgcttcaaccaaacagccacggcgaccggtcgtttgtcctcctctgatccaaaccttcagaatattccagtacgtaccccattgggccagaagatccgccgcgcgtttgtagctgaggagggttggcgtttagtggccctcgattatagccaaattgaattacgtgtccttgcccatctttctggcgatgagaacctcatccgcgtgtttcaggaaggcaaagacattcacactcaaacggcaagctggatgtttggattatcagctgaagcgatcgatcctttgatgcgtcgtgcagcgaagaccatcaatttcggtgttctctacggtatgagtgcccatcgtttgtcgcaggaattaggcattccctatgaagaagctgcggcgttcattcagcgctactttcaaagctatcccaaagttaaagcatggatcgagaagactctcttggaaggccgcacacgtggttacgtagagaccttatttggacgtcgccgctatgttcccgatttaaacgctcgcgtgaaatctgtccgtgaagccgccgaacgcatggcgttcaacatgcctgtacagggcacggcagctgacctcatgaaacttgcaatggtgcgcctttttccacaattgcgtgaagttggtgcccgcatgctcttgcaggtccacgatgaactcttgttagaagcgccaaaagagcgtgcggaagaggtggcagccctcgcgaaagaggttatggaaggcgtgtggcccttagcggtgcctcttgaagtcgaagttggtattggcgaggattggttggctgccaaaggataatga

SEQ ID NO: 2060 - protein, 841 aa, synthetic construct
  REGION 1..841: note = Variant of DNA polymerase I from Thermus sp. strain 2.9
MHHHHHHGGSGMLPLFEPKGRVLLVDGHHLAYRNFFALKGLTTSRGEPVQGVYGFAKSLLKALKEDGDVVIVVFDAKAPSFRHEAYEAYKAGRAPTPEDFPRQLALMKELVDLLGLERLEVPGFEADDVLATLAKKAEREGYEVQILTADRDLFQLLSPRISVLHPEGHRITPEWLWEKYGLRPEQWVDFRALAGDPSDNIPGVKGIGEKTALKLLKEWGSLENLLKNLDQVKPESVREKILAHLEDLKLSRELSRVRTDLPLEVDFRGRREPDWEGLKAFLERLEFGSLLHEFGLLESPLPAEEAPWPPPEGAFLGYRLSRPEPMWAELLALAASAQGRVYRAEDPHGALRGLKEVRGLLAKDLAVVALREGLDLPPTDDPMLLAYLLDPSNTTPEGVARRYGGEWTEDAGERALLAERLHANLLGRLQGEERLLWLYEEVEKPLSRVLAHMEATGVKLDVAYLEALSLEVAAEMRRLEEEVFRLAGHSFYLNSRDQLERVLFDELGLPPIGKTEKTGKRSTSAAVLEALREVHPIVDKILQYRELAKLKGTYIDPLPALVHPKTGRLHTRFNQTATATGRLSSSDPNLQNIPVRTPLGQKIRRAFVAEEGWRLVALDYSQIELRVLAHLSGDENLIRVFQEGKDIHTQTASWMFGLSAEAIDPLMRRAAKTINFGVLYGMSAHRLSQELGIPYEEAAAFIQRYFQSYPKVKAWIEKTLLEGRTRGYVETLFGRRRYVPDLNARVKSVREAAERMAFNMPVQGTAADLMKLAMVRLFPQLREVGARMLLQVHDELLLEAPKERAEEVAALAKEVMEGVWPLAVPLEVEVGIGEDWLAAKG

SEQ ID NO: 2061 - DNA, 2529 bp, synthetic construct
  misc_feature 1..2529: note = Variant of DNA polymerase I from Thermus sp. strain 2.9
  source 1..2529: mol_type = other DNA
atgcaccatcatcatcatcatggcggtagcggcatgttaccgttgttcgaacctaaaggtcgcgtgcttctggttgatggccatcatctcgcgtatcgtaacttctttgccctgaaaggattaaccaccagccgtggcgagccggtacagggtgtctacggctttgcaaagtcgctcctgaaagctctgaaagaagacggtgatgtggtgattgttgtctttgatgcgaaagcgccaagttttcgccacgaagcgtacgaagcttacaaagccgggcgtgctccaacgccggaagactttcctcgccaattggcgcttatgaaggaattagtggatttgcttggcctcgaacgcttggaagttcccggtttcgaggcagacgacgtattagcgactctcgcaaagaaagccgaacgtgagggctatgaagtccagatcttgacagcagatcgcgatcttttccagcttttatctccgcgcatctcggtgttacacccggaagggcatcgtatcaccccggaatggctctgggagaaatatggtttgcgtcccgaacaatgggtggattttcgcgccttagcaggcgatccgagcgacaatattccgggagttaaaggtatcggcgagaagacggcgctcaagctccttaaagaatgggggtcgttggagaacttgcttaagaatttagatcaggtcaaaccagagtcagtgcgtgagaagattcttgcacacctcgaagacctcaaattaagccgcgaattgtcccgtgtacgcaccgatttgccgctcgaagttgatttccgtggccgccgcgaacctgactgggagggtcttaaagcgtttttagagcgtcttgaatttggttcgctcttgcatgaattcggccttttagaaagcccgttaccagccgaagaagcaccttggccaccgcccgaaggcgcgtttttaggttaccgtttgagtcgcccggaaccgatgtgggccgaattattggctcttgcagcgtctgcccagggacgtgtgtatcgcgcggaagaccctcatggtgcgctccgcggcctcaaagaagtccgtggactccttgccaaagacttagctgttgttgcattgcgcgaaggtcttgatttacctccgactgatgatccaatgcttcttgcgtacctcttggacccgtcaaacacgacgcccgaaggcgtagcccgtcgttacggcggcgagtggaccgaagatgcaggcgagcgcgcgttattggccgaacgtttgcacgccaatttattaggacgtttgcaaggcgaggaacgtctcctctggctttacgaaggtgtggagaaaccattgagtcgcgtgctcgcgcatatggaagctaccggtgtcaaattagacgtggcgtatttggaggcactcagccttgaagttgctgccgaaatgcgccgcttggaggaagaagtattccgtttagcaggccactccttttatcttaattctcgcgatcagttagaacgtgtgttgttcgatgaacttggtctccctcctatcggcaagacagagaagaccggtaaacgtagcacttcagcggcggttttagaagctcttcgcgaagtccatcccattgtggacaagatcttgcagtaccgcgaactcgcgaaattgaaaggcacctatattgaccctcttccggcattagtccacccgaaaacgggacgcctccatacccgcttcaaccaaacagccacggcgaccggtcgtttgtcctcctctgatccaaaccttcagaatattccagtacgtaccccattgggccagaagatccgccgcgcgtttgtagctgaggagggttggcgtttagtggccctcgattatagccaaattgaattacgtgtccttgcccatctttctggcgatgagaacctcatccgcgtgtttcaggaaggcaaagacattcacactcaaacggcaagctggatgtttggattatcagctgaagcgatcgatcctttgatgcgtcgtgcagcgaagaccatcaatttcggtgttctctacggtatgagtgcccatcgtttgtcgcaggaattaggcattccctatgaagaagctgcggcgttcattcagcgctactttcaaagctatcccaaagttaaagcatggatcgagaagactctcgaagaaggccgcacacgtggttacgtagagaccttatttggacgtcgccgctatgttcccgatttaaacgctcgcgtgaaatctgtccgtgaagccgccgaacgcatggcgttcaacatgcctgtacagggcacggcagctgacctcatgaaacttgcaatggtgcgcctttttccacaattgcgtgaagttggtgcccgcatgctcttgcaggtccacgatgaactcttgttagaagcgccaaaagagcgtgcggaagaggtggcagccctcgcgaaagaggttatggaaggcgtgtggcccttagcggtgcctcttgaagtcgaagttggtattggcgaggattggttggctgccaaaggataatga

SEQ ID NO: 2062 - protein, 841 aa, synthetic construct
  REGION 1..841: note = Variant of DNA polymerase I from Thermus sp. strain 2.9
MHHHHHHGGSGMLPLFEPKGRVLLVDGHHLAYRNFFALKGLTTSRGEPVQGVYGFAKSLLKALKEDGDVVIVVFDAKAPSFRHEAYEAYKAGRAPTPEDFPRQLALMKELVDLLGLERLEVPGFEADDVLATLAKKAEREGYEVQILTADRDLFQLLSPRISVLHPEGHRITPEWLWEKYGLRPEQWVDFRALAGDPSDNIPGVKGIGEKTALKLLKEWGSLENLLKNLDQVKPESVREKILAHLEDLKLSRELSRVRTDLPLEVDFRGRREPDWEGLKAFLERLEFGSLLHEFGLLESPLPAEEAPWPPPEGAFLGYRLSRPEPMWAELLALAASAQGRVYRAEDPHGALRGLKEVRGLLAKDLAVVALREGLDLPPTDDPMLLAYLLDPSNTTPEGVARRYGGEWTEDAGERALLAERLHANLLGRLQGEERLLWLYEGVEKPLSRVLAHMEATGVKLDVAYLEALSLEVAAEMRRLEEEVFRLAGHSFYLNSRDQLERVLFDELGLPPIGKTEKTGKRSTSAAVLEALREVHPIVDKILQYRELAKLKGTYIDPLPALVHPKTGRLHTRFNQTATATGRLSSSDPNLQNIPVRTPLGQKIRRAFVAEEGWRLVALDYSQIELRVLAHLSGDENLIRVFQEGKDIHTQTASWMFGLSAEAIDPLMRRAAKTINFGVLYGMSAHRLSQELGIPYEEAAAFIQRYFQSYPKVKAWIEKTLEEGRTRGYVETLFGRRRYVPDLNARVKSVREAAERMAFNMPVQGTAADLMKLAMVRLFPQLREVGARMLLQVHDELLLEAPKERAEEVAALAKEVMEGVWPLAVPLEVEVGIGEDWLAAKG

SEQ ID NO: 2063 - DNA, 2529 bp, synthetic construct
  misc_feature 1..2529: note = Variant of DNA polymerase I from Thermus sp. strain 2.9
  source 1..2529: mol_type = other DNA
atgcaccatcatcatcatcatggcggtagcggcatgttaccgttgttcgaacctaaaggtcgcgtgcttctggttgatggccatcatctcgcgtatcgtaacttctttgccctgaaaggattaaccaccagccgtggcgagccggtacagggtgtctacggctttgcaaagtcgctcctgaaagctctgaaagaagacggtgatgtggtgattgttgtctttgatgcgaaagcgccaagttttcgccacgaagcgtacgaagcttacaaagccgggcgtgctccaacgccggaagactttcctcgccaattggcgcttatgaaggaattagtggatttgcttggcctcgaacgcttggaagttcccggtttcgaggcagacgacgtattagcgactctcgcaaagaaagccgaacgtgagggctatgaagtccagatcttgacagcagatcgcgatcttttccagcttttatctccgcgcatctcggtgttacacccggaagggcatcgtatcaccccggaatggctctgggagaaatatggtttgcgtcccgaacaatgggtggattttcgcgccttagcaggcgatccgagcgacaatattccgggagttaaaggtatcggcgagaagacggcgctcaagctccttaaagaatgggggtcgttggagaacttgctttataatttagatcaggtcaaaccagagtcagtgcgtgagaagattcttgcacacctcgaagacctcaaattaagccgcgaattgtcccgtgtacgcaccgatttgccgctcgaagttgatttccgtggccgccgcgaacctgactgggagggtcttaaagcgtttttagagcgtcttgaatttggttcgctcttgcatgaattcggccttttagaaagcccgttaccagccgaagaagcaccttggccaccgcccgaaggcgcgtttttaggttaccgtttgagtcgcccggaaccgatgtgggccgaattattggctcttgcagcgtctgcccagggacgtgtgtatcgcgcggaagaccctcatggtgcgctccgcggcctcaaagaagtccgtggactccttgccaaagacttagctgttgttgcattgcgcgaaggtcttgatttacctccgactgatgatccaatgcttcttgcgtacctcttggacccgtcaaacacgacgcccgaaggcgtagcccgtcgttacggcggcgagtggaccgaagatgcaggcgagcgcgcgttattggccgaacgtttgcacgccaatttattaggacgtttgcaaggcgaggaacgtctcctctggctttacgaagaagtggagaaaccattgagtcgcgtgctcgcgcatatggaagctaccggtgtcaaattagacgtggcgtatttggaggcactcagccttgaagttgctgccgaaatgcgccgcttggaggaagaagtattccgtttagcaggccactccttttatcttaattctcgcgatcagttagaacgtgtgttgttcgatgaacttggtctccctcctatcggcaagacagagaagaccggtaaacgtagcacttcagcggcggttttagaagctcttcgcgaagtccatcccattgtggacaagatcttgcagtaccgcgaactcgcgaaattgaaaggcacctatattgaccctcttccggcattagtccacccgaaaacgggacgcctccatacccgcttcaaccaaacagccacggcgaccggtcgtttgtcctcctctgatccaaaccttcagaatattccagtacgtaccccattgggccagaagatccgccgcgcgtttgtagctgaggagggttggcgtttagtggccctcgattatagccaaattgaattacgtgtccttgcccatctttctggcgatgagaacctcatccgcgtgtttcaggaaggcaaagacattcacactcaaacggcaagctggatgtttggattatcagctgaagcgatcgatcctttgatgcgtcgtgcagcgaagaccatcaatttcggtgttctctacggtatgagtgcccatcgtttgtcgcaggaattaggcattccctatgaagaagctgcggcgttcattcagcgctactttcaaagctatcccaaagttaaagcatggatcgagaagactctcgaagaaggccgcacacgtggttacgtagagaccttatttggacgtcgccgctatgttcccgatttaaacgctcgcgtgaaatctgtccgtgaagccgccgaacgcatggcgttcaacatgcctgtacagggcacggcagctgacctcatgaaacttgcaatggtgcgcctttttccacaattgcgtgaagttggtgcccgcatgctcttgcaggtccacgatgaactcttgttagaagcgccaaaagagcgtgcggaagaggtggcagccctcgcgaaagaggttatggaaggcgtgtggcccttagcggtgcctcttgaagtcgaagttggtattggcgaggattggttggctgccaaaggataatga

SEQ ID NO: 2064 - protein, 841 aa, synthetic construct
  REGION 1..841: note = Variant of DNA polymerase I from Thermus sp. strain 2.9
MHHHHHHGGSGMLPLFEPKGRVLLVDGHHLAYRNFFALKGLTTSRGEPVQGVYGFAKSLLKALKEDGDVVIVVFDAKAPSFRHEAYEAYKAGRAPTPEDFPRQLALMKELVDLLGLERLEVPGFEADDVLATLAKKAEREGYEVQILTADRDLFQLLSPRISVLHPEGHRITPEWLWEKYGLRPEQWVDFRALAGDPSDNIPGVKGIGEKTALKLLKEWGSLENLLYNLDQVKPESVREKILAHLEDLKLSRELSRVRTDLPLEVDFRGRREPDWEGLKAFLERLEFGSLLHEFGLLESPLPAEEAPWPPPEGAFLGYRLSRPEPMWAELLALAASAQGRVYRAEDPHGALRGLKEVRGLLAKDLAVVALREGLDLPPTDDPMLLAYLLDPSNTTPEGVARRYGGEWTEDAGERALLAERLHANLLGRLQGEERLLWLYEEVEKPLSRVLAHMEATGVKLDVAYLEALSLEVAAEMRRLEEEVFRLAGHSFYLNSRDQLERVLFDELGLPPIGKTEKTGKRSTSAAVLEALREVHPIVDKILQYRELAKLKGTYIDPLPALVHPKTGRLHTRFNQTATATGRLSSSDPNLQNIPVRTPLGQKIRRAFVAEEGWRLVALDYSQIELRVLAHLSGDENLIRVFQEGKDIHTQTASWMFGLSAEAIDPLMRRAAKTINFGVLYGMSAHRLSQELGIPYEEAAAFIQRYFQSYPKVKAWIEKTLEEGRTRGYVETLFGRRRYVPDLNARVKSVREAAERMAFNMPVQGTAADLMKLAMVRLFPQLREVGARMLLQVHDELLLEAPKERAEEVAALAKEVMEGVWPLAVPLEVEVGIGEDWLAAKG

SEQ ID NO: 2065 - DNA, 2529 bp, synthetic construct
  misc_feature 1..2529: note = Variant of DNA polymerase I from Thermus sp. strain 2.9
  source 1..2529: mol_type = other DNA
atgcaccatcatcatcatcatggcggtagcggcatgttaccgttgttcgaacctaaaggtcgcgtgcttctggttgatggccatcatctcgcgtatcgtaacttctttgccctgaaaggattaaccaccagccgtggcgagccggtacagggtgtctacggctttgcaaagtcgctcctgaaagctctgaaagaagacggtgatgtggtgattgttgtctttgatgcgaaagcgccaagttttcgccacgaagcgtacgaagcttacaaagccgggcgtgctccaacgccgaatgactttcctcgccaattggcgcttatgaaggaattagtggatttgcttggcctcgaacgcttggaagttcccggtttcgaggcagacgacgtattagcgactctcgcaaagaaagccgaacgtgagggctatgaagtccagatcttgacagcagatcgcgatcttttccagcttttatctccgcgcatctcggtgttacacccggaagggcatcgtatcaccccggaatggctctgggagaaatatggtttgcgtcccgaacaatgggtggattttcgcgccttagcaggcgatccgagcgacaatattccgggagttaaaggtatcggcgagaagacggcgctcaagctccttaaagaatgggggtcgttggagaacttgcttaagaatttagatcaggtcaaaccagagtcagtgcgtgagaagattcttgcacacctcgaagacctcaaattaagccgcgaattgtcccgtgtacgcaccgatttgccgctcgaagttgatttccgtggccgccgcgaacctgactgggagggtcttaaagcgtttttagagcgtcttgaatttggttcgctcttgcatgaattcggccttttagaaagcccgttaccagccgaagaagcaccttggccaccgcccgaaggcgcgtttttaggttaccgtttgagtcgcccggaaccgatgtgggccgaattattggctcttgcagcgtctgcccagggacgtgtgtatcgcgcggaagaccctcatggtgcgctccgcggcctcaaagaagtccgtggactccttgccaaagacttagctgttgttgcattgcgcgaaggtcttgatttacctccgactgatgatccaatgcttcttgcgtacctcttggacccgtcaaacacgacgcccgaaggcgtagcccgtcgttacggcggcgagtggaccgaagatgcaggcgagcgcgcgttattggccgaacgtttgcacgccaatttattaggacgtttgcaaggcgaggaacgtctcctctggctttacgaagaagtggagaaaccattgagtcgcgtgctcgcgcatatggaagctaccggtgtcaaattagacgtggcgtatttggaggcactcagccttgaagttgctgccgaaatgcgccgcttggaggaagaagtattccgtttagcaggccactccttttatcttaattctcgcgatcagttagaacgtgtgttgttcgatgaacttggtctccctcctatcggcaagacagagaagaccggtaaacgtagcacttcagcggcggttttagaagctcttcgcgaagtccatcccattgtggacaagatcttgcagtaccgcgaactcgcgaaattgaaaggcacctatattgaccctcttccggcattagtccacccgaaaacgggacgcctccatacccgcttcaaccaaacagccacggcgaccggtcgtttgtcctcctctgatccaaaccttcagaatattccagtacgtaccccattgggccagaagatccgccgcgcgtttgtagctgaggagggttggcgtttagtggccctcgattatagccaaattgaattacgtgtccttgcccatctttctggcgatgagaacctcatccgcgtgtttcaggaaggcaaagacattcacactcaaacggcaagctggatgtttggattatcagctgaagcgatcgatcctttgatgcgtcgtgcagcgaagaccatcaatttcggtgttctctacggtatgagtgcccatcgtttgtcgcaggaattaggcattccctatgaagaagctgcggcgttcattcagcgctactttcaaagctatcccaaagttaaagcatggatcgagaagactctcgaagaaggccgcacacgtggttacgtagagaccttatttggacgtcgccgctatgttcccgatttaaacgctcgcgtgaaatctgtccgtgaagccgccgaacgcatggcgttcaacatgcctgtacagggcacggcagctgacctcatgaaacttgcaatggtgcgcctttttccacaattgcgtgaagttggtgcccgcatgctcttgcaggtccacgatgaactcttgttagaagcgccaaaagagcgtgcggaagaggtggcagccctcgcgaaagaggttatggaaggcgtgtggcccttagcggtgcctcttgaagtcgaagttggtattggcgaggattggttggctgccaaaggataatga

SEQ ID NO: 2066 - protein, 841 aa, synthetic construct
  REGION 1..841: note = Variant of DNA polymerase I from Thermus sp. strain 2.9
MHHHHHHGGSGMLPLFEPKGRVLLVDGHHLAYRNFFALKGLTTSRGEPVQGVYGFAKSLLKALKEDGDVVIVVFDAKAPSFRHEAYEAYKAGRAPTPNDFPRQLALMKELVDLLGLERLEVPGFEADDVLATLAKKAEREGYEVQILTADRDLFQLLSPRISVLHPEGHRITPEWLWEKYGLRPEQWVDFRALAGDPSDNIPGVKGIGEKTALKLLKEWGSLENLLKNLDQVKPESVREKILAHLEDLKLSRELSRVRTDLPLEVDFRGRREPDWEGLKAFLERLEFGSLLHEFGLLESPLPAEEAPWPPPEGAFLGYRLSRPEPMWAELLALAASAQGRVYRAEDPHGALRGLKEVRGLLAKDLAVVALREGLDLPPTDDPMLLAYLLDPSNTTPEGVARRYGGEWTEDAGERALLAERLHANLLGRLQGEERLLWLYEEVEKPLSRVLAHMEATGVKLDVAYLEALSLEVAAEMRRLEEEVFRLAGHSFYLNSRDQLERVLFDELGLPPIGKTEKTGKRSTSAAVLEALREVHPIVDKILQYRELAKLKGTYIDPLPALVHPKTGRLHTRFNQTATATGRLSSSDPNLQNIPVRTPLGQKIRRAFVAEEGWRLVALDYSQIELRVLAHLSGDENLIRVFQEGKDIHTQTASWMFGLSAEAIDPLMRRAAKTINFGVLYGMSAHRLSQELGIPYEEAAAFIQRYFQSYPKVKAWIEKTLEEGRTRGYVETLFGRRRYVPDLNARVKSVREAAERMAFNMPVQGTAADLMKLAMVRLFPQLREVGARMLLQVHDELLLEAPKERAEEVAALAKEVMEGVWPLAVPLEVEVGIGEDWLAAKG

SEQ ID NO: 2067 - DNA, 2529 bp, synthetic construct; identical to SEQ ID NO: 2019
  misc_feature 1..2529: note = Variant of DNA polymerase I from Thermus sp. strain 2.9
  source 1..2529: mol_type = other DNA

SEQ ID NO: 2068 - protein, 841 aa, synthetic construct; identical to SEQ ID NO: 2020
  REGION 1..841: note = Variant of DNA polymerase I from Thermus sp. strain 2.9

SEQ ID NO: 2069 - DNA, 2529 bp, synthetic construct; identical to SEQ ID NO: 1987
  misc_feature 1..2529: note = Variant of DNA polymerase I from Thermus sp. strain 2.9
  source 1..2529: mol_type = other DNA

SEQ ID NO: 2070 - protein, 841 aa, synthetic construct; identical to SEQ ID NO: 1988
  REGION 1..841: note = Variant of DNA polymerase I from Thermus sp. strain 2.9

SEQ ID NO: 2071 - DNA, 2529 bp, synthetic construct
  misc_feature 1..2529: note = Variant of DNA polymerase I from Thermus sp. strain 2.9
  source 1..2529: mol_type = other DNA
atgcaccatcatcatcatcatggcggtagcggcatgttaccgttgttcgaacctaaaggtcgcgtgcttctggttgatggccatcatctcgcgtatcgtaacttctttgccctgaaaggattaaccaccagccgtggcgagccggtacagggtgtctacggctttgcaaagtcgctcctgaaagctctgaaagaagacggtgatgtggtgattgttgtctttgatgcgaaagcgccaagttttcgccacgaagcgtacgaagcttacaaagccgggcgtgctccaacgccggaagactttcctcgccaattggcgcttatgaaggaattagtggatttgcttggcctcgaacgcttggaagttcccggtttcgaggcagacgacgtattagcgactctcgcaaagaaagccgaacgtgagggctatgaagtccagatcttgacagcagatcgcgatcttttccagcttttatctccgcgcatctcggtgttacacccggaagggcatcgtatcaccccggaatggctctgggagaaatatggtttgcgtcccgaacaatgggtggattttcgcgccttagcaggcgatccgagcgacaatattccgggagttaaaggtatcggcgagaagacggcgctcaagctccttaaagaatgggggtcgttggagaacttgcttaagaatttagatcaggtcaaaccagagtcagtgcgtgagaagattcttgcacacctcgaagacctcaaattaagccgcgaattgtcccgtgtacgcaccgatttgccgctcgaagttgatttccgtggccgccgcgaacctgactgggagggtcttaaagcgtttttagagcgtcttgaatttggttcgctcttgcatgaattcggccttttagaaagcccgttaccagccgaagaagcaccttggccaccgcccgaaggcgcgtttttaggttaccgtttgagtcgcccggaaccgatgtgggccgaattattggctcttgcagcgtctgcccagggacgtgtgtatcgcgcggaagaccctcatggtgcgctccgcggcctcaaagaagtccgtggactccttgccaaagacttagctgttgttgcattgcgcgaaggtcttgatttacctccgactgatgatccaatgcttcttgcgtacctcttggacccgtcaaacacgacgcccgaaggcgtagcccgtcgttacggcggcgagtggaccgaagatgcaggcgagcgcgcgttattggccgaacgtttgcacgccaatttattaggacgtttgcaaggcgaggaacgtctcctctggctttacgaagaagtggagaaaccattgagtcgcgtgctcgcgcatatggaagctaccggtgtcaaattagacgtggcgtatttggaggcactcagccttgaagttgctgccgaaatgcgccgcttggaggaagaagtattccgtttagcaggccactccttttatcttaattctcgcgatcagttagaacgtgtgttgttcgatgaacttggtctccctcctatcggcaagacagagaagaccggtaaacgtagcacttcagcggcggttttagaagctcttcgcgaagtccatcccattgtggacaagatcttgcagtaccgcgaactcgcgaaattgaaaggcacctatattgaccctcttccggcattagtccacccgaaaacgggacgcctccatacccgcttcaaccaaacagccacggcgaccggtcgtttgtcctcctctgatccaaaccttcagaatattccagtacgtaccccattgggccagaagatccgccgcgcgtttgtagctgaggagggttggcgtttagtggccctcgattatagccaaattgaattacgtgtccttgcccatctttctggcgatactaacctcatccgcgtgtttcaggaaggcaaagacattcacactcaaacggcaagctggatgtttggattatcagctgaagcgatcgatcctttgatgcgtcgtgcagcgaagaccatcaatttcggtgttctctacggtatgagtgcccatcgtttgtcgcaggaattaggcattccctatgaagaagctgcggcgttcattcagcgctactttcaaagctatcccaaagttaaagcatggatcgagaagactctcgaagaaggccgcacacgtggttacgtagagaccttatttggacgtcgccgctatgttcccgatttaaacgctcgcgtgaaatctgtccgtgaagccgccgaacgcatggcgttcaacatgcctgtacagggcacggcagctgacctcatgaaacttgcaatggtgcgcctttttccacaattgcgtgaagttggtgcccgcatgctcttgcaggtccacgatgaactcttgttagaagcgccaaaagagcgtgcggaagaggtggcagccctcgcgaaagaggttatggaaggcgtgtggcccttagcggtgcctcttgaagtcgaagttggtattggcgaggattggttggctgccaaaggataatga

SEQ ID NO: 2072 - protein, 841 aa, synthetic construct
  REGION 1..841: note = Variant of DNA polymerase I from Thermus sp. strain 2.9
MHHHHHHGGSGMLPLFEPKGRVLLVDGHHLAYRNFFALKGLTTSRGEPVQGVYGFAKSLLKALKEDGDVVIVVFDAKAPSFRHEAYEAYKAGRAPTPEDFPRQLALMKELVDLLGLERLEVPGFEADDVLATLAKKAEREGYEVQILTADRDLFQLLSPRISVLHPEGHRITPEWLWEKYGLRPEQWVDFRALAGDPSDNIPGVKGIGEKTALKLLKEWGSLENLLKNLDQVKPESVREKILAHLEDLKLSRELSRVRTDLPLEVDFRGRREPDWEGLKAFLERLEFGSLLHEFGLLESPLPAEEAPWPPPEGAFLGYRLSRPEPMWAELLALAASAQGRVYRAEDPHGALRGLKEVRGLLAKDLAVVALREGLDLPPTDDPMLLAYLLDPSNTTPEGVARRYGGEWTEDAGERALLAERLHANLLGRLQGEERLLWLYEEVEKPLSRVLAHMEATGVKLDVAYLEALSLEVAAEMRRLEEEVFRLAGHSFYLNSRDQLERVLFDELGLPPIGKTEKTGKRSTSAAVLEALREVHPIVDKILQYRELAKLKGTYIDPLPALVHPKTGRLHTRFNQTATATGRLSSSDPNLQNIPVRTPLGQKIRRAFVAEEGWRLVALDYSQIELRVLAHLSGDTNLIRVFQEGKDIHTQTASWMFGLSAEAIDPLMRRAAKTINFGVLYGMSAHRLSQELGIPYEEAAAFIQRYFQSYPKVKAWIEKTLEEGRTRGYVETLFGRRRYVPDLNARVKSVREAAERMAFNMPVQGTAADLMKLAMVRLFPQLREVGARMLLQVHDELLLEAPKERAEEVAALAKEVMEGVWPLAVPLEVEVGIGEDWLAAKG

SEQ ID NO: 2073 - DNA, 2529 bp, synthetic construct
  misc_feature 1..2529: note = Variant of DNA polymerase I from Thermus sp. strain 2.9
  source 1..2529: mol_type = other DNA
atgcaccatcatcatcatcatggcggtagcggcatgttaccgttgttcgaacctaaaggtcgcgtgcttctggttgatggccatcatctcgcgtatcgtaacttctttgccctgaaaggattaaccaccagccgtggcgagccggtacagggtgtctacggctttgcaaagtcgctcctgaaagctctgaaagaagacggtgatgtggtgattgttgtctttgatgcgaaagcgccaagttttcgccacgaagcgtacgaagcttacaaagccgggcgtgctccaacgccggaagactttcctcgccaattggcgcttatgaaggaattagtggatttgcttggcctcgaacgcttggaagttcccggtttcgaggcagacgacgtattagcgactctcgcaaagaaagccgaacgtgagggctatgaagtccagatcttgacagcagatcgcgatcttttccagcttttatctccgcgcatctcggtgttacacccggaagggcatcgtatcaccccggaatggctctgggagaaatatggtttgcgtcccgaacaatgggtggattttcgcgccttagcaggcgatccgagcgacaatattccgggagttaaaggtatcggcgagaagacggcgctcaagctccttaaagaatgggggtcgttggagaacttgcttaagaatttagatcaggtcaaaccagagtcagtgcgtgagaagattcttgcacacctcgaagacctcaaattaagccgcgaattgtcccgtgtacgcaccgatttgccgctcgaagttgatttccgtggccgccgcgaacctgactgggagggtcttaaagcgtttttagagcgtcttgaatttggttcgctcttgcatgaattcggccttttagaaagcccgttaccagccgaagaagcaccttggccaccgcccgaaggcgcgtttttaggttaccgtttgagtcgcccggaaccgatgtgggccgaattattggctcttgcagcgtctgcccagggacgtgtgtatcgcgcggaagaccctcatggtgcgctccgcggcctcaaagaagtccgtggactccttgccaaagacttagctgttgttgcattgcgcgaaggtcttcggttacctccgactgatgatccaatgcttcttgcgtacctcttggacccgtcaaacacgacgcccgaaggcgtagcccgtcgttacggcggcgagtggaccgaagatgcaggcgagcgcgcgttattggccgaacgtttgcacgccaatttattaggacgtttgcaaggcgaggaacgtctcctctggctttacgaagaagtggagaaaccattgagtcgcgtgctcgcgcatatggaagctaccggtgtcaaattagacgtggcgtatttggaggcactcagccttgaagttgctgccgaaatgcgccgcttggaggaagaagtattccgtttagcaggccactccttttatcttaattctcgcgatcagttagaacgtgtgttgttcgatgaacttggtctccctcctatcggcaagacagagaagaccggtaaacgtagcacttcagcggcggttttagaagctcttcgcgaagtccatcccattgtggacaagatcttgcagtaccgcgaactcgcgaaattgaaaggcacctatattgaccctcttccggcattagtccacccgaaaacgggacgcctccatacccgcttcaaccaaacagccacggcgaccggtcgtttgtcctcctctgatccaaaccttcagaatattccagtacgtaccccattgggccagaagatccgccgcgcgtttgtagctgaggagggttggcgtttagtggccctcgattatagccaaattgaattacgtgtccttgcccatctttctggcgatgagaacctcatccgcgtgtttcaggaaggcaaagacattcacactcaaacggcaagctggatgtttggattatcagctgaagcgatcgatcctttgatgcgtcgtgcagcgaagaccatcaatttcggtgttctctacggtatgagtgcccatcgtttgtcgcaggaattaggcattccctatgaagaagctgcggcgttcattcagcgctactttcaaagctatcccaaagttaaagcatggatcgagaagactctcgaagaaggccgcacacgtggttacgtagagaccttatttggacgtcgccgctatgttcccgatttaaacgctcgcgtgaaatctgtccgtgaagccgccgaacgcatggcgttcaacatgcctgtacagggcacggcagctgacctcatgaaacttgcaatggtgcgcctttttccacaattgcgtgaagttggtgcccgcatgctcttgcaggtccacgatgaactcttgttagaagcgccaaaagagcgtgcggaagaggtggcagccctcgcgaaagaggttatggaaggcgtgtggcccttagcggtgcctcttgaagtcgaagttggtattggcgaggattggttggctgccaaaggataatga

SEQ ID NO: 2074 - protein, 841 aa, synthetic construct
  REGION 1..841: note = Variant of DNA polymerase I from Thermus sp. strain 2.9
MHHHHHHGGSGMLPLFEPKGRVLLVDGHHLAYRNFFALKGLTTSRGEPVQGVYGFAKSLLKALKEDGDVVIVVFDAKAPSFRHEAYEAYKAGRAPTPEDFPRQLALMKELVDLLGLERLEVPGFEADDVLATLAKKAEREGYEVQILTADRDLFQLLSPRISVLHPEGHRITPEWLWEKYGLRPEQWVDFRALAGDPSDNIPGVKGIGEKTALKLLKEWGSLENLLKNLDQVKPESVREKILAHLEDLKLSRELSRVRTDLPLEVDFRGRREPDWEGLKAFLERLEFGSLLHEFGLLESPLPAEEAPWPPPEGAFLGYRLSRPEPMWAELLALAASAQGRVYRAEDPHGALRGLKEVRGLLAKDLAVVALREGLRLPPTDDPMLLAYLLDPSNTTPEGVARRYGGEWTEDAGERALLAERLHANLLGRLQGEERLLWLYEEVEKPLSRVLAHMEATGVKLDVAYLEALSLEVAAEMRRLEEEVFRLAGHSFYLNSRDQLERVLFDELGLPPIGKTEKTGKRSTSAAVLEALREVHPIVDKILQYRELAKLKGTYIDPLPALVHPKTGRLHTRFNQTATATGRLSSSDPNLQNIPVRTPLGQKIRRAFVAEEGWRLVALDYSQIELRVLAHLSGDENLIRVFQEGKDIHTQTASWMFGLSAEAIDPLMRRAAKTINFGVLYGMSAHRLSQELGIPYEEAAAFIQRYFQSYPKVKAWIEKTLEEGRTRGYVETLFGRRRYVPDLNARVKSVREAAERMAFNMPVQGTAADLMKLAMVRLFPQLREVGARMLLQVHDELLLEAPKERAEEVAALAKEVMEGVWPLAVPLEVEVGIGEDWLAAKG

SEQ ID NO: 2075 - DNA, 2529 bp, synthetic construct
  misc_feature 1..2529: note = Variant of DNA polymerase I from Thermus sp. strain 2.9
  source 1..2529: mol_type = other DNA
atgcaccatcatcatcatcatggcggtagcggcatgttaccgttgttcgaacctaaaggtcgcgtgcttctggttgatggccatcatctcgcgtatcgtaacttctttgccctgaaaggattaaccaccagccgtggcgagccggtacagggtgtctacggctttgcaaagtcgctcctgaaagctctgaaagaagacggtgatgtggtgattgttgtctttgatgcgaaagcgccaagttttcgccacgaagcgtacgaagcttacaaagccgggcgtgctccaacgccggaagactttcctcgccaattggcgcttatgaaggaattagtggatttgcttggcctcgaacgcttggaagttcccggtttcgaggcagacgacgtattagcgactctcgcaaagaaagccgaacgtgagggctatgaagtccagatcttgacagcagatcgcgatcttttccagcttttatctccgcgcatctcggtgttacacccggaagggcatcgtatcaccccggaatggctctgggagaaatatggtttgcgtcccgaacaatgggtggattttcgcgccttagcaggcgatccgagcgacaatattccgggagttaaaggtatcggcgagaagacggcgctcaagctccttaaagggtgggggtcgttggagaacttgcttaagaatttagatcaggtcaaaccagagtcagtgcgtgagaagattcttgcacacctcgaagacctcaaattaagccgcgaattgtcccgtgtacgcaccgatttgccgctcgaagttgatttccgtggccgccgcgaacctgactgggagggtcttaaagcgtttttagagcgtcttgaatttggttcgctcttgcatgaattcggccttttagaaagcccgttaccagccgaagaagcaccttggccaccgcccgaaggcgcgtttttaggttaccgtttgagtcgcccggaaccgatgtgggccgaattattggctcttgcagcgtctgcccagggacgtgtgtatcgcgcggaagaccctcatggtgcgctccgcggcctcaaagaagtccgtggactccttgccaaagacttagctgttgttgcattgcgcgaaggtcttgatttacctccgactgatgatccaatgcttcttgcgtacctcttggacccgtcaaacacgacgcccgaaggcgtagcccgtcgttacggcggcgagtggaccgaagatgcaggcgagcgcgcgttattggccgaacgtttgcacgccaatttattaggacgtttgcaaggcgaggaacgtctcctctggctttacgaagaagtggagaaaccattgagtcgcgtgctcgcgcatatggaagctaccggtgtcaaattagacgtggcgtatttggaggcactcagccttgaagttgctgccgaaatgcgccgcttggaggaagaagtattccgtttagcaggccactccttttatcttaattctcgcgatcagttagaacgtgtgttgttcgatgaacttggtctccctcctatcggcaagacagagaagaccggtaaacgtagcacttcagcggcggttttagaagctcttcgcgaagtccatcccattgtggacaagatcttgcagtaccgcgaactcgcgaaattgaaaggcacctatattgaccctcttccggcattagtccacccgaaaacgggacgcctccatacccgcttcaaccaaacagccacggcgaccggtcgtttgtcctcctctgatccaaaccttcagaatattccagtacgtaccccattgggccagaagatccgccgcgcgtttgtagctgaggagggttggcgtttagtggccctcgattatagccaaattgaattacgtgtccttgcccatctttctggcgatgagaacctcatccgcgtgtttcaggaaggcaaagacattcacactcaaacggcaagctggatgtttggattatcagctgaagcgatcgatcctttgatgcgtcgtgcagcgaagaccatcaatttcggtgttctctacggtatgagtgcccatcgtttgtcgcaggaattaggcattccctatgaagaagctgcggcgttcattcagcgctactttcaaagctatcccaaagttaaagcatggatcgagaagactctcgaagaaggccgcacacgtggttacgtagagaccttatttggacgtcgccgctatgttcccgatttaaacgctcgcgtgaaatctgtccgtgaagccgccgaacgcatggcgttcaacatgcctgtacagggcacggcagctgacctcatgaaacttgcaatggtgcgcctttttccacaattgcgtgaagttggtgcccgcatgctcttgcaggtccacgatgaactcttgttagaagcgccaaaagagcgtgcggaagaggtggcagccctcgcgaaagaggttatggaaggcgtgtggcccttagcggtgcctcttgaagtcgaagttggtattggcgaggattggttggctgccaaaggataatga

SEQ ID NO: 2076 - protein, 841 aa, synthetic construct
  REGION 1..841: note = Variant of DNA polymerase I from Thermus sp. strain 2.9
MHHHHHHGGSGMLPLFEPKGRVLLVDGHHLAYRNFFALKGLTTSRGEPVQGVYGFAKSLLKALKEDGDVVIVVFDAKAPSFRHEAYEAYKAGRAPTPEDFPRQLALMKELVDLLGLERLEVPGFEADDVLATLAKKAEREGYEVQILTADRDLFQLLSPRISVLHPEGHRITPEWLWEKYGLRPEQWVDFRALAGDPSDNIPGVKGIGEKTALKLLKGWGSLENLLKNLDQVKPESVREKILAHLEDLKLSRELSRVRTDLPLEVDFRGRREPDWEGLKAFLERLEFGSLLHEFGLLESPLPAEEAPWPPPEGAFLGYRLSRPEPMWAELLALAASAQGRVYRAEDPHGALRGLKEVRGLLAKDLAVVALREGLDLPPTDDPMLLAYLLDPSNTTPEGVARRYGGEWTEDAGERALLAERLHANLLGRLQGEERLLWLYEEVEKPLSRVLAHMEATGVKLDVAYLEALSLEVAAEMRRLEEEVFRLAGHSFYLNSRDQLERVLFDELGLPPIGKTEKTGKRSTSAAVLEALREVHPIVDKILQYRELAKLKGTYIDPLPALVHPKTGRLHTRFNQTATATGRLSSSDPNLQNIPVRTPLGQKIRRAFVAEEGWRLVALDYSQIELRVLAHLSGDENLIRVFQEGKDIHTQTASWMFGLSAEAIDPLMRRAAKTINFGVLYGMSAHRLSQELGIPYEEAAAFIQRYFQSYPKVKAWIEKTLEEGRTRGYVETLFGRRRYVPDLNARVKSVREAAERMAFNMPVQGTAADLMKLAMVRLFPQLREVGARMLLQVHDELLLEAPKERAEEVAALAKEVMEGVWPLAVPLEVEVGIGEDWLAAKG

SEQ ID NO: 2077 - DNA, 2529 bp, synthetic construct
  misc_feature 1..2529: note = Variant of DNA polymerase I from Thermus sp. strain 2.9
  source 1..2529: mol_type = other DNA
atgcaccatcatcatcatcatggcggtagcggcatgttaccgttgttcgaacctaaaggtcgcgtgcttctggttgatggccatcatctcgcgtatcgtaacttctttgccctgaaaggattaaccaccagccgtggcgagccggtacagggtgtctacggctttgcaaagtcgctcctgaaagctctgaaagaagacggtgatgtggtgattgttgtctttgatgcgaaagcgccaagttttcgccacgaagcgtacgaagcttacaaagccgggcgtgctccaacgccggaagactttcctcgccaattggcgcttatgaaggaattagtggatttgcttggcctcgaacgcttggaagttcccggtttcgaggcagacgacgtattagcgactctcgcaaagaaagccgaacgtgagggctatgaagtccagatcttgacagcagatcgcgatcttttccagcttttatctccgcgcatctcggtgttacacccggaagggcatcgtatcaccccggaatggctctgggagaaatatggtttgcgtcccgaacaatgggtggattttcgcgccttagcaggcgatccgagcgacaatattccgggagttaaaggtatcggcgagaagacggcgctcaagctccttaaagaatgggggtcgttggagaacttgcttaagaatttagatcaggtcaaaccagagtcagtgcgtgagaagattcttgcacacctcgaagacctcaaattaagccgcgaattgtcccgtgtacgcaccgatttgccgctcgaagttgatttccgtggccgccgcgaacctgactgggagggtcttaaagcgtttttagagcgtcttgaatttggttcgctcttgcatgaattcggccttttagaaagcccgttaccagccgaagaagcaccttggccaccgcccgaaggcgcgtttttaggttaccgtttgagtcgcccggaaccgatgtgggccgaattattggctcttgcagcgtctgcccagggacgtgtgtatcgcgcggaagaccctcatggtgcgctccgcggcctcaaagaagtccgtggactccttgccaaagacttagctgttgttgcattgcgcgaaggtcttgatttacctccgactgatgatccaatgcttcttgcgtacctcttggacccgtcaaacacgacgcccgaaggcgtagcccgtcgttacggcggcgagtggaccgaagatgcaggcgagcgcgcgttattggccgaacgtttgcacgccaatttattaggacgtttgcaaggcgaggaacgtctcctctggctttacgaagaagtggagaaaccattgagtcgcgtgctcgcgcatatggaagctaccggtgtcaaattagacgtggcgtatttggaggcactcagccttgaagttgctgccgaaatgcgccgcttggaggaagaagtattccgtttagcaggccactccttttatcttaattctcgcgatcagttagaacgtgtgttgttcgatgaacttggtctccctcctatcggcaagacagagaagaccggtaaacgtagcacttcagcggcggttttagaagctcttcgcgaagtccatcccattgtggacaagatcttgcagtaccgcgaactcgcgaaattgaaaggcacctatattgaccctcttccggcattagtccacccgaaaacgggacgcctccatacccgcttcaaccaaacagccacggcgaccggtcgtttgtcctcctctgatccaaaccttcagaatattccagtacgtaccccattgggccagaagatccgccgcgcgtttgtagctgaggagggttggcgtttagtggccctcgattatagccaaattgaattacgtgtccttgcccatctttctggcgatgagaacctcatccgcgtgtttcaggaaggcaaagacattcacactcaaacggcaagctggatgtttggatcttcagctgaagcgatcgatcctttgatgcgtcgtgcagcgaagaccatcaatttcggtgttctctacggtatgagtgcccatcgtttgtcgcaggaattaggcattccctatgaagaagctgcggcgttcattcagcgctactttcaaagctatcccaaagttaaagcatggatcgagaagactctcgaagaaggccgcacacgtggttacgtagagaccttatttggacgtcgccgctatgttcccgatttaaacgctcgcgtgaaatctgtccgtgaagccgccgaacgcatggcgttcaacatgcctgtacagggcacggcagctgacctcatgaaacttgcaatggtgcgcctttttccacaattgcgtgaagttggtgcccgcatgctcttgcaggtccacgatgaactcttgttagaagcgccaaaagagcgtgcggaagaggtggcagccctcgcgaaagaggttatggaaggcgtgtggcccttagcggtgcctcttgaagtcgaagttggtattggcgaggattggttggctgccaaaggataatga

SEQ ID NO: 2078 - protein, 841 aa, synthetic construct
  REGION 1..841: note = Variant of DNA polymerase I from Thermus sp. strain 2.9
MHHHHHHGGSGMLPLFEPKGRVLLVDGHHLAYRNFFALKGLTTSRGEPVQGVYGFAKSLLKALKEDGDVVIVVFDAKAPSFRHEAYEAYKAGRAPTPEDFPRQLALMKELVDLLGLERLEVPGFEADDVLATLAKKAEREGYEVQILTADRDLFQLLSPRISVLHPEGHRITPEWLWEKYGLRPEQWVDFRALAGDPSDNIPGVKGIGEKTALKLLKEWGSLENLLKNLDQVKPESVREKILAHLEDLKLSRELSRVRTDLPLEVDFRGRREPDWEGLKAFLERLEFGSLLHEFGLLESPLPAEEAPWPPPEGAFLGYRLSRPEPMWAELLALAASAQGRVYRAEDPHGALRGLKEVRGLLAKDLAVVALREGLDLPPTDDPMLLAYLLDPSNTTPEGVARRYGGEWTEDAGERALLAERLHANLLGRLQGEERLLWLYEEVEKPLSRVLAHMEATGVKLDVAYLEALSLEVAAEMRRLEEEVFRLAGHSFYLNSRDQLERVLFDELGLPPIGKTEKTGKRSTSAAVLEALREVHPIVDKILQYRELAKLKGTYIDPLPALVHPKTGRLHTRFNQTATATGRLSSSDPNLQNIPVRTPLGQKIRRAFVAEEGWRLVALDYSQIELRVLAHLSGDENLIRVFQEGKDIHTQTASWMFGSSAEAIDPLMRRAAKTINFGVLYGMSAHRLSQELGIPYEEAAAFIQRYFQSYPKVKAWIEKTLEEGRTRGYVETLFGRRRYVPDLNARVKSVREAAERMAFNMPVQGTAADLMKLAMVRLFPQLREVGARMLLQVHDELLLEAPKERAEEVAALAKEVMEGVWPLAVPLEVEVGIGEDWLAAKG

SEQ ID NO: 2079 - DNA, 2529 bp, synthetic construct; identical to SEQ ID NO: 1999
  misc_feature 1..2529: note = Variant of DNA polymerase I from Thermus sp. strain 2.9
  source 1..2529: mol_type = other DNA

SEQ ID NO: 2080 - protein, 841 aa, synthetic construct; identical to SEQ ID NO: 2000
  REGION 1..841: note = Variant of DNA polymerase I from Thermus sp. strain 2.9

SEQ ID NO: 2081 - DNA, 2529 bp, synthetic construct
  misc_feature 1..2529: note = Variant of DNA polymerase I from Thermus sp. strain 2.9
  source 1..2529: mol_type = other DNA
atgcaccatcatcatcatcatggcggtagcggcatgttaccgttgttcgaacctaaaggtcgcgtgcttctggttgatggccatcatctcgcgtatcgtaacttctttgccctgaaaggattaaccaccagccgtggcgagccggtacagggtgtctacggctttgcaaagtcgctcctgaaagctctgaaagaagacggtgatgtggtgattgttgtctttgatgcgaaagcgccaagttttcgccacgaagcgtacgaagcttacaaagccgggcgtgctccaacgccggaagactttcctcgccaattggcgcttatgaaggaattagtggatttgcttggcctcgaacgcttggaagttcccggtttcgaggcagacgacgtattagcgactctcgcaaagaaagccgaacgtgagggctatgaagtccagatcttgacagcagatcgcgatcttttccagcttttatctccgcgcatctcggtgttacacccggaagggcatcgtatcaccccggaatggctctgggagaaatatggtttgcgtcccgaacaatgggtggattttcgcgccttagcaggcgatccgagcgacaatattccgggagttaaaggtatcggcgagaagacggcgctcaagctccttaaagaatgggggtcgttggagaacttgcttaagaatttagatcaggtcaaaccagagtcagtgcgtgagaagattcttgcacacctcgaagacctcaaattaagccgcgaattgtcccgtgtacgcaccgatttgccgctcgaagttgatttccgtggccgccgcgaacctgactgggagggtcttaaagcgtttttagagcgtcttgaatttggttcgctcttgcatgaattcggccttttagaaagcccgttaccagccgaagaagcaccttggccaccgcccgaaggcgcgtttttaggttaccgtttgagtcgcccggaaccgatgtgggccgaattattggctcttgcagcgtctgcccagggacgtgtgtatcgcgcggaagaccctcatggtgcgctccgcggcctcaaagaagtccgtggactccttgccaaagacttagctgttgttgcattgcgcgaaggtcttgatttacctccgactgatgatccaatgcttcttgcgtacctcttggacccgtcaaacacgacgcccgaaggcgtagcccgtcgttacggcggcgagtggaccgaagatgcaggcgagcgcgcgttattggccgaacgtttgcacgccaatttattaggacgtttgcaaggcgaggaacgtctcctctggctttacgaagaagtggagaaaccattgagtcgcgtgctcgcgcatatggaagctaccggtgtcaaattagacgtggcgtatttggaggcactcagccttgaagttgctgccgaaatgcgccgcttggaggaagaagtattccgtttagcaggccactccttttatcttaattctcgcgatcagttagaacgtgtgttgttcgatgaacttggtctccctcctatcggcaagacagagaagaccggtaaacgtagcacttcagcggcggttttagaagctcttcgcgaagtccatcccattgtggacaagatcttgcagtaccgcgaactcgcgaaattgaaaggcacctatattgaccctcttccggcattagtccacccgaaaacgggacgcctccatacccgcttcaaccaaacagccacggcgaccggtcgtttgtcctcctctgatccaaaccttcagaatattccagtacgtaccccattgggccagaagatccgccgcgcgtttgtagctgaggagggttggcgtttagtggccctcgattatagccaaattgaattacgtgtccttgcccatctttctggcgatgagaacctcatccgcgtgtttcaggaaggcaaagacattcacactcaaacggcaagctggatgtttggattatcagctgaagcgatcgatcctttgatgcgtcgtgcagcgaagaccatcaatttcggtgttctctacggtatgagtgcccatcgtttgtcgcaggaattatctattccctatgaagaagctgcggcgttcattcagcgctactttcaaagctatcccaaagttaaagcatggatcgagaagactctcgaagaaggccgcacacgtggttacgtagagaccttatttggacgtcgccgctatgttcccgatttaaacgctcgcgtgaaatctgtccgtgaagccgccgaacgcatggcgttcaacatgcctgtacagggcacggcagctgacctcatgaaacttgcaatggtgcgcctttttccacaattgcgtgaagttggtgcccgcatgctcttgcaggtccacgatgaactcttgttagaagcgccaaaagagcgtgcggaagaggtggcagccctcgcgaaagaggttatggaaggcgtgtggcccttagcggtgcctcttgaagtcgaagttggtattggcgaggattggttggctgccaaaggataatga

SEQ ID NO: 2082 - protein, 841 aa, synthetic construct
  REGION 1..841: note = Variant of DNA polymerase I from Thermus sp. strain 2.9
MHHHHHHGGSGMLPLFEPKGRVLLVDGHHLAYRNFFALKGLTTSRGEPVQGVYGFAKSLLKALKEDGDVVIVVFDAKAPSFRHEAYEAYKAGRAPTPEDFPRQLALMKELVDLLGLERLEVPGFEADDVLATLAKKAEREGYEVQILTADRDLFQLLSPRISVLHPEGHRITPEWLWEKYGLRPEQWVDFRALAGDPSDNIPGVKGIGEKTALKLLKEWGSLENLLKNLDQVKPESVREKILAHLEDLKLSRELSRVRTDLPLEVDFRGRREPDWEGLKAFLERLEFGSLLHEFGLLESPLPAEEAPWPPPEGAFLGYRLSRPEPMWAELLALAASAQGRVYRAEDPHGALRGLKEVRGLLAKDLAVVALREGLDLPPTDDPMLLAYLLDPSNTTPEGVARRYGGEWTEDAGERALLAERLHANLLGRLQGEERLLWLYEEVEKPLSRVLAHMEATGVKLDVAYLEALSLEVAAEMRRLEEEVFRLAGHSFYLNSRDQLERVLFDELGLPPIGKTEKTGKRSTSAAVLEALREVHPIVDKILQYRELAKLKGTYIDPLPALVHPKTGRLHTRFNQTATATGRLSSSDPNLQNIPVRTPLGQKIRRAFVAEEGWRLVALDYSQIELRVLAHLSGDENLIRVFQEGKDIHTQTASWMFGLSAEAIDPLMRRAAKTINFGVLYGMSAHRLSQELSIPYEEAAAFIQRYFQSYPKVKAWIEKTLEEGRTRGYVETLFGRRRYVPDLNARVKSVREAAERMAFNMPVQGTAADLMKLAMVRLFPQLREVGARMLLQVHDELLLEAPKERAEEVAALAKEVMEGVWPLAVPLEVEVGIGEDWLAAKG

SEQ ID NO: 2083 - DNA, 2529 bp, synthetic construct
  misc_feature 1..2529: note = Variant of DNA polymerase I from Thermus sp. strain 2.9
  source 1..2529: mol_type = other DNA
atgcaccatcatcatcatcatggcggtagcggcatgttaccgttgttcgaacctaaaggtcgcgtgcttctggttgatggccatcatctcgcgtatcgtaacttctttgccctgaaaggattaaccaccagccgtggcgagccggtacagggtgtctacggctttgcaaagtcgctcctgaaagctctgaaagaagacggtgatgtggtgattgttgtctttgatgcgaaagcgccaagttttcgccacgaagcgtacgaagcttacaaagccgggcgtgctccaacgccggaagactttcctcgccaattggcgcttatgaaggaattagtggatttgcttggcctcgaacgcttggaagttcccggtttcgaggcagacgacgtattagcgactctcgcaaagaaagccgaacgtgagggctatgaagtccagatcttgacagcagatcgcgatcttttccagcttttatctccgcgcatctcggtgttacacccggaagggcatcgtatcaccccggaatggctctgggagaaatatggtttgcgtcccgaacaatgggtggattttcgcgccttagcaggcgatccgagcgacaatattccgggagttaaaggtatcggcgagaagacggcgctcaagctccttaaagaatgggggtcgttggagaacttgcttaagaatttagatcaggtcaaaccagagtcagtgcgtgagaagattcttgcacacctcgaagacctcaaattaagccgcgaattgtcccgtgtacgcaccgatttgccgctcgaagttgatttccgtggccgccgcgaacctgactgggagggtcttaaagcgtttttagagcgtcttgaatttggttcgctcttgcatgaattcggccttttagaaagcccgttaccagccgaagaagcaccttggccaccgcccgaaggcgcgtttttaggttaccgtttgagtcgcccggaaccgatgtgggccgaattattggctcttgcagcgtctgcccagggacgtgtgtatcgcgcggaagaccctcatggtgcgctccgcggcctcaaagaagtccgtggactccttgccaaagacttagctgttgttgcattgcgcgaaggtcttgatttacctccgactgatgatccaatgcttcttgcgtacctcttggacccgtcaaacacgacgcccgaaggcgtagcccgtcgttacggcggcgagtggaccgaagatgcaggcgagcgcgcgttattggccgaacgtttgcacgccaatttattaggacgtttgcaaggcgaggaacgtctcctctggctttacgaagaagtggagaaaccattgagtcgcgtgctcgcgcatatggaagctaccggtgtcaaattagacgtggcgtatttggaggcactcagccttgaagttgctgccgaaatgcgccgcttggaggaagaagtattccgtttagcaggccactccttttatcttaattctcgcgatcagttagaacgtgtgttgttcgatgaacttggtctccctcctatcggcaagacagagaagaccggtaaacgtagcacttcagcggcggttttagaagctcttcgcgaagtccatcccattgtggacaagatcttgcagtaccgcgaactcgcgaaattgaaaggcacctatattgaccctcttccggcattagtccacccgaaaacgggacgcctccatacccgcttcaaccaaacagccacggcgaccggtcgtttgtcctcctctgatccaaaccttcagaatattccagtacgtaccccattgggccagaagatccgccgcgcgtttgtagctgaggagggttggcgtttagtggccctcgattatagccaaattgaattacgtgtccttgcccatctttctggcgatgagaacctcatccgcgtgtttcaggaaggcaaagacattcacactcaaacggcaagctggatgtttggattatcagctgaagcgatcgatcctttgatgcgtcgtgcagcgaagaccatcaatttcggtgttctctacggtatgagtgcccatcgtttgtcgcaggaattaggcattccctatgaagaagctgcggcgttcattcagcgctactttcaaagctatcccaaagttaaagcatggatctataagactctcgaagaaggccgcacacgtggttacgtagagaccttatttggacgtcgccgctatgttcccgatttaaacgctcgcgtgaaatctgtccgtgaagccgccgaacgcatggcgttcaacatgcctgtacagggcacggcagctgacctcatgaaacttgcaatggtgcgcctttttccacaattgcgtgaagttggtgcccgcatgctcttgcaggtccacgatgaactcttgttagaagcgccaaaagagcgtgcggaagaggtggcagccctcgcgaaagaggttatggaaggcgtgtggcccttagcggtgcctcttgaagtcgaagttggtattggcgaggattggttggctgccaaaggataatga

SEQ ID NO: 2084 - protein, 841 aa, synthetic construct
  REGION 1..841: note = Variant of DNA polymerase I from Thermus sp. strain 2.9
MHHHHHHGGSGMLPLFEPKGRVLLVDGHHLAYRNFFALKGLTTSRGEPVQGVYGFAKSLLKALKEDGDVVIVVFDAKAPSFRHEAYEAYKAGRAPTPEDFPRQLALMKELVDLLGLERLEVPGFEADDVLATLAKKAEREGYEVQILTADRDLFQLLSPRISVLHPEGHRITPEWLWEKYGLRPEQWVDFRALAGDPSDNIPGVKGIGEKTALKLLKEWGSLENLLKNLDQVKPESVREKILAHLEDLKLSRELSRVRTDLPLEVDFRGRREPDWEGLKAFLERLEFGSLLHEFGLLESPLPAEEAPWPPPEGAFLGYRLSRPEPMWAELLALAASAQGRVYRAEDPHGALRGLKEVRGLLAKDLAVVALREGLDLPPTDDPMLLAYLLDPSNTTPEGVARRYGGEWTEDAGERALLAERLHANLLGRLQGEERLLWLYEEVEKPLSRVLAHMEATGVKLDVAYLEALSLEVAAEMRRLEEEVFRLAGHSFYLNSRDQLERVLFDELGLPPIGKTEKTGKRSTSAAVLEALREVHPIVDKILQYRELAKLKGTYIDPLPALVHPKTGRLHTRFNQTATATGRLSSSDPNLQNIPVRTPLGQKIRRAFVAEEGWRLVALDYSQIELRVLAHLSGDENLIRVFQEGKDIHTQTASWMFGLSAEAIDPLMRRAAKTINFGVLYGMSAHRLSQELGIPYEEAAAFIQRYFQSYPKVKAWIYKTLEEGRTRGYVETLFGRRRYVPDLNARVKSVREAAERMAFNMPVQGTAADLMKLAMVRLFPQLREVGARMLLQVHDELLLEAPKERAEEVAALAKEVMEGVWPLAVPLEVEVGIGEDWLAAKG

SEQ ID NO: 2085 - DNA, 2529 bp, synthetic construct
  misc_feature 1..2529: note = Variant of DNA polymerase I from Thermus sp. strain 2.9
  source 1..2529: mol_type = other DNA
atgcaccatcatcatcatcatggcggtagcggcatgttaccgttgttcgaacctaaaggtcgcgtgcttctggttgatggccatcatctcgcgtatcgtaacttctttgccctgaaaggattaaccaccagccgtggcgagccggtacagggtgtctacggctttgcaaagtcgctcctgaaagctctgaaagaagacggtgatgtggtgattgttgtctttgatgcgaaagcgccaagttttcgccacgaagcgtacgaagcttacaaagccgggcgtgctccaacgccggaagactttcctcgccaattggcgcttatgaaggaattagtggatttgcttggcctcgaacgcttggaagttcccggtttcgaggcagacgacgtattagcgactctcgcaaagaaagccgaacgtgagggctatgaagtccagatcttgacagcagatcgcgatcttttccagcttttatctccgcgcatctcggtgttacacccggaagggcatcgtatcaccccggaatggctctgggagaaatatggtttgcgtcccgaacaatgggtggattttcgcgccttagcaggcgatccgagcgacaatattccgggagttaaaggtatcggcgagaagacggcgctcaagctccttaaagaatgggggtcgttggagaacttgcttaagaatttagatcaggtcaaaccagagtcagtgcgtgagaagattcttgcacacctcgaagacctcaaattaagccgcgaattgtcccgtgtacgcaccgatttgccgctcgaagttgatttccgtggccgccgcgaacctgactgggagggtcttaaagcgtttttagagcgtcttgaatttggttcgctcttgcatgaattcggccttttagaaagcccgttaccagccgaagaagcaccttggccaccgcccgaaggcgcgtttttaggttaccgtttgagtcgcccggaaccgatgtgggccgaattattggctcttgcagcgtctgcccagggacgtgtgtatcgcgcggaagaccctcatggtgcgctccgcggcctcaaagaagtccgtggactccttgccaaagacttagctgttgttgcattgcgcgaaggtcttgatttacctccgactgatgatccaatgcttcttgcgtacctcttggacccgtcaaacacgacgcccgaaggcgtagcccgtcgttacggcggcgagtggaccgaagatgcaggcgagcgcgcgttattggccgaacgtttgcacgccaatttattaggacgtttgcaaggcgaggaacgtctcctctggctttacgaagaagtggagaaaccattgagtcgcgtgctcgcgcatatggaagctaccggtgtcaaattagacgtggcgtatttggaggcactcagccttgaagttgctgccgaaatgcgccgcttggaggaagaagtattccgtttagcaggccactccttttatcttaattctcgcgatcagttagaacgtgtgttgttcgatgaacttggtctccctcctatcggcaagacagagaagaccggtaaacgtagcacttcagcggcggttttagaagctcttcgcgaagtccatcccattgtggacaagatcttgcagtaccgcgaactcgcgaaattgaaaggcacctatattgaccctcttccggcattagtccacccgaaaacgggacgcctccatacccgcttcaaccaaacagccacggcgaccggtcgtttgtcctcctctgatccaaaccttcagaatattccagtacgtaccccattgggccagaagatccgccgcgcgtttgtagctgaggagggttggcgtttagtggccctcgattatagccaaattgaattacgtgtccttgcccatctttctggcgatgggaacctcatccgcgtgtttcaggaaggcaaagacattcacactcaaacggcaagctggatgtttggattatcagctgaagcgatcgatcctttgatgcgtcgtgcagcgaagaccatcaatttcggtgttctctacggtatgagtgcccatcgtttgtcgcaggaattaggcattccctatgaagaagctgcggcgttcattcagcgctactttcaaagctatcccaaagttaaagcatggatcgagaagactctcgaagaaggccgcacacgtggttacgtagagaccttatttggacgtcgccgctatgttcccgatttaaacgctcgcgtgaaatctgtccgtgaagccgccgaacgcatggcgttcaacatgcctgtacagggcacggcagctgacctcatgaaacttgcaatggtgcgcctttttccacaattgcgtgaagttggtgcccgcatgctcttgcaggtccacgatgaactcttgttagaagcgccaaaagagcgtgcggaagaggtggcagccctcgcgaaagaggttatggaaggcgtgtggcccttagcggtgcctcttgaagtcgaagttggtattggcgaggattggttggctgccaaaggataatga

SEQ ID NO: 2086 - protein, 841 aa, synthetic construct
  REGION 1..841: note = Variant of DNA polymerase I from Thermus sp. strain 2.9
MHHHHHHGGSGMLPLFEPKGRVLLVDGHHLAYRNFFALKGLTTSRGEPVQGVYGFAKSLLKALKEDGDVVIVVFDAKAPSFRHEAYEAYKAGRAPTPEDFPRQLALMKELVDLLGLERLEVPGFEADDVLATLAKKAEREGYEVQILTADRDLFQLLSPRISVLHPEGHRITPEWLWEKYGLRPEQWVDFRALAGDPSDNIPGVKGIGEKTALKLLKEWGSLENLLKNLDQVKPESVREKILAHLEDLKLSRELSRVRTDLPLEVDFRGRREPDWEGLKAFLERLEFGSLLHEFGLLESPLPAEEAPWPPPEGAFLGYRLSRPEPMWAELLALAASAQGRVYRAEDPHGALRGLKEVRGLLAKDLAVVALREGLDLPPTDDPMLLAYLLDPSNTTPEGVARRYGGEWTEDAGERALLAERLHANLLGRLQGEERLLWLYEEVEKPLSRVLAHMEATGVKLDVAYLEALSLEVAAEMRRLEEEVFRLAGHSFYLNSRDQLERVLFDELGLPPIGKTEKTGKRSTSAAVLEALREVHPIVDKILQYRELAKLKGTYIDPLPALVHPKTGRLHTRFNQTATATGRLSSSDPNLQNIPVRTPLGQKIRRAFVAEEGWRLVALDYSQIELRVLAHLSGDGNLIRVFQEGKDIHTQTASWMFGLSAEAIDPLMRRAAKTINFGVLYGMSAHRLSQELGIPYEEAAAFIQRYFQSYPKVKAWIEKTLEEGRTRGYVETLFGRRRYVPDLNARVKSVREAAERMAFNMPVQGTAADLMKLAMVRLFPQLREVGARMLLQVHDELLLEAPKERAEEVAALAKEVMEGVWPLAVPLEVEVGIGEDWLAAKG

SEQ ID NO: 2087 - DNA, 2529 bp, synthetic construct
  misc_feature 1..2529: note = Variant of DNA polymerase I from Thermus sp. strain 2.9
  source 1..2529: mol_type = other DNA
atgcaccatcatcatcatcatggcggtagcggcatgttaccgttgttcgaacctaaaggtcgcgtgcttctggttgatggccatcatctcgcgtatcgtaacttctttgccctgaaaggattaaccaccagccgtggcgagccggtacagggtgtctacggctttgcaaagtcgctcctgaaagctctgaaagaagacggtgatgtggtgattgttgtctttgatgcgaaagcgccaagttttcgccacgaagcgtacgaagcttacaaagccgggcgtgctccaacgccggaagactttcctcgccaattggcgcttatgaaggaattagtggatttgcttggcctcgaacgcttggaagttcccggtttcgaggcagacgacgtattagcgactctcgcaaagaaagccgaacgtgagggctatgaagtccagatcttgacagcagatcgcgatcttttccagcttttatctccgcgcatctcggtgttacacccggaagggcatcgtatcaccccggaatggctctgggagaaatatggtttgcgtcccgaacaatgggtggattttcgcgccttagcaggcgatccgagcgacaatattccgggagttaaaggtatcggcgagaagacggcgctcaagctccttaaagaatgggggtcgttggagaacttgcttaagaatttagatcaggtcaaaccagagtcagtgcgtgagaagattcttgcacacctcgaagacctcaaattaagccgcgaattgtcccgtgtacgcaccgatttgccgctcgaagttgatttccgtggccgccgcgaacctgactgggagggtcttaaagcgtttttagagcgtcttgaatttggttcgctcttgcatgaattcggccttttagaaagcccgttaccagccgaagaagcaccttggccaccgcccgaaggcgcgtttttaggttaccgtttgagtcgcccggaaccgatgtgggccgaattattggctcttgcagcgtctgcccagggacgtgtgtatcgcgcggaagaccctcatggtgcgctccgcggcctcaaagaagtccgtggactccttgccaaagacttagctgttgttgcattgcgcgaaggtcttgatttacctccgactgatgatccaatgcttcttgcgtacctcttggacccgtcaaacacgacgcccgaaggcgtagcccgtcgttacggcggcgagtggaccgaagatgcaggcgagcgcgcgttattggccgaacgtttgcacgccaatttattaggacgtttgcaaggcgaggaacgtctcctctggctttacgaagaagtggagaaaccattgagtcgcgtgctcgcgcatatggaagctaccggtgtcaaattagacgtggcgtatttggaggcactcagccttgaagttgctgccgaaatgcgccgcttggaggaagaagtattccgtttagcaggccactccttttatcttaattctcgcgatcagttagaacgtgtgttgttcgatgaacttggtctccctcctatcggcaagacagagaagaccggtaaacgtagcacttcagcggcggttttagaagctcttcgcgaagtccatcccattgtggacaagatcttgcagtaccgcgaactcgcgaaattgaaaggcacctatattgaccctcttccggcattagtccacccgaaaacgggacgcctccatacccgcttcaaccaaacagccacggcgaccggtcgtttgtcctcctctgatccaaaccttcagaatattccagtacgtaccccattgggccagaagatccgccgcgcgtttgtagctgaggagggttggcgtttagtggccctcgattatagccaaattgaattacgtgtccttgcccatctttctggcgatgagaacctcatccgcgtgtttcaggaaggcaatgacattcacactcaaacggcaagctggatgtttggattatcagctgaagcgatcgatcctttgatgcgtcgtgcagcgaagaccatcaatttcggtgttctctacggtatgagtgcccatcgtttgtcgcaggaattaggcattccctatgaagaagctgcggcgttcattcagcgctactttcaaagctatcccaaagttaaagcatggatcgagaagactctcgaagaaggccgcacacgtggttacgtagagaccttatttggacgtcgccgctatgttcccgatttaaacgctcgcgtgaaatctgtccgtgaagccgccgaacgcatggcgttcaacatgcctgtacagggcacggcagctgacctcatgaaacttgcaatggtgcgcctttttccacaattgcgtgaagttggtgcccgcatgctcttgcaggtccacgatgaactcttgttagaagcgccaaaagagcgtgcggaagaggtggcagccctcgcgaaagaggttatggaaggcgtgtggcccttagcggtgcctcttgaagtcgaagttggtattggcgaggattggttggctgccaaaggataatga

SEQ ID NO: 2088 - protein, 841 aa, synthetic construct
  REGION 1..841: note = Variant of DNA polymerase I from Thermus sp. strain 2.9
MHHHHHHGGSGMLPLFEPKGRVLLVDGHHLAYRNFFALKGLTTSRGEPVQGVYGFAKSLLKALKEDGDVVIVVFDAKAPSFRHEAYEAYKAGRAPTPEDFPRQLALMKELVDLLGLERLEVPGFEADDVLATLAKKAEREGYEVQILTADRDLFQLLSPRISVLHPEGHRITPEWLWEKYGLRPEQWVDFRALAGDPSDNIPGVKGIGEKTALKLLKEWGSLENLLKNLDQVKPESVREKILAHLEDLKLSRELSRVRTDLPLEVDFRGRREPDWEGLKAFLERLEFGSLLHEFGLLESPLPAEEAPWPPPEGAFLGYRLSRPEPMWAELLALAASAQGRVYRAEDPHGALRGLKEVRGLLAKDLAVVALREGLDLPPTDDPMLLAYLLDPSNTTPEGVARRYGGEWTEDAGERALLAERLHANLLGRLQGEERLLWLYEEVEKPLSRVLAHMEATGVKLDVAYLEALSLEVAAEMRRLEEEVFRLAGHSFYLNSRDQLERVLFDELGLPPIGKTEKTGKRSTSAAVLEALREVHPIVDKILQYRELAKLKGTYIDPLPALVHPKTGRLHTRFNQTATATGRLSSSDPNLQNIPVRTPLGQKIRRAFVAEEGWRLVALDYSQIELRVLAHLSGDENLIRVFQEGNDIHTQTASWMFGLSAEAIDPLMRRAAKTINFGVLYGMSAHRLSQELGIPYEEAAAFIQRYFQSYPKVKAWIEKTLEEGRTRGYVETLFGRRRYVPDLNARVKSVREAAERMAFNMPVQGTAADLMKLAMVRLFPQLREVGARMLLQVHDELLLEAPKERAEEVAALAKEVMEGVWPLAVPLEVEVGIGEDWLAAKG

SEQ ID NO: 2089 - DNA, 2529 bp, synthetic construct
  misc_feature 1..2529: note = Variant of DNA polymerase I from Thermus sp. strain 2.9
  source 1..2529: mol_type = other DNA
atgcaccatcatcatcatcatggcggtagcggcatgttaccgttgttcgaacctaaaggtcgcgtgcttctggttgatggccatcatctcgcgtatcgtaacttctttgccctgaaaggattaaccaccagccgtggcgagccggtacagggtgtctacggctttgcaaagtcgctcctgaaagctctgaaagaagacggtgatgtggtgattgttgtctttgatgcgaaagcgccaagttttcgccacgaagcgtacgaagcttacaaagccgggcgtgctccaacgccggaagactttcctcgccaattggcgcttatgaaggaattagtggatttgcttggcctcgaacgcttggaagttcccggtttcgaggcagacgacgtattagcgactctcgcaaagaaagccgaacgtgagggctatgaagtccagatcttgacagcagatcgcgatcttttccagcttttatctccgcgcatctcggtgttacacccggaagggcatcgtatcaccccggaatggctctgggagaaatatggtttgcgtcccgaacaatgggtggattttcgcgccttagcaggcgatccgagcgacaatattccgggagttaaaggtatcggcgagaagacggcgctcaagctccttaaagaatgggggtcgttggagaacttgcttaagaatttagatcaggtcaaaccagagtcagtgcgtgagaagattcttgcacacctcgaagacctcaaattaagccgcgaattgtcccgtgtacgcaccgatttgccgctcgaagttgatttccgtggccgccgcgaacctgactgggagggtcttaaagcgtttttagagcgtcttgaatttggttcgctcttgcatgaattcggccttttagaaagcccgttaccagccgaagaagcaccttggccaccgcccgaaggcgcgtttttaggttaccgtttgagtcgcccggaaccgatgtgggccgaattattggctcttgcagcgtctgcccagggacgtgtgtatcgcgcggaagaccctcatggtgcgctccgcggcctcaaagaagtccgtggactccttgccaaagacttagctgttgttgcattgcgcgaaggtcttatgttacctccgactgatgatccaatgcttcttgcgtacctcttggacccgtcaaacacgacgcccgaaggcgtagcccgtcgttacggcggcgagtggaccgaagatgcaggcgagcgcgcgttattggccgaacgtttgcacgccaatttattaggacgtttgcaaggcgaggaacgtctcctctggctttacgaagaagtggagaaaccattgagtcgcgtgctcgcgcatatggaagctaccggtgtcaaattagacgtggcgtatttggaggcactcagccttgaagttgctgccgaaatgcgccgcttggaggaagaagtattccgtttagcaggccactccttttatcttaattctcgcgatcagttagaacgtgtgttgttcgatgaacttggtctccctcctatcggcaagacagagaagaccggtaaacgtagcacttcagcggcggttttagaagctcttcgcgaagtccatcccattgtggacaagatcttgcagtaccgcgaactcgcgaaattgaaaggcacctatattgaccctcttccggcattagtccacccgaaaacgggacgcctccatacccgcttcaaccaaacagccacggcgaccggtcgtttgtcctcctctgatccaaaccttcagaatattccagtacgtaccccattgggccagaagatccgccgcgcgtttgtagctgaggagggttggcgtttagtggccctcgattatagccaaattgaattacgtgtccttgcccatctttctggcgatgagaacctcatccgcgtgtttcaggaaggcaaagacattcacactcaaacggcaagctggatgtttggattatcagctgaagcgatcgatcctttgatgcgtcgtgcagcgaagaccatcaatttcggtgttctctacggtatgagtgcccatcgtttgtcgcaggaattaggcattccctatgaagaagctgcggcgttcattcagcgctactttcaaagctatcccaaagttaaagcatggatcgagaagactctcgaagaaggccgcacacgtggttacgtagagaccttatttggacgtcgccgctatgttcccgatttaaacgctcgcgtgaaatctgtccgtgaagccgccgaacgcatggcgttcaacatgcctgtacagggcacggcagctgacctcatgaaacttgcaatggtgcgcctttttccacaattgcgtgaagttggtgcccgcatgctcttgcaggtccacgatgaactcttgttagaagcgccaaaagagcgtgcggaagaggtggcagccctcgcgaaagaggttatggaaggcgtgtggcccttagcggtgcctcttgaagtcgaagttggtattggcgaggattggttggctgccaaaggataatga

SEQ ID NO: 2090 - protein, 841 aa, synthetic construct
  REGION 1..841: note = Variant of DNA polymerase I from Thermus sp. strain 2.9
MHHHHHHGGSGMLPLFEPKGRVLLVDGHHLAYRNFFALKGLTTSRGEPVQGVYGFAKSLLKALKEDGDVVIVVFDAKAPSFRHEAYEAYKAGRAPTPEDFPRQLALMKELVDLLGLERLEVPGFEADDVLATLAKKAEREGYEVQILTADRDLFQLLSPRISVLHPEGHRITPEWLWEKYGLRPEQWVDFRALAGDPSDNIPGVKGIGEKTALKLLKEWGSLENLLKNLDQVKPESVREKILAHLEDLKLSRELSRVRTDLPLEVDFRGRREPDWEGLKAFLERLEFGSLLHEFGLLESPLPAEEAPWPPPEGAFLGYRLSRPEPMWAELLALAASAQGRVYRAEDPHGALRGLKEVRGLLAKDLAVVALREGLMLPPTDDPMLLAYLLDPSNTTPEGVARRYGGEWTEDAGERALLAERLHANLLGRLQGEERLLWLYEEVEKPLSRVLAHMEATGVKLDVAYLEALSLEVAAEMRRLEEEVFRLAGHSFYLNSRDQLERVLFDELGLPPIGKTEKTGKRSTSAAVLEALREVHPIVDKILQYRELAKLKGTYIDPLPALVHPKTGRLHTRFNQTATATGRLSSSDPNLQNIPVRTPLGQKIRRAFVAEEGWRLVALDYSQIELRVLAHLSGDENLIRVFQEGKDIHTQTASWMFGLSAEAIDPLMRRAAKTINFGVLYGMSAHRLSQELGIPYEEAAAFIQRYFQSYPKVKAWIEKTLEEGRTRGYVETLFGRRRYVPDLNARVKSVREAAERMAFNMPVQGTAADLMKLAMVRLFPQLREVGARMLLQVHDELLLEAPKERAEEVAALAKEVMEGVWPLAVPLEVEVGIGEDWLAAKG

SEQ ID NO: 2091 - DNA, 2529 bp, synthetic construct
  misc_feature 1..2529: note = Variant of DNA polymerase I from Thermus sp. strain 2.9
  source 1..2529: mol_type = other DNA
atgcaccatcatcatcatcatggcggtagcggcatgttaccgttgttcgaacctaaaggtcgcgtgcttctggttgatggccatcatctcgcgtatcgtaacttctttgccctgaaaggattaaccaccagccgtggcgagccggtacagggtgtctacggctttgcaaagtcgctcctgaaagctctgaaagaagacggtgatgtggtgattgttgtctttgatgcgaaagcgccaagttttcgccacgaagcgtacgaagcttacaaagccgggcgtgctccaacgccggaagactttcctcgccaattggcgcttatgaaggaattagtggatttgcttggcctcgaacgcttggaagttcccggtttcgaggcagacgacgtattagcgactctcgcaaagaaagccgaacgtgagggctatgaagtccagatcttgacagcagatcgcgatcttttccagcttttatctccgcgcatctcggtgttacacccggaagggcatcgtatcaccccggaatggctctgggagaaatatggtttgcgtcccgaacaatgggtggattttcgcgccttagcaggcgatccgagcgacaatattccgggagttaaaggtatcggcgagaagacggcgctcaagctccttaaagaatgggggtcgttggagaacttgcttaagaatttagatcaggtcaaaccagagtcagtgcgtgagaagattcttgcacacctcgaagacctcaaattaagccgcgaattgtcccgtgtacgcaccgatttgccgctcgaagttgatttccgtggccgccgcgaacctgactgggagggtcttaaagcgtttttagagcgtcttgaatttggttcgctcttgcatgaattcggccttttagaaagcccgttaccagccgaagaagcaccttggccaccgcccgaaggcgcgtttttaggttaccgtttgagtcgcccggaaccgatgtgggccgaattattggctcttgcagcgtctgcccagggaagtgtgtatcgcgcggaagaccctcatggtgcgctccgcggcctcaaagaagtccgtggactccttgccaaagacttagctgttgttgcattgcgcgaaggtcttgatttacctccgactgatgatccaatgcttcttgcgtacctcttggacccgtcaaacacgacgcccgaaggcgtagcccgtcgttacggcggcgagtggaccgaagatgcaggcgagcgcgcgttattggccgaacgtttgcacgccaatttattaggacgtttgcaaggcgaggaacgtctcctctggctttacgaagaagtggagaaaccattgagtcgcgtgctcgcgcatatggaagctaccggtgtcaaattagacgtggcgtatttggaggcactcagccttgaagttgctgccgaaatgcgccgcttggaggaagaagtattccgtttagcaggccactccttttatcttaattctcgcgatcagttagaacgtgtgttgttcgatgaacttggtctccctcctatcggcaagacagagaagaccggtaaacgtagcacttcagcggcggttttagaagctcttcgcgaagtccatcccattgtggacaagatcttgcagtaccgcgaactcgcgaaattgaaaggcacctatattgaccctcttccggcattagtccacccgaaaacgggacgcctccatacccgcttcaaccaaacagccacggcgaccggtcgtttgtcctcctctgatccaaaccttcagaatattccagtacgtaccccattgggccagaagatccgccgcgcgtttgtagctgaggagggttggcgtttagtggccctcgattatagccaaattgaattacgtgtccttgcccatctttctggcgatgagaacctcatccgcgtgtttcaggaaggcaaagacattcacactcaaacggcaagctggatgtttggattatcagctgaagcgatcgatcctttgatgcgtcgtgcagcgaagaccatcaatttcggtgttctctacggtatgagtgcccatcgtttgtcgcaggaattaggcattccctatgaagaagctgcggcgttcattcagcgctactttcaaagctatcccaaagttaaagcatggatcgagaagactctcgaagaaggccgcacacgtggttacgtagagaccttatttggacgtcgccgctatgttcccgatttaaacgctcgcgtgaaatctgtccgtgaagccgccgaacgcatggcgttcaacatgcctgtacagggcacggcagctgacctcatgaaacttgcaatggtgcgcctttttccacaattgcgtgaagttggtgcccgcatgctcttgcaggtccacgatgaactcttgttagaagcgccaaaagagcgtgcggaagaggtggcagccctcgcgaaagaggttatggaaggcgtgtggcccttagcggtgcctcttgaagtcgaagttggtattggcgaggattggttggctgccaaaggataatga

SEQ ID NO: 2092 - protein, 841 aa, synthetic construct
  REGION 1..841: note = Variant of DNA polymerase I from Thermus sp. strain 2.9
MHHHHHHGGSGMLPLFEPKGRVLLVDGHHLAYRNFFALKGLTTSRGEPVQGVYGFAKSLLKALKEDGDVVIVVFDAKAPSFRHEAYEAYKAGRAPTPEDFPRQLALMKELVDLLGLERLEVPGFEADDVLATLAKKAEREGYEVQILTADRDLFQLLSPRISVLHPEGHRITPEWLWEKYGLRPEQWVDFRALAGDPSDNIPGVKGIGEKTALKLLKEWGSLENLLKNLDQVKPESVREKILAHLEDLKLSRELSRVRTDLPLEVDFRGRREPDWEGLKAFLERLEFGSLLHEFGLLESPLPAEEAPWPPPEGAFLGYRLSRPEPMWAELLALAASAQGSVYRAEDPHGALRGLKEVRGLLAKDLAVVALREGLDLPPTDDPMLLAYLLDPSNTTPEGVARRYGGEWTEDAGERALLAERLHANLLGRLQGEERLLWLYEEVEKPLSRVLAHMEATGVKLDVAYLEALSLEVAAEMRRLEEEVFRLAGHSFYLNSRDQLERVLFDELGLPPIGKTEKTGKRSTSAAVLEALREVHPIVDKILQYRELAKLKGTYIDPLPALVHPKTGRLHTRFNQTATATGRLSSSDPNLQNIPVRTPLGQKIRRAFVAEEGWRLVALDYSQIELRVLAHLSGDENLIRVFQEGKDIHTQTASWMFGLSAEAIDPLMRRAAKTINFGVLYGMSAHRLSQELGIPYEEAAAFIQRYFQSYPKVKAWIEKTLEEGRTRGYVETLFGRRRYVPDLNARVKSVREAAERMAFNMPVQGTAADLMKLAMVRLFPQLREVGARMLLQVHDELLLEAPKERAEEVAALAKEVMEGVWPLAVPLEVEVGIGEDWLAAKG

SEQ ID NO: 2093 - DNA, 2529 bp, synthetic construct
  misc_feature 1..2529: note = Variant of DNA polymerase I from Thermus sp. strain 2.9
  source 1..2529: mol_type = other DNA
atgcaccatcatcatcatcatggcggtagcggcatgttaccgttgttcgaacctaaaggtcgcgtgcttctggttgatggccatcatctcgcgtatcgtaacttctttgccctgaaaggattaaccaccagccgtggcgagccggtacagggtgtctacggctttgcaaagtcgctcctgaaagctctgaaagaagacggtgatgtggtgattgttgtctttgatgcgaaagcgccaagttttcgccacgaagcgtacgaagcttacaaagccgggcgtgctccaacgccggaagactttcctcgccaattggcgcttatgaaggaattagtggatttgcttggcctcgaacgcttggaagttcccggtttcgaggcagacgacgtattagcgactctcgcaaagaaagccgaacgtgagggctatgaagtccagatcttgacagcagatcgcgatcttttccagcttttatctccgcgcatctcggtgttacacccggaagggcatcgtatcaccccggaatggctctgggagaaatatggtttgcgtcccgaacaatgggtggattttcgcgccttagcaggcgatccgagcgacaatattccgggagttaaaggtatcggcgagaagacggcgctcaagctccttaaagaatgggggtcgttggagaacttgcttaagaatttagatcaggtcaaaccagagtcagtgcgtgagaagattcttgcacacctcgaagacctcaaattaagccgcgaattgtcccgtgtacgcaccgatttgccgctcgaagttgatttccgtggccgccgcgaacctgactgggagggtcttaaagcgtttttagagcgtcttgaatttggttcgctcttgcatgaattcggccttttagaaagcccgttaccagccgaagaagcaccttggccaccgcccgaaggcgcgtttttaggttaccgtttgagtcgcccggaaccgatgtgggccgaattattggctcttgcagcgtctgcccagggacgtgtgtatcgcgcggaagaccctcatggtgcgctccgcggcctcaaagaagtccgtggactccttgccaaagacttagctgttgttgcattgcgcgaaggtcttgatttacctccgactgatgatccaatgcttcttgcgtacctcttggacccgtcaaacacgacgcccgaaggcgtagcccgtcgttacggcggccagtggaccgaagatgcaggcgagcgcgcgttattggccgaacgtttgcacgccaatttattaggacgtttgcaaggcgaggaacgtctcctctggctttacgaagaagtggagaaaccattgagtcgcgtgctcgcgcatatggaagctaccggtgtcaaattagacgtggcgtatttggaggcactcagccttgaagttgctgccgaaatgcgccgcttggaggaagaagtattccgtttagcaggccactccttttatcttaattctcgcgatcagttagaacgtgtgttgttcgatgaacttggtctccctcctatcggcaagacagagaagaccggtaaacgtagcacttcagcggcggttttagaagctcttcgcgaagtccatcccattgtggacaagatcttgcagtaccgcgaactcgcgaaattgaaaggcacctatattgaccctcttccggcattagtccacccgaaaacgggacgcctccatacccgcttcaaccaaacagccacggcgaccggtcgtttgtcctcctctgatccaaaccttcagaatattccagtacgtaccccattgggccagaagatccgccgcgcgtttgtagctgaggagggttggcgtttagtggccctcgattatagccaaattgaattacgtgtccttgcccatctttctggcgatgagaacctcatccgcgtgtttcaggaaggcaaagacattcacactcaaacggcaagctggatgtttggattatcagctgaagcgatcgatcctttgatgcgtcgtgcagcgaagaccatcaatttcggtgttctctacggtatgagtgcccatcgtttgtcgcaggaattaggcattccctatgaagaagctgcggcgttcattcagcgctactttcaaagctatcccaaagttaaagcatggatcgagaagactctcgaagaaggccgcacacgtggttacgtagagaccttatttggacgtcgccgctatgttcccgatttaaacgctcgcgtgaaatctgtccgtgaagccgccgaacgcatggcgttcaacatgcctgtacagggcacggcagctgacctcatgaaacttgcaatggtgcgcctttttccacaattgcgtgaagttggtgcccgcatgctcttgcaggtccacgatgaactcttgttagaagcgccaaaagagcgtgcggaagaggtggcagccctcgcgaaagaggttatggaaggcgtgtggcccttagcggtgcctcttgaagtcgaagttggtattggcgaggattggttggctgccaaaggataatga

SEQ ID NO: 2094 - protein, 841 aa, synthetic construct
  REGION 1..841: note = Variant of DNA polymerase I from Thermus sp. strain 2.9
MHHHHHHGGSGMLPLFEPKGRVLLVDGHHLAYRNFFALKGLTTSRGEPVQGVYGFAKSLLKALKEDGDVVIVVFDAKAPSFRHEAYEAYKAGRAPTPEDFPRQLALMKELVDLLGLERLEVPGFEADDVLATLAKKAEREGYEVQILTADRDLFQLLSPRISVLHPEGHRITPEWLWEKYGLRPEQWVDFRALAGDPSDNIPGVKGIGEKTALKLLKEWGSLENLLKNLDQVKPESVREKILAHLEDLKLSRELSRVRTDLPLEVDFRGRREPDWEGLKAFLERLEFGSLLHEFGLLESPLPAEEAPWPPPEGAFLGYRLSRPEPMWAELLALAASAQGRVYRAEDPHGALRGLKEVRGLLAKDLAVVALREGLDLPPTDDPMLLAYLLDPSNTTPEGVARRYGGQWTEDAGERALLAERLHANLLGRLQGEERLLWLYEEVEKPLSRVLAHMEATGVKLDVAYLEALSLEVAAEMRRLEEEVFRLAGHSFYLNSRDQLERVLFDELGLPPIGKTEKTGKRSTSAAVLEALREVHPIVDKILQYRELAKLKGTYIDPLPALVHPKTGRLHTRFNQTATATGRLSSSDPNLQNIPVRTPLGQKIRRAFVAEEGWRLVALDYSQIELRVLAHLSGDENLIRVFQEGKDIHTQTASWMFGLSAEAIDPLMRRAAKTINFGVLYGMSAHRLSQELGIPYEEAAAFIQRYFQSYPKVKAWIEKTLEEGRTRGYVETLFGRRRYVPDLNARVKSVREAAERMAFNMPVQGTAADLMKLAMVRLFPQLREVGARMLLQVHDELLLEAPKERAEEVAALAKEVMEGVWPLAVPLEVEVGIGEDWLAAKG

SEQ ID NO: 2095 - DNA, 2529 bp, synthetic construct
  misc_feature 1..2529: note = Variant of DNA polymerase I from Thermus sp. strain 2.9
  source 1..2529: mol_type = other DNA
atgcaccatcatcatcatcatggcggtagcggcatgttaccgttgttcgaacctaaaggtcgcgtgcttctggttgatggccatcatctcgcgtatcgtaacttctttgccctgaaaggattaaccaccagccgtggcgagccggtacagggtgtctacggctttgcaaagtcgctcctgaaagctctgaaagaagacggtgatgtggtgattgttgtctttgatgcgaaagcgccaagttttcgccacgaagcgtacgaagcttacaaagccgggcgtgctccaacgccggaagactttcctcgccaattggcgcttatgaaggaattagtggatttgcttggcctcgaacgcttggaagttcccggtttcgaggcagacgacgtattagcgactctcgcaaagaaagccgaacgtgagggctatgaagtccagatcttgacagcagatcgcgatcttttccagcttttatctccgcgcatctcggtgttacacccggaagggcatcgtatcaccccggaatggctctgggagaaatatggtttgcgtcccgaacaatgggtggattttcgcgccttagcaggcgatccgagcgacaatattccgggagttaaaggtatcggcgagaagacggcgctcaagctccttaaagaatgggggtcgttggagaacttgcttaagaatttagatcaggtcaaaccagagtcagtgcgtgagaagattcttgcacacctcgaagacctcaaattaagccgcgaattgtcccgtgtacgcaccgatttgccgctcgaagttgatttccgtggccgccgcgaacctgactgggagggtcttaaagcgtttttagagcgtcttgaatttggttcgctcttgcatgaattcggccttttagaaagcccgttaccagccgaagaagcaccttggccaccgcccgaaggcgcgtttttaggttaccgtttgagtcgcccggaaccgatgtgggccgaattattggctcttgcagcgtctgcccagggacgtgtgtatcgcgcggaagaccctcatggtgcgctccgcggcctcaaagaagtccgtggactccttgccaaagacttagctgttgttgcattgcgcgaaggtcttgatttacctccgactgatgatccaatgcttcttgcgtacctcttggacccgtcaaacacgacgcccgaaggcgtagcccgtcgttacggcggcgagtggaccgaagatgcaggcgagcgcgcgttattggccgaacgtttgcacgccaatttattaggacgtttgcaaggcgaggaacgtctcctctggctttacgaagaagtggagaaaccattgagtcgcgtgctcgcgcatatggaagctaccggtgtcaaattagacgtggcgtatttggaggcactcagccttgaagttgctgccgaaatgcgccgcttggaggaagaagtattccgtttagcaggccactccttttatcttaattctcgcgatcagttagaacgtgtgttgttcgatgaacttggtctccctcctatcggcaagacagagaagaccggtaaacgtagcacttcagcggcggttttagaagctcttcgcgaagtccatcccattgtggacaagatcttgcagtaccgcgaactcgcgaaattgaaaggcacctatattgaccctcttccggcattagtccacccgaaaacgggacgcctccatacccgcttcaaccaaacagccacggcgaccggtcgtttgtcctcctctgatccaaaccttcagaatattccagtacgtaccccattgggccagaagatccgccgcgcgtttgtagctgaggagggttggcgtttagtggccctcgattatagccaaattgaattacgtgtccttgcccatctttctggcgatgagaacctcatccgcgtgtttcaggaaggcaaagacattcacactcaaacggcaagctggatgtttggattatcagctgaagcgatcgatcctgagatgcgtcgtgcagcgaagaccatcaatttcggtgttctctacggtatgagtgcccatcgtttgtcgcaggaattaggcattccctatgaagaagctgcggcgttcattcagcgctactttcaaagctatcccaaagttaaagcatggatcgagaagactctcgaagaaggccgcacacgtggttacgtagagaccttatttggacgtcgccgctatgttcccgatttaaacgctcgcgtgaaatctgtccgtgaagccgccgaacgcatggcgttcaacatgcctgtacagggcacggcagctgacctcatgaaacttgcaatggtgcgcctttttccacaattgcgtgaagttggtgcccgcatgctcttgcaggtccacgatgaactcttgttagaagcgccaaaagagcgtgcggaagaggtggcagccctcgcgaaagaggttatggaaggcgtgtggcccttagcggtgcctcttgaagtcgaagttggtattggcgaggattggttggctgccaaaggataatga

SEQ ID NO: 2096 - protein, 841 aa, synthetic construct
  REGION 1..841: note = Variant of DNA polymerase I from Thermus sp. strain 2.9
MHHHHHHGGSGMLPLFEPKGRVLLVDGHHLAYRNFFALKGLTTSRGEPVQGVYGFAKSLLKALKEDGDVVIVVFDAKAPSFRHEAYEAYKAGRAPTPEDFPRQLALMKELVDLLGLERLEVPGFEADDVLATLAKKAEREGYEVQILTADRDLFQLLSPRISVLHPEGHRITPEWLWEKYGLRPEQWVDFRALAGDPSDNIPGVKGIGEKTALKLLKEWGSLENLLKNLDQVKPESVREKILAHLEDLKLSRELSRVRTDLPLEVDFRGRREPDWEGLKAFLERLEFGSLLHEFGLLESPLPAEEAPWPPPEGAFLGYRLSRPEPMWAELLALAASAQGRVYRAEDPHGALRGLKEVRGLLAKDLAVVALREGLDLPPTDDPMLLAYLLDPSNTTPEGVARRYGGEWTEDAGERALLAERLHANLLGRLQGEERLLWLYEEVEKPLSRVLAHMEATGVKLDVAYLEALSLEVAAEMRRLEEEVFRLAGHSFYLNSRDQLERVLFDELGLPPIGKTEKTGKRSTSAAVLEALREVHPIVDKILQYRELAKLKGTYIDPLPALVHPKTGRLHTRFNQTATATGRLSSSDPNLQNIPVRTPLGQKIRRAFVAEEGWRLVALDYSQIELRVLAHLSGDENLIRVFQEGKDIHTQTASWMFGLSAEAIDPEMRRAAKTINFGVLYGMSAHRLSQELGIPYEEAAAFIQRYFQSYPKVKAWIEKTLEEGRTRGYVETLFGRRRYVPDLNARVKSVREAAERMAFNMPVQGTAADLMKLAMVRLFPQLREVGARMLLQVHDELLLEAPKERAEEVAALAKEVMEGVWPLAVPLEVEVGIGEDWLAAKG

SEQ ID NO: 2097 - DNA, 2529 bp, synthetic construct
  misc_feature 1..2529: note = Variant of DNA polymerase I from Thermus sp. strain 2.9
  source 1..2529: mol_type = other DNA
atgcaccatcatcatcatcatggcggtagcggcatgttaccgttgttcgaacctaaaggtcgcgtgcttctggttgatggccatcatctcgcgtatcgtaacttctttgccctgaaaggattaaccaccagccgtggcgagccggtacagggtgtctacggctttgcaaagtcgctcctgaaagctctgaaagaagacggtgatgtggtgattgttgtctttgatgcgaaagcgccaagttttcgccacgaagcgtacgaagcttacaaagccgggcgtgctccaacgccggaagactttcctcgccaattggcgcttatgaaggaattagtggatttgcttggcctcgaacgcttggaagttcccggtttcgaggcagacgacgtattagcgactctcgcaaagaaagccgaacgtgagggctatgaagtccagatcttgacagcagatcgcgatcttttccagcttttatctccgcgcatctcggtgttacacccggaagggcatcgtatcaccccggaatggctctgggagaaatatggtttgcgtcccgaacaatgggtggattttcgcgccttagcaggcgatccgagcgacaatattccgggagttaaaggtatcggcgagaagacggcgctcaagctccttaaagaatgggggtcgttggagaacttgcttaagaatttagatcaggtcaaaccagagtcagtgcgtgagaagattcttgcacacctcgaagacctcaaattaagccgcgaattgtcccgtgtacgcaccgatttgccgctcgaagttgatttccgtggccgccgcgaacctgactgggagggtcttaaagcgtttttagagcgtcttgaatttggttcgctcttgcatgaattcggccttttagaaagcccgttaccagccgaagaagcaccttggccaccgcccgaaggcgcgtttttaggttaccgtttgagtcgcccggaaccgatgtgggccgaattattggctcttgcagcgtctgcccagggacgtgtgtatcgcgcggaagaccctcatggtgcgctccgcggcctcaaagaagtccgtggactccttgccaaagacttagctgttgttgcattgcgcgaaggtcttgctttacctccgactgatgatccaatgcttcttgcgtacctcttggacccgtcaaacacgacgcccgaaggcgtagcccgtcgttacggcggcgagtggaccgaagatgcaggcgagcgcgcgttattggccgaacgtttgcacgccaatttattaggacgtttgcaaggcgaggaacgtctcctctggctttacgaagaagtggagaaaccattgagtcgcgtgctcgcgcatatggaagctaccggtgtcaaattagacgtggcgtatttggaggcactcagccttgaagttgctgccgaaatgcgccgcttggaggaagaagtattccgtttagcaggccactccttttatcttaattctcgcgatcagttagaacgtgtgttgttcgatgaacttggtctccctcctatcggcaagacagagaagaccggtaaacgtagcacttcagcggcggttttagaagctcttcgcgaagtccatcccattgtggacaagatcttgcagtaccgcgaactcgcgaaattgaaaggcacctatattgaccctcttccggcattagtccacccgaaaacgggacgcctccatacccgcttcaaccaaacagccacggcgaccggtcgtttgtcctcctctgatccaaaccttcagaatattccagtacgtaccccattgggccagaagatccgccgcgcgtttgtagctgaggagggttggcgtttagtggccctcgattatagccaaattgaattacgtgtccttgcccatctttctggcgatgagaacctcatccgcgtgtttcaggaaggcaaagacattcacactcaaacggcaagctggatgtttggattatcagctgaagcgatcgatcctttgatgcgtcgtgcagcgaagaccatcaatttcggtgttctctacggtatgagtgcccatcgtttgtcgcaggaattaggcattccctatgaagaagctgcggcgttcattcagcgctactttcaaagctatcccaaagttaaagcatggatcgagaagactctcgaagaaggccgcacacgtggttacgtagagaccttatttggacgtcgccgctatgttcccgatttaaacgctcgcgtgaaatctgtccgtgaagccgccgaacgcatggcgttcaacatgcctgtacagggcacggcagctgacctcatgaaacttgcaatggtgcgcctttttccacaattgcgtgaagttggtgcccgcatgctcttgcaggtccacgatgaactcttgttagaagcgccaaaagagcgtgcggaagaggtggcagccctcgcgaaagaggttatggaaggcgtgtggcccttagcggtgcctcttgaagtcgaagttggtattggcgaggattggttggctgccaaaggataatga

SEQ ID NO: 2098 - protein, 841 aa, synthetic construct
  REGION 1..841: note = Variant of DNA polymerase I from Thermus sp. strain 2.9
MHHHHHHGGSGMLPLFEPKGRVLLVDGHHLAYRNFFALKGLTTSRGEPVQGVYGFAKSLLKALKEDGDVVIVVFDAKAPSFRHEAYEAYKAGRAPTPEDFPRQLALMKELVDLLGLERLEVPGFEADDVLATLAKKAEREGYEVQILTADRDLFQLLSPRISVLHPEGHRITPEWLWEKYGLRPEQWVDFRALAGDPSDNIPGVKGIGEKTALKLLKEWGSLENLLKNLDQVKPESVREKILAHLEDLKLSRELSRVRTDLPLEVDFRGRREPDWEGLKAFLERLEFGSLLHEFGLLESPLPAEEAPWPPPEGAFLGYRLSRPEPMWAELLALAASAQGRVYRAEDPHGALRGLKEVRGLLAKDLAVVALREGLALPPTDDPMLLAYLLDPSNTTPEGVARRYGGEWTEDAGERALLAERLHANLLGRLQGEERLLWLYEEVEKPLSRVLAHMEATGVKLDVAYLEALSLEVAAEMRRLEEEVFRLAGHSFYLNSRDQLERVLFDELGLPPIGKTEKTGKRSTSAAVLEALREVHPIVDKILQYRELAKLKGTYIDPLPALVHPKTGRLHTRFNQTATATGRLSSSDPNLQNIPVRTPLGQKIRRAFVAEEGWRLVALDYSQIELRVLAHLSGDENLIRVFQEGKDIHTQTASWMFGLSAEAIDPLMRRAAKTINFGVLYGMSAHRLSQELGIPYEEAAAFIQRYFQSYPKVKAWIEKTLEEGRTRGYVETLFGRRRYVPDLNARVKSVREAAERMAFNMPVQGTAADLMKLAMVRLFPQLREVGARMLLQVHDELLLEAPKERAEEVAALAKEVMEGVWPLAVPLEVEVGIGEDWLAAKG

SEQ ID NO: 2099 - DNA, 2529 bp, synthetic construct
  misc_feature 1..2529: note = Variant of DNA polymerase I from Thermus sp. strain 2.9
  source 1..2529: mol_type = other DNA
atgcaccatcatcatcatcatggcggtagcggcatgttaccgttgttcgaacctaaaggtcgcgtgcttctggttgatggccatcatctcgcgtatcgtaacttctttgccctgaaaggattaaccaccagccgtggcgagccggtacagggtgtctacggctttgcaaagtcgctcctgaaagctctgaaagaagacggtgatgtggtgattgttgtctttgatgcgaaagcgccaagttttcgccacgaagcgtacgaagcttacaaagccgggcgtgctccaacgccggaagactttcctcgccaattggcgcttatgaaggaattagtggatttgcttggcctcgaacgcttggaagttcccggtttcgaggcagacgacgtattagcgactctcgcaaagaaagccgaacgtgagggctatgaagtccagatcttgacagcagatcgcgatcttttccagcttttatctccgcgcatctcggtgttacacccggaagggcatcgtatcaccccggaatggctctgggagaaatatggtttgcgtcccgaacaatgggtggattttcgcgccttagcaggcgatccgagcgacaatattccgggagttaaaggtatcggcgagaagacggcgctcaagctccttaaagaatgggggtcgttggagaacttgcttaagaatttagatcaggtcaaaccagagtcagtgcgtgagaagattcttgcacacctcgaagacctcaaattaagccgcgaattgtcccgtgtacgcaccgatttgccgctcgaagttgatttccgtggccgccgcgaacctgactgggagggtcttaaagcgtttttagagcgtcttgaatttggttcgctcttgcatgaattcggccttttagaaagcccgttaccagccgaagaagcaccttggccaccgcccgaaggcgcgtttttaggttaccgtttgagtcgcccggaaccgatgtgggccgaattattggctcttgcagcgtctgcccagggacgtgtgtatcgcgcggaagaccctcatggtgcgctccgcggcctcaaagaagtccgtggactccttgccaaagacttagctgttgttgcattgcgcgaaggtcttgatttacctccgactgatgatccaatgcttcttgcgtacctcttggacccgtcaaacacgacgcccgaaggcgtagcccgtcgttacggcggcgagtggaccgaagatgcaggcgagcgcgcgttattggccgaacgtttgcacgccaatttattaggacgtttgcaaggcgaggaacgtctcctctggctttacgaagaagtggagaaaccattgagtcgcgtgctcgcgcatatggaagctaccggtgtcaaattagacgtggcgtatttggaggcactcagccttgaagttgctgccgaaatgcgccgcttggaggaagaagtattccgtttagcaggccactccttttatcttaattctcgcgatcagttagaacgtgtgttgttcgatgaacttggtctccctcctatcggcaagacagagaagaccggtaaacgtagcacttcagcggcggttttattggctcttcgcgaagtccatcccattgtggacaagatcttgcagtaccgcgaactcgcgaaattgaaaggcacctatattgaccctcttccggcattagtccacccgaaaacgggacgcctccatacccgcttcaaccaaacagccacggcgaccggtcgtttgtcctcctctgatccaaaccttcagaatattccagtacgtaccccattgggccagaagatccgccgcgcgtttgtagctgaggagggttggcgtttagtggccctcgattatagccaaattgaattacgtgtccttgcccatctttctggcgatgagaacctcatccgcgtgtttcaggaaggcaaagacattcacactcaaacggcaagctggatgtttggattatcagctgaagcgatcgatcctttgatgcgtcgtgcagcgaagaccatcaatttcggtgttctctacggtatgagtgcccatcgtttgtcgcaggaattaggcattccctatgaagaagctgcggcgttcattcagcgctactttcaaagctatcccaaagttaaagcatggatcgagaagactctcgaagaaggccgcacacgtggttacgtagagaccttatttggacgtcgccgctatgttcccgatttaaacgctcgcgtgaaatctgtccgtgaagccgccgaacgcatggcgttcaacatgcctgtacagggcacggcagctgacctcatgaaacttgcaatggtgcgcctttttccacaattgcgtgaagttggtgcccgcatgctcttgcaggtccacgatgaactcttgttagaagcgccaaaagagcgtgcggaagaggtggcagccctcgcgaaagaggttatggaaggcgtgtggcccttagcggtgcctcttgaagtcgaagttggtattggcgaggattggttggctgccaaaggataatga

SEQ ID NO: 2100 - protein, 841 aa, synthetic construct
  REGION 1..841: note = Variant of DNA polymerase I from Thermus sp. strain 2.9
MHHHHHHGGSGMLPLFEPKGRVLLVDGHHLAYRNFFALKGLTTSRGEPVQGVYGFAKSLLKALKEDGDVVIVVFDAKAPSFRHEAYEAYKAGRAPTPEDFPRQLALMKELVDLLGLERLEVPGFEADDVLATLAKKAEREGYEVQILTADRDLFQLLSPRISVLHPEGHRITPEWLWEKYGLRPEQWVDFRALAGDPSDNIPGVKGIGEKTALKLLKEWGSLENLLKNLDQVKPESVREKILAHLEDLKLSRELSRVRTDLPLEVDFRGRREPDWEGLKAFLERLEFGSLLHEFGLLESPLPAEEAPWPPPEGAFLGYRLSRPEPMWAELLALAASAQGRVYRAEDPHGALRGLKEVRGLLAKDLAVVALREGLDLPPTDDPMLLAYLLDPSNTTPEGVARRYGGEWTEDAGERALLAERLHANLLGRLQGEERLLWLYEEVEKPLSRVLAHMEATGVKLDVAYLEALSLEVAAEMRRLEEEVFRLAGHSFYLNSRDQLERVLFDELGLPPIGKTEKTGKRSTSAAVLLALREVHPIVDKILQYRELAKLKGTYIDPLPALVHPKTGRLHTRFNQTATATGRLSSSDPNLQNIPVRTPLGQKIRRAFVAEEGWRLVALDYSQIELRVLAHLSGDENLIRVFQEGKDIHTQTASWMFGLSAEAIDPLMRRAAKTINFGVLYGMSAHRLSQELGIPYEEAAAFIQRYFQSYPKVKAWIEKTLEEGRTRGYVETLFGRRRYVPDLNARVKSVREAAERMAFNMPVQGTAADLMKLAMVRLFPQLREVGARMLLQVHDELLLEAPKERAEEVAALAKEVMEGVWPLAVPLEVEVGIGEDWLAAKG

SEQ ID NO: 2101 - DNA, 2529 bp, synthetic construct
  misc_feature 1..2529: note = Variant of DNA polymerase I from Thermus sp. strain 2.9
  source 1..2529: mol_type = other DNA
atgcaccatcatcatcatcatggcggtagcggcatgttaccgttgttcgaacctaaaggtcgcgtgcttctggttgatggccatcatctcgcgtatcgtaacttctttgccctgaaaggattaaccaccagccgtggcgagccggtacagggtgtctacggctttgcaaagtcgctcctgaaagctctgaaagaagacggtgatgtggtgattgttgtctttgatgcgaaagcgccaagttttcgccacgaagcgtacgaagcttacaaagccgggcgtgctccaacgccggaagactttcctcgccaattggcgcttatgaaggaattagtggatttgcttggcctcgaacgcttggaagttcccggtttcgaggcagacgacgtattagcgactctcgcaaagaaagccgaacgtgagggctatgaagtccagatcttgacagcagatcgcgatcttttccagcttttatctccgcgcatctcggtgttacacccggaagggcatcgtatcaccccggaatggctctgggagaaatatggtttgcgtcccgaacaatgggtggattttcgcgccttagcaggcgatccgagcgacaatattccgggagttaaaggtatcggcgagaagacggcgctcaagctccttaaagaatgggggtcgttggagaacttgcttaagaatttagatcaggtcaaaccagagtcagtgcgtgagaagattcttgcacacctcgaagacctcaaattaagccgcgaattgtcccgtgtacgcaccgatttgccgctcgaagttgatttccgtggccgccgcgaacctgactgggagggtcttaaagcgtttttagagcgtcttgaatttggttcgctcttgcatgaattcggccttttagaaagcccgttaccagccgaagaagcaccttggccaccgcccgaaggcgcgtttttaggttaccgtttgagtcgcccggaaccgatgtgggccgaattattggctcttgcagcgtctgcccagggacgtgtgtatcgcgcggaagaccctcatggtgcgctccgcggcctcaaagaagtccgtggactccttgccaaagacttagctgttgttgcattgcgcgaaggtcttgatttacctccgactgatgatccaatgcttcttgcgtacctcttggacccgtcaaacacgacgcccgaaggcgtagcccgtcgttacggcggcgagtggaccgaagatgcaggcgagcgcgcgttattggccgaacgtttgcacgccaatttattaggacgtttgcaaggcgaggaacgtctcctctggctttacgaagaagtggagaaaccattgagtcgcgtgctcgcgcatatggaagctaccggtgtcaaattagacgtggcgtatttggaggcactcagccttgaagttgctgccgaaatgcgccgcttggaggaagaagtattccgtttagcaggccactccttttatcttaattctcgcgatcagttagaacgtgtgttgttcgatgaacttggtctccctcctatcggcaagacagagaagaccggtaaacgtagcacttcagcggcggttttagaagctcttcgcgaagtccatcccattgtggacaagatcttgcagtaccgcgaactcgcgaaattgaaaggcacctatattgaccctcttccggcattagtccacccgaaaacgggacgcctccatacccgcttcaaccaaacagccacggcgaccggtcgtttgtcctcctctgatccaaaccttcagaatattccagtacgtaccccattgggccagaagatccgccgcgcgtttgtagctgaggagggttggcgtttagtggccctcgattatagccaaattgaattacgtgtccttgcccatctttctggcgatgagaacctcatccgcgtgtttcaggaaggctttgacattcacactcaaacggcaagctggatgtttggattatcagctgaagcgatcgatcctttgatgcgtcgtgcagcgaagaccatcaatttcggtgttctctacggtatgagtgcccatcgtttgtcgcaggaattaggcattccctatgaagaagctgcggcgttcattcagcgctactttcaaagctatcccaaagttaaagcatggatcgagaagactctcgaagaaggccgcacacgtggttacgtagagaccttatttggacgtcgccgctatgttcccgatttaaacgctcgcgtgaaatctgtccgtgaagccgccgaacgcatggcgttcaacatgcctgtacagggcacggcagctgacctcatgaaacttgcaatggtgcgcctttttccacaattgcgtgaagttggtgcccgcatgctcttgcaggtccacgatgaactcttgttagaagcgccaaaagagcgtgcggaagaggtggcagccctcgcgaaagaggttatggaaggcgtgtggcccttagcggtgcctcttgaagtcgaagttggtattggcgaggattggttggctgccaaaggataatga

SEQ ID NO: 2102 - protein, 841 aa, synthetic construct
  REGION 1..841: note = Variant of DNA polymerase I from Thermus sp. strain 2.9
MHHHHHHGGSGMLPLFEPKGRVLLVDGHHLAYRNFFALKGLTTSRGEPVQGVYGFAKSLLKALKEDGDVVIVVFDAKAPSFRHEAYEAYKAGRAPTPEDFPRQLALMKELVDLLGLERLEVPGFEADDVLATLAKKAEREGYEVQILTADRDLFQLLSPRISVLHPEGHRITPEWLWEKYGLRPEQWVDFRALAGDPSDNIPGVKGIGEKTALKLLKEWGSLENLLKNLDQVKPESVREKILAHLEDLKLSRELSRVRTDLPLEVDFRGRREPDWEGLKAFLERLEFGSLLHEFGLLESPLPAEEAPWPPPEGAFLGYRLSRPEPMWAELLALAASAQGRVYRAEDPHGALRGLKEVRGLLAKDLAVVALREGLDLPPTDDPMLLAYLLDPSNTTPEGVARRYGGEWTEDAGERALLAERLHANLLGRLQGEERLLWLYEEVEKPLSRVLAHMEATGVKLDVAYLEALSLEVAAEMRRLEEEVFRLAGHSFYLNSRDQLERVLFDELGLPPIGKTEKTGKRSTSAAVLEALREVHPIVDKILQYRELAKLKGTYIDPLPALVHPKTGRLHTRFNQTATATGRLSSSDPNLQNIPVRTPLGQKIRRAFVAEEGWRLVALDYSQIELRVLAHLSGDENLIRVFQEGFDIHTQTASWMFGLSAEAIDPLMRRAAKTINFGVLYGMSAHRLSQELGIPYEEAAAFIQRYFQSYPKVKAWIEKTLEEGRTRGYVETLFGRRRYVPDLNARVKSVREAAERMAFNMPVQGTAADLMKLAMVRLFPQLREVGARMLLQVHDELLLEAPKERAEEVAALAKEVMEGVWPLAVPLEVEVGIGEDWLAAKG

SEQ ID NO: 2103 - DNA, 2529 bp, synthetic construct; identical to SEQ ID NO: 1975
  misc_feature 1..2529: note = Variant of DNA polymerase I from Thermus sp. strain 2.9
  source 1..2529: mol_type = other DNA

SEQ ID NO: 2104 - protein, 841 aa, synthetic construct; identical to SEQ ID NO: 1976
  REGION 1..841: note = Variant of DNA polymerase I from Thermus sp. strain 2.9

SEQ ID NO: 2105 - DNA, 2529 bp, synthetic construct
  misc_feature 1..2529: note = Variant of DNA polymerase I from Thermus sp. strain 2.9
  source 1..2529: mol_type = other DNA
atgcaccatcatcatcatcatggcggtagcggcatgttaccgttgttcgaacctaaaggtcgcgtgcttctggttgatggccatcatctcgcgtatcgtaacttctttgccctgaaaggattaaccaccagccgtggcgagccggtacagggtgtctacggctttgcaaagtcgctcctgaaagctctgaaagaagacggtgatgtggtgattgttgtctttgatgcgaaagcgccaagttttcgccacgaagcgtacgaagcttacaaagccgggcgtgctccaacgccggaagactttcctcgccaattggcgcttatgaaggaattagtggatttgcttggcctcgaacgcttggaagttcccggtttcgaggcagacgacgtattagcgactctcgcaaagaaagccgaacgtgagggctatgaagtccagatcttgacagcagatcgcgatcttttccagcttttatctccgcgcatctcggtgttacacccggaagggcatcgtatcaccccggaatggctctgggagaaatatggtttgcgtcccgaacaatgggtggattttcgcgccttagcaggcgatccgagcgacaatattccgggagttaaaggtatcggcgagaagacggcgctcaagctccttaaagaatgggggtcgttggagaacttgcttaagaatttagatcaggtcaaaccagagtcagtgcgtgagaagattcttgcacacctcgaagacctcaaattaagccgcgaattgtcccgtgtacgcaccgatttgccgctcgaagttgatttccgtggccgccgcgaacctgactgggagggtcttaaagcgtttttagagcgtcttgaatttggttcgctcttgcatgaattcggccttttagaaagcccgttaccagccgaagaagcaccttggccaccgcccgaaggcgcgtttttaggttaccgtttgagtcgcccggaaccgatgtgggccgaattagtggctcttgcagcgtctgcccagggacgtgtgtatcgcgcggaagaccctcatggtgcgctccgcggcctcaaagaagtccgtggactccttgccaaagacttagctgttgttgcattgcgcgaaggtcttgatttacctccgactgatgatccaatgcttcttgcgtacctcttggacccgtcaaacacgacgcccgaaggcgtagcccgtcgttacggcggcgagtggaccgaagatgcaggcgagcgcgcgttattggccgaacgtttgcacgccaatttattaggacgtttgcaaggcgaggaacgtctcctctggctttacgaagaagtggagaaaccattgagtcgcgtgctcgcgcatatggaagctaccggtgtcaaattagacgtggcgtatttggaggcactcagccttgaagttgctgccgaaatgcgccgcttggaggaagaagtattccgtttagcaggccactccttttatcttaattctcgcgatcagttagaacgtgtgttgttcgatgaacttggtctccctcctatcggcaagacagagaagaccggtaaacgtagcacttcagcggcggttttagaagctcttcgcgaagtccatcccattgtggacaagatcttgcagtaccgcgaactcgcgaaattgaaaggcacctatattgaccctcttccggcattagtccacccgaaaacgggacgcctccatacccgcttcaaccaaacagccacggcgaccggtcgtttgtcctcctctgatccaaaccttcagaatattccagtacgtaccccattgggccagaagatccgccgcgcgtttgtagctgaggagggttggcgtttagtggccctcgattatagccaaattgaattacgtgtccttgcccatctttctggcgatgagaacctcatccgcgtgtttcaggaaggcaaagacattcacactcaaacggcaagctggatgtttggattatcagctgaagcgatcgatcctttgatgcgtcgtgcagcgaagaccatcaatttcggtgttctctacggtatgagtgcccatcgtttgtcgcaggaattaggcattccctatgaagaagctgcggcgttcattcagcgctactttcaaagctatcccaaagttaaagcatggatcgagaagactctcgaagaaggccgcacacgtggttacgtagagaccttatttggacgtcgccgctatgttcccgatttaaacgctcgcgtgaaatctgtccgtgaagccgccgaacgcatggcgttcaacatgcctgtacagggcacggcagctgacctcatgaaacttgcaatggtgcgcctttttccacaattgcgtgaagttggtgcccgcatgctcttgcaggtccacgatgaactcttgttagaagcgccaaaagagcgtgcggaagaggtggcagccctcgcgaaagaggttatggaaggcgtgtggcccttagcggtgcctcttgaagtcgaagttggtattggcgaggattggttggctgccaaaggataatga

SEQ ID NO: 2106 - protein, 841 aa, synthetic construct
  REGION 1..841: note = Variant of DNA polymerase I from Thermus sp. strain 2.9
MHHHHHHGGSGMLPLFEPKGRVLLVDGHHLAYRNFFALKGLTTSRGEPVQGVYGFAKSLLKALKEDGDVVIVVFDAKAPSFRHEAYEAYKAGRAPTPEDFPRQLALMKELVDLLGLERLEVPGFEADDVLATLAKKAEREGYEVQILTADRDLFQLLSPRISVLHPEGHRITPEWLWEKYGLRPEQWVDFRALAGDPSDNIPGVKGIGEKTALKLLKEWGSLENLLKNLDQVKPESVREKILAHLEDLKLSRELSRVRTDLPLEVDFRGRREPDWEGLKAFLERLEFGSLLHEFGLLESPLPAEEAPWPPPEGAFLGYRLSRPEPMWAELVALAASAQGRVYRAEDPHGALRGLKEVRGLLAKDLAVVALREGLDLPPTDDPMLLAYLLDPSNTTPEGVARRYGGEWTEDAGERALLAERLHANLLGRLQGEERLLWLYEEVEKPLSRVLAHMEATGVKLDVAYLEALSLEVAAEMRRLEEEVFRLAGHSFYLNSRDQLERVLFDELGLPPIGKTEKTGKRSTSAAVLEALREVHPIVDKILQYRELAKLKGTYIDPLPALVHPKTGRLHTRFNQTATATGRLSSSDPNLQNIPVRTPLGQKIRRAFVAEEGWRLVALDYSQIELRVLAHLSGDENLIRVFQEGKDIHTQTASWMFGLSAEAIDPLMRRAAKTINFGVLYGMSAHRLSQELGIPYEEAAAFIQRYFQSYPKVKAWIEKTLEEGRTRGYVETLFGRRRYVPDLNARVKSVREAAERMAFNMPVQGTAADLMKLAMVRLFPQLREVGARMLLQVHDELLLEAPKERAEEVAALAKEVMEGVWPLAVPLEVEVGIGEDWLAAKG

SEQ ID NO: 2107 - DNA, 2529 bp, synthetic construct
  misc_feature 1..2529: note = Variant of DNA polymerase I from Thermus sp. strain 2.9
  source 1..2529: mol_type = other DNA
atgcaccatcatcatcatcatggcggtagcggcatgttaccgttgttcgaacctaaaggtcgcgtgcttctggttgatggccatcatctcgcgtatcgtaacttctttgccctgaaaggattaaccaccagccgtggcgagccggtacagggtgtctacggctttgcaaagtcgctcctgaaagctctgaaagaagacggtgatgtggtgattgttgtctttgatgcgaaagcgccaagttttcgccacgaagcgtacgaagcttacaaagccgggcgtgctccaacgccggaagactttcctcgccaattggcgcttatgaaggaattagtggatttgcttggcctcgaacgcttggaagttcccggtttcgaggcagacgacgtattagcgactctcgcaaagaaagccgaacgtgagggctatgaagtccagatcttgacagcagatcgcgatcttttccagcttttatctccgcgcatctcggtgttacacccggaagggcatcgtatcaccccggaatggctctgggagaaatatggtttgcgtcccgaacaatgggtggattttcgcgccttagcaggcgatccgagcgacaatattccgggagttaaaggtatcggcgagaagacggcgctcaagctccttaaagaatgggggtcgttggagaacttgcttaagaatttagatcaggtcaaaccagagtcagtgcgtgagaagattcttgcacacctcgaagacctcaaattaagccgcgaattgtcccgtgtacgcaccgatttgccgctcgaagttgatttccgtggccgccgcgaacctgactgggagggtcttaaagcgtttttagagcgtcttgaatttggttcgctcttgcatgaattcggccttttagaaagcccgttaccagccgaagaagcaccttggccaccgcccgaaggcgcgtttttaggttaccgtttgagtcgcccggaaccgatgtgggccgaattattggctcttgcagcgtctgcccagggacgtgtgtatcgcgcggaagaccctcatggtgcgctccgcggcctcaaagaagtccgtggactccttgccaaagacttagctgttgttgcattgcgcgaaggtcttgatttacctccgactgatgatccaatgcttcttgcgtacctcttggacccgtcaaacacgacgcccgaaggcgtagcccgtcgttacggcggcgagtggaccgaagatgcaggcgagcgcgcgttattggccgaacgtttgcacgccaatttattaggacgtttgcaaggcgaggaacgtctcctctggctttacgaagaagtggagaaaccattgagtcgcgtgctcgcgcatatggaagctaccggtgtcaaattagacgtggcgtatttggaggcactcagccttgaagttgctgccgaaatgcgccgcttggaggaagaagtattccgtttagcaggccactccttttatcttaattctcgcgatcagttagaacgtgtgttgttcgatgaacttggtctccctcctatcggcaagacagagaagaccggtaaacgtagcacttcagcggcggttttagaagctcttcgcgaagtccatcccattgtggacaagatcttgcagtaccgcgaactcgcgaaattgaaaggcacctatattgaccctcttccggcattagtccacccgaaaacgggacgcctccatacccgcttcaaccaaacagccacggcgaccggtcgtttgtcctcctctgatccaaaccttcagaatattccagtacgtaccccattgggccagaagatccgccgcgcgtttgtagctgaggagggttggcgtttagtggccctcgattatagccaaattgaattacgtgtccttgcccatctttctggcgatgagaacctcatccgcgtgtttcaggaaggcaaagacattcacactcaaacggcaagctggatgtttggattatcagctgaagcgatcgatcctttgatgcgtcgtgcagcgaagaccatcaatttcggtgttctctacggtatgagtgcccatcgtttgtcgcaggaattaggcattccctatgaagaagctgcggcgttcattcagcgctactttcaaagctatcccaaagttaaagcatggatcgagaagactctcgaagaaggccgcacacgtggttacgtagagaccttatttggacgtcgccgctatgttcccgatttaaacgctcgcgtgaaatctgtccgtgaagccgccgaacgcatggcgttcaacatgcctgtacagggcacggcagctgacctcatgaaacttgcaatggtgcgcctttttccacaattgcgtgaagttggtgcccgcatgctcttgcaggtccacgatgaactcttgttagaagcgccaaaagaggcggcggaagaggtggcagccctcgcgaaagaggttatggaaggcgtgtggcccttagcggtgcctcttgaagtcgaagttggtattggcgaggattggttggctgccaaaggataatga

SEQ ID NO: 2108 - protein, 841 aa, synthetic construct
  REGION 1..841: note = Variant of DNA polymerase I from Thermus sp. strain 2.9
MHHHHHHGGSGMLPLFEPKGRVLLVDGHHLAYRNFFALKGLTTSRGEPVQGVYGFAKSLLKALKEDGDVVIVVFDAKAPSFRHEAYEAYKAGRAPTPEDFPRQLALMKELVDLLGLERLEVPGFEADDVLATLAKKAEREGYEVQILTADRDLFQLLSPRISVLHPEGHRITPEWLWEKYGLRPEQWVDFRALAGDPSDNIPGVKGIGEKTALKLLKEWGSLENLLKNLDQVKPESVREKILAHLEDLKLSRELSRVRTDLPLEVDFRGRREPDWEGLKAFLERLEFGSLLHEFGLLESPLPAEEAPWPPPEGAFLGYRLSRPEPMWAELLALAASAQGRVYRAEDPHGALRGLKEVRGLLAKDLAVVALREGLDLPPTDDPMLLAYLLDPSNTTPEGVARRYGGEWTEDAGERALLAERLHANLLGRLQGEERLLWLYEEVEKPLSRVLAHMEATGVKLDVAYLEALSLEVAAEMRRLEEEVFRLAGHSFYLNSRDQLERVLFDELGLPPIGKTEKTGKRSTSAAVLEALREVHPIVDKILQYRELAKLKGTYIDPLPALVHPKTGRLHTRFNQTATATGRLSSSDPNLQNIPVRTPLGQKIRRAFVAEEGWRLVALDYSQIELRVLAHLSGDENLIRVFQEGKDIHTQTASWMFGLSAEAIDPLMRRAAKTINFGVLYGMSAHRLSQELGIPYEEAAAFIQRYFQSYPKVKAWIEKTLEEGRTRGYVETLFGRRRYVPDLNARVKSVREAAERMAFNMPVQGTAADLMKLAMVRLFPQLREVGARMLLQVHDELLLEAPKEAAEEVAALAKEVMEGVWPLAVPLEVEVGIGEDWLAAKG

SEQ ID NO: 2109 - DNA, 2529 bp, synthetic construct
  misc_feature 1..2529: note = Variant of DNA polymerase I from Thermus sp. strain 2.9
  source 1..2529: mol_type = other DNA
atgcaccatcatcatcatcatggcggtagcggcatgttaccgttgttcgaacctaaaggtcgcgtgcttctggttgatggccatcatctcgcgtatcgtaacttctttgccctgaaaggattaaccaccagccgtggcgagccggtacagggtgtctacggctttgcaaagtcgctcctgaaagctctgaaagaagacggtgatgtggtgattgttgtctttgatgcgaaagcgccaagttttcgccacgaagcgtacgaagcttacaaagccgggcgtgctccaacgccggaagactttcctcgccaattggcgcttatgaaggaattagtggatttgcttggcctcgaacgcttggaagttcccggtttcgaggcagacgacgtattagcgactctcgcaaagaaagccgaacgtgagggctatgaagtccagatcttgacagcagatcgcgatcttttccagcttttatctccgcgcatctcggtgttacacccggaagggcatcgtatcaccccggaatggctctgggagaaatatggtttgcgtcccgaacaatgggtggattttcgcgccttagcaggcgatccgagcgacaatattcagggagttaaaggtatcggcgagaagacggcgctcaagctccttaaagaatgggggtcgttggagaacttgcttaagaatttagatcaggtcaaaccagagtcagtgcgtgagaagattcttgcacacctcgaagacctcaaattaagccgcgaattgtcccgtgtacgcaccgatttgccgctcgaagttgatttccgtggccgccgcgaacctgactgggagggtcttaaagcgtttttagagcgtcttgaatttggttcgctcttgcatgaattcggccttttagaaagcccgttaccagccgaagaagcaccttggccaccgcccgaaggcgcgtttttaggttaccgtttgagtcgcccggaaccgatgtgggccgaattattggctcttgcagcgtctgcccagggacgtgtgtatcgcgcggaagaccctcatggtgcgctccgcggcctcaaagaagtccgtggactccttgccaaagacttagctgttgttgcattgcgcgaaggtcttgatttacctccgactgatgatccaatgcttcttgcgtacctcttggacccgtcaaacacgacgcccgaaggcgtagcccgtcgttacggcggcgagtggaccgaagatgcaggcgagcgcgcgttattggccgaacgtttgcacgccaatttattaggacgtttgcaaggcgaggaacgtctcctctggctttacgaagaagtggagaaaccattgagtcgcgtgctcgcgcatatggaagctaccggtgtcaaattagacgtggcgtatttggaggcactcagccttgaagttgctgccgaaatgcgccgcttggaggaagaagtattccgtttagcaggccactccttttatcttaattctcgcgatcagttagaacgtgtgttgttcgatgaacttggtctccctcctatcggcaagacagagaagaccggtaaacgtagcacttcagcggcggttttagaagctcttcgcgaagtccatcccattgtggacaagatcttgcagtaccgcgaactcgcgaaattgaaaggcacctatattgaccctcttccggcattagtccacccgaaaacgggacgcctccatacccgcttcaaccaaacagccacggcgaccggtcgtttgtcctcctctgatccaaaccttcagaatattccagtacgtaccccattgggccagaagatccgccgcgcgtttgtagctgaggagggttggcgtttagtggccctcgattatagccaaattgaattacgtgtccttgcccatctttctggcgatgagaacctcatccgcgtgtttcaggaaggcaaagacattcacactcaaacggcaagctggatgtttggattatcagctgaagcgatcgatcctttgatgcgtcgtgcagcgaagaccatcaatttcggtgttctctacggtatgagtgcccatcgtttgtcgcaggaattaggcattccctatgaagaagctgcggcgttcattcagcgctactttcaaagctatcccaaagttaaagcatggatcgagaagactctcgaagaaggccgcacacgtggttacgtagagaccttatttggacgtcgccgctatgttcccgatttaaacgctcgcgtgaaatctgtccgtgaagccgccgaacgcatggcgttcaacatgcctgtacagggcacggcagctgacctcatgaaacttgcaatggtgcgcctttttccacaattgcgtgaagttggtgcccgcatgctcttgcaggtccacgatgaactcttgttagaagcgccaaaagagcgtgcggaagaggtggcagccctcgcgaaagaggttatggaaggcgtgtggcccttagcggtgcctcttgaagtcgaagttggtattggcgaggattggttggctgccaaaggataatga

SEQ ID NO: 2110 - protein, 841 aa, synthetic construct
  REGION 1..841: note = Variant of DNA polymerase I from Thermus sp. strain 2.9
MHHHHHHGGSGMLPLFEPKGRVLLVDGHHLAYRNFFALKGLTTSRGEPVQGVYGFAKSLLKALKEDGDVVIVVFDAKAPSFRHEAYEAYKAGRAPTPEDFPRQLALMKELVDLLGLERLEVPGFEADDVLATLAKKAEREGYEVQILTADRDLFQLLSPRISVLHPEGHRITPEWLWEKYGLRPEQWVDFRALAGDPSDNIQGVKGIGEKTALKLLKEWGSLENLLKNLDQVKPESVREKILAHLEDLKLSRELSRVRTDLPLEVDFRGRREPDWEGLKAFLERLEFGSLLHEFGLLESPLPAEEAPWPPPEGAFLGYRLSRPEPMWAELLALAASAQGRVYRAEDPHGALRGLKEVRGLLAKDLAVVALREGLDLPPTDDPMLLAYLLDPSNTTPEGVARRYGGEWTEDAGERALLAERLHANLLGRLQGEERLLWLYEEVEKPLSRVLAHMEATGVKLDVAYLEALSLEVAAEMRRLEEEVFRLAGHSFYLNSRDQLERVLFDELGLPPIGKTEKTGKRSTSAAVLEALREVHPIVDKILQYRELAKLKGTYIDPLPALVHPKTGRLHTRFNQTATATGRLSSSDPNLQNIPVRTPLGQKIRRAFVAEEGWRLVALDYSQIELRVLAHLSGDENLIRVFQEGKDIHTQTASWMFGLSAEAIDPLMRRAAKTINFGVLYGMSAHRLSQELGIPYEEAAAFIQRYFQSYPKVKAWIEKTLEEGRTRGYVETLFGRRRYVPDLNARVKSVREAAERMAFNMPVQGTAADLMKLAMVRLFPQLREVGARMLLQVHDELLLEAPKERAEEVAALAKEVMEGVWPLAVPLEVEVGIGEDWLAAKG

SEQ ID NO: 2111 - DNA, 2529 bp, synthetic construct
  misc_feature 1..2529: note = Variant of DNA polymerase I from Thermus sp. strain 2.9
  source 1..2529: mol_type = other DNA
atgcaccatcatcatcatcatggcggtagcggcatgttaccgttgttcgaacctaaaggtcgcgtgcttctggttgatggccatcatctcgcgtatcgtaacttctttgccctgaaaggattaaccaccagccgtggcgagccggtacagggtgtctacggctttgcaaagtcgctcctgaaagctctgaaagaagacggtgatgtggtgattgttgtctttgatgcgaaagcgccaagttttcgccacgaagcgtacgaagcttacaaagccgggcgtgctccaacgccggaagactttcctcgccaattggcgcttatgaaggaattagtggatttgcttggcctcgaacgcttggaagttcccggtttcgaggcagacgacgtattagcgactctcgcaaagaaagccgaacgtgagggctatgaagtccagatcttgacagcagatcgcgatcttttccagcttttatctccgcgcatctcggtgttacacccggaagggcatcgtatcaccccggaatggctctgggagaaatatggtttgcgtcccgaacaatgggtggattttcgcgccttagtgggcgatccgagcgacaatattccgggagttaaaggtatcggcgagaagacggcgctcaagctccttaaagaatgggggtcgttggagaacttgcttaagaatttagatcaggtcaaaccagagtcagtgcgtgagaagattcttgcacacctcgaagacctcaaattaagccgtgaattgtcccgtgtacgcaccgatttgccgctcgaagttgatttccgtggccgccgcgaacctgactgggagggtcttaaagcgtttttagagcgtcttgaatttggttcgctcttgcatgaattcggccttttagaaagcccgttaccagccgaagaagcaccttggccaccgcccgaaggcgcgtttttaggttaccgtttgagtcgcccggaaccgatgtgggccgaattattggctcttgcagcgtctgcccagggacgtgtgtatcgcgcggaagaccctcatggtgcgctccgcggcctcaaagaagtcaatggactccttgccaaagacttagctgttgttgcattgcgcgaaggtcttgatttacctccgactgatgatccaatgcttcttgcgtacctcttggacccgtcaaacacgacgcccgaaggcgtagcccgtcgttacggcggcgagtggaccgaagatgcaggtgagcgcgcgttattggccgaacgtttgcacgccaatttattaggacgtttgcaaggcgaggaacgtctcctctggctttacgaagaagtggagaaaccattgagtcgcgtgctcgcgcatatggaagctaccggtgtcaaattagacgtggcgtatttggagaatctcagccttgaagttgctgccgaaatgcgccgcttggaggaagaagtattccgtttagcaggccactccttttatcttaattctcgcgatcagttagaacgtgtgttgttcgatgaacttggtctccctcctatcggcaagacagagaagaccggtaaacgtagcacttcagcggcggttttagaagctcttcgcgaagtccatcccattgtggacaagatcttgcagtaccgcgaactcgcgaaattgaaaggcacctatattgaccctcttccggcattagtccacccgaaaacgggacgcctccatacccgcttcaaccaaacagccacggcgaccggtcgtttgtcctcctctgatccaaaccttcagaatattccagtacgtaccccattgggccagaagatccgccgcgcgtttgtagctgaggagggttggcgtttagtggccctcgattatagccaaattgaattacgtgtccttgcccatctttctggcgatgagaacctcatccgcgtgtttcaggaaggcaaagacattcacactcaaacggcaagctggatgtttggagtgtcagctgaagcgatcgatcctttgatgcgtcgtgcagcgaagaccatcaatttcggtgttctctacggtatgagtgcccatcgtttgtcgcaggaattaggcattccctatacggaagctgcggcgttcattcagaagtactttcaaagctatcccaaagttaaagcatggatcgagaagactctcgaagaaggccgcacacgtggttacgtagagaccttatttggacgtcgccgctatgttcccgatttaaacgctcgcgtgaaatctgtccgtgaagccgccgaacgcatggcgttcaacatgcctgtacagggcacggcagctgacctcatgaaacttgcaatggtgcgcctttttccacaattgcgtgaagttggtgcccgcatgctcttgcaggtccacgatgaactcttgttagaagcgccaaaagagcgtgcggaagaggtggcagccctcgcgaaagaggttatggaaggcgtgtggcccttagcggtgcctcttgaagtcgaagttggtattggcgaggattggttggctgccaaaggataatga

SEQ ID NO: 2112 - protein, 841 aa, synthetic construct
  REGION 1..841: note = Variant of DNA polymerase I from Thermus sp. strain 2.9
MHHHHHHGGSGMLPLFEPKGRVLLVDGHHLAYRNFFALKGLTTSRGEPVQGVYGFAKSLLKALKEDGDVVIVVFDAKAPSFRHEAYEAYKAGRAPTPEDFPRQLALMKELVDLLGLERLEVPGFEADDVLATLAKKAEREGYEVQILTADRDLFQLLSPRISVLHPEGHRITPEWLWEKYGLRPEQWVDFRALVGDPSDNIPGVKGIGEKTALKLLKEWGSLENLLKNLDQVKPESVREKILAHLEDLKLSRELSRVRTDLPLEVDFRGRREPDWEGLKAFLERLEFGSLLHEFGLLESPLPAEEAPWPPPEGAFLGYRLSRPEPMWAELLALAASAQGRVYRAEDPHGALRGLKEVNGLLAKDLAVVALREGLDLPPTDDPMLLAYLLDPSNTTPEGVARRYGGEWTEDAGERALLAERLHANLLGRLQGEERLLWLYEEVEKPLSRVLAHMEATGVKLDVAYLENLSLEVAAEMRRLEEEVFRLAGHSFYLNSRDQLERVLFDELGLPPIGKTEKTGKRSTSAAVLEALREVHPIVDKILQYRELAKLKGTYIDPLPALVHPKTGRLHTRFNQTATATGRLSSSDPNLQNIPVRTPLGQKIRRAFVAEEGWRLVALDYSQIELRVLAHLSGDENLIRVFQEGKDIHTQTASWMFGVSAEAIDPLMRRAAKTINFGVLYGMSAHRLSQELGIPYTEAAAFIQKYFQSYPKVKAWIEKTLEEGRTRGYVETLFGRRRYVPDLNARVKSVREAAERMAFNMPVQGTAADLMKLAMVRLFPQLREVGARMLLQVHDELLLEAPKERAEEVAALAKEVMEGVWPLAVPLEVEVGIGEDWLAAKG

SEQ ID NO: 2113 - DNA, 2529 bp, synthetic construct
  misc_feature 1..2529: note = Variant of DNA polymerase I from Thermus sp. strain 2.9
  source 1..2529: mol_type = other DNA
atgcaccatcatcatcatcatggcggtagcggcatgttaccgttgttcgaacctaaaggtcgcgtgcttctggttgatggccatcatctcgcgtatcgtaacttctttgccctgaaaggattaaccaccagccgtggcgagccggtacagggtgtctacggctttgcaaagtcgctcctgaaagctctgaaagaagacggtgatgtggtgattgttgtctttgatgcgaaagcgccaagttttcgccacgaagcgtacgaagcttacaaagccgggcgtgctccaacgccggaagactttcctcgccaattggcgcttatgaaggaattagtggatttgcttggcctcgaacgcttggaagttcccggtttcgaggcagacgacgtattagcgactctcgcaaagaaagccgaacgtgagggctatgaagtccagatcttgacagcagatcgcgatcttttccagcttttatctccgcgcatctcggtgttacacccggaagggcatcgtatcaccccggaatggctctgggagaaatatggtttgcgtcccgaacaatgggtggattttcgcgccttagtgggcgatccgagcgacaatattccgggagttaaaggtatcggcgagaagacggcgctcaagctccttaaagaatgggggtcgttggagaacttgcttaagaatttagatcaggtcaaaccagagtcagtgcgtgagaagattcttgcacacctcgaagacctcaaattaagcctggaattgtcccgtgtacgcaccgatttgccgctcgaagttgatttccgtggccgccgcgaacctgactgggagggtcttaaagcgtttttagagcgtcttgaatttggttcgctcttgcatgaattcggccttttagaaagcccgttaccagccgaagaagcaccttggccaccgcccgaaggcgcgtttttaggttaccgtttgagtcgcccggaaccgatgtgggccgaattattggctcttgcagcgtctgcccagggacgtgtgtatcgcgcggaagaccctcatggtgcgctccgcggcctcaaagaagtccgtggactccttgccaaagacttagctgttgttgcattgcgcgaaggtcttgatttacctccgactgatgatccaatgcttcttgcgtacctcttggacccgtcaaacacgacgcccgaaggcgtagcccgtcgttacggcggcgagtggaccgaagatgcaggtgagcgcgcgttattggccgaacgtttgcacgccaatttattaggacgtttgcaaggcgaggaacgtctcctctggctttacgaagaagtggagaaaccattgagtcgcgtgctcgcgcatatggaagctaccggtgtcaaattagacgtggcgtatttggaggcgctcagccttgaagttgctgccgaaatgcgccgcttggaggaagaagtattccgtttagcaggccactccttttatcttaattctcgcgatcagttagaacgtgtgttgttcgatgagcttggtctccctcctatcggcaagacagagaagaccggtaaacgtagcacttcagcggcggttttagaagctcttcgcgaagtccatcccattgtggacaagatcttgcagtaccgcgaactcgcgaaattgaaaggcacctatattgaccctcttccggcattagtccacccgaaaacgggacgcctccatacccgcttcaaccaaacagccacggcgaccggtcgtttgtcctcctctgatccaaaccttcagaatattccagtacgtaccccattgggccagaagatccgccgcgcgtttgtagctgaggagggttggcgtttagtggccctcgattatagccaaattgaattacgtgtccttgcccatctttctggcgatgagaacctcatccgcgtgtttcaggaaggcaaagacattcacactcaaacggcaagctggatgtttggattatcagctgaagcgatcgatcctttgatgcgtcgtgcagcgaagaccatcaatttcggtgttctctacggtatgagtgcccatcgtttgtcgcaggaattaggcattccctatacggaagctgcggcgttcattcagaagtactttcaaagctatcccaaagttaaagcatggatcgagaagactctcgaagaaggccgcacacgtggttacgtagagaccttatttggacgtcgccgctatgttcccgatttaaacgctcgcgtgaaatctgtccgtgaagccgccgaacgcatggcgttcaacatgcctgtacagggcacggcagctgacctcatgaaacttgcaatggtgcgcctttttccacaattgcgtgaagttggtgcccgcatgctcttgcaggtccacgatgaactcttgttagaagcgccaaaagagcgtgcggaagaggtggcagccctcgcgaaagaggttatggaaggcgtgtggcccttagcggtgcctcttgaagtcgaagttggtattggcgaggattggttggctgccaaaggataatga

SEQ ID NO: 2114 - protein, 841 aa, synthetic construct
  REGION 1..841: note = Variant of DNA polymerase I from Thermus sp. strain 2.9
MHHHHHHGGSGMLPLFEPKGRVLLVDGHHLAYRNFFALKGLTTSRGEPVQGVYGFAKSLLKALKEDGDVVIVVFDAKAPSFRHEAYEAYKAGRAPTPEDFPRQLALMKELVDLLGLERLEVPGFEADDVLATLAKKAEREGYEVQILTADRDLFQLLSPRISVLHPEGHRITPEWLWEKYGLRPEQWVDFRALVGDPSDNIPGVKGIGEKTALKLLKEWGSLENLLKNLDQVKPESVREKILAHLEDLKLSLELSRVRTDLPLEVDFRGRREPDWEGLKAFLERLEFGSLLHEFGLLESPLPAEEAPWPPPEGAFLGYRLSRPEPMWAELLALAASAQGRVYRAEDPHGALRGLKEVRGLLAKDLAVVALREGLDLPPTDDPMLLAYLLDPSNTTPEGVARRYGGEWTEDAGERALLAERLHANLLGRLQGEERLLWLYEEVEKPLSRVLAHMEATGVKLDVAYLEALSLEVAAEMRRLEEEVFRLAGHSFYLNSRDQLERVLFDELGLPPIGKTEKTGKRSTSAAVLEALREVHPIVDKILQYRELAKLKGTYIDPLPALVHPKTGRLHTRFNQTATATGRLSSSDPNLQNIPVRTPLGQKIRRAFVAEEGWRLVALDYSQIELRVLAHLSGDENLIRVFQEGKDIHTQTASWMFGLSAEAIDPLMRRAAKTINFGVLYGMSAHRLSQELGIPYTEAAAFIQKYFQSYPKVKAWIEKTLEEGRTRGYVETLFGRRRYVPDLNARVKSVREAAERMAFNMPVQGTAADLMKLAMVRLFPQLREVGARMLLQVHDELLLEAPKERAEEVAALAKEVMEGVWPLAVPLEVEVGIGEDWLAAKG

SEQ ID NO: 2115 - DNA, 2529 bp, synthetic construct
  misc_feature 1..2529: note = Variant of DNA polymerase I from Thermus sp. strain 2.9
  source 1..2529: mol_type = other DNA
atgcaccatcatcatcatcatggcggtagcggcatgttaccgttgttcgaacctaaaggtcgcgtgcttctggttgatggccatcatctcgcgtatcgtaacttctttgccctgaaaggattaaccaccagccgtggcgagccggtacagggtgtctacggctttgcaaagtcgctcctgaaagctctgaaagaagacggtgatgtggtgattgttgtctttgatgcgaaagcgccaagttttcgccacgaagcgtacgaagcttacaaagccgggcgtgctccaacgccggaagactttcctcgccaattggcgcttatgaaggaattagtggatttgcttggcctcgaacgcttggaagttcccggtttcgaggcagacgacgtattagcgactctcgcaaagaaagccgaacgtgagggctatgaagtccagatcttgacagcagatcgcgatcttttccagcttttatctccgcgcatctcggtgttacacccggaagggcatcgtatcaccccggaatggctctgggagaaatatggtttgcgtcccgaacaatgggtggattttcgcgccttagtgggcgatccgagcgacaatattccgggagttaaaggtatcggcgagaagacggcgctcaagctccttaaagaatgggggtcgttggagaacttgcttaagaatttagatcaggtcaaaccagagtcagtgcgtgagaagattcttgcacacctcgaagacctcaaattaagccgtgaattgtcccgtgtacgcaccgatttgccgctcgaagttgatttccgtggccgccgcgaacctgactgggagggtcttaaagcgtttttagagcgtcttgaatttggttcgctcttgcatgaattcggccttttagaaagcccgttaccagccgaagaagcaccttggccaccgcccgaaggcgcgtttttaggttaccgtttgagtcgcccggaaccgatgtgggccgaattattggctcttgcagcgtctgcccagggacgtgtgtatcgcgcggaagaccctcatggtgcgctccgcggcctcaaagaagtccgtggactccttgccaaagacttagctgttgttgcattgcgcgaaggtcttgatttacctccgactgatgatccaatgcttcttgcgtacctcttggacccgtcaaacacgacgcccgaaggcgtagcccgtcgttacggcggcgagtggaccgaagatgcaggcgagcgcgcgttattggccgaacgtttgcacgccaatttattaggacgtttgcaaggcgaggaacgtctcctctggctttacgaagaagtggagaaaccattgagtcgcgtgctcgcgcatatggaagctaccggtgtcaaattagacgtggcgtatttggagaatctcagccttgaagttgctgccgaaatgcgccgcttggaggaagaagtattccgtttagcaggccactccttttatcttaattctcgcgatcagttagaacgtgtgttgttcgatgaacttggtctccctcctatcggcaagacagagaagaccggtaaacgtagcacttcagcggcggttttagaagctcttcgcgaagtccatcccattgtggacaagatcttgcagtaccgcgaactcgcgaaattgaaaggcacctatattgaccctcttccggcattagtccacccgaaaacgggacgcctccatacccgcttcaaccaaacagccacggcgaccggtcgtttgtcctcctctgatccaaaccttcagaatattccagtacgtaccccattgggccagaagatccgccgcgcgtttgtagctgaggagggttggcgtttagtggccctcgattatagccaaattgaattacgtgtccttgcccatctttctggcgatgagaacctcatccgcgtgtttcaggaaggcaaagacattcacactcaaacggcaagctggatgtttggagtgtcagctgaagcgatcgatcctttgatgcgtcgtgcagcgaagaccatcaatttcggtgttctctacggtatgagtgcccatcgtttgtcgcaggaattaggcattccctatgaggaagctgcggcgttcattcagcgctactttcaaagctatcccaaagttaaagcatggatcgagaagactctcgaagaaggccgcacacgtggttacgtagagaccttatttggacgtcgccgctatgttcccgatttaaccgctcgcgtgaaatctgtccgtgaagccgccgaacgcatggcgttcaacatgcctgtacagggcacggcagctgacctcatgaaacttgcaatggtgcgcctttttccacaattgcgtgaagttggtgcccgcatgctcttgcaggtccacgatgaactcttgttagaagcgccaaaagagcgtgcggaagaggtggcagccctcgcgaaagaggttatggaaggcgtgtggcccttagcggtgcctcttgaagtcgaagttggtattggcgaggattggttggctgccaaaggataatga

SEQ ID NO: 2116 - protein, 841 aa, synthetic construct
  REGION 1..841: note = Variant of DNA polymerase I from Thermus sp. strain 2.9
MHHHHHHGGSGMLPLFEPKGRVLLVDGHHLAYRNFFALKGLTTSRGEPVQGVYGFAKSLLKALKEDGDVVIVVFDAKAPSFRHEAYEAYKAGRAPTPEDFPRQLALMKELVDLLGLERLEVPGFEADDVLATLAKKAEREGYEVQILTADRDLFQLLSPRISVLHPEGHRITPEWLWEKYGLRPEQWVDFRALVGDPSDNIPGVKGIGEKTALKLLKEWGSLENLLKNLDQVKPESVREKILAHLEDLKLSRELSRVRTDLPLEVDFRGRREPDWEGLKAFLERLEFGSLLHEFGLLESPLPAEEAPWPPPEGAFLGYRLSRPEPMWAELLALAASAQGRVYRAEDPHGALRGLKEVRGLLAKDLAVVALREGLDLPPTDDPMLLAYLLDPSNTTPEGVARRYGGEWTEDAGERALLAERLHANLLGRLQGEERLLWLYEEVEKPLSRVLAHMEATGVKLDVAYLENLSLEVAAEMRRLEEEVFRLAGHSFYLNSRDQLERVLFDELGLPPIGKTEKTGKRSTSAAVLEALREVHPIVDKILQYRELAKLKGTYIDPLPALVHPKTGRLHTRFNQTATATGRLSSSDPNLQNIPVRTPLGQKIRRAFVAEEGWRLVALDYSQIELRVLAHLSGDENLIRVFQEGKDIHTQTASWMFGVSAEAIDPLMRRAAKTINFGVLYGMSAHRLSQELGIPYEEAAAFIQRYFQSYPKVKAWIEKTLEEGRTRGYVETLFGRRRYVPDLTARVKSVREAAERMAFNMPVQGTAADLMKLAMVRLFPQLREVGARMLLQVHDELLLEAPKERAEEVAALAKEVMEGVWPLAVPLEVEVGIGEDWLAAKG

SEQ ID NO: 2117 - DNA, 2529 bp, synthetic construct
  misc_feature 1..2529: note = Variant of DNA polymerase I from Thermus sp. strain 2.9
  source 1..2529: mol_type = other DNA
atgcaccatcatcatcatcatggcggtagcggcatgttaccgttgttcgaacctaaaggtcgcgtgcttctggttgatggccatcatctcgcgtatcgtaacttctttgccctgaaaggattaaccaccagccgtggcgagccggtacagggtgtctacggctttgcaaagtcgctcctgaaagctctgaaagaagacggtgatgtggtgattgttgtctttgatgcgaaagcgccaagttttcgccacgaagcgtacgaagcttacaaagccgggcgtgctccaacgccggaagactttcctcgccaattggcgcttatgaaggaattagtggatttgcttggcctcgaacgcttggaagttcccggtttcgaggcagacgacgtattagcgactctcgcaaagaaagccgaacgtgagggctatgaagtccagatcttgacagcagatcgcgatcttttccagcttttatctccgcgcatctcggtgttacacccggaagggcatcgtatcaccccggaatggctctgggagaaatatggtttgcgtcccgaacaatgggtggattttcgcgccttagcgggcgatccgagcgacaatattccgggagttaaaggtatcggcgagaagacggcgctcaagctccttaaagaatgggggtcgttggagaacttgcttaagaatttagatcaggtcaaaccagagtcagtgcgtgagaagattcttgcacacctcgaagacctcaaattaagcctggaattgtcccgtgtacgcaccgatttgccgctcgaagttgatttccgtggccgccgcgaacctgactgggagggtcttaaagcgtttttagagcgtcttgaatttggttcgctcttgcatgaattcggccttttagaaagcccgttaccagccgaagaagcaccttggccaccgcccgaaggcgcgtttttaggttaccgtttgagtcgcccggaaccgatgtgggccgaattattggctcttgcagcgtctgcccagggacgtgtgtatcgcgcggaagaccctcatggtgcgctccgcggcctcaaagaagtcaatggactccttgccaaagacttagctgttgttgcattgcgcgaaggtcttgatttacctccgactgatgatccaatgcttcttgcgtacctcttggacccgtcaaacacgacgcccgaaggcgtagcccgtcgttacggcggcgagtggaccgaagatgcaggtgagcgcgcgttattggccgaacgtttgcacgccaatttattaggacgtttgcaaggcgaggaacgtctcctctggctttacgaagaagtggagaaaccattgagtcgcgtgctcgcgcatatggaagctaccggtgtcaaattagacgtggcgtatttggaggcactcagccttgaagttgctgccgaaatgcgccgcttggaggaagaagtattccgtttagcaggccactccttttatcttaattctcgcgatcagttagaacgtgtgttgttcgatgaacttggtctccctcctatcggcaagacagagaagaccggtaaacgtagcacttcagcggcggttttagaagctcttcgcgaagtccatcccattgtggacaagatcttgcagtaccgcgaactcgcgaaattgaaaggcacctatattgaccctcttccggcattagtccacccgaaaacgggacgcctccatacccgcttcaaccaaacagccacggcgaccggtcgtttgtcctcctctgatccaaaccttcagaatattccagtacgtaccccattgggccagaagatccgccgcgcgtttgtagctgaggagggttggcgtttagtggccctcgattatagccaaattgaattacgtgtccttgcccatctttctggcgatgagaacctcatccgcgtgtttcaggaaggcaaagacattcacactcaaacggcaagctggatgtttggactgtcagctgaagcgatcgatcctttgatgcgtcgtgcagcgaagaccatcaatttcggtgttctctacggtatgagtgcccatcgtttgtcgcaggaattaggcattccctatacggaagctgcggcgttcattcagaagtactttcaaagctatcccaaagttaaagcatggatcgagaagactctcgaagaaggccgcacacgtggttacgtagagaccttatttggacgtcgccgctatgttcccgatttaaacgctcgcgtgaaatctgtccgtgaagccgccgaacgcatggcgttcaacatgcctgtacagggcacggcagctgacctcatgaaacttgcaatggtgcgcctttttccacaattgcgtgaagttggtgcccgcatgctcttgcaggtccacgatgaactcttgttagaagcgccaaaagagcgtgcggaagaggtggcagccctcgcgaaagaggttatggaaggcgtgtggcccttagcggtgcctcttgaagtcgaagttggtattggcgaggattggttggctgccaaaggataatga

SEQ ID NO: 2118 - protein, 841 aa, synthetic construct
  REGION 1..841: note = Variant of DNA polymerase I from Thermus sp. strain 2.9
MHHHHHHGGSGMLPLFEPKGRVLLVDGHHLAYRNFFALKGLTTSRGEPVQGVYGFAKSLLKALKEDGDVVIVVFDAKAPSFRHEAYEAYKAGRAPTPEDFPRQLALMKELVDLLGLERLEVPGFEADDVLATLAKKAEREGYEVQILTADRDLFQLLSPRISVLHPEGHRITPEWLWEKYGLRPEQWVDFRALAGDPSDNIPGVKGIGEKTALKLLKEWGSLENLLKNLDQVKPESVREKILAHLEDLKLSLELSRVRTDLPLEVDFRGRREPDWEGLKAFLERLEFGSLLHEFGLLESPLPAEEAPWPPPEGAFLGYRLSRPEPMWAELLALAASAQGRVYRAEDPHGALRGLKEVNGLLAKDLAVVALREGLDLPPTDDPMLLAYLLDPSNTTPEGVARRYGGEWTEDAGERALLAERLHANLLGRLQGEERLLWLYEEVEKPLSRVLAHMEATGVKLDVAYLEALSLEVAAEMRRLEEEVFRLAGHSFYLNSRDQLERVLFDELGLPPIGKTEKTGKRSTSAAVLEALREVHPIVDKILQYRELAKLKGTYIDPLPALVHPKTGRLHTRFNQTATATGRLSSSDPNLQNIPVRTPLGQKIRRAFVAEEGWRLVALDYSQIELRVLAHLSGDENLIRVFQEGKDIHTQTASWMFGLSAEAIDPLMRRAAKTINFGVLYGMSAHRLSQELGIPYTEAAAFIQKYFQSYPKVKAWIEKTLEEGRTRGYVETLFGRRRYVPDLNARVKSVREAAERMAFNMPVQGTAADLMKLAMVRLFPQLREVGARMLLQVHDELLLEAPKERAEEVAALAKEVMEGVWPLAVPLEVEVGIGEDWLAAKG

SEQ ID NO: 2119 - DNA, 2529 bp, synthetic construct
  misc_feature 1..2529: note = Variant of DNA polymerase I from Thermus sp. strain 2.9
  source 1..2529: mol_type = other DNA
atgcaccatcatcatcatcatggcggtagcggcatgttaccgttgttcgaacctaaaggtcgcgtgcttctggttgatggccatcatctcgcgtatcgtaacttctttgccctgaaaggattaaccaccagccgtggcgagccggtacagggtgtctacggctttgcaaagtcgctcctgaaagctctgaaagaagacggtgatgtggtgattgttgtctttgatgcgaaagcgccaagttttcgccacgaagcgtacgaagcttacaaagccgggcgtgctccaacgccggaagactttcctcgccaattggcgcttatgaaggaattagtggatttgcttggcctcgaacgcttggaagttcccggtttcgaggcagacgacgtattagcgactctcgcaaagaaagccgaacgtgagggctatgaagtccagatcttgacagcagatcgcgatcttttccagcttttatctccgcgcatctcggtgttacacccggaagggcatcgtatcaccccggaatggctctgggagaaatatggtttgcgtcccgaacaatgggtggattttcgcgccttagtgggcgatccgagcgacaatattccgggagttaaaggtatcggcgagaagacggcgctcaagctccttaaagaatgggggtcgttggagaacttgcttaagaatttagatcaggtcaaaccagagtcagtgcgtgagaagattcttgcacacctcgaagacctcaaattaagccgcgaattgtcccgtgtacgcaccgatttgccgctcgaagttgatttccgtggccgccgcgaacctgactgggagggtcttaaagcgtttttagagcgtcttgaatttggttcgctcttgcatgaattcggccttttagaaagcccgttaccagccgaagaagcaccttggccaccgcccgaaggcgcgtttttaggttaccgtttgagtcgcccggaaccgatgtgggccgaattattggctcttgcagcgtctgcccagggacgtgtgtatcgcgcggaagaccctcatggtgcgctccgcggcctcaaagaagtccgtggactccttgccaaagacttagctgttgttgcattgcgcgaaggtcttgatttacctccgactgatgatccaatgcttcttgcgtacctcttggacccgtcaaacacgacgcccgaaggcgtagcccgtcgttacggcggcgagtggaccgaagatgcaggtgagcgcgcgttattggccgaacgtttgcacgccaatttattaggacgtttgcaaggcgaggaacgtctcctctggctttacgaagaagtggagaaaccattgagtcgcgtgctcgcgcatatggaagctaccggtgtcaaattagacgtggcgtatttggaggcactcagccttgaagttgctgccgaaatgcgccgcttggaggaagaagtattccgtttagcaggccactccttttatcttaattctcgcgatcagttagaacgtgtgttgttcgatgaacttggtctccctcctatcggcaagacagagaagaccggtaaacgtagcacttcagcggcggttttagaagctcttcgcgaagtccatcccattgtggacaagatcttgcagtaccgcgaactcgcgaaattgaaaggcacctatattgaccctcttccggcattagtccacccgaaaacgggacgcctccatacccgcttcaaccaaacagccacggcgaccggtcgtttgtcctcctctgatccaaaccttcagaatattccagtacgtaccccattgggccagaagatccgccgcgcgtttgtagctgaggagggttggcgtttagtggccctcgattatagccaaattgaattacgtgtccttgcccatctttctggcgatgagaacctcatccgcgtgtttcaggaaggcaaagacattcacactcaaacggcaagctggatgtttggagtgtcagctgaagcgatcgatcctttgatgcgtcgtgcagcgaagaccatcaatttcggtgttctctacggtatgagtgcccatcgtttgtcgcaggaattaggcattccctatgaagaagctgcggcgttcattcagcgctactttcaaagctatcccaaagttaaagcatggatcgagaagactctcgaagaaggccgcacacgtggttacgtagagaccttatttggacgtcgccgctatgttcccgatttaaacgctcgcgtgaaatctgtccgtgaagccgccgaacgcatggcgttcaacatgcctgtacagggcacggcagctgacctcatgaaacttgcaatggtgcgcctttttccacaattgcgtgaagttggtgcccgcatgctcttgcaggtccacgatgaactcttgttagaagcgccaaaagagcgtgcggaagaggtggcagccctcgcgaaagaggttatggaaggcgtgtggcccttagcggtgcctcttgaagtcgaagttggtattggcgaggattggttggctgccaaaggataatga

SEQ ID NO: 2120 - protein, 841 aa, synthetic construct
  REGION 1..841: note = Variant of DNA polymerase I from Thermus sp. strain 2.9
MHHHHHHGGSGMLPLFEPKGRVLLVDGHHLAYRNFFALKGLTTSRGEPVQGVYGFAKSLLKALKEDGDVVIVVFDAKAPSFRHEAYEAYKAGRAPTPEDFPRQLALMKELVDLLGLERLEVPGFEADDVLATLAKKAEREGYEVQILTADRDLFQLLSPRISVLHPEGHRITPEWLWEKYGLRPEQWVDFRALVGDPSDNIPGVKGIGEKTALKLLKEWGSLENLLKNLDQVKPESVREKILAHLEDLKLSRELSRVRTDLPLEVDFRGRREPDWEGLKAFLERLEFGSLLHEFGLLESPLPAEEAPWPPPEGAFLGYRLSRPEPMWAELLALAASAQGRVYRAEDPHGALRGLKEVRGLLAKDLAVVALREGLDLPPTDDPMLLAYLLDPSNTTPEGVARRYGGEWTEDAGERALLAERLHANLLGRLQGEERLLWLYEEVEKPLSRVLAHMEATGVKLDVAYLEALSLEVAAEMRRLEEEVFRLAGHSFYLNSRDQLERVLFDELGLPPIGKTEKTGKRSTSAAVLEALREVHPIVDKILQYRELAKLKGTYIDPLPALVHPKTGRLHTRFNQTATATGRLSSSDPNLQNIPVRTPLGQKIRRAFVAEEGWRLVALDYSQIELRVLAHLSGDENLIRVFQEGKDIHTQTASWMFGVSAEAIDPLMRRAAKTINFGVLYGMSAHRLSQELGIPYEEAAAFIQRYFQSYPKVKAWIEKTLEEGRTRGYVETLFGRRRYVPDLNARVKSVREAAERMAFNMPVQGTAADLMKLAMVRLFPQLREVGARMLLQVHDELLLEAPKERAEEVAALAKEVMEGVWPLAVPLEVEVGIGEDWLAAKG

SEQ ID NO: 2121 - DNA, 2529 bp, synthetic construct
  misc_feature 1..2529: note = Variant of DNA polymerase I from Thermus sp. strain 2.9
  source 1..2529: mol_type = other DNA
atgcaccatcatcatcatcatggcggtagcggcatgttaccgttgttcgaacctaaaggtcgcgtgcttctggttgatggccatcatctcgcgtatcgtaacttctttgccctgaaaggattaaccaccagccgtggcgagccggtacagggtgtctacggctttgcaaagtcgctcctgaaagctctgaaagaagacggtgatgtggtgattgttgtctttgatgcgaaagcgccaagttttcgccacgaagcgtacgaagcttacaaagccgggcgtgctccaacgccggaagactttcctcgccaattggcgcttatgaaggaattagtggatttgcttggcctcgaacgcttggaagttcccggtttcgaggcagacgacgtattagcgactctcgcaaagaaagccgaacgtgagggctatgaagtccagatcttgacagcagatcgcgatcttttccagcttttatctccgcgcatctcggtgttacacccggaagggcatcgtatcaccccggaatggctctgggagaaatatggtttgcgtcccgaacaatgggtggattttcgcgccttagtgggcgatccgagcgacaatattccgggagttaaaggtatcggcgagaagacggcgctcaagctccttaaagaatgggggtcgttggagaacttgcttaagaatttagatcaggtcaaaccagagtcagtgcgtgagaagattcttgcacacctcgaagacctcaaattaagcctggaattgtcccgtgtacgcaccgatttgccgctcgaagttgatttccgtggccgccgcgaacctgactgggagggtcttaaagcgtttttagagcgtcttgaatttggttcgctcttgcatgaattcggccttttagaaagcccgttaccagccgaagaagcaccttggccaccgcccgaaggcgcgtttttaggttaccgtttgagtcgcccggaaccgatgtgggccgaattattggctcttgcagcgtctgcccagggacgtgtgtatcgcgcggaagaccctcatggtgcgctccgcggcctcaaagaagtccgtggactccttgccaaagacttagctgttgttgcattgcgcgaaggtcttgatttacctccgactgatgatccaatgcttcttgcgtacctcttggacccgtcaaacacgacgcccgaaggcgtagcccgtcgttacggcggcgagtggaccgaagatgcaggtgagcgcgcgttattggccgaacgtttgcacgccaatttattaggacgtttgcaaggcgaggaacgtctcctctggctttacgaagaagtggagaaaccattgagtcgcgtgctcgcgcatatggaagctaccggtgtcaaattagacgtggcgtatttggaggcactcagccttgaagttgctgccgaaatgcgccgcttggaggaagaagtattccgtttagcaggccactccttttatcttaattctcgcgatcagttagaacgtgtgttgttcgatgaacttggtctccctcctatcggcaagacagagaagaccggtaaacgtagcacttcagcggcggttttagaagctcttcgcgaagtccatcccattgtggacaagatcttgcagtaccgcgaactcgcgaaattgaaaggcacctatattgaccctcttccggcattagtccacccgaaaacgggacgcctccatacccgcttcaaccaaacagccacggcgaccggtcgtttgtcctcctctgatccaaaccttcagaatattccagtacgtaccccattgggccagaagatccgccgcgcgtttgtagctgaggagggttggcgtttagtggccctcgattatagccaaattgaattacgtgtccttgcccatctttctggcgatgagaacctcatccgcgtgtttcaggaaggcaaagacattcacactcaaacggcaagctggatgtttggattatcagctgaagcgatcgatcctttgatgcgtcgtgcagcgaagaccatcaatttcggtgttctctacggtatgagtgcccatcgtttgtcgcaggaattaggcattccctatgaggaagctgcggcgttcattcagaagtactttcaaagctatcccaaagttaaagcatggatcgagaagactctcgaagaaggccgcacacgtggttacgtagagaccttatttggacgtcgccgctatgttcccgatttaaccgctcgcgtgaaatctgtccgtgaagccgccgaacgcatggcgttcaacatgcctgtacagggcacggcagctgacctcatgaaacttgcaatggtgcgcctttttccacaattgcgtgaagttggtgcccgcatgctcttgcaggtccacgatgaactcttgttagaagcgccaaaagagcgtgcggaagaggtggcagccctcgcgaaagaggttatggaaggcgtgtggcccttagcggtgcctcttgaagtcgaagttggtattggcgaggattggttggctgccaaaggataatga

SEQ ID NO: 2122 - protein, 841 aa, synthetic construct
  REGION 1..841: note = Variant of DNA polymerase I from Thermus sp. strain 2.9
MHHHHHHGGSGMLPLFEPKGRVLLVDGHHLAYRNFFALKGLTTSRGEPVQGVYGFAKSLLKALKEDGDVVIVVFDAKAPSFRHEAYEAYKAGRAPTPEDFPRQLALMKELVDLLGLERLEVPGFEADDVLATLAKKAEREGYEVQILTADRDLFQLLSPRISVLHPEGHRITPEWLWEKYGLRPEQWVDFRALVGDPSDNIPGVKGIGEKTALKLLKEWGSLENLLKNLDQVKPESVREKILAHLEDLKLSLELSRVRTDLPLEVDFRGRREPDWEGLKAFLERLEFGSLLHEFGLLESPLPAEEAPWPPPEGAFLGYRLSRPEPMWAELLALAASAQGRVYRAEDPHGALRGLKEVRGLLAKDLAVVALREGLDLPPTDDPMLLAYLLDPSNTTPEGVARRYGGEWTEDAGERALLAERLHANLLGRLQGEERLLWLYEEVEKPLSRVLAHMEATGVKLDVAYLEALSLEVAAEMRRLEEEVFRLAGHSFYLNSRDQLERVLFDELGLPPIGKTEKTGKRSTSAAVLEALREVHPIVDKILQYRELAKLKGTYIDPLPALVHPKTGRLHTRFNQTATATGRLSSSDPNLQNIPVRTPLGQKIRRAFVAEEGWRLVALDYSQIELRVLAHLSGDENLIRVFQEGKDIHTQTASWMFGLSAEAIDPLMRRAAKTINFGVLYGMSAHRLSQELGIPYEEAAAFIQKYFQSYPKVKAWIEKTLEEGRTRGYVETLFGRRRYVPDLTARVKSVREAAERMAFNMPVQGTAADLMKLAMVRLFPQLREVGARMLLQVHDELLLEAPKERAEEVAALAKEVMEGVWPLAVPLEVEVGIGEDWLAAKG

SEQ ID NO: 2123 - DNA, 2529 bp, synthetic construct
  misc_feature 1..2529: note = Variant of DNA polymerase I from Thermus sp. strain 2.9
  source 1..2529: mol_type = other DNA
atgcaccatcatcatcatcatggcggtagcggcatgttaccgttgttcgaacctaaaggtcgcgtgcttctggttgatggccatcatctcgcgtatcgtaacttctttgccctgaaaggattaaccaccagccgtggcgagccggtacagggtgtctacggctttgcaaagtcgctcctgaaagctctgaaagaagacggtgatgtggtgattgttgtctttgatgcgaaagcgccaagttttcgccacgaagcgtacgaagcttacaaagccgggcgtgctccaacgccggaagactttcctcgccaattggcgcttatgaaggaattagtggatttgcttggcctcgaacgcttggaagttcccggtttcgaggcagacgacgtattagcgactctcgcaaagaaagccgaacgtgagggctatgaagtccagatcttgacagcagatcgcgatcttttccagcttttatctccgcgcatctcggtgttacacccggaagggcatcgtatcaccccggaatggctctgggagaaatatggtttgcgtcccgaacaatgggtggattttcgcgccttagtgggcgatccgagcgacaatattccgggagttaaaggtatcggcgagaagacggcgctcaagctccttaaagaatgggggtcgttggagaacttgcttaagaatttagatcaggtcaaaccagagtcagtgcgtgagaagattcttgcacacctcgaagacctcaaattaagcctggaattgtcccgtgtacgcaccgatttgccgctcgaagttgatttccgtggccgccgcgaacctgactgggagggtcttaaagcgtttttagagcgtcttgaatttggttcgctcttgcatgaattcggccttttagaaagcccgttaccagccgaagaagcaccttggccaccgcccgaaggcgcgtttttaggttaccgtttgagtcgcccggaaccgatgtgggccgaattattggctcttgcagcgtctgcccagggacgtgtgtatcgcgcggaagaccctcatggtgcgctccgcggcctcaaagaagtccgtggactccttgccaaagacttagctgttgttgcattgcgcgaaggtcttgatttacctccgactgatgatccaatgcttcttgcgtacctcttggacccgtcaaacacgacgcccgaaggcgtagcccgtcgttacggcggcgagtggaccgaagatgcaggcgagcgcgcgttattggccgaacgtttgcacgccaatttattaggacgtttgcaaggcgaggaacgtctcctctggctttacgaagaagtggagaaaccattgagtcgcgtgctcgcgcatatggaagctaccggtgtcaaattagacgtggcgtatttggagaatctcagccttgaagttgctgccgaaatgcgccgcttggaggaagaagtattccgtttagcaggccactccttttatcttaattctcgcgatcagttagaacgtgtgttgttcgatgagcttggtctccctcctatcggcaagacagagaagaccggtaaacgtagcacttcagcggcggttttagaagctcttcgcgaagtccatcccattgtggacaagatcttgcagtaccgcgaactcgcgaaattgaaaggcacctatattgaccctcttccggcattagtccacccgaaaacgggacgcctccatacccgcttcaaccaaacagccacggcgaccggtcgtttgtcctcctctgatccaaaccttcagaatattccagtacgtaccccattgggccagaagatccgccgcgcgtttgtagctgaggagggttggcgtttagtggccctcgattatagccaaattgaattacgtgtccttgcccatctttctggcgatgagaacctcatccgcgtgtttcaggaaggcaaagacattcacactcaaacggcaagctggatgtttggagtgtcagctgaagcgatcgatcctttgatgcgtcgtgcagcgaagaccatcaatttcggtgttctctacggtatgagtgcccatcgtttgtcgcaggaattaggcattccctatgaggaagctgcggcgttcattcagcgctactttcaaagctatcccaaagttaaagcatggatcgagaagactctcgaagaaggccgcacacgtggttacgtagagaccttatttggacgtcgccgctatgttcccgatttaaacgctcgcgtgaaatctgtccgtgaagccgccgaacgcatggcgttcaacatgcctgtacagggcacggcagctgacctcatgaaacttgcaatggtgcgcctttttccacaattgcgtgaagttggtgcccgcatgctcttgcaggtccacgatgaactcttgttagaagcgccaaaagagcgtgcggaagaggtggcagccctcgcgaaagaggttatggaaggcgtgtggcccttagcggtgcctcttgaagtcgaagttggtattggcgaggattggttggctgccaaaggataatga

SEQ ID NO: 2124 - protein, 841 aa, synthetic construct
  REGION 1..841: note = Variant of DNA polymerase I from Thermus sp. strain 2.9
MHHHHHHGGSGMLPLFEPKGRVLLVDGHHLAYRNFFALKGLTTSRGEPVQGVYGFAKSLLKALKEDGDVVIVVFDAKAPSFRHEAYEAYKAGRAPTPEDFPRQLALMKELVDLLGLERLEVPGFEADDVLATLAKKAEREGYEVQILTADRDLFQLLSPRISVLHPEGHRITPEWLWEKYGLRPEQWVDFRALVGDPSDNIPGVKGIGEKTALKLLKEWGSLENLLKNLDQVKPESVREKILAHLEDLKLSLELSRVRTDLPLEVDFRGRREPDWEGLKAFLERLEFGSLLHEFGLLESPLPAEEAPWPPPEGAFLGYRLSRPEPMWAELLALAASAQGRVYRAEDPHGALRGLKEVRGLLAKDLAVVALREGLDLPPTDDPMLLAYLLDPSNTTPEGVARRYGGEWTEDAGERALLAERLHANLLGRLQGEERLLWLYEEVEKPLSRVLAHMEATGVKLDVAYLENLSLEVAAEMRRLEEEVFRLAGHSFYLNSRDQLERVLFDELGLPPIGKTEKTGKRSTSAAVLEALREVHPIVDKILQYRELAKLKGTYIDPLPALVHPKTGRLHTRFNQTATATGRLSSSDPNLQNIPVRTPLGQKIRRAFVAEEGWRLVALDYSQIELRVLAHLSGDENLIRVFQEGKDIHTQTASWMFGVSAEAIDPLMRRAAKTINFGVLYGMSAHRLSQELGIPYEEAAAFIQRYFQSYPKVKAWIEKTLEEGRTRGYVETLFGRRRYVPDLNARVKSVREAAERMAFNMPVQGTAADLMKLAMVRLFPQLREVGARMLLQVHDELLLEAPKERAEEVAALAKEVMEGVWPLAVPLEVEVGIGEDWLAAKG

SEQ ID NO: 2125 - DNA, 2529 bp, synthetic construct
  misc_feature 1..2529: note = Variant of DNA polymerase I from Thermus sp. strain 2.9
  source 1..2529: mol_type = other DNA
atgcaccatcatcatcatcatggcggtagcggcatgttaccgttgttcgaacctaaaggtcgcgtgcttctggttgatggccatcatctcgcgtatcgtaacttctttgccctgaaaggattaaccaccagccgtggcgagccggtacagggtgtctacggctttgcaaagtcgctcctgaaagctctgaaagaagacggtgatgtggtgattgttgtctttgatgcgaaagcgccaagttttcgccacgaagcgtacgaagcttacaaagccgggcgtgctccaacgccggaagactttcctcgccaattggcgcttatgaaggaattagtggatttgcttggcctcgaacgcttggaagttcccggtttcgaggcagacgacgtattagcgactctcgcaaagaaagccgaacgtgagggctatgaagtccagatcttgacagcagatcgcgatcttttccagcttttatctccgcgcatctcggtgttacacccggaagggcatcgtatcaccccggaatggctctgggagaaatatggtttgcgtcccgaacaatgggtggattttcgcgccttagtgggcgatccgagcgacaatattccgggagttaaaggtatcggcgagaagacggcgctcaagctccttaaagaatgggggtcgttggagaacttgcttaagaatttagatcaggtcaaaccagagtcagtgcgtgagaagattcttgcacacctcgaagacctcaaattaagcctggaattgtcccgtgtacgcaccgatttgccgctcgaagttgatttccgtggccgccgcgaacctgactgggagggtcttaaagcgtttttagagcgtcttgaatttggttcgctcttgcatgaattcggccttttagaaagcccgttaccagccgaagaagcaccttggccaccgcccgaaggcgcgtttttaggttaccgtttgagtcgcccggaaccgatgtgggccgaattattggctcttgcagcgtctgcccagggacgtgtgtatcgcgcggaagaccctcatggtgcgctccgcggcctcaaagaagtccgtggactccttgccaaagacttagctgttgttgcattgcgcgaaggtcttgatttacctccgactgatgatccaatgcttcttgcgtacctcttggacccgtcaaacacgacgcccgaaggcgtagcccgtcgttacggcggcgagtggaccgaagatgcaggtgagcgcgcgttattggccgaacgtttgcacgccaatttattaggacgtttgcaaggcgaggaacgtctcctctggctttacgaagaagtggagaaaccattgagtcgcgtgctcgcgcatatggaagctaccggtgtcaaattagacgtggcgtatttggagaatctcagccttgaagttgctgccgaaatgcgccgcttggaggaagaagtattccgtttagcaggccactccttttatcttaattctcgcgatcagttagaacgtgtgttgttcgatgaacttggtctccctccgatcggcaagacagagaagaccggtaaacgtagcacttcagcggcggttttagaagctcttcgcgaagtccatcccattgtggacaagatcttgcagtaccgcgaactcgcgaaattgaaaggcacctatattgaccctcttccggcattagtccacccgaaaacgggacgcctccatacccgcttcaaccaaacagccacggcgaccggtcgtttgtcctcctctgatccaaaccttcagaatattccagtacgtaccccattgggccagaagatccgccgcgcgtttgtagctgaggagggttggcgtttagtggccctcgattatagccaaattgaattacgtgtccttgcccatctttctggcgatgagaacctcatccgcgtgtttcaggaaggcaaagacattcacactcaaacggcaagctggatgtttggattatcagctgaagcgatcgatcctttgatgcgtcgtgcagcgaagaccatcaatttcggtgttctctacggtatgagtgcccatcgtttgtcgcaggaattaggcattccctatgaggaagctgcggcgttcattcagaagtactttcaaagctatcccaaagttaaagcatggatcgagaagactctcgaagaaggccgcacacgtggttacgtagagaccttatttggacgtcgccgctatgttcccgatttaaacgctcgcgtgaaatctgtccgtgaagccgccgaacgcatggcgttcaacatgcctgtacagggcacggcagctgacctcatgaaacttgcaatggtgcgcctttttccacaattgcgtgaagttggtgcccgcatgctcttgcaggtccacgatgaactcttgttagaagcgccaaaagagcgtgcggaagaggtggcagccctcgcgaaagaggttatggaaggcgtgtggcccttagcggtgcctcttgaagtcgaagttggtattggcgaggattggttggctgccaaaggataatga

SEQ ID NO: 2126 - protein, 841 aa, synthetic construct
  REGION 1..841: note = Variant of DNA polymerase I from Thermus sp. strain 2.9
MHHHHHHGGSGMLPLFEPKGRVLLVDGHHLAYRNFFALKGLTTSRGEPVQGVYGFAKSLLKALKEDGDVVIVVFDAKAPSFRHEAYEAYKAGRAPTPEDFPRQLALMKELVDLLGLERLEVPGFEADDVLATLAKKAEREGYEVQILTADRDLFQLLSPRISVLHPEGHRITPEWLWEKYGLRPEQWVDFRALVGDPSDNIPGVKGIGEKTALKLLKEWGSLENLLKNLDQVKPESVREKILAHLEDLKLSLELSRVRTDLPLEVDFRGRREPDWEGLKAFLERLEFGSLLHEFGLLESPLPAEEAPWPPPEGAFLGYRLSRPEPMWAELLALAASAQGRVYRAEDPHGALRGLKEVRGLLAKDLAVVALREGLDLPPTDDPMLLAYLLDPSNTTPEGVARRYGGEWTEDAGERALLAERLHANLLGRLQGEERLLWLYEEVEKPLSRVLAHMEATGVKLDVAYLENLSLEVAAEMRRLEEEVFRLAGHSFYLNSRDQLERVLFDELGLPPIGKTEKTGKRSTSAAVLEALREVHPIVDKILQYRELAKLKGTYIDPLPALVHPKTGRLHTRFNQTATATGRLSSSDPNLQNIPVRTPLGQKIRRAFVAEEGWRLVALDYSQIELRVLAHLSGDENLIRVFQEGKDIHTQTASWMFGLSAEAIDPLMRRAAKTINFGVLYGMSAHRLSQELGIPYEEAAAFIQKYFQSYPKVKAWIEKTLEEGRTRGYVETLFGRRRYVPDLNARVKSVREAAERMAFNMPVQGTAADLMKLAMVRLFPQLREVGARMLLQVHDELLLEAPKERAEEVAALAKEVMEGVWPLAVPLEVEVGIGEDWLAAKG

SEQ ID NO: 2127 - DNA, 2529 bp, synthetic construct
  misc_feature 1..2529: note = Variant of DNA polymerase I from Thermus sp. strain 2.9
  source 1..2529: mol_type = other DNA
atgcaccatcatcatcatcatggcggtagcggcatgttaccgttgttcgaacctaaaggtcgcgtgcttctggttgatggccatcatctcgcgtatcgtaacttctttgccctgaaaggattaaccaccagccgtggcgagccggtacagggtgtctacggctttgcaaagtcgctcctgaaagctctgaaagaagacggtgatgtggtgattgttgtctttgatgcgaaagcgccaagttttcgccacgaagcgtacgaagcttacaaagccgggcgtgctccaacgccggaagactttcctcgccaattggcgcttatgaaggaattagtggatttgcttggcctcgaacgcttggaagttcccggtttcgaggcagacgacgtattagcgactctcgcaaagaaagccgaacgtgagggctatgaagtccagatcttgacagcagatcgcgatcttttccagcttttatctccgcgcatctcggtgttacacccggaagggcatcgtatcaccccggaatggctctgggagaaatatggtttgcgtcccgaacaatgggtggattttcgcgccttagtgggcgatccgagcgacaatattccgggagttaaaggtatcggcgagaagacggcgctcaagctccttaaagaatgggggtcgttggagaacttgcttaagaatttagatcaggtcaaaccagagtcagtgcgtgagaagattcttgcacacctcgaagacctcaaattaagccgtgaattgtcccgtgtacgcaccgatttgccgctcgaagttgatttccgtggccgccgcgaacctgactgggagggtcttaaagcgtttttagagcgtcttgaatttggttcgctcttgcatgaattcggccttttagaaagcccgttaccagccgaagaagcaccttggccaccgcccgaaggcgcgtttttaggttaccgtttgagtcgcccggaaccgatgtgggccgaattattggctcttgcagcgtctgcccagggacgtgtgtatcgcgcggaagaccctcatggtgcgctccgcggcctcaaagaagtccgtggactccttgccaaagacttagctgttgttgcattgcgcgaaggtcttgatttacctccgactgatgatccaatgcttcttgcgtacctcttggacccgtcaaacacgacgcccgaaggcgtagcccgtcgttacggcggcgagtggaccgaagatgcagctgagcgcgcgttattggccgaacgtttgcacgccaatttattaggacgtttgcaaggcgaggaacgtctcctctggctttacgaagaagtggagaaaccattgagtcgcgtgctcgcgcatatggaagctaccggtgtcaaattagacgtggcgtatttggaggcgctcagccttgaagttgctgccgaaatgcgccgcttggaggaagaagtattccgtttagcaggccactccttttatcttaattctcgcgatcagttagaacgtgtgttgttcgatgaacttggtctccctccgatcggcaagacagagaagaccggtaaacgtagcacttcagcggcggttttagaagctcttcgcgaagtccatcccattgtggacaagatcttgcagtaccgcgaactcgcgaaattgaaaggcacctatattgaccctcttccggcattagtccacccgaaaacgggacgcctccatacccgcttcaaccaaacagccacggcgaccggtcgtttgtcctcctctgatccaaaccttcagaatattccagtacgtaccccattgggccagaagatccgccgcgcgtttgtagctgaggagggttggcgtttagtggccctcgattatagccaaattgaattacgtgtccttgcccatctttctggcgatgagaacctcatccgcgtgtttcaggaaggcaaagacattcacactcaaacggcaagctggatgtttggagtgtcagctgaagcgatcgatcctttgatgcgtcgtgcagcgaagaccatcaatttcggtgttctctacggtatgagtgcccatcgtttgtcgcaggaattaggcattccctatgaagaagctgcggcgttcattcagcgctactttcaaagctatcccaaagttaaagcatggatcgagaagactctcgaagaaggccgcacacgtggttacgtagagaccttatttggacgtcgccgctatgttcccgatttaaacgctcgcgtgaaatctgtccgtgaagccgccgaacgcatggcgttcaacatgcctgtacagggcacggcagctgacctcatgaaacttgcaatggtgcgcctttttccacaattgcgtgaagttggtgcccgcatgctcttgcaggtccacgatgaactcttgttagaagcgccaaaagagcgtgcggaagaggtggcagccctcgcgaaagaggttatggaaggcgtgtggcccttagcggtgcctcttgaagtcgaagttggtattggcgaggattggttggctgccaaaggataatga

SEQ ID NO: 2128 - protein, 841 aa, synthetic construct
  REGION 1..841: note = Variant of DNA polymerase I from Thermus sp. strain 2.9
MHHHHHHGGSGMLPLFEPKGRVLLVDGHHLAYRNFFALKGLTTSRGEPVQGVYGFAKSLLKALKEDGDVVIVVFDAKAPSFRHEAYEAYKAGRAPTPEDFPRQLALMKELVDLLGLERLEVPGFEADDVLATLAKKAEREGYEVQILTADRDLFQLLSPRISVLHPEGHRITPEWLWEKYGLRPEQWVDFRALVGDPSDNIPGVKGIGEKTALKLLKEWGSLENLLKNLDQVKPESVREKILAHLEDLKLSRELSRVRTDLPLEVDFRGRREPDWEGLKAFLERLEFGSLLHEFGLLESPLPAEEAPWPPPEGAFLGYRLSRPEPMWAELLALAASAQGRVYRAEDPHGALRGLKEVRGLLAKDLAVVALREGLDLPPTDDPMLLAYLLDPSNTTPEGVARRYGGEWTEDAAERALLAERLHANLLGRLQGEERLLWLYEEVEKPLSRVLAHMEATGVKLDVAYLEALSLEVAAEMRRLEEEVFRLAGHSFYLNSRDQLERVLFDELGLPPIGKTEKTGKRSTSAAVLEALREVHPIVDKILQYRELAKLKGTYIDPLPALVHPKTGRLHTRFNQTATATGRLSSSDPNLQNIPVRTPLGQKIRRAFVAEEGWRLVALDYSQIELRVLAHLSGDENLIRVFQEGKDIHTQTASWMFGVSAEAIDPLMRRAAKTINFGVLYGMSAHRLSQELGIPYEEAAAFIQRYFQSYPKVKAWIEKTLEEGRTRGYVETLFGRRRYVPDLNARVKSVREAAERMAFNMPVQGTAADLMKLAMVRLFPQLREVGARMLLQVHDELLLEAPKERAEEVAALAKEVMEGVWPLAVPLEVEVGIGEDWLAAKG

SEQ ID NO: 2129 - DNA, 2529 bp, synthetic construct
  misc_feature 1..2529: note = Variant of DNA polymerase I from Thermus sp. strain 2.9
  source 1..2529: mol_type = other DNA
atgcaccatcatcatcatcatggcggtagcggcatgttaccgttgttcgaacctaaaggtcgcgtgcttctggttgatggccatcatctcgcgtatcgtaacttctttgccctgaaaggattaaccaccagccgtggcgagccggtacagggtgtctacggctttgcaaagtcgctcctgaaagctctgaaagaagacggtgatgtggtgattgttgtctttgatgcgaaagcgccaagttttcgccacgaagcgtacgaagcttacaaagccgggcgtgctccaacgccggaagactttcctcgccaattggcgcttatgaaggaattagtggatttgcttggcctcgaacgcttggaagttcccggtttcgaggcagacgacgtattagcgactctcgcaaagaaagccgaacgtgagggctatgaagtccagatcttgacagcagatcgcgatcttttccagcttttatctccgcgcatctcggtgttacacccggaagggcatcgtatcaccccggaatggctctgggagaaatatggtttgcgtcccgaacaatgggtggattttcgcgccttagtgggcgatccgagcgacaatattccgggagttaaaggtatcggcgagaagacggcgctcaagctccttaaagaatgggggtcgttggagaacttgcttaagaatttagatcaggtcaaaccagagtcagtgcgtgagaagattcttgcacacctcgaagacctcaaattaagccgtgaattgtcccgtgtacgcaccgatttgccgctcgaagttgatttccgtggccgccgcgaacctgactgggagggtcttaaagcgtttttagagcgtcttgaatttggttcgctcttgcatgaattcggccttttagaaagcccgttaccagccgaagaagcaccttggccaccgcccgaaggcgcgtttttaggttaccgtttgagtcgcccggaaccgatgtgggccgaattattggctcttgcagcgtctgcccagggacgtgtgtatcgcgcggaagaccctcatggtgcgctccgcggcctcaaagaagtccgtggactccttgccaaagacttagctgttgttgcattgcgcgaaggtcttgatttacctccgactgatgatccaatgcttcttgcgtacctcttggacccgtcaaacacgacgcccgaaggcgtagcccgtcgttacggcggcgagtggaccgaagatgcaggtgagcgcgcgttattggccgaacgtttgcacgccaatttattaggacgtttgcaaggcgaggaacgtctcctctggctttacgaagaagtggagaaaccattgagtcgcgtgctcgcgcatatggaagctaccggtgtcaaattagacgtggcgtatttggagaatctcagccttgaagttgctgccgaaatgcgccgcttggaggaagaagtattccgtttagcaggccactccttttatcttaattctcgcgatcagttagaacgtgtgttgttcgatgaacttggtctccctcctatcggcaagacagagaagaccggtaaacgtagcacttcagcggcggttttagaagctcttcgcgaagtccatcccattgtggacaagatcttgcagtaccgcgaactcgcgaaattgaaaggcacctatattgaccctcttccggcattagtccacccgaaaacgggacgcctccatacccgcttcaaccaaacagccacggcgaccggtcgtttgtcctcctctgatccaaaccttcagaatattccagtacgtaccccattgggccagaagatccgccgcgcgtttgtagctgaggagggttggcgtttagtggccctcgattatagccaaattgaattacgtgtccttgcccatctttctggcgatgagaacctcatccgcgtgtttcaggaaggcaaagacattcacactcaaacggcaagctggatgtttggattatcagctgaagcgatcgatcctttgatgcgtcgtgcagcgaagaccatcaatttcggtgttctctacggtatgagtgcccatcgtttgtcgcaggaattaggcattccctatgaggaagctgcggcgttcattcagcgctactttcaaagctatcccaaagttaaagcatggatcgagaagactctcgaagaaggccgcacacgtggttacgtagagaccttatttggacgtcgccgctatgttcccgatttaaacgctcgcgtgaaatctgtccgtgaagccgccgaacgcatggcgttcaacatgcctgtacagggcacggcagctgacctcatgaaacttgcaatggtgcgcctttttccacaattgcgtgaagttggtgcccgcatgctcttgcaggtccacgatgaactcttgttagaagcgccaaaagagcgtgcggaagaggtggcagccctcgcgaaagaggttatggaaggcgtgtggcccttagcggtgcctcttgaagtcgaagttggtattggcgaggattggttggctgccaaaggataatga

SEQ ID NO: 2130 - protein, 841 aa, synthetic construct
  REGION 1..841: note = Variant of DNA polymerase I from Thermus sp. strain 2.9
MHHHHHHGGSGMLPLFEPKGRVLLVDGHHLAYRNFFALKGLTTSRGEPVQGVYGFAKSLLKALKEDGDVVIVVFDAKAPSFRHEAYEAYKAGRAPTPEDFPRQLALMKELVDLLGLERLEVPGFEADDVLATLAKKAEREGYEVQILTADRDLFQLLSPRISVLHPEGHRITPEWLWEKYGLRPEQWVDFRALVGDPSDNIPGVKGIGEKTALKLLKEWGSLENLLKNLDQVKPESVREKILAHLEDLKLSRELSRVRTDLPLEVDFRGRREPDWEGLKAFLERLEFGSLLHEFGLLESPLPAEEAPWPPPEGAFLGYRLSRPEPMWAELLALAASAQGRVYRAEDPHGALRGLKEVRGLLAKDLAVVALREGLDLPPTDDPMLLAYLLDPSNTTPEGVARRYGGEWTEDAGERALLAERLHANLLGRLQGEERLLWLYEEVEKPLSRVLAHMEATGVKLDVAYLENLSLEVAAEMRRLEEEVFRLAGHSFYLNSRDQLERVLFDELGLPPIGKTEKTGKRSTSAAVLEALREVHPIVDKILQYRELAKLKGTYIDPLPALVHPKTGRLHTRFNQTATATGRLSSSDPNLQNIPVRTPLGQKIRRAFVAEEGWRLVALDYSQIELRVLAHLSGDENLIRVFQEGKDIHTQTASWMFGLSAEAIDPLMRRAAKTINFGVLYGMSAHRLSQELGIPYEEAAAFIQRYFQSYPKVKAWIEKTLEEGRTRGYVETLFGRRRYVPDLNARVKSVREAAERMAFNMPVQGTAADLMKLAMVRLFPQLREVGARMLLQVHDELLLEAPKERAEEVAALAKEVMEGVWPLAVPLEVEVGIGEDWLAAKG

SEQ ID NO: 2131 - DNA, 2529 bp, synthetic construct
  misc_feature 1..2529: note = Variant of DNA polymerase I from Thermus sp. strain 2.9
  source 1..2529: mol_type = other DNA
atgcaccatcatcatcatcatggcggtagcggcgtgttaccggtgttcgagcctaaaggtcgcgtgcttctggttgatggccatcatctcgcgtatcgtaacttctttgccctgaaaggattaaccaccagccgtggcgagccggtacagggtgtctacggctttgcaaagtcgctcctgaaagctctgaaagaagacggtgatgtggtgattgttgtctttgatgcgaaagcgccaagttttcgccacgaagcgtacgaagcttacaaagccgggcgtgctccaacgccggaagactttcctcgccaattggcgcttatgaaggaattagtggatttgcttggcctcgaacgcttggaagttcccggtttcgaggcagacgacgtattagcgactctcgcaaagaaagccgaacgtgagggctatgaagtccagatcttgacagcagatcgcgatcttttccagcttttatctccgcgcatctcggtgttacacccggaagggcatcgtatcaccccggaatggctctgggagaaatatggtttgcgtcccgaacaatgggtggattttcgcgccttagcaggcgatccgagcgacaatattccgggagttaaaggtatcggcgagaagacggcgctcaagctccttaaagaatgggggtcgttggagaacttgcttaagaatttagatcaggtcaaaccagagtcagtgcgtgagaagattcttgcacacctcgaagacctcaaattaagccgcgaattgtcccgtgtacgcaccgatttgccgctcgaagttgatttccgtggccgccgcgaacctgactgggagggtcttaaagcgtttttagagcgtcttgaatttggttcgctcttgcatgaattcggccttttagaaagcccgttaccagccgaggaagcaccttggccaccgcccgaaggcgcgtttttaggttaccgtttgagtcgcccggaaccgatgtgggccgaattattggctcttgcagcgtctgcccagggacgtgtgtatcgcgcggaagaccctcatggtgcgctccgcggcctcttcgaagtccgcggactccttgccaaagacttagctgttgttgcattgcgcgaaggtcttgatttacctccgactgatgatccaatgcttcttgcgtacctcttggacccgtcaaacacgacgcccgaaggcgtagcccgtcgttacggcggcgagtggaccgaagatgcagcgaaacgcgcgttattggccgaacgtttgcacgccaatttattaggacgtttgcaaggcgaggaacgtctcctctggctttacgaagaagtggagaaaccattgagtcgcgtgctcgcgcatatggaagctaccggtgtcaaattagacgtggcgtatttggaggcgctcagccttgaagttgctgccgaaatgcgccgcttggaggaagaagtattccgtttagcaggccattcctttcgccttaattctcgcgatcagttagaacgtgtgttgttcgatgaacttggtctccctcctatcggcaagacagagaagaccggtaaacgtagcacttcagcggcggttttagaagctcttcgcgaagtccatcccattgtggacaagatcttgcagtaccgcgaactcgcgaaattgaaaggcacctatattgaccctcttccggcattagtccacccgaaaacgggacgcctccatacccgcttcaaccaaacagccacggcgaccggtcgtttgtcctcctctgatccaaaccttcagaatattccagtacgtaccccattgggccagaagatccgccgcgcgtttgtagctgaggagggttggcgtttagtggccctcgattatagccaaattgaattacgtgtccttgcccatctttctggcgatgagaacctcatccgcgtgtttcaggaaggcaaagacattcacactcaaacggcaagctggatgtttggagtgtcagctgaagcgatcgatcctttgatgcgtcgtgcagcgaagaccatcaatttcggtgttctctacggtatgagtgcccaccgtttgtcgcaggaattaggcattccctatgaagaagctgcggcgttcattcagaaatactttcaaagctatcccaaagttaaagcatggatcgagaagactctcgaagaaggccgcacacgtggttacgtagagaccttatttggacgtcgccgctatgttcccgatttaaacgctcgcgtgaaatctgtccgtgaagccgccgaacgcatggcgttcaacatgcctgtacagggcacggcagctgacctcatgaaacttgcaatggtgcgcctttttccacaattgcgtgaagttggtgcccgcatgctcttgcaggtccacgatgaactcttgttagaagcgccaaaagagcgtgcggaagaggtggcagccctcgcgaaagaggttatggaaggcgtgtggcccttagcggtgcctcttgaagtcgaagttggtattggcgaggattggctggctgccaaaggataatga

SEQ ID NO: 2132 - protein, 841 aa, synthetic construct
  REGION 1..841: note = Variant of DNA polymerase I from Thermus sp. strain 2.9
MHHHHHHGGSGVLPVFEPKGRVLLVDGHHLAYRNFFALKGLTTSRGEPVQGVYGFAKSLLKALKEDGDVVIVVFDAKAPSFRHEAYEAYKAGRAPTPEDFPRQLALMKELVDLLGLERLEVPGFEADDVLATLAKKAEREGYEVQILTADRDLFQLLSPRISVLHPEGHRITPEWLWEKYGLRPEQWVDFRALAGDPSDNIPGVKGIGEKTALKLLKEWGSLENLLKNLDQVKPESVREKILAHLEDLKLSRELSRVRTDLPLEVDFRGRREPDWEGLKAFLERLEFGSLLHEFGLLESPLPAEEAPWPPPEGAFLGYRLSRPEPMWAELLALAASAQGRVYRAEDPHGALRGLFEVRGLLAKDLAVVALREGLDLPPTDDPMLLAYLLDPSNTTPEGVARRYGGEWTEDAAKRALLAERLHANLLGRLQGEERLLWLYEEVEKPLSRVLAHMEATGVKLDVAYLEALSLEVAAEMRRLEEEVFRLAGHSFRLNSRDQLERVLFDELGLPPIGKTEKTGKRSTSAAVLEALREVHPIVDKILQYRELAKLKGTYIDPLPALVHPKTGRLHTRFNQTATATGRLSSSDPNLQNIPVRTPLGQKIRRAFVAEEGWRLVALDYSQIELRVLAHLSGDENLIRVFQEGKDIHTQTASWMFGVSAEAIDPLMRRAAKTINFGVLYGMSAHRLSQELGIPYEEAAAFIQKYFQSYPKVKAWIEKTLEEGRTRGYVETLFGRRRYVPDLNARVKSVREAAERMAFNMPVQGTAADLMKLAMVRLFPQLREVGARMLLQVHDELLLEAPKERAEEVAALAKEVMEGVWPLAVPLEVEVGIGEDWLAAKG

SEQ ID NO: 2133 - DNA, 2529 bp, synthetic construct
  misc_feature 1..2529: note = Variant of DNA polymerase I from Thermus sp. strain 2.9
  source 1..2529: mol_type = other DNA
atgcaccatcatcatcatcatggcggtagcggcgtgttaccggtgttcgagcctaaaggtcgcgtgcttctggttgatggccatcatctcgcgtatcgtaacttctttgccctgaaaggattaaccaccagccgtggcgagccggtacagggtgtctacggctttgcaaagtcgctcctgaaagctctgaaagaagacggtgatgtggtgattgttgtctttgatgcgaaagcgccaagttttcgccacgaagcgtacgaagcttacaaagccgggcgtgctccaacgccggaagactttcctcgccaattggcgcttatgaaggaattagtggatttgcttggcctcgaacgcttggaagttcccggtttcgaggcagacgacgtattagcgactctcgcaaagaaagccgaacgtgagggctatgaagtccagatcttgacagcagatcgcgatcttttccagcttttatctccgcgcatctcggtgttacacccggaagggcatcgtatcaccccggaatggctctgggagaaatatggtttgcgtcccgaacaatgggtggattttcgcgccttagcaggcgatccgagcgacaatattccgggagttaaaggtatcggcgagaagacggcgctcaagctccttaaagaatgggggtcgttggagaacttgcttaagaatttagatcaggtcaaaccagagtcagtgcgtgagaagattcttgcacacctcgaagacctcaaattaagccgcgaattgtcccgtgtacgcaccgatttgccgctcgaagttgatttccgtcgccgccgcgaacctgactgggagggtcttaaagcgtttttagagcgtcttgaatttggttcgctcttgcatgaattcggccttttagaaagcccgttaccagccgaggaagcaccttggccaccgcccgaaggcgcgtttttaggttaccgtttgagtcgcccggaaccgatgtgggccgaattattggctcttgcagcgtctgcccagggacgtgtgtatcgcgcggaagaccctcatggtgcgctccgcggcctcttcgaagtcaatggactccttgccaaagacttagctgttgttgcattgcgcgaaggtcttgatttacctccgactgatgatccaatgcttcttgcgtacctcttggacccgtcaaacacgacgcccgaaggcgtagcccgtcgttacggcggcgagtggaccgaagatgcagcgaaacgcgcgttattggccgaacgtttgcacgccaatttattaggacgtttgcaaggcgaggaacgtctcctctggctttacgaagaagtggagaaaccattgagtcgcgtgctcgcgcatatggaagctaccggtgtcaaattagacgtggcgtatttggaggcgctcagccttgaagttgctgccgaaatgcgccgcttggaggaagaagtattccgtttagcaggccactcctttcgccttaattctcgcgatcagttagaacgtgtgttgttcgatgaacttggtctccctcctatcggcaagacagagaagaccggtaaacgtagcacttcagcggcggttttagaagctcttcgcgaagtccatccaattgtggacaagatcttgcagtaccgcgaactcgcgaaattgaaaggcacctatattgaccctcttccggcattagtccacccgaaaacgggacgcctccatacccgcttcaaccaaacagccacggcgaccggtcgtttgtcctcctctgatccaaaccttcagaatattccagtacgtaccccattgggccagaagatccgccgcgcgtttgtagctgaggagggttggcgtttagtggccctcgattatagccaaattgaattacgtgtccttgcccatctttctggcgatgagaacctcatccgcgtgtttcaggaaggcaaagacattcacactcaaacggcaagctggatgtttggagtgtcagctgaagcgatcgatcctttgatgcgtcgtgcagcgaagaccatcaatttcggtgttctctacggtatgagtgcccatcgtttgtcgcaggaattaggcattccctatgaagaagctgcggcgttcattcagaaatactttcaaagctatcccaaagttaaagcatggatcgagaagactctcgaagaaggccgcacacgtggttacgtagagaccttatttggacgtcgccgctatgttcccgatttaaacgctcgcgtgaaatctgtccgtgaagccgccgaacgcatggcgttcaacatgcctgtacagggcacggcagctgacctcatgaaacttgcaatggtgcgcctttttccacaattgcgtgaagttggtgcccgcatgctcttgcaggtccacgatgaactcttgttagaagcgccaaaagagcgtgcggaagaggtggcagccctcgcgaaagaggttatggaaggcgtgtggcccttagcggtgcctcttgaagtcgaagttggtattggcgaggattggctggctgccaaaggataatga

SEQ ID NO: 2134 - protein, 841 aa, synthetic construct
  REGION 1..841: note = Variant of DNA polymerase I from Thermus sp. strain 2.9
MHHHHHHGGSGVLPVFEPKGRVLLVDGHHLAYRNFFALKGLTTSRGEPVQGVYGFAKSLLKALKEDGDVVIVVFDAKAPSFRHEAYEAYKAGRAPTPEDFPRQLALMKELVDLLGLERLEVPGFEADDVLATLAKKAEREGYEVQILTADRDLFQLLSPRISVLHPEGHRITPEWLWEKYGLRPEQWVDFRALAGDPSDNIPGVKGIGEKTALKLLKEWGSLENLLKNLDQVKPESVREKILAHLEDLKLSRELSRVRTDLPLEVDFRRRREPDWEGLKAFLERLEFGSLLHEFGLLESPLPAEEAPWPPPEGAFLGYRLSRPEPMWAELLALAASAQGRVYRAEDPHGALRGLFEVNGLLAKDLAVVALREGLDLPPTDDPMLLAYLLDPSNTTPEGVARRYGGEWTEDAAKRALLAERLHANLLGRLQGEERLLWLYEEVEKPLSRVLAHMEATGVKLDVAYLEALSLEVAAEMRRLEEEVFRLAGHSFRLNSRDQLERVLFDELGLPPIGKTEKTGKRSTSAAVLEALREVHPIVDKILQYRELAKLKGTYIDPLPALVHPKTGRLHTRFNQTATATGRLSSSDPNLQNIPVRTPLGQKIRRAFVAEEGWRLVALDYSQIELRVLAHLSGDENLIRVFQEGKDIHTQTASWMFGVSAEAIDPLMRRAAKTINFGVLYGMSAHRLSQELGIPYEEAAAFIQKYFQSYPKVKAWIEKTLEEGRTRGYVETLFGRRRYVPDLNARVKSVREAAERMAFNMPVQGTAADLMKLAMVRLFPQLREVGARMLLQVHDELLLEAPKERAEEVAALAKEVMEGVWPLAVPLEVEVGIGEDWLAAKG

SEQ ID NO: 2135 - DNA, 2529 bp, synthetic construct
  misc_feature 1..2529: note = Variant of DNA polymerase I from Thermus sp. strain 2.9
  source 1..2529: mol_type = other DNA
atgcaccatcatcatcatcatggcggtagcggcgtgttaccggtgttcgagcctaaaggtcgcgtgcttctggttgatggccatcatctcgcgtatcgtaacttctttgccctgaaaggattaaccaccagccgtggcgagccggtacagggtgtctacggctttgcaaagtcgctcctgaaagctctgaaagaagacggtgatgtggtgattgttgtctttgatgcgaaagcgccaagttttcgccacgaagcgtacgaagcttacaaagccgggcgtgctccaacgccggaagactttcctcgccaattggcgcttatgaaggaattagtggatttgcttggcctcgaacgcttggaagttcccggtttcgaggcagacgacgtattagcgactctcgcaaagaaagccgaacgtgagggctatgaagtccagatcttgacagcagatcgcgatcttttccagcttttatctccgcgcatctcggtgttacacccggaagggcatcgtatcaccccggaatggctctgggagaaatatggtttgcgtcccgaacaatgggtggattttcgcgccttagtcggcgatccgagcgacaatattccgggagttaaaggtatcggcgagaagacggcgctcaagctccttaaagaatgggggtcgttggagaacttgcttaagaatttagatcaggtcaaaccagagtcagtgcgtgagaagattcttgcacacctcgaagacctcaaattaagccgtgaattgtcccgtgtacgcaccgatttgccgctcgaagttgatttccgtcgccgccgcgaacctgactgggagggtcttaaagcgtttttagagcgtcttgaatttggttcgctcttgcatgaattcggccttttagaaagcccgttaccagccgaggaagcaccttggccaccgcccgaaggcgcgtttttaggttaccgtttgagtcgcccggaaccgatgtgggccgaattactggctcttgcagcgtctgcccagggacgtgtgtatcgcgcggaagaccctcatggtgcgctccgcggcctcttcgaagtccgtggactccttgccaaagacttagctgttgttgcattgcgcgaaggtcttgatttacctccgactgatgatccaatgcttcttgcgtacctcttggacccgtcaaacacgacgcccgaaggcgtagcccgtcgttacggcggcgagtggaccgaagatgcagcgaaacgcgcgttattggccgaacgtttgcacgccaatttattaggacgtttgcaaggcgaggaacgtctcctctggctttacgaagaagtggagaaaccattgagtcgcgtgctcgcgcatatggaagctaccggtgtcaaattagacgtggcgtatttggagaatctcagccttgaagttgctgccgaaatgcgccgcttggaggaagaagtattccgtttagcaggccattcctttcgccttaattctcgcgatcagttagaacgtgtgttgttcgatgaacttggtctccctcctatcggcaagacagagaagaccggtaaacgtagcacttcagcggcggttttagaagctcttcgcgaagtccatccaattgtggacaagatcttgcagtaccgcgaactcgcgaaattgaaaggcacctatattgaccctcttccggcattagtccacccgaaaacgggacgcctccatacccgcttcaaccaaacagccacggcgaccggtcgtttgtcctcctctgatccaaaccttcagaacattccagtacgtaccccattgggccagaagatccgccgcgcgtttgtagctgaggagggttggcgtttagtggccctcgattatagccaaattgaattacgtgtccttgcccatctttctggcgatgagaacctcatccgcgtgtttcaggaaggcaaagacattcacactcaaacggcaagctggatgtttggactgtcagctgaagcgatcgatcctttgatgcgtcgtgcagcgaagaccatcaatttcggtgttctctacggtatgagtgcccaccgtttgtcgcaggaattaggcattccctatgaagaagctgcggcgttcattcagaaatactttcaaagctatcccaaagttaaagcatggatcgagaagactctccgtgaaggccgcacacgtggttacgtagagaccttatttggacgtcgccgctatgttcccgatttaaacgctcgcgtgaaatctgtccgtgaagccgccgaacgcatggcgttcaacatgcctgtacagggcacggcagctgacctcatgaaacttgcaatggtgcgcctttttccacaattgcgtgaagttggtgcccgcatgctcttgcaggtccacgatgaactcttgttagaagcgccaaaagagcgtgcggaagaggtggcagccctcgcgaaagaggttatggaaggcgtgtggcccttagcggtgcctcttgaagtcgaagttggtattggcgaggattggctggctgccaaaggataatga

SEQ ID NO: 2136 - protein, 841 aa, synthetic construct
  REGION 1..841: note = Variant of DNA polymerase I from Thermus sp. strain 2.9
MHHHHHHGGSGVLPVFEPKGRVLLVDGHHLAYRNFFALKGLTTSRGEPVQGVYGFAKSLLKALKEDGDVVIVVFDAKAPSFRHEAYEAYKAGRAPTPEDFPRQLALMKELVDLLGLERLEVPGFEADDVLATLAKKAEREGYEVQILTADRDLFQLLSPRISVLHPEGHRITPEWLWEKYGLRPEQWVDFRALVGDPSDNIPGVKGIGEKTALKLLKEWGSLENLLKNLDQVKPESVREKILAHLEDLKLSRELSRVRTDLPLEVDFRRRREPDWEGLKAFLERLEFGSLLHEFGLLESPLPAEEAPWPPPEGAFLGYRLSRPEPMWAELLALAASAQGRVYRAEDPHGALRGLFEVRGLLAKDLAVVALREGLDLPPTDDPMLLAYLLDPSNTTPEGVARRYGGEWTEDAAKRALLAERLHANLLGRLQGEERLLWLYEEVEKPLSRVLAHMEATGVKLDVAYLENLSLEVAAEMRRLEEEVFRLAGHSFRLNSRDQLERVLFDELGLPPIGKTEKTGKRSTSAAVLEALREVHPIVDKILQYRELAKLKGTYIDPLPALVHPKTGRLHTRFNQTATATGRLSSSDPNLQNIPVRTPLGQKIRRAFVAEEGWRLVALDYSQIELRVLAHLSGDENLIRVFQEGKDIHTQTASWMFGLSAEAIDPLMRRAAKTINFGVLYGMSAHRLSQELGIPYEEAAAFIQKYFQSYPKVKAWIEKTLREGRTRGYVETLFGRRRYVPDLNARVKSVREAAERMAFNMPVQGTAADLMKLAMVRLFPQLREVGARMLLQVHDELLLEAPKERAEEVAALAKEVMEGVWPLAVPLEVEVGIGEDWLAAKG

SEQ ID NO: 2137 - DNA, 2529 bp, synthetic construct
  misc_feature 1..2529: note = Variant of DNA polymerase I from Thermus sp. strain 2.9
  source 1..2529: mol_type = other DNA
atgcaccatcatcatcatcatggcggtagcggcgtgttaccggtgttcgagcctaaaggtcgcgtgcttctggttgatggccatcatctcgcgtatcgtaacttctttgccctgaaaggattaaccaccagccgtggcgagccggtacagggtgtctacggctttgcaaagtcgctcctgaaagctctgaaagaagacggtgatgtggtgattgttgtctttgatgcgaaagcgccaagttttcgccacgaagcgtacgaagcttacaaagccgggcgtgctccaacgccggaagactttcctcgccaattggcgcttatgaaggaattagtggatttgcttggcctcgaacgcttggaagttcccggtttcgaggcagacgacgtattagcgactctcgcaaagaaagccgaacgtgagggctatgaagtccagatcttgacagcagatcgcgatcttttccagcttttatctccgcgcatctcggtgttacacccggaagggcatcgtatcaccccggaatggctctgggagaaatatggtttgcgtcccgaacaatgggtggattttcgcgccttagcaggcgatccgagcgacaatattccgggagttaaaggtatcggcgagaagacggcgctcaagctccttaaagaatgggggtcgttggagaacttgcttaagaatttagatcaggtcaaaccagagtcagtgcgtgagaagattcttgcacacctcgaagacctcaaattaagccgcgaattgtcccgtgtacgcaccgatttgccgctcgaagttgatttccgtcgccgccgcgaacctgactgggagggtcttaaagcgtttttagagcgtcttgaatttggttcgctcttgcatgaattcggccttttagaaagcccgttaccagccggggaagcaccttggccaccgcccgaaggcgcgtttttaggttaccgtttgagtcgcccggaaccgatgtgggccgaattactggctcttgcagcgtctgcccagggacgtgtgtatcgcgcggaagaccctcatggtgcgctccgcggcctcttcgaagtccgcggactccttgccaaagacttagctgttgttgcattgcgcgaaggtcttgatttacctccgactgatgatccaatgcttcttgcgtacctcttggacccgtcaaacacgacgcccgaaggcgtagcccgtcgttacggcggcgagtggaccgaagatgcagcgaaacgcgcgttattggccgaacgtttgcacgccaatttattaggacgtttgcaaggcgaggaacgtctcctctggctttacgaagaagtggagaaaccattgagtcgcgtgctcgcgcatatggaagctaccggtgtcaaattagacgtggcgtatttggaggcgctcagccttgaagttgctgccgaaatgcgccgcttggaggaagaagtattccgtttagcaggccgttcctttcgccttaattctcgcgatcagttagaacgtgtgttgttcgatgaacttggtctccctcctatcggcaagacagagaagaccggtaaacgtagcacttcagcggcggttttagaagctcttcgcgaagtccatcccattgtggacaagatcttgcagtaccgcgaactcgcgaaattgaaaggcacctatattgaccctcttccggcattagtccacccgaaaacgggacgcctccatacccgcttcaaccaaacagccacggcgaccggtcgtttgtcctcctctgatccaaaccttcagaatattccagtacgtaccccattgggccagaagatccgccgcgcgtttgtagctgaggagggttggcgtttagtggccctcgattatagccaaattgaattacgtgtccttgcccatctttctggcgatgagaacctcatccgcgtgtttcaggaaggcaaagacattcacactcaaacggcaagctggatgtttggagtgtcagctgaagcgatcgatcctttgatgcgtcgtgcagcgaagaccatcaatttcggtgttctctacggtatgagtgcccatcgtttgtcgcaggaattaggcattccctatgaagaagctgcggcgttcattcagaaatactttcaaagctatcccaaagttaaagcatggatcgagaagactctccgtgaaggccgcacacgtggttacgtagagaccttatttggacgtcgccgctatgttcccgatttaaacgctcgcgtgaaatctgtccgtgaagccgccgaacgcatggcgttcaacatgcctgtacagggcacggcagctgacctcatgaaacttgcaatggtgcgcctttttccacaattgcgtgaagttggtgcccgcatgctcttgcaggtccacgatgaactcttgttagaagcgccaaaagagcgtgcggaagaggtggcagccctcgcgaaagaggttatggaaggcgtgtggcccttagcggtgcctcttgaagtcgaagttggtattggcgaggattggctggctgccaaaggataatga

SEQ ID NO: 2138 - protein, 841 aa, synthetic construct
  REGION 1..841: note = Variant of DNA polymerase I from Thermus sp. strain 2.9
MHHHHHHGGSGVLPVFEPKGRVLLVDGHHLAYRNFFALKGLTTSRGEPVQGVYGFAKSLLKALKEDGDVVIVVFDAKAPSFRHEAYEAYKAGRAPTPEDFPRQLALMKELVDLLGLERLEVPGFEADDVLATLAKKAEREGYEVQILTADRDLFQLLSPRISVLHPEGHRITPEWLWEKYGLRPEQWVDFRALAGDPSDNIPGVKGIGEKTALKLLKEWGSLENLLKNLDQVKPESVREKILAHLEDLKLSRELSRVRTDLPLEVDFRRRREPDWEGLKAFLERLEFGSLLHEFGLLESPLPAGEAPWPPPEGAFLGYRLSRPEPMWAELLALAASAQGRVYRAEDPHGALRGLFEVRGLLAKDLAVVALREGLDLPPTDDPMLLAYLLDPSNTTPEGVARRYGGEWTEDAAKRALLAERLHANLLGRLQGEERLLWLYEEVEKPLSRVLAHMEATGVKLDVAYLEALSLEVAAEMRRLEEEVFRLAGRSFRLNSRDQLERVLFDELGLPPIGKTEKTGKRSTSAAVLEALREVHPIVDKILQYRELAKLKGTYIDPLPALVHPKTGRLHTRFNQTATATGRLSSSDPNLQNIPVRTPLGQKIRRAFVAEEGWRLVALDYSQIELRVLAHLSGDENLIRVFQEGKDIHTQTASWMFGVSAEAIDPLMRRAAKTINFGVLYGMSAHRLSQELGIPYEEAAAFIQKYFQSYPKVKAWIEKTLREGRTRGYVETLFGRRRYVPDLNARVKSVREAAERMAFNMPVQGTAADLMKLAMVRLFPQLREVGARMLLQVHDELLLEAPKERAEEVAALAKEVMEGVWPLAVPLEVEVGIGEDWLAAKG

SEQ ID NO: 2139 - DNA, 2529 bp, synthetic construct
  misc_feature 1..2529: note = Variant of DNA polymerase I from Thermus sp. strain 2.9
  source 1..2529: mol_type = other DNA
atgcaccatcatcatcatcatggcggtagcggcgtgttaccggtgttcgagcctaaaggtcgcgtgcttctggttgatggccatcatctcgcgtatcgtaacttctttgccctgaaaggattaaccaccagccgtggcgagccggtacagggtgtctacggctttgcaaagtcgctcctgaaagctctgaaagaagacggtgatgtggtgattgttgtctttgatgcgaaagcgccaagttttcgccacgaagcgtacgaagcttacaaagccgggcgtgctccaacgccggaagactttcctcgccaattggcgcttatgaaggaattagtggatttgcttggcctcgaacgcttggaagttcccggtttcgaggcagacgacgtattagcgactctcgcaaagaaagccgaacgtgagggctatgaagtccagatcttgacagcagatcgcgatcttttccagcttttatctccgcgcatctcggtgttacacccggaagggcatcgtatcaccccggaatggctctgggagaaatatggtttgcgtcccgaacaatgggtggattttcgcgccttagccggcgatccgagcgacaatattccgggagttaaaggtatcggcgagaagacggcgctcaagctccttaaagaatgggggtcgttggagaacttgcttaagaatttagatcaggtcaaaccagagtcagtgcgtgagaagattcttgcacacctcgaagacctcaaattaagccgcgaattgtcccgtgtacgcaccgatttgccgctcgaagttgatttccgtcgccgccgcgaacctgactgggagggtcttaaagcgtttttagagcgtcttgaatttggttcgctcttgcatgaattcggccttttagaaagcccgttaccagccgaagaagcaccttggccaccgcccgaaggcgcgtttttaggttaccgtttgagtcgcccggaaccgatgtgggccgaattattggctcttgcagcgtctgcccagggacgtgtgtatcgcgcggaagaccctcatggtgcgctccgcggcctcttcgaagtccgtggactccttgccaaagacttagctgttgttgcattgcgcgaaggtcttgatttacctccgactgatgatccaatgcttcttgcgtacctcttggacccgtcaaacacgacgcccgaaggcgtagcccgtcgttacggcggcgagtggaccgaagatgcagcgaaacgcgcgttattggccgaacgtttgcacgccaatttattaggacgtttgcaaggcgaggaacgtctcctctggctttacgaagaagtggagaaaccattgagtcgcgtgctcgcgcatatggaagctaccggtgtcaaattagacgtggcgtatttggaggctctcagccttgaagttgctgccgaaatgcgccgcttggaggaagaagtattccgtttagcaggccgttcctttcgccttaattctcgcgatcagttagaacgtgtgttgttcgatgaacttggtctccctcctatcggcaagacagagaagaccggtaaacgtagcacttcagcggcggttttagaagctcttcgcgaagtccatcccattgtggacaagatcttgcagtaccgcgaactcgcgaaattgaaaggcacctatattgaccctcttccggcattagtccacccgaaaacgggacgcctccatacccgcttcaaccaaacagccacggcgaccggtcgtttgtcctcctctgatccaaaccttcagaatattccagtacgtaccccattgggccagaagatccgccgcgcgtttgtagctgaggagggttggcgtttagtggccctcgattatagccaaattgaattacgtgtccttgcccatctttctggcgatgagaacctcatccgcgtgtttcaggaaggcaaagacattcacactcaaacggcaagctggatgtttggattatcagctgaagcgatcgatcctttgatgcgtcgtgcagcgaagaccatcaatttcggtgttctctacggtatgagtgcccaccgtttgtcgcaggaattaggcattccctatgaagaagctgcggcgttcattcagaaatactttcaaagctatcccaaagttaaagcatggatcgagaagactctcgaagaaggccgcacacgtggttacgtagagaccttatttggacgtcgccgctatgttcccgatttaaacgctcgcgtgaaatctgtccgtgaagccgccgaacgcatggcgttcaacatgcctgtacagggcacggcagctgacctcatgaaacttgcaatggtgcgcctttttccacaattgcgtgaagttggtgcccgcatgctcttgcaggtccacgatgaactcttgttagaagcgccaaaagagcgtgcggaagaggtggcagccctcgcgaaagaggttatggaaggcgtgtggcccttagcggtgcctcttgaagtcgaagttggtattggcgaggattggctggctgccaaaggataatga

SEQ ID NO: 2140 - protein, 841 aa, synthetic construct
  REGION 1..841: note = Variant of DNA polymerase I from Thermus sp. strain 2.9
MHHHHHHGGSGVLPVFEPKGRVLLVDGHHLAYRNFFALKGLTTSRGEPVQGVYGFAKSLLKALKEDGDVVIVVFDAKAPSFRHEAYEAYKAGRAPTPEDFPRQLALMKELVDLLGLERLEVPGFEADDVLATLAKKAEREGYEVQILTADRDLFQLLSPRISVLHPEGHRITPEWLWEKYGLRPEQWVDFRALAGDPSDNIPGVKGIGEKTALKLLKEWGSLENLLKNLDQVKPESVREKILAHLEDLKLSRELSRVRTDLPLEVDFRRRREPDWEGLKAFLERLEFGSLLHEFGLLESPLPAEEAPWPPPEGAFLGYRLSRPEPMWAELLALAASAQGRVYRAEDPHGALRGLFEVRGLLAKDLAVVALREGLDLPPTDDPMLLAYLLDPSNTTPEGVARRYGGEWTEDAAKRALLAERLHANLLGRLQGEERLLWLYEEVEKPLSRVLAHMEATGVKLDVAYLEALSLEVAAEMRRLEEEVFRLAGRSFRLNSRDQLERVLFDELGLPPIGKTEKTGKRSTSAAVLEALREVHPIVDKILQYRELAKLKGTYIDPLPALVHPKTGRLHTRFNQTATATGRLSSSDPNLQNIPVRTPLGQKIRRAFVAEEGWRLVALDYSQIELRVLAHLSGDENLIRVFQEGKDIHTQTASWMFGLSAEAIDPLMRRAAKTINFGVLYGMSAHRLSQELGIPYEEAAAFIQKYFQSYPKVKAWIEKTLEEGRTRGYVETLFGRRRYVPDLNARVKSVREAAERMAFNMPVQGTAADLMKLAMVRLFPQLREVGARMLLQVHDELLLEAPKERAEEVAALAKEVMEGVWPLAVPLEVEVGIGEDWLAAKG

SEQ ID NO: 2141 - DNA, 2529 bp, synthetic construct
  misc_feature 1..2529: note = Variant of DNA polymerase I from Thermus sp. strain 2.9
  source 1..2529: mol_type = other DNA
atgcaccatcatcatcatcatggcggtagcggcgtgttaccggtgttcgagcctaaaggtcgcgtgcttctggttgatggccatcatctcgcgtatcgtaacttctttgccctgaaaggattaaccaccagccgtggcgagccggtacagggtgtctacggctttgcaaagtcgctcctgaaagctctgaaagaagacggtgatgtggtgattgttgtctttgatgcgaaagcgccaagttttcgccacgaagcgtacgaagcttacaaagccgggcgtgctccaacgccggaagactttcctcgccaattggcgcttatgaaggaattagtggatttgcttggcctcgaacgcttggaagttcccggtttcgaggcagacgacgtattagcgactctcgcaaagaaagccgaacgtgagggctatgaagtccagatcttgacagcagatcgcgatcttttccagcttttatctccgcgcatctcggtgttacacccggaagggcatcgtatcaccccggaatggctctgggagaaatatggtttgcgtcccgaacaatgggtggattttcgcgccttagccggcgatccgagcgacaatattccgggagttaaaggtatcggcgagaagacggcgctcaagctccttaaagaatgggggtcgttggagaacttgcttaagaatttagatcaggtcaaaccagagtcagtgcgtgagaagattcttgcacacctcgaagacctcaaattaagcctggaattgtcccgtgtacgcaccgatttgccgctcgaagttgatttccgtggccgccgcgaacctgactgggagggtcttaaagcgtttttagagcgtcttgaatttggttcgctcttgcatgaattcggccttttagaaagcccgttaccagccgtggaagcaccttggccaccgcccgaaggcgcgtttttaggttaccgtttgagtcgcccggaaccgatgtgggccgaattactggctcttgcagcgtctgcccagggacgtgtgtatcgcgcggaagaccctcatggtgcgctccgcggcctcttcgaagtccgcggactccttgccaaagacttagctgttgttgcattgcgcgaaggtcttgatttacctccgactgatgatccaatgcttcttgcgtacctcttggacccgtcaaacacgacgcccgaaggcgtagcccgtcgttacggcggcgagtggaccgaagatgcagcgaaacgcgcgttattggccgaacgtttgcacgccaatttattaggacgtttgcaaggcgaggaacgtctcctctggctttacgaagaagtggagaaaccattgagtcgcgtgctcgcgcatatggaagctaccggtgtcaaattagacgtggcgtatttggaggctctcagccttgaagttgctgccgaaatgcgccgcttggaggaagaagtattccgtttagcaggccactcctttcgccttaattctcgcgatcagttagaacgtgtgttgttcgatgaacttggtctccctcctatcggcaagacagagaagaccggtaaacgtagcacttcagcggcggttttagaagctcttcgcgaagtccatccaattgtggacaagatcttgcagtaccgcgaactcgcgaaattgaaaggcacctatattgaccctcttccggcattagtccacccgaaaacgggacgcctccatacccgcttcaaccaaacagccacggcgaccggtcgtttgtcctcctctgatccaaaccttcagaatattccagtacgtaccccattgggccagaagatccgccgcgcgtttgtagctgaggagggttggcgtttagtggccctcgattatagccaaattgaattacgtgtccttgcccatctttctggcgatgagaacctcatccgcgtgtttcaggaaggcaaagacattcacactcaaacggcaagctggatgtttggattatcagctgaagcgatcgatcctttgatgcgtcgtgcagcgaagaccatcaatttcggtgttctctacggtatgagtgcccaccgtttgtcgcaggaattaggcattccctatgaagaagctgcggcgttcattcagaaatactttcaaagctatcccaaagttaaagcatggatcgagaagactctcgaagaaggccgcacacgtggttacgtagagaccttatttggacgtcgccgctatgttcccgatttaactgctcgcgtgaaatctgtccgtgaagccgccgaacgcatggcgttcaacatgcctgtacagggcacggcagctgacctcatgaaacttgcaatggtgcgcctttttccacaattgcgtgaagttggtgcccgcatgctcttgcaggtccacgatgaactcttgttagaagcgccaaaagagcgtgcggaagaggtggcagccctcgcgaaagaggttatggaaggcgtgtggcccttagcggtgcctcttgaagtcgaagttggtattggcgaggattggctggctgccaaaggataatga

SEQ ID NO: 2142 - protein, 841 aa, synthetic construct
  REGION 1..841: note = Variant of DNA polymerase I from Thermus sp. strain 2.9
MHHHHHHGGSGVLPVFEPKGRVLLVDGHHLAYRNFFALKGLTTSRGEPVQGVYGFAKSLLKALKEDGDVVIVVFDAKAPSFRHEAYEAYKAGRAPTPEDFPRQLALMKELVDLLGLERLEVPGFEADDVLATLAKKAEREGYEVQILTADRDLFQLLSPRISVLHPEGHRITPEWLWEKYGLRPEQWVDFRALAGDPSDNIPGVKGIGEKTALKLLKEWGSLENLLKNLDQVKPESVREKILAHLEDLKLSLELSRVRTDLPLEVDFRGRREPDWEGLKAFLERLEFGSLLHEFGLLESPLPAVEAPWPPPEGAFLGYRLSRPEPMWAELLALAASAQGRVYRAEDPHGALRGLFEVRGLLAKDLAVVALREGLDLPPTDDPMLLAYLLDPSNTTPEGVARRYGGEWTEDAAKRALLAERLHANLLGRLQGEERLLWLYEEVEKPLSRVLAHMEATGVKLDVAYLEALSLEVAAEMRRLEEEVFRLAGHSFRLNSRDQLERVLFDELGLPPIGKTEKTGKRSTSAAVLEALREVHPIVDKILQYRELAKLKGTYIDPLPALVHPKTGRLHTRFNQTATATGRLSSSDPNLQNIPVRTPLGQKIRRAFVAEEGWRLVALDYSQIELRVLAHLSGDENLIRVFQEGKDIHTQTASWMFGLSAEAIDPLMRRAAKTINFGVLYGMSAHRLSQELGIPYEEAAAFIQKYFQSYPKVKAWIEKTLEEGRTRGYVETLFGRRRYVPDLTARVKSVREAAERMAFNMPVQGTAADLMKLAMVRLFPQLREVGARMLLQVHDELLLEAPKERAEEVAALAKEVMEGVWPLAVPLEVEVGIGEDWLAAKG

SEQ ID NO: 2143 - DNA, 2529 bp, synthetic construct
  misc_feature 1..2529: note = Variant of DNA polymerase I from Thermus sp. strain 2.9
  source 1..2529: mol_type = other DNA
atgcaccatcatcatcatcatggcggtagcggcgtgttaccggtgttcgagcctaaaggtcgcgtgcttctggttgatggccatcatctcgcgtatcgtaacttctttgccctgaaaggattaaccaccagccgtggcgagccggtacagggtgtctacggctttgcaaagtcgctcctgaaagctctgaaagaagacggtgatgtggtgattgttgtctttgatgcgaaagcgccaagttttcgccacgaagcgtacgaagcttacaaagccgggcgtgctccaacgccggaagactttcctcgccaattggcgcttatgaaggaattagtggatttgcttggcctcgaacgcttggaagttcccggtttcgaggcagacgacgtattagcgactctcgcaaagaaagccgaacgtgagggctatgaagtccagatcttgacagcagatcgcgatcttttccagcttttatctccgcgcatctcggtgttacacccggaagggcatcgtatcaccccggaatggctctgggagaaatatggtttgcgtcccgaacaatgggtggattttcgcgccttagcaggcgatccgagcgacaatattccgggagttaaaggtatcggcgagaagacggcgctcaagctccttaaagaatgggggtcgttggagaacttgcttaagaatttagatcaggtcaaaccagagtcagtgcgtgagaagattcttgcacacctcgaagacctcaaattaagcctggaattgtcccgtgtacgcaccgatttgccgctcgaagttgatttccgtcgccgccgcgaacctgactgggagggtcttaaagcgtttttagagcgtcttgaatttggttcgctcttgcatgaattcggccttttagaaagcccgttaccagccggggaagcaccttggccaccgcccgaaggcgcgtttttaggttaccgtttgagtcgcccggaaccgatgtgggccgaattattggctcttgcagcgtctgcccagggacgtgtgtatcgcgcggaagaccctcatggtgcgctccgcggcctcttcgaagtccgtggactccttgccaaagacttagctgttgttgcattgcgcgaaggtcttgatttacctccgactgatgatccaatgcttcttgcgtacctcttggacccgtcaaacacgacgcccgaaggcgtagcccgtcgttacggcggcgagtggaccgaagatgcagcgaaacgcgcgttattggccgaacgtttgcacgccaatttattaggacgtttgcaaggcgaggaacgtctcctctggctttacgaagaagtggagaaaccattgagtcgcgtgctcgcgcatatggaagctaccggtgtcaaattagacgtggcgtatttggaggctctcagccttgaagttgctgccgaaatgcgccgcttggaggaagaagtattccgtttagcaggccactcctttcgccttaattctcgcgatcagttagaacgtgtgttgttcgatgaacttggtctccctcctatcggcaagacagagaagaccggtaaacgtagcacttcagcggcggttttagaagctcttcgcgaagtccatcccattgtggacaagatcttgcagtaccgcgaactcgcgaaattgaaaggcacctatattgaccctcttccggcattagtccacccgaaaacgggacgcctccatacccgcttcaaccaaacagccacggcgaccggtcgtttgtcctcctctgatccaaaccttcagaatattccagtacgtaccccattgggccagaagatccgccgcgcgtttgtagctgaggagggttggcgtttagtggccctcgattatagccaaattgaattacgtgtccttgcccatctttctggcgatgagaacctcatccgcgtgtttcaggaaggcaaagacattcacactcaaacggcaagctggatgtttggagtgtcagctgaagcgatcgatcctttgatgcgtcgtgcagcgaagaccatcaatttcggtgttctctacggtatgagtgcccatcgtttgtcgcaggaattaggcattccctatgaagaagctgcggcgttcattcagaaatactttcaaagctatcccaaagttaaagcatggatcgagaagactctcgaagaaggccgcacacgtggttacgtagagaccttatttggacgtcgccgctatgttcccgatttaaacgctcgcgtgaaatctgtccgtgaagccgccgaacgcatggcgttcaacatgcctgtacagggcacggcagctgacctcatgaaacttgcaatggtgcgcctttttccacaattgcgtgaagttggtgcccgcatgctcttgcaggtccacgatgaactcttgttagaagcgccaaaagagcgtgcggaagaggtggcagccctcgcgaaagaggttatggaaggcgtgtggcccttagcggtgcctcttgaagtcgaagttggtattggcgaggattggctggctgccaaaggataatga

SEQ ID NO: 2144 - protein, 841 aa, synthetic construct
  REGION 1..841: note = Variant of DNA polymerase I from Thermus sp. strain 2.9
MHHHHHHGGSGVLPVFEPKGRVLLVDGHHLAYRNFFALKGLTTSRGEPVQGVYGFAKSLLKALKEDGDVVIVVFDAKAPSFRHEAYEAYKAGRAPTPEDFPRQLALMKELVDLLGLERLEVPGFEADDVLATLAKKAEREGYEVQILTADRDLFQLLSPRISVLHPEGHRITPEWLWEKYGLRPEQWVDFRALAGDPSDNIPGVKGIGEKTALKLLKEWGSLENLLKNLDQVKPESVREKILAHLEDLKLSLELSRVRTDLPLEVDFRRRREPDWEGLKAFLERLEFGSLLHEFGLLESPLPAGEAPWPPPEGAFLGYRLSRPEPMWAELLALAASAQGRVYRAEDPHGALRGLFEVRGLLAKDLAVVALREGLDLPPTDDPMLLAYLLDPSNTTPEGVARRYGGEWTEDAAKRALLAERLHANLLGRLQGEERLLWLYEEVEKPLSRVLAHMEATGVKLDVAYLEALSLEVAAEMRRLEEEVFRLAGHSFRLNSRDQLERVLFDELGLPPIGKTEKTGKRSTSAAVLEALREVHPIVDKILQYRELAKLKGTYIDPLPALVHPKTGRLHTRFNQTATATGRLSSSDPNLQNIPVRTPLGQKIRRAFVAEEGWRLVALDYSQIELRVLAHLSGDENLIRVFQEGKDIHTQTASWMFGVSAEAIDPLMRRAAKTINFGVLYGMSAHRLSQELGIPYEEAAAFIQKYFQSYPKVKAWIEKTLEEGRTRGYVETLFGRRRYVPDLNARVKSVREAAERMAFNMPVQGTAADLMKLAMVRLFPQLREVGARMLLQVHDELLLEAPKERAEEVAALAKEVMEGVWPLAVPLEVEVGIGEDWLAAKG

SEQ ID NO: 2145 - DNA, 2529 bp, synthetic construct
  misc_feature 1..2529: note = Variant of DNA polymerase I from Thermus sp. strain 2.9
  source 1..2529: mol_type = other DNA
atgcaccatcatcatcatcatggcggtagcggcgtgttaccggtgttcgagcctaaaggtcgcgtgcttctggttgatggccatcatctcgcgtatcgtaacttctttgccctgaaaggattaaccaccagccgtggcgagccggtacagggtgtctacggctttgcaaagtcgctcctgaaagctctgaaagaagacggtgatgtggtgattgttgtctttgatgcgaaagcgccaagttttcgccacgaagcgtacgaagcttacaaagccgggcgtgctccaacgccggaagactttcctcgccaattggcgcttatgaaggaattagtggatttgcttggcctcgaacgcttggaagttcccggtttcgaggcagacgacgtattagcgactctcgcaaagaaagccgaacgtgagggctatgaagtccagatcttgacagcagatcgcgatcttttccagcttttatctccgcgcatctcggtgttacacccggaagggcatcgtatcaccccggaatggctctgggagaaatatggtttgcgtcccgaacaatgggtggattttcgcgccttagccggcgatccgagcgacaatattccgggagttaaaggtatcggcgagaagacggcgctcaagctccttaaagaatgggggtcgttggagaacttgcttaagaatttagatcaggtcaaaccagagtcagtgcgtgagaagattcttgcacacctcgaagacctcaaattaagccgcgaattgtcccgtgtacgcaccgatttgccgctcgaagttgatttccgtcgccgccgcgaacctgactgggagggtcttaaagcgtttttagagcgtcttgaatttggttcgctcttgcatgaattcggccttttagaaagcccgttaccagccgtggaagcaccttggccaccgcccgaaggcgcgtttttaggttaccgtttgagtcgcccggaaccgatgtgggccgaattactggctcttgcagcgtctgcccagggacgtgtgtatcgcgcggaagaccctcatggtgcgctccgcggcctcttcgaagtccgtggactccttgccaaagacttagctgttgttgcattgcgcgaaggtcttgatttacctccgactgatgatccaatgcttcttgcgtacctcttggacccgtcaaacacgacgcccgaaggcgtagcccgtcgttacggcggcgagtggaccgaagatgcagcgaaacgcgcgttattggccgaacgtttgcacgccaatttattaggacgtttgcaaggcgaggaacgtctcctctggctttacgaagaagtggagaaaccattgagtcgcgtgctcgcgcatatggaagctaccggtgtcaaattagacgtggcgtatttggaggctctcagccttgaagttgctgccgaaatgcgccgcttggaggaagaagtattccgtttagcaggccactcctttcgccttaattctcgcgatcagttagaacgtgtgttgttcgatgaacttggtctccctcctatcggcaagacagagaagaccggtaaacgtagcacttcagcggcggttttagaagctcttcgcgaagtccatcccattgtggacaagatcttgcagtaccgcgaactcgcgaaattgaaaggcacctatattgaccctcttccggcattagtccacccgaaaacgggacgcctccatacccgcttcaaccaaacagccacggcgaccggtcgtttgtcctcctctgatccaaaccttcagaatattccagtacgtaccccattgggccagaagatccgccgcgcgtttgtagctgaggagggttggcgtttagtggccctcgattatagccaaattgaattacgtgtccttgcccatctttctggcgatgagaacctcatccgcgtgtttcaggaaggcaaagacattcacactcaaacggcaagctggatgtttggattatcagctgaagcgatcgatcctttgatgcgtcgtgcagcgaagaccatcaatttcggtgttctctacggtatgagtgcccatcgtttgtcgcaggaattaggcattccctatgaagaagctgcggcgttcattcagaaatactttcaaagctatcccaaagttaaagcatggatcgagaagactctcgaagaaggccgcacacgtggttacgtagagaccttatttggacgtcgccgctatgttcccgatttaaacgctcgcgtgaaatctgtccgtgaagccgccgaacgcatggcgttcaacatgcctgtacagggcacggcagctgacctcatgaaacttgcaatggtgcgcctttttccacaattgcgtgaagttggtgcccgcatgctcttgcaggtccacgatgaactcttgttagaagcgccaaaagagcgtgcggaagaggtggcagccctcgcgaaagaggttatggaaggcgtgtggcccttagcggtgcctcttgaagtcgaagttggtattggcgaggattggctggctgccaaaggataatga

SEQ ID NO: 2146 - protein, 841 aa, synthetic construct
  REGION 1..841: note = Variant of DNA polymerase I from Thermus sp. strain 2.9
MHHHHHHGGSGVLPVFEPKGRVLLVDGHHLAYRNFFALKGLTTSRGEPVQGVYGFAKSLLKALKEDGDVVIVVFDAKAPSFRHEAYEAYKAGRAPTPEDFPRQLALMKELVDLLGLERLEVPGFEADDVLATLAKKAEREGYEVQILTADRDLFQLLSPRISVLHPEGHRITPEWLWEKYGLRPEQWVDFRALAGDPSDNIPGVKGIGEKTALKLLKEWGSLENLLKNLDQVKPESVREKILAHLEDLKLSRELSRVRTDLPLEVDFRRRREPDWEGLKAFLERLEFGSLLHEFGLLESPLPAVEAPWPPPEGAFLGYRLSRPEPMWAELLALAASAQGRVYRAEDPHGALRGLFEVRGLLAKDLAVVALREGLDLPPTDDPMLLAYLLDPSNTTPEGVARRYGGEWTEDAAKRALLAERLHANLLGRLQGEERLLWLYEEVEKPLSRVLAHMEATGVKLDVAYLEALSLEVAAEMRRLEEEVFRLAGHSFRLNSRDQLERVLFDELGLPPIGKTEKTGKRSTSAAVLEALREVHPIVDKILQYRELAKLKGTYIDPLPALVHPKTGRLHTRFNQTATATGRLSSSDPNLQNIPVRTPLGQKIRRAFVAEEGWRLVALDYSQIELRVLAHLSGDENLIRVFQEGKDIHTQTASWMFGLSAEAIDPLMRRAAKTINFGVLYGMSAHRLSQELGIPYEEAAAFIQKYFQSYPKVKAWIEKTLEEGRTRGYVETLFGRRRYVPDLNARVKSVREAAERMAFNMPVQGTAADLMKLAMVRLFPQLREVGARMLLQVHDELLLEAPKERAEEVAALAKEVMEGVWPLAVPLEVEVGIGEDWLAAKG

SEQ ID NO: 2147 - DNA, 2529 bp, synthetic construct
  misc_feature 1..2529: note = Variant of DNA polymerase I from Thermus sp. strain 2.9
  source 1..2529: mol_type = other DNA
atgcaccatcatcatcatcatggcggtagcggcgtgttaccggtgttcgagcctaaaggtcgcgtgcttctggttgatggccatcatctcgcgtatcgtaacttctttgccctgaaaggattaaccaccagccgtggcgagccggtacagggtgtctacggctttgcaaagtcgctcctgaaagctctgaaagaagacggtgatgtggtgattgttgtctttgatgcgaaagcgccaagttttcgccacgaagcgtacgaagcttacaaagccgggcgtgctccaacgccggaagactttcctcgccaattggcgcttatgaaggaattagtggatttgcttggcctcgaacgcttggaagttcccggtttcgaggcagacgacgtattagcgactctcgcaaagaaagccgaacgtgagggctatgaagtccagatcttgacagcagatcgcgatcttttccagcttttatctccgcgcatctcggtgttacacccggaagggcatcgtatcaccccggaatggctctgggagaaatatggtttgcgtcccgaacaatgggtggattttcgcgccttagccggcgatccgagcgacaatattccgggagttaaaggtatcggcgagaagacggcgctcaagctccttaaagaatgggggtcgttggagaacttgcttaagaatttagatcaggtcaaaccagagtcagtgcgtgagaagattcttgcacacctcgaagacctcaaattaagccgcgaattgtcccgtgtacgcaccgatttgccgctcgaagttgatttccgtggccgccgcgaacctgactgggagggtcttaaagcgtttttagagcgtcttgaatttggttcgctcttgcatgaattcggccttttagaaagcccgttaccagccggggaagcaccttggccaccgcccgaaggcgcgtttttaggttaccgtttgagtcgcccggaaccgatgtgggccgaattattggctcttgcagcgtctgcccagggacgtgtgtatcgcgcggaagaccctcatggtgcgctccgcggcctcttcgaagtccgtggactccttgccaaagacttagctgttgttgcattgcgcgaaggtcttgatttacctccgactgatgatccaatgcttcttgcgtacctcttggacccgtcaaacacgacgcccgaaggcgtagcccgtcgttacggcggcgagtggaccgaagatgcagcgaaacgcgcgttattggccgaacgtttgcacgccaatttattaggacgtttgcaaggcgaggaacgtctcctctggctttacgaagaagtggagaaaccattgagtcgcgtgctcgcgcatatggaagctaccggtgtcaaattagacgtggcgtatttggaggcgctcagccttgaagttgctgccgaaatgcgccgcttggaggaagaagtattccgtttagcaggccattcctttcgccttaattctcgcgatcagttagaacgtgtgttgttcgatgaacttggtctccctcctatcggcaagacagagaagaccggtaaacgtagcacttcagcggcggttttagaagctcttcgcgaagtccatcccattgtggacaagatcttgcagtaccgcgaactcgcgaaattgaaaggcacctatattgaccctcttccggcattagtccacccgaaaacgggacgcctccatacccgcttcaaccaaacagccacggcgaccggtcgtttgtcctcctctgatccaaaccttcagaatattccagtacgtaccccattgggccagaagatccgccgcgcgtttgtagctgaggagggttggcgtttagtggccctcgattatagccaaattgaattacgtgtccttgcccatctttctggcgatgagaacctcatccgcgtgtttcaggaaggcaaagacattcacactcaaacggcaagctggatgtttggagagtcagctgaagcgatcgatcctttgatgcgtcgtgcagcgaagaccatcaatttcggtgttctctacggtatgagtgcccatcgtttgtcgcaggaattaggcattccctatgaagaagctgcggcgttcattcagaaatactttcaaagctatcccaaagttaaagcatggatcgagaagactctcgaagaaggccgcacacgtggttacgtagagaccttatttggacgtcgccgctatgttcccgatttaaacgctcgcgtgaaatctgtccgtgaagccgccgaacgcatggcgttcaacatgcctgtacagggcacggcagctgacctcatgaaacttgcaatggtgcgcctttttccacaattgcgtgaagttggtgcccgcatgctcttgcaggtccacgatgaactcttgttagaagcgccaaaagagcgtgcggaagaggtggcagccctcgcgaaagaggttatggaaggcgtgtggcccttagcggtgcctcttgaagtcgaagttggtattggcgaggattggctggctgccaaaggataatga

SEQ ID NO: 2148 - protein, 841 aa, synthetic construct
  REGION 1..841: note = Variant of DNA polymerase I from Thermus sp. strain 2.9
MHHHHHHGGSGVLPVFEPKGRVLLVDGHHLAYRNFFALKGLTTSRGEPVQGVYGFAKSLLKALKEDGDVVIVVFDAKAPSFRHEAYEAYKAGRAPTPEDFPRQLALMKELVDLLGLERLEVPGFEADDVLATLAKKAEREGYEVQILTADRDLFQLLSPRISVLHPEGHRITPEWLWEKYGLRPEQWVDFRALAGDPSDNIPGVKGIGEKTALKLLKEWGSLENLLKNLDQVKPESVREKILAHLEDLKLSRELSRVRTDLPLEVDFRGRREPDWEGLKAFLERLEFGSLLHEFGLLESPLPAGEAPWPPPEGAFLGYRLSRPEPMWAELLALAASAQGRVYRAEDPHGALRGLFEVRGLLAKDLAVVALREGLDLPPTDDPMLLAYLLDPSNTTPEGVARRYGGEWTEDAAKRALLAERLHANLLGRLQGEERLLWLYEEVEKPLSRVLAHMEATGVKLDVAYLEALSLEVAAEMRRLEEEVFRLAGHSFRLNSRDQLERVLFDELGLPPIGKTEKTGKRSTSAAVLEALREVHPIVDKILQYRELAKLKGTYIDPLPALVHPKTGRLHTRFNQTATATGRLSSSDPNLQNIPVRTPLGQKIRRAFVAEEGWRLVALDYSQIELRVLAHLSGDENLIRVFQEGKDIHTQTASWMFGESAEAIDPLMRRAAKTINFGVLYGMSAHRLSQELGIPYEEAAAFIQKYFQSYPKVKAWIEKTLEEGRTRGYVETLFGRRRYVPDLNARVKSVREAAERMAFNMPVQGTAADLMKLAMVRLFPQLREVGARMLLQVHDELLLEAPKERAEEVAALAKEVMEGVWPLAVPLEVEVGIGEDWLAAKG

SEQ ID NO: 2149 - DNA, 2529 bp, synthetic construct
  misc_feature 1..2529: note = Variant of DNA polymerase I from Thermus sp. strain 2.9
  source 1..2529: mol_type = other DNA
atgcaccatcatcatcatcatggcggtagcggcgtgttaccggtgttcgagcctaaaggtcgcgtgcttctggttgatggccatcatctcgcgtatcgtaacttctttgccctgaaaggattaaccaccagccgtggcgagccggtacagggtgtctacggctttgcaaagtcgctcctgaaagctctgaaagaagacggtgatgtggtgattgttgtctttgatgcgaaagcgccaagttttcgccacgaagcgtacgaagcttacaaagccgggcgtgctccaacgccggaagactttcctcgccaattggcgcttatgaaggaattagtggatttgcttggcctcgaacgcttggaagttcccggtttcgaggcagacgacgtattagcgactctcgcaaagaaagccgaacgtgagggctatgaagtccagatcttgacagcagatcgcgatcttttccagcttttatctccgcgcatctcggtgttacacccggaagggcatcgtatcaccccggaatggctctgggagaaatatggtttgcgtcccgaacaatgggtggattttcgcgccttagtcggcgatccgagcgacaatattccgggagttaaaggtatcggcgagaagacggcgctcaagctccttaaagaatgggggtcgttggagaacttgcttaagaatttagatcaggtcaaaccagagtcagtgcgtgagaagattcttgcacacctcgaagacctcaaattaagcctggaattgtcccgtgtacgcaccgatttgccgctcgaagttgatttccgtcgccgccgcgaacctgactgggagggtcttaaagcgtttttagagcgtcttgaatttggttcgctcttgcatgaattcggccttttagaaagcccgttaccagccggggaagcaccttggccaccgcccgaaggcgcgtttttaggttaccgtttgagtcgcccggaaccgatgtgggccgaattattggctcttgcagcgtctgcccagggacgtgtgtatcgcgcggaagaccctcatggtgcgctccgcggcctcttcgaagtccgtggactccttgccaaagacttagctgttgttgcattgcgcgaaggtcttgatttacctccgactgatgatccaatgcttcttgcgtacctcttggacccgtcaaacacgacgcccgaaggcgtagcccgtcgttacggcggcgagtggaccgaagatgcagcgaaacgcgcgttattggccgaacgtttgcacgccaatttattaggacgtttgcaaggcgaggaacgtctcctctggctttacgaagaagtggagaaaccattgagtcgcgtgctcgcgcatatggaagctaccggtgtcaaattagacgtggcgtatttggagaatctcagccttgaagttgctgccgaaatgcgccgcttggaggaagaagtattccgtttagcaggccactcctttcgccttaattctcgcgatcagttagaacgtgtgttgttcgatgaacttggtctccctcctatcggcaagacagagaagaccggtaaacgtagcacttcagcggcggttttagaagctcttcgcgaagtccatcccattgtggacaagatcttgcagtaccgcgaactcgcgaaattgaaaggcacctatattgaccctcttccggcattagtccacccgaaaacgggacgcctccatacccgcttcaaccaaacagccacggcgaccggtcgtttgtcctcctctgatccaaaccttcagaatattccagtacgtaccccattgggccagaagatccgccgcgcgtttgtagctgaggagggttggcgtttagtggccctcgattatagccaaattgaattacgtgtccttgcccatctttctggcgatgagaacctcatccgcgtgtttcaggaaggcaaagacattcacactcaaacggcaagctggatgtttggattatcagctgaagcgatcgatcctttgatgcgtcgtgcagcgaagaccatcaatttcggtgttctctacggtatgagtgcccaccgtttgtcgcaggaattaggcattccctatgaagaagctgcggcgttcattcagaaatactttcaaagctatcccaaagttaaagcatggatcgagaagactctcgaagaaggccgcacacgtggttacgtagagaccttatttggacgtcgccgctatgttcccgatttaaacgctcgcgtgaaatctgtccgtgaagccgccgaacgcatggcgttcaacatgcctgtacagggcacggcagctgacctcatgaaacttgcaatggtgcgcctttttccacaattgcgtgaagttggtgcccgcatgctcttgcaggtccacgatgaactcttgttagaagcgccaaaagagcgtgcggaagaggtggcagccctcgcgaaagaggttatggaaggcgtgtggcccttagcggtgcctcttgaagtcgaagttggtattggcgaggattggctggctgccaaaggataatga

SEQ ID NO: 2150 - protein, 841 aa, synthetic construct
  REGION 1..841: note = Variant of DNA polymerase I from Thermus sp. strain 2.9
MHHHHHHGGSGVLPVFEPKGRVLLVDGHHLAYRNFFALKGLTTSRGEPVQGVYGFAKSLLKALKEDGDVVIVVFDAKAPSFRHEAYEAYKAGRAPTPEDFPRQLALMKELVDLLGLERLEVPGFEADDVLATLAKKAEREGYEVQILTADRDLFQLLSPRISVLHPEGHRITPEWLWEKYGLRPEQWVDFRALVGDPSDNIPGVKGIGEKTALKLLKEWGSLENLLKNLDQVKPESVREKILAHLEDLKLSLELSRVRTDLPLEVDFRRRREPDWEGLKAFLERLEFGSLLHEFGLLESPLPAGEAPWPPPEGAFLGYRLSRPEPMWAELLALAASAQGRVYRAEDPHGALRGLFEVRGLLAKDLAVVALREGLDLPPTDDPMLLAYLLDPSNTTPEGVARRYGGEWTEDAAKRALLAERLHANLLGRLQGEERLLWLYEEVEKPLSRVLAHMEATGVKLDVAYLENLSLEVAAEMRRLEEEVFRLAGHSFRLNSRDQLERVLFDELGLPPIGKTEKTGKRSTSAAVLEALREVHPIVDKILQYRELAKLKGTYIDPLPALVHPKTGRLHTRFNQTATATGRLSSSDPNLQNIPVRTPLGQKIRRAFVAEEGWRLVALDYSQIELRVLAHLSGDENLIRVFQEGKDIHTQTASWMFGLSAEAIDPLMRRAAKTINFGVLYGMSAHRLSQELGIPYEEAAAFIQKYFQSYPKVKAWIEKTLEEGRTRGYVETLFGRRRYVPDLNARVKSVREAAERMAFNMPVQGTAADLMKLAMVRLFPQLREVGARMLLQVHDELLLEAPKERAEEVAALAKEVMEGVWPLAVPLEVEVGIGEDWLAAKG

SEQ ID NO: 2151 - DNA, 2529 bp, synthetic construct
  misc_feature 1..2529: note = Variant of DNA polymerase I from Thermus sp. strain 2.9
  source 1..2529: mol_type = other DNA
atgcaccatcatcatcatcatggcggtagcggcgtgttaccggtgttcgagcctaaaggtcgcgtgcttctggttgatggccatcatctcgcgtatcgtaacttctttgccctgaaaggattaaccaccagccgtggcgagccggtacagggtgtctacggctttgcaaagtcgctcctgaaagctctgaaagaagacggtgatgtggtgattgttgtctttgatgcgaaagcgccaagttttcgccacgaagcgtacgaagcttacaaagccgggcgtgctccaacgccggaagactttcctcgccaattggcgcttatgaaggaattagtggatttgcttggcctcgaacgcttggaagttcccggtttcgaggcagacgacgtattagcgactctcgcaaagaaagccgaacgtgagggctatgaagtccagatcttgacagcagatcgcgatcttttccagcttttatctccgcgcatctcggtgttacacccggaagggcatcgtatcaccccggaatggctctgggagaaatatggtttgcgtcccgaacaatgggtggattttcgcgccttagcaggcgatccgagcgacaatattccgggagttaaaggtatcggcgagaagacggcgctcaagctccttaaagaatgggggtcgttggagaacttgcttaagaatttagatcaggtcaaaccagagtcagtgcgtgagaagattcttgcacacctcgaagacctcaaattaagccgcgaattgtcccgtgtacgcaccgatttgccgctcgaagttgatttccgtggccgccgcgaacctgactgggagggtcttaaagcgtttttagagcgtcttgaatttggttcgctcttgcatgaattcggccttttagaaagcccgttaccagccgaagaagcaccttggccaccgcccgaaggcgcgtttttaggttaccgtttgagtcgcccggaaccgatgtgggccgaattattggctcttgcagcgtctgcccagggacgtgtgtatcgcgcggaagaccctcatggtgcgctccgcggcctcttcgaagtccgtggactccttgccaaagacttagctgttgttgcattgcgcgaaggtcttgatttacctccgactgatgatccaatgcttcttgcgtacctcttggacccgtcaaacacgacgcccgaaggcgtagcccgtcgttacggcggcgagtggaccgaagatgcagcgaaacgcgcgttattggccgaacgtttgcacgccaatttattaggacgtttgcaaggcgaggaacgtctcctctggctttacgaagaagtggagaaaccattgagtcgcgtgctcgcgcatatggaagctaccggtgtcaaattagacgtggcgtatttggaggctctcagccttgaagttgctgccgaaatgcgccgcttggaggaagaagtattccgtttagcaggccactcctttcgccttaattctcgcgatcagttagaacgtgtgttgttcgatgaacttggtctccctcctatcggcaagacagagaagaccggtaaacgtagcacttcagcggcggttttagaagctcttcgcgaagtccatcccattgtggacaagatcttgcagtaccgcgaactcgcgaaattgaaaggcacctatattgaccctcttccggcattagtccacccgaaaacgggacgcctccatacccgcttcaaccaaacagccacggcgaccggtcgtttgtcctcctctgatccaaaccttcagaatattccagtacgtaccccattgggccagaagatccgccgcgcgtttgtagctgaggagggttggcgtttagtggccctcgattatagccaaattgaattacgtgtccttgcccatctttctggcgatgagaacctcatccgcgtgtttcaggaaggcaaagacattcacactcaaacggcaagctggatgtttggattatcagctgaagcgatcgatcctttgatgcgtcgtgcagcgaagaccatcaatttcggtgttctctacggtatgagtgcccatcgtttgtcgcaggaattaggcattccctatgaagaagctgcggcgttcattcagaaatactttcaaagctatcccaaagttaaagcatggatcgagaagactctcgaagaaggccgcacacgtggttacgtagagaccttatttggacgtcgccgctatgttcccgatttaaacgctcgcgtgaaatctgtccgtgaagccgccgaacgcatggcgttcaacatgcctgtacagggcacggcagctgacctcatgaaacttgcaatggtgcgcctttttccacaattgcgtgaagttggtgcccgcatgctcttgcaggtccacgatgaactcttgttagaagcgccaaaagagcgtgcggaagaggtggcagccctcgcgaaagaggttatggaaggcgtgtggcccttagcggtgcctcttgaagtcgaagttggtattggcgaggattggctggctgccaaaggataatga

SEQ ID NO: 2152 - protein, 841 aa, synthetic construct
  REGION 1..841: note = Variant of DNA polymerase I from Thermus sp. strain 2.9
MHHHHHHGGSGVLPVFEPKGRVLLVDGHHLAYRNFFALKGLTTSRGEPVQGVYGFAKSLLKALKEDGDVVIVVFDAKAPSFRHEAYEAYKAGRAPTPEDFPRQLALMKELVDLLGLERLEVPGFEADDVLATLAKKAEREGYEVQILTADRDLFQLLSPRISVLHPEGHRITPEWLWEKYGLRPEQWVDFRALAGDPSDNIPGVKGIGEKTALKLLKEWGSLENLLKNLDQVKPESVREKILAHLEDLKLSRELSRVRTDLPLEVDFRGRREPDWEGLKAFLERLEFGSLLHEFGLLESPLPAEEAPWPPPEGAFLGYRLSRPEPMWAELLALAASAQGRVYRAEDPHGALRGLFEVRGLLAKDLAVVALREGLDLPPTDDPMLLAYLLDPSNTTPEGVARRYGGEWTEDAAKRALLAERLHANLLGRLQGEERLLWLYEEVEKPLSRVLAHMEATGVKLDVAYLEALSLEVAAEMRRLEEEVFRLAGHSFRLNSRDQLERVLFDELGLPPIGKTEKTGKRSTSAAVLEALREVHPIVDKILQYRELAKLKGTYIDPLPALVHPKTGRLHTRFNQTATATGRLSSSDPNLQNIPVRTPLGQKIRRAFVAEEGWRLVALDYSQIELRVLAHLSGDENLIRVFQEGKDIHTQTASWMFGLSAEAIDPLMRRAAKTINFGVLYGMSAHRLSQELGIPYEEAAAFIQKYFQSYPKVKAWIEKTLEEGRTRGYVETLFGRRRYVPDLNARVKSVREAAERMAFNMPVQGTAADLMKLAMVRLFPQLREVGARMLLQVHDELLLEAPKERAEEVAALAKEVMEGVWPLAVPLEVEVGIGEDWLAAKG

SEQ ID NO: 2153 - DNA, 2529 bp, synthetic construct
  misc_feature 1..2529: note = Variant of DNA polymerase I from Thermus sp. strain 2.9
  source 1..2529: mol_type = other DNA
atgcaccatcatcatcatcatggcggtagcggcgtgttaccggtgttcgagcctaaaggtcgcgtgcttctggttgatggccatcatctcgcgtatcgtaacttctttgccctgaaaggattaaccaccagccgtggcgagccggtacagggtgtctacggctttgcaaagtcgctcctgaaagctctgaaagaagacggtgatgtggtgattgttgtctttgatgcgaaagcgccaagttttcgccacgaagcgtacgaagcttacaaagccgggcgtgctccaacgccggaagactttcctcgccaattggcgcttatgaaggaattagtggatttgcttggcctcgaacgcttggaagttcccggtttcgaggcagacgacgtattagcgactctcgcaaagaaagccgaacgtgagggctatgaagtccagatcttgacagcagatcgcgatcttttccagcttttatctccgcgcatctcggtgttacacccggaagggcatcgtatcaccccggaatggctctgggagaaatatggtttgcgtcccgaacaatgggtggattttcgcgccttagtcggcgatccgagcgacaatattccgggagttaaaggtatcggcgagaagacggcgctcaagctccttaaagaatgggggtcgttggagaacttgcttaagaatttagatcaggtcaaaccagagtcagtgcgtgagaagattcttgcacacctcgaagacctcaaattaagcctggaattgtcccgtgtacgcaccgatttgccgctcgaagttgatttccgtcgccgccgcgaacctgactgggagggtcttaaagcgtttttagagcgtcttgaatttggttcgctcttgcatgaattcggccttttagaaagcccgttaccagccgaagaagcaccttggccaccgcccgaaggcgcgtttttaggttaccgtttgagtcgcccggaaccgatgtgggccgaattattggctcttgcagcgtctgcccagggacgtgtgtatcgcgcggaagaccctcatggtgcgctccgcggcctcttcgaagtccgtggactccttgccaaagacttagctgttgttgcattgcgcgaaggtcttgatttacctccgactgatgatccaatgcttcttgcgtacctcttggacccgtcaaacacgacgcccgaaggcgtagcccgtcgttacggcggcgagtggaccgaagatgcagcgaaacgcgcgttattggccgaacgtttgcacgccaatttattaggacgtttgcaaggcgaggaacgtctcctctggctttacgaagaagtggagaaaccattgagtcgcgtgctcgcgcatatggaagctaccggtgtcaaattagacgtggcgtatttggagaatctcagccttgaagttgctgccgaaatgcgccgcttggaggaagaagtattccgtttagcaggccactcctttcgccttaattctcgcgatcagttagaacgtgtgttgttcgatgaacttggtctccctcctatcggcaagacagagaagaccggtaaacgtagcacttcagcggcggttttagaagctcttcgcgaagtccatcccattgtggacaagatcttgcagtaccgcgaactcgcgaaattgaaaggcacctatattgaccctcttccggcattagtccacccgaaaacgggacgcctccatacccgcttcaaccaaacagccacggcgaccggtcgtttgtcctcctctgatccaaaccttcagaatattccagtacgtaccccattgggccagaagatccgccgcgcgtttgtagctgaggagggttggcgtttagtggccctcgattatagccaaattgaattacgtgtccttgcccatctttctggcgatgagaacctcatccgcgtgtttcaggaaggcaaagacattcacactcaaacggcaagctggatgtttggactgtcagctgaagcgatcgatcctttgatgcgtcgtgcagcgaagaccatcaatttcggtgttctctacggtatgagtgcccaccgtttgtcgcaggaattaggcattccctatgaagaagctgcggcgttcattcagaaatactttcaaagctatcccaaagttaaagcatggatcgagaagactctcgaagaaggccgcacacgtggttacgtagagaccttatttggacgtcgccgctatgttcccgatttaaacgctcgcgtgaaatctgtccgtgaagccgccgaacgcatggcgttcaacatgcctgtacagggcacggcagctgacctcatgaaacttgcaatggtgcgcctttttccacaattgcgtgaagttggtgcccgcatgctcttgcaggtccacgatgaactcttgttagaagcgccaaaagagcgtgcggaagaggtggcagccctcgcgaaagaggttatggaaggcgtgtggcccttagcggtgcctcttgaagtcgaagttggtattggcgaggattggctggctgccaaaggataatga

SEQ ID NO: 2154 - protein, 841 aa, synthetic construct
  REGION 1..841: note = Variant of DNA polymerase I from Thermus sp. strain 2.9
MHHHHHHGGSGVLPVFEPKGRVLLVDGHHLAYRNFFALKGLTTSRGEPVQGVYGFAKSLLKALKEDGDVVIVVFDAKAPSFRHEAYEAYKAGRAPTPEDFPRQLALMKELVDLLGLERLEVPGFEADDVLATLAKKAEREGYEVQILTADRDLFQLLSPRISVLHPEGHRITPEWLWEKYGLRPEQWVDFRALVGDPSDNIPGVKGIGEKTALKLLKEWGSLENLLKNLDQVKPESVREKILAHLEDLKLSLELSRVRTDLPLEVDFRRRREPDWEGLKAFLERLEFGSLLHEFGLLESPLPAEEAPWPPPEGAFLGYRLSRPEPMWAELLALAASAQGRVYRAEDPHGALRGLFEVRGLLAKDLAVVALREGLDLPPTDDPMLLAYLLDPSNTTPEGVARRYGGEWTEDAAKRALLAERLHANLLGRLQGEERLLWLYEEVEKPLSRVLAHMEATGVKLDVAYLENLSLEVAAEMRRLEEEVFRLAGHSFRLNSRDQLERVLFDELGLPPIGKTEKTGKRSTSAAVLEALREVHPIVDKILQYRELAKLKGTYIDPLPALVHPKTGRLHTRFNQTATATGRLSSSDPNLQNIPVRTPLGQKIRRAFVAEEGWRLVALDYSQIELRVLAHLSGDENLIRVFQEGKDIHTQTASWMFGLSAEAIDPLMRRAAKTINFGVLYGMSAHRLSQELGIPYEEAAAFIQKYFQSYPKVKAWIEKTLEEGRTRGYVETLFGRRRYVPDLNARVKSVREAAERMAFNMPVQGTAADLMKLAMVRLFPQLREVGARMLLQVHDELLLEAPKERAEEVAALAKEVMEGVWPLAVPLEVEVGIGEDWLAAKG

SEQ ID NO: 2155 - DNA, 2529 bp, synthetic construct
  misc_feature 1..2529: note = Variant of DNA polymerase I from Thermus sp. strain 2.9
  source 1..2529: mol_type = other DNA
atgcaccatcatcatcatcatggcggtagcggcgtgttaccggtgttcgagcctaaaggtcgcgtgcttctggttgatggccatcatctcgcgtatcgtaacttctttgccctgaaaggattaaccaccagccgtggcgagccggtacagggtgtctacggctttgcaaagtcgctcctgaaagctctgaaagaagacggtgatgtggtgattgttgtctttgatgcgaaagcgccaagttttcgccacgaagcgtacgaagcttacaaagccgggcgtgctccaacgccggaagactttcctcgccaattggcgcttatgaaggaattagtggatttgcttggcctcgaacgcttggaagttcccggtttcgaggcagacgacgtattagcgactctcgcaaagaaagccgaacgtgagggctatgaagtccagatcttgacagcagatcgcgatcttttccagcttttatctccgcgcatctcggtgttacacccggaagggcatcgtatcaccccggaatggctctgggagaaatatggtttgcgtcccgaacaatgggtggattttcgcgccttagtcggcgatccgagcgacaatattccgggagttaaaggtatcggcgagaagacggcgctcaagctccttaaagaatgggggtcgttggagaacttgcttaagaatttagatcaggtcaaaccagagtcagtgcgtgagaagattcttgcacacctcgaagacctcaaattaagccgtgaattgtcccgtgtacgcaccgatttgccgctcgaagttgatttccgtcgccgccgcgaacctgactgggagggtcttaaagcgtttttagagcgtcttgaatttggttcgctcttgcatgaattcggccttttagaaagcccgttaccagccgaggaagcaccttggccaccgcccgaaggcgcgtttttaggttaccgtttgagtcgcccggaaccgatgtgggccgaattattggctcttgcagcgtctgcccagggacgtgtgtatcgcgcggaagaccctcatggtgcgctccgcggcctcttcgaagtccgtggactccttgccaaagacttagctgttgttgcattgcgcgaaggtcttgatttacctccgactgatgatccaatgcttcttgcgtacctcttggacccgtcaaacacgacgcccgaaggcgtagcccgtcgttacggcggcgagtggaccgaagatgcagcgaaacgcgcgttattggccgaacgtttgcacgccaatttattaggacgtttgcaaggcgaggaacgtctcctctggctttacgaagaagtggagaaaccattgagtcgcgtgctcgcgcatatggaagctaccggtgtcaaattagacgtggcgtatttggaggcgctcagccttgaagttgctgccgaaatgcgccgcttggaggaagaagtattccgtttagcaggccactcctttcgccttaattctcgcgatcagttagaacgtgtgttgttcgatgaacttggtctccctcctatcggcaagacagagaagaccggtaaacgtagcacttcagcggcggttttagaagctcttcgcgaagtccatgggattgtggacaagatcttgcagtaccgcgaactcgcgaaattgaaaggcacctatattgaccctcttccggcattagtccacccgaaaacgggacgcctccatacccgcttcaaccaaacagccacggcgaccggtcgtttgtcctcctctgatccaaaccttcagaacattccagtacgtaccccattgggccagaagatccgccgcgcgtttgtagctgaggagggttggcgtttagtggccctcgattatagccaaattgaattacgtgtccttgcccatctttctggcgatgagaacctcatccgcgtgtttcaggaaggcaaagacattcacactcaaacggcaagctggatgtttggagagtcagctgaagcgatcgatcctttgatgcgtcgtgcagcgaagaccatcaatttcggtgttctctacggtatgagtgcccaccgtttgtcgcaggaattaggcattccctatgaagaagctgcggcgttcattcagaaatactttcaaagctatcccaaagttaaagcatggatcgagaagactctcgaagaaggccgcacacgtggttacgtagagaccttatttggacgtcgccgctatgttcccgatttaaacgctcgcgtgaaatctgtccgtgaagccgccgaacgcatggcgttcaacatgcctgtacagggcacggcagctgacctcatgaaacttgcaatggtgcgcctttttccacaattgcgtgaagttggtgcccgcatgctcttgcaggtccacgatgaactcttgttagaagcgccaaaagagcgtgcggaagaggtggcagccctcgcgaaagaggttatggaaggcgtgtggcccttagcggtgcctcttgaagtcgaagttggtattggcgaggattggctggctgccaaaggataatga

SEQ ID NO: 2156 - protein, 841 aa, synthetic construct
  REGION 1..841: note = Variant of DNA polymerase I from Thermus sp. strain 2.9
MHHHHHHGGSGVLPVFEPKGRVLLVDGHHLAYRNFFALKGLTTSRGEPVQGVYGFAKSLLKALKEDGDVVIVVFDAKAPSFRHEAYEAYKAGRAPTPEDFPRQLALMKELVDLLGLERLEVPGFEADDVLATLAKKAEREGYEVQILTADRDLFQLLSPRISVLHPEGHRITPEWLWEKYGLRPEQWVDFRALVGDPSDNIPGVKGIGEKTALKLLKEWGSLENLLKNLDQVKPESVREKILAHLEDLKLSRELSRVRTDLPLEVDFRRRREPDWEGLKAFLERLEFGSLLHEFGLLESPLPAEEAPWPPPEGAFLGYRLSRPEPMWAELLALAASAQGRVYRAEDPHGALRGLFEVRGLLAKDLAVVALREGLDLPPTDDPMLLAYLLDPSNTTPEGVARRYGGEWTEDAAKRALLAERLHANLLGRLQGEERLLWLYEEVEKPLSRVLAHMEATGVKLDVAYLEALSLEVAAEMRRLEEEVFRLAGHSFRLNSRDQLERVLFDELGLPPIGKTEKTGKRSTSAAVLEALREVHGIVDKILQYRELAKLKGTYIDPLPALVHPKTGRLHTRFNQTATATGRLSSSDPNLQNIPVRTPLGQKIRRAFVAEEGWRLVALDYSQIELRVLAHLSGDENLIRVFQEGKDIHTQTASWMFGESAEAIDPLMRRAAKTINFGVLYGMSAHRLSQELGIPYEEAAAFIQKYFQSYPKVKAWIEKTLEEGRTRGYVETLFGRRRYVPDLNARVKSVREAAERMAFNMPVQGTAADLMKLAMVRLFPQLREVGARMLLQVHDELLLEAPKERAEEVAALAKEVMEGVWPLAVPLEVEVGIGEDWLAAKG

SEQ ID NO: 2157 - DNA, 2529 bp, synthetic construct
  misc_feature 1..2529: note = Variant of DNA polymerase I from Thermus sp. strain 2.9
  source 1..2529: mol_type = other DNA
atgcaccatcatcatcatcatggcggtagcggcgtgttaccggtgttcgagcctaaaggtcgcgtgcttctggttgatggccatcatctcgcgtatcgtaacttctttgccctgaaaggattaaccaccagccgtggcgagccggtacagggtgtctacggctttgcaaagtcgctcctgaaagctctgaaagaagacggtgatgtggtgattgttgtctttgatgcgaaagcgccaagttttcgccacgaagcgtacgaagcttacaaagccgggcgtgctccaacgccggaagactttcctcgccaattggcgcttatgaaggaattagtggatttgcttggcctcgaacgcttggaagttcccggtttcgaggcagacgacgtattagcgactctcgcaaagaaagccgaacgtgagggctatgaagtccagatcttgacagcagatcgcgatcttttccagcttttatctccgcgcatctcggtgttacacccggaagggcatcgtatcaccccggaatggctctgggagaaatatggtttgcgtcccgaacaatgggtggattttcgcgccttagcaggcgatccgagcgacaatattccgggagttaaaggtatcggcgagaagacggcgctcaagctccttaaagaatgggggtcgttggagaacttgcttaagaatttagatcaggtcaaaccagagtcagtgcgtgagaagattcttgcacacctcgaagacctcaaattaagccgcgaattgtcccgtgtacgcaccgatttgccgctcgaagttgatttccgtcgccgccgcgaacctgactgggagggtcttaaagcgtttttagagcgtcttgaatttggttcgctcttgcatgaattcggccttttagaaagcccgttaccagccgaagaagcaccttggccaccgcccgaaggcgcgtttttaggttaccgtttgagtcgcccggaaccgatgtgggccgaattattggctcttgcagcgtctgcccagggacgtgtgtatcgcgcggaagaccctcatggtgcgctccgcggcctcttcgaagtccgtggactccttgccaaagacttagctgttgttgcattgcgcgaaggtcttgatttacctccgactgatgatccaatgcttcttgcgtacctcttggacccgtcaaacacgacgcccgaaggcgtagcccgtcgttacggcggcgagtggaccgaagatgcagcgaaacgcgcgttattggccgaacgtttgcacgccaatttattaggacgtttgcaaggcgaggaacgtctcctctggctttacgaagaagtggagaaaccattgagtcgcgtgctcgcgcatatggaagctaccggtgtcaaattagacgtggcgtatttggaggctctcagccttgaagttgctgccgaaatgcgccgcttggaggaagaagtattccgtttagcaggccactcctttcgccttaattctcgcgatcagttagaacgtgtgttgttcgatgaacttggtctccctcctatcggcaagacagagaagaccggtaaacgtagcacttcagcggcggttttagaagctcttcgcgaagtccatcccattgtggacaagatcttgcagtaccgcgaactcgcgaaattgaaaggcacctatattgaccctcttccggcattagtccacccgaaaacgggacgcctccatacccgcttcaaccaaacagccacggcgaccggtcgtttgtcctcctctgatccaaaccttcagaatattccagtacgtaccccattgggccagaagatccgccgcgcgtttgtagctgaggagggttggcgtttagtggccctcgattatagccaaattgaattacgtgtccttgcccatctttctggcgatgagaacctcatccgcgtgtttcaggaaggcaaagacattcacactcaaacggcaagctggatgtttggattatcagctgaagcgatcgatcctttgatgcgtcgtgcagcgaagaccatcaatttcggtgttctctacggtatgagtgcccatcgtttgtcgcaggaattaggcattccctatgaagaagctgcggcgttcattcagaaatactttcaaagctatcccaaagttaaagcatggatcacgaagactctcgaagaaggccgcacacgtggttacgtagagaccttatttggacgtcgccgctatgttcccgatttaaatgctcgcgtgaaatctgtccgtgaagccgccgaacgcatggcgttcaacatgcctgtacagggcacggcagctgacctcatgaaacttgcaatggtgcgcctttttccacaattgcgtgaagttggtgcccgcatgctcttgcaggtccacgatgaactcttgttagaagcgccaaaagagcgtgcggaagaggtggcagccctcgcgaaagaggttatggaaggcgtgtggcccttagcggtgcctcttgaagtcgaagttggtattggcgaggattggctggctgccaaaggataatga

SEQ ID NO: 2158 - protein, 841 aa, synthetic construct
  REGION 1..841: note = Variant of DNA polymerase I from Thermus sp. strain 2.9
MHHHHHHGGSGVLPVFEPKGRVLLVDGHHLAYRNFFALKGLTTSRGEPVQGVYGFAKSLLKALKEDGDVVIVVFDAKAPSFRHEAYEAYKAGRAPTPEDFPRQLALMKELVDLLGLERLEVPGFEADDVLATLAKKAEREGYEVQILTADRDLFQLLSPRISVLHPEGHRITPEWLWEKYGLRPEQWVDFRALAGDPSDNIPGVKGIGEKTALKLLKEWGSLENLLKNLDQVKPESVREKILAHLEDLKLSRELSRVRTDLPLEVDFRRRREPDWEGLKAFLERLEFGSLLHEFGLLESPLPAEEAPWPPPEGAFLGYRLSRPEPMWAELLALAASAQGRVYRAEDPHGALRGLFEVRGLLAKDLAVVALREGLDLPPTDDPMLLAYLLDPSNTTPEGVARRYGGEWTEDAAKRALLAERLHANLLGRLQGEERLLWLYEEVEKPLSRVLAHMEATGVKLDVAYLEALSLEVAAEMRRLEEEVFRLAGHSFRLNSRDQLERVLFDELGLPPIGKTEKTGKRSTSAAVLEALREVHPIVDKILQYRELAKLKGTYIDPLPALVHPKTGRLHTRFNQTATATGRLSSSDPNLQNIPVRTPLGQKIRRAFVAEEGWRLVALDYSQIELRVLAHLSGDENLIRVFQEGKDIHTQTASWMFGLSAEAIDPLMRRAAKTINFGVLYGMSAHRLSQELGIPYEEAAAFIQKYFQSYPKVKAWITKTLEEGRTRGYVETLFGRRRYVPDLNARVKSVREAAERMAFNMPVQGTAADLMKLAMVRLFPQLREVGARMLLQVHDELLLEAPKERAEEVAALAKEVMEGVWPLAVPLEVEVGIGEDWLAAKG

SEQ ID NO: 2159 - DNA, 2529 bp, synthetic construct
  misc_feature 1..2529: note = Variant of DNA polymerase I from Thermus sp. strain 2.9
  source 1..2529: mol_type = other DNA
atgcaccatcatcatcatcatggcggtagcggcgtgttaccggtgttcgagcctaaaggtcgcgtgcttctggttgatggccatcatctcgcgtatcgtaacttctttgccctgaaaggattaaccaccagccgtggcgagccggtacagggtgtctacggctttgcaaagtcgctcctgaaagctctgaaagaagacggtgatgtggtgattgttgtctttgatgcgaaagcgccaagttttcgccacgaagcgtacgaagcttacaaagccgggcgtgctccaacgccggaagactttcctcgccaattggcgcttatgaaggaattagtggatttgcttggcctcgaacgcttggaagttcccggtttcgaggcagacgacgtattagcgactctcgcaaagaaagccgaacgtgagggctatgaagtccagatcttgacagcagatcgcgatcttttccagcttttatctccgcgcatctcggtgttacacccggaagggcatcgtatcaccccggaatggctctgggagaaatatggtttgcgtcccgaacaatgggtggattttcgcgccttagtcggcgatccgagcgacaatattccgggagttaaaggtatcggcgagaagacggcgctcaagctccttaaagaatgggggtcgttggagaacttgcttaagaatttagatcaggtcaaaccagagtcagtgcgtgagaagattcttgcacacctcgaagacctcaaattaagccgcgaattgtcccgtgtacgcaccgatttgccgctcgaagttgatttccgtggccgccgcgaacctgactgggagggtcttaaagcgtttttagagcgtcttgaatttggttcgctcttgcatgaattcggccttttagaaagcccgttaccagccgtggaagcaccttggccaccgcccgaaggcgcgtttttaggttaccgtttgagtcgcccggaaccgatgtgggccgaattactggctcttgcagcgtctgcccagggacgtgtgtatcgcgcggaagaccctcatggtgcgctccgcggcctcttcgaagtccgcggactccttgccaaagacttagctgttgttgcattgcgcgaaggtcttgatttacctccgactgatgatccaatgcttcttgcgtacctcttggacccgtcaaacacgacgcccgaaggcgtagcccgtcgttacggcggcgagtggaccgaagatgcagcgaaacgcgcgttattggccgaacgtttgcacgccaatttattaggacgtttgcaaggcgaggaacgtctcctctggctttacgaagaagtggagaaaccattgagtcgcgtgctcgcgcatatggaagctaccggtgtcaaattagacgtggcgtatttggaggcgctcagccttgaagttgctgccgaaatgcgccgcttggaggaagaagtattccgtttagcaggccattcctttcgccttaattctcgcgatcagttagaacgtgtgttgttcgatgaacttggtctccctcctatcggcaagacagagaagaccggtaaacgtagcacttcagcggcggttttagaagctcttcgcgaagtccatcccattgtggacaagatcttgcagtaccgcgaactcgcgaaattgaaaggcacctatattgaccctcttccggcattagtccacccgaaaacgggacgcctccatacccgcttcaaccaaacagccacggcgaccggtcgtttgtcctcctctgatccaaaccttcagaatattccagtacgtaccccattgggccagaagatccgccgcgcgtttgtagctgaggagggttggcgtttagtggccctcgattatagccaaattgaattacgtgtccttgcccatctttctggcgatgagaacctcatccgcgtgtttcaggaaggcaaagacattcacactcaaacggcaagctggatgtttggagtgtcagctgaagcgatcgatcctttgatgcgtcgtgcagcgaagaccatcaatttcggtgttctctacggtatgagtgcccaccgtttgtcgcaggaattaggcattccctatgaagaagctgcggcgttcattcagaaatactttcaaagctatcccaaagttaaagcatggatcacgaagactctcgaagaaggccgcacacgtggttacgtagagaccttatttggacgtcgccgctatgttcccgatttaaatgctcgcgtgaaatctgtccgtgaagccgccgaacgcatggcgttcaacatgcctgtacagggcacggcagctgacctcatgaaacttgcaatggtgcgcctttttccacaattgcgtgaagttggtgcccgcatgctcttgcaggtccacgatgaactcttgttagaagcgccaaaagagcgtgcggaagaggtggcagccctcgcgaaagaggttatggaaggcgtgtggcccttagcggtgcctcttgaagtcgaagttggtattggcgaggattggctggctgccaaaggataatga

SEQ ID NO: 2160 - protein, 841 aa, synthetic construct
  REGION 1..841: note = Variant of DNA polymerase I from Thermus sp. strain 2.9
MHHHHHHGGSGVLPVFEPKGRVLLVDGHHLAYRNFFALKGLTTSRGEPVQGVYGFAKSLLKALKEDGDVVIVVFDAKAPSFRHEAYEAYKAGRAPTPEDFPRQLALMKELVDLLGLERLEVPGFEADDVLATLAKKAEREGYEVQILTADRDLFQLLSPRISVLHPEGHRITPEWLWEKYGLRPEQWVDFRALVGDPSDNIPGVKGIGEKTALKLLKEWGSLENLLKNLDQVKPESVREKILAHLEDLKLSRELSRVRTDLPLEVDFRGRREPDWEGLKAFLERLEFGSLLHEFGLLESPLPAVEAPWPPPEGAFLGYRLSRPEPMWAELLALAASAQGRVYRAEDPHGALRGLFEVRGLLAKDLAVVALREGLDLPPTDDPMLLAYLLDPSNTTPEGVARRYGGEWTEDAAKRALLAERLHANLLGRLQGEERLLWLYEEVEKPLSRVLAHMEATGVKLDVAYLEALSLEVAAEMRRLEEEVFRLAGHSFRLNSRDQLERVLFDELGLPPIGKTEKTGKRSTSAAVLEALREVHPIVDKILQYRELAKLKGTYIDPLPALVHPKTGRLHTRFNQTATATGRLSSSDPNLQNIPVRTPLGQKIRRAFVAEEGWRLVALDYSQIELRVLAHLSGDENLIRVFQEGKDIHTQTASWMFGVSAEAIDPLMRRAAKTINFGVLYGMSAHRLSQELGIPYEEAAAFIQKYFQSYPKVKAWITKTLEEGRTRGYVETLFGRRRYVPDLNARVKSVREAAERMAFNMPVQGTAADLMKLAMVRLFPQLREVGARMLLQVHDELLLEAPKERAEEVAALAKEVMEGVWPLAVPLEVEVGIGEDWLAAKG

SEQ ID NO: 2161 - DNA, 2529 bp, synthetic construct
  misc_feature 1..2529: note = Variant of DNA polymerase I from Thermus sp. strain 2.9
  source 1..2529: mol_type = other DNA
atgcaccatcatcatcatcatggcggtagcggcgtgttaccggtgttcgagcctaaaggtcgcgtgcttctggttgatggccatcatctcgcgtatcgtaacttctttgccctgaaaggattaaccaccagccgtggcgagccggtacagggtgtctacggctttgcaaagtcgctcctgaaagctctgaaagaagacggtgatgtggtgattgttgtctttgatgcgaaagcgccaagttttcgccacgaagcgtacgaagcttacaaagccgggcgtgctccaacgccggaagactttcctcgccaattggcgcttatgaaggaattagtggatttgcttggcctcgaacgcttggaagttcccggtttcgaggcagacgacgtattagcgactctcgcaaagaaagccgaacgtgagggctatgaagtccagatcttgacagcagatcgcgatcttttccagcttttatctccgcgcatctcggtgttacacccggaagggcatcgtatcaccccggaatggctctgggagaaatatggtttgcgtcccgaacaatgggtggattttcgcgccttagtcggcgatccgagcgacaatattccgggagttaaaggtatcggcgagaagacggcgctcaagctccttaaagaatgggggtcgttggagaacttgcttaagaatttagatcaggtcaaaccagagtcagtgcgtgagaagattcttgcacacctcgaagacctcaaattaagccgtgaattgtcccgtgtacgcaccgatttgccgctcgaagttgatttccgtggccgccgcgaacctgactgggagggtcttaaagcgtttttagagcgtcttgaatttggttcgctcttgcatgaattcggccttttagaaagcccgttaccagccgaggaagcaccttggccaccgcccgaaggcgcgtttttaggttaccgtttgagtcgcccggaaccgatgtgggccgaattattggctcttgcagcgtctgcccagggacgtgtgtatcgcgcggaagaccctcatggtgcgctccgcggcctcttcgaagtccgtggactccttgccaaagacttagctgttgttgcattgcgcgaaggtcttgatttacctccgactgatgatccaatgcttcttgcgtacctcttggacccgtcaaacacgacgcccgaaggcgtagcccgtcgttacggcggcgagtggaccgaagatgcagcgaaacgcgcgttattggccgaacgtttgcacgccaatttattaggacgtttgcaaggcgaggaacgtctcctctggctttacgaagaagtggagaaaccattgagtcgcgtgctcgcgcatatggaagctaccggtgtcaaattagacgtggcgtatttggaggctctcagccttgaagttgctgccgaaatgcgccgcttggaggaagaagtattccgtttagcaggccattcctttcgccttaattctcgcgatcagttagaacgtgtgttgttcgatgaacttggtctccctcctatcggcaagacagagaagaccggtaaacgtagcacttcagcggcggttttagaagctcttcgcgaagtccatcccattgtggacaagatcttgcagtaccgcgaactcgcgaaattgaaaggcacctatattgaccctcttccggcattagtccacccgaaaacgggacgcctccatacccgcttcaaccaaacagccacggcgaccggtcgtttgtcctcctctgatccaaaccttcagaatattccagtacgtaccccattgggccagaagatccgccgcgcgtttgtagctgaggagggttggcgtttagtggccctcgattatagccaaattgaattacgtgtccttgcccatctttctggcgatgagaacctcatccgcgtgtttcaggaaggcaaagacattcacactcaaacggcaagctggatgtttggattatcagctgaagcgatcgatcctttgatgcgtcgtgcagcgaagaccatcaatttcggtgttctctacggtatgagtgcccatcgtttgtcgcaggaattaggcattccctatgaagaagctgcggcgttcattcagaaatactttcaaagctatcccaaagttaaagcatggatcgagaagactctcgaagaaggccgcacacgtggttacgtagagaccttatttggacgtcgccgctatgttcccgatttaaacgctcgcgtgaaatctgtccgtgaagccgccgaacgcatggcgttcaacatgcctgtacagggcacggcagctgacctcatgaaacttgcaatggtgcgcctttttccacaattgcgtgaagttggtgcccgcatgctcttgcaggtccacgatgaactcttgttagaagcgccaaaagagcgtgcggaagaggtggcagccctcgcgaaagaggttatggaaggcgtgtggcccttagcggtgcctcttgaagtcgaagttggtattggcgaggattggctggctgccaaaggataatga

SEQ ID NO: 2162 - protein, 841 aa, synthetic construct
  REGION 1..841: note = Variant of DNA polymerase I from Thermus sp. strain 2.9
MHHHHHHGGSGVLPVFEPKGRVLLVDGHHLAYRNFFALKGLTTSRGEPVQGVYGFAKSLLKALKEDGDVVIVVFDAKAPSFRHEAYEAYKAGRAPTPEDFPRQLALMKELVDLLGLERLEVPGFEADDVLATLAKKAEREGYEVQILTADRDLFQLLSPRISVLHPEGHRITPEWLWEKYGLRPEQWVDFRALVGDPSDNIPGVKGIGEKTALKLLKEWGSLENLLKNLDQVKPESVREKILAHLEDLKLSRELSRVRTDLPLEVDFRGRREPDWEGLKAFLERLEFGSLLHEFGLLESPLPAEEAPWPPPEGAFLGYRLSRPEPMWAELLALAASAQGRVYRAEDPHGALRGLFEVRGLLAKDLAVVALREGLDLPPTDDPMLLAYLLDPSNTTPEGVARRYGGEWTEDAAKRALLAERLHANLLGRLQGEERLLWLYEEVEKPLSRVLAHMEATGVKLDVAYLEALSLEVAAEMRRLEEEVFRLAGHSFRLNSRDQLERVLFDELGLPPIGKTEKTGKRSTSAAVLEALREVHPIVDKILQYRELAKLKGTYIDPLPALVHPKTGRLHTRFNQTATATGRLSSSDPNLQNIPVRTPLGQKIRRAFVAEEGWRLVALDYSQIELRVLAHLSGDENLIRVFQEGKDIHTQTASWMFGLSAEAIDPLMRRAAKTINFGVLYGMSAHRLSQELGIPYEEAAAFIQKYFQSYPKVKAWIEKTLEEGRTRGYVETLFGRRRYVPDLNARVKSVREAAERMAFNMPVQGTAADLMKLAMVRLFPQLREVGARMLLQVHDELLLEAPKERAEEVAALAKEVMEGVWPLAVPLEVEVGIGEDWLAAKG

SEQ ID NO: 2163 - DNA, 2529 bp, synthetic construct
  misc_feature 1..2529: note = Variant of DNA polymerase I from Thermus sp. strain 2.9
  source 1..2529: mol_type = other DNA
atgcaccatcatcatcatcatggcggtagcggcgtgttaccggtgttcgagcctaaaggtcgcgtgcttctggttgatggccatcatctcgcgtatcgtaacttctttgccctgaaaggattaaccaccagccgtggcgagccggtacagggtgtctacggctttgcaaagtcgctcctgaaagctctgaaagaagacggtgatgtggtgattgttgtctttgatgcgaaagcgccaagttttcgccacgaagcgtacgaagcttacaaagccgggcgtgctccaacgccggaagactttcctcgccaattggcgcttatgaaggaattagtggatttgcttggcctcgaacgcttggaagttcccggtttcgaggcagacgacgtattagcgactctcgcaaagaaagccgaacgtgagggctatgaagtccagatcttgacagcagatcgcgatcttttccagcttttatctccgcgcatctcggtgttacacccggaagggcatcgtatcaccccggaatggctctgggagaaatatggtttgcgtcccgaacaatgggtggattttcgcgccttagcaggcgatccgagcgacaatattccgggagttaaaggtatcggcgagaagacggcgctcaagctccttaaagaatgggggtcgttggagaacttgcttaagaatttagatcaggtcaaaccagagtcagtgcgtgagaagattcttgcacacctcgaagacctcaaattaagccgtgaattgtcccgtgtacgcaccgatttgccgctcgaagttgatttccgtcgccgccgcgaacctgactgggagggtcttaaagcgtttttagagcgtcttgaatttggttcgctcttgcatgaattcggccttttagaaagcccgttaccagccggggaagcaccttggccaccgcccgaaggcgcgtttttaggttaccgtttgagtcgcccggaaccgatgtgggccgaattactggctcttgcagcgtctgcccagggacgtgtgtatcgcgcggaagaccctcatggtgcgctccgcggcctcttcgaagtccgtggactccttgccaaagacttagctgttgttgcattgcgcgaaggtcttgatttacctccgactgatgatccaatgcttcttgcgtacctcttggacccgtcaaacacgacgcccgaaggcgtagcccgtcgttacggcggcgagtggaccgaagatgcagcgaaacgcgcgttattggccgaacgtttgcacgccaatttattaggacgtttgcaaggcgaggaacgtctcctctggctttacgaagaagtggagaaaccattgagtcgcgtgctcgcgcatatggaagctaccggtgtcaaattagacgtggcgtatttggaggctctcagccttgaagttgctgccgaaatgcgccgcttggaggaagaagtattccgtttagcaggccactcctttcgccttaattctcgcgatcagttagaacgtgtgttgttcgatgaacttggtctccctcctatcggcaagacagagaagaccggtaaacgtagcacttcagcggcggttttagaagctcttcgcgaagtccatcccattgtggacaagatcttgcagtaccgcgaactcgcgaaattgaaaggcacctatattgaccctcttccggcattagtccacccgaaaacgggacgcctccatacccgcttcaaccaaacagccacggcgaccggtcgtttgtcctcctctgatccaaaccttcagaatattccagtacgtaccccattgggccagaagatccgccgcgcgtttgtagctgaggagggttggcgtttagtggccctcgattatagccaaattgaattacgtgtccttgcccatctttctggcgatgagaacctcatccgcgtgtttcaggaaggcaaagacattcacactcaaacggcaagctggatgtttggattatcagctgaagcgatcgatcctttgatgcgtcgtgcagcgaagaccatcaatttcggtgttctctacggtatgagtgcccaccgtttgtcgcaggaattaggcattccctatgaagaagctgcggcgttcattcagaaatactttcaaagctatcccaaagttaaagcatggatcgagaagactctcgaagaaggccgcacacgtggttacgtagagaccttatttggacgtcgccgctatgttcccgatttaaacgctcgcgtgaaatctgtccgtgaagccgccgaacgcatggcgttcaacatgcctgtacagggcacggcagctgacctcatgaaacttgcaatggtgcgcctttttccacaattgcgtgaagttggtgcccgcatgctcttgcaggtccacgatgaactcttgttagaagcgccaaaagagcgtgcggaagaggtggcagccctcgcgaaagaggttatggaaggcgtgtggcccttagcggtgcctcttgaagtcgaagttggtattggcgaggattggctggctgccaaaggataatga

SEQ ID NO: 2164 - protein, 841 aa, synthetic construct
  REGION 1..841: note = Variant of DNA polymerase I from Thermus sp. strain 2.9
MHHHHHHGGSGVLPVFEPKGRVLLVDGHHLAYRNFFALKGLTTSRGEPVQGVYGFAKSLLKALKEDGDVVIVVFDAKAPSFRHEAYEAYKAGRAPTPEDFPRQLALMKELVDLLGLERLEVPGFEADDVLATLAKKAEREGYEVQILTADRDLFQLLSPRISVLHPEGHRITPEWLWEKYGLRPEQWVDFRALAGDPSDNIPGVKGIGEKTALKLLKEWGSLENLLKNLDQVKPESVREKILAHLEDLKLSRELSRVRTDLPLEVDFRRRREPDWEGLKAFLERLEFGSLLHEFGLLESPLPAGEAPWPPPEGAFLGYRLSRPEPMWAELLALAASAQGRVYRAEDPHGALRGLFEVRGLLAKDLAVVALREGLDLPPTDDPMLLAYLLDPSNTTPEGVARRYGGEWTEDAAKRALLAERLHANLLGRLQGEERLLWLYEEVEKPLSRVLAHMEATGVKLDVAYLEALSLEVAAEMRRLEEEVFRLAGHSFRLNSRDQLERVLFDELGLPPIGKTEKTGKRSTSAAVLEALREVHPIVDKILQYRELAKLKGTYIDPLPALVHPKTGRLHTRFNQTATATGRLSSSDPNLQNIPVRTPLGQKIRRAFVAEEGWRLVALDYSQIELRVLAHLSGDENLIRVFQEGKDIHTQTASWMFGLSAEAIDPLMRRAAKTINFGVLYGMSAHRLSQELGIPYEEAAAFIQKYFQSYPKVKAWIEKTLEEGRTRGYVETLFGRRRYVPDLNARVKSVREAAERMAFNMPVQGTAADLMKLAMVRLFPQLREVGARMLLQVHDELLLEAPKERAEEVAALAKEVMEGVWPLAVPLEVEVGIGEDWLAAKG

SEQ ID NO: 2165 - DNA, 2529 bp, synthetic construct
  misc_feature 1..2529: note = Variant of DNA polymerase I from Thermus sp. strain 2.9
  source 1..2529: mol_type = other DNA
atgcaccatcatcatcatcatggcggtagcggcgtgttaccggtgttcgagcctaaaggtcgcgtgcttctggttgatggccatcatctcgcgtatcgtaacttctttgccctgaaaggattaaccaccagccgtggcgagccggtacagggtgtctacggctttgcaaagtcgctcctgaaagctctgaaagaagacggtgatgtggtgattgttgtctttgatgcgaaagcgccaagttttcgccacgaagcgtacgaagcttacaaagccgggcgtgctccaacgccggaagactttcctcgccaattggcgcttatgaaggaattagtggatttgcttggcctcgaacgcttggaagttcccggtttcgaggcagacgacgtattagcgactctcgcaaagaaagccgaacgtgagggctatgaagtccagatcttgacagcagatcgcgatcttttccagcttttatctccgcgcatctcggtgttacacccggaagggcatcgtatcaccccggaatggctctgggagaaatatggtttgcgtcccgaacaatgggtggattttcgcgccttagtcggcgatccgagcgacaatattccgggagttaaaggtatcggcgagaagacggcgctcaagctccttaaagaatgggggtcgttggagaacttgcttaagaatttagatcaggtcaaaccagagtcagtgcgtgagaagattcttgcacacctcgaagacctcaaattaagcctggaattgtcccgtgtacgcaccgatttgccgctcgaagttgatttccgtcgccgccgcgaacctgactgggagggtcttaaagcgtttttagagcgtcttgaatttggttcgctcttgcatgaattcggccttttagaaagcccgttaccagccgaggaagcaccttggccaccgcccgaaggcgcgtttttaggttaccgtttgagtcgcccggaaccgatgtgggccgaattattggctcttgcagcgtctgcccagggacgtgtgtatcgcgcggaagaccctcatggtgcgctccgcggcctcttcgaagtcaatggactccttgccaaagacttagctgttgttgcattgcgcgaaggtcttgatttacctccgactgatgatccaatgcttcttgcgtacctcttggacccgtcaaacacgacgcccgaaggcgtagcccgtcgttacggcggcgagtggaccgaagatgcagcgaaacgcgcgttattggccgaacgtttgcacgccaatttattaggacgtttgcaaggcgaggaacgtctcctctggctttacgaagaagtggagaaaccattgagtcgcgtgctcgcgcatatggaagctaccggtgtcaaattagacgtggcgtatttggaggcgctcagccttgaagttgctgccgaaatgcgccgcttggaggaagaagtattccgtttagcaggccgttcctttcgccttaattctcgcgatcagttagaacgtgtgttgttcgatgaacttggtctccctcctatcggcaagacagagaagaccggtaaacgtagcacttcagcggcggttttagaagctcttcgcgaagtccatccaattgtggacaagatcttgcagtaccgcgaactcgcgaaattgaaaggcacctatattgaccctcttccggcattagtccacccgaaaacgggacgcctccatacccgcttcaaccaaacagccacggcgaccggtcgtttgtcctcctctgatccaaaccttcagaacattccagtacgtaccccattgggccagaagatccgccgcgcgtttgtagctgaggagggttggcgtttagtggccctcgattatagccaaattgaattacgtgtccttgcccatctttctggcgatgagaacctcatccgcgtgtttcaggaaggcaaagacattcacactcaaacggcaagctggatgtttggactgtcagctgaagcgatcgatcctttgatgcgtcgtgcagcgaagaccatcaatttcggtgttctctacggtatgagtgcccaccgtttgtcgcaggaattaggcattccctatgaagaagctgcggcgttcattcagaaatactttcaaagctatcccaaagttaaagcatggatcgagaagactctcgaagaaggccgcacacgtggttacgtagagaccttatttggacgtcgccgctatgttcccgatttaaatgctcgcgtgaaatctgtccgtgaagccgccgaacgcatggcgttcaacatgcctgtacagggcacggcagctgacctcatgaaacttgcaatggtgcgcctttttccacaattgcgtgaagttggtgcccgcatgctcttgcaggtccacgatgaactcttgttagaagcgccaaaagagcgtgcggaagaggtggcagccctcgcgaaagaggttatggaaggcgtgtggcccttagcggtgcctcttgaagtcgaagttggtattggcgaggattggctggctgccaaaggataatga

SEQ ID NO: 2166 - protein, 841 aa, synthetic construct
  REGION 1..841: note = Variant of DNA polymerase I from Thermus sp. strain 2.9
MHHHHHHGGSGVLPVFEPKGRVLLVDGHHLAYRNFFALKGLTTSRGEPVQGVYGFAKSLLKALKEDGDVVIVVFDAKAPSFRHEAYEAYKAGRAPTPEDFPRQLALMKELVDLLGLERLEVPGFEADDVLATLAKKAEREGYEVQILTADRDLFQLLSPRISVLHPEGHRITPEWLWEKYGLRPEQWVDFRALVGDPSDNIPGVKGIGEKTALKLLKEWGSLENLLKNLDQVKPESVREKILAHLEDLKLSLELSRVRTDLPLEVDFRRRREPDWEGLKAFLERLEFGSLLHEFGLLESPLPAEEAPWPPPEGAFLGYRLSRPEPMWAELLALAASAQGRVYRAEDPHGALRGLFEVNGLLAKDLAVVALREGLDLPPTDDPMLLAYLLDPSNTTPEGVARRYGGEWTEDAAKRALLAERLHANLLGRLQGEERLLWLYEEVEKPLSRVLAHMEATGVKLDVAYLEALSLEVAAEMRRLEEEVFRLAGRSFRLNSRDQLERVLFDELGLPPIGKTEKTGKRSTSAAVLEALREVHPIVDKILQYRELAKLKGTYIDPLPALVHPKTGRLHTRFNQTATATGRLSSSDPNLQNIPVRTPLGQKIRRAFVAEEGWRLVALDYSQIELRVLAHLSGDENLIRVFQEGKDIHTQTASWMFGLSAEAIDPLMRRAAKTINFGVLYGMSAHRLSQELGIPYEEAAAFIQKYFQSYPKVKAWIEKTLEEGRTRGYVETLFGRRRYVPDLNARVKSVREAAERMAFNMPVQGTAADLMKLAMVRLFPQLREVGARMLLQVHDELLLEAPKERAEEVAALAKEVMEGVWPLAVPLEVEVGIGEDWLAAKG

SEQ ID NO: 2167 - DNA, 2529 bp, synthetic construct
  misc_feature 1..2529: note = Variant of DNA polymerase I from Thermus sp. strain 2.9
  source 1..2529: mol_type = other DNA
atgcaccatcatcatcatcatggcggtagcggcgtgttaccggtgttcgagcctaaaggtcgcgtgcttctggttgatggccatcatctcgcgtatcgtaacttctttgccctgaaaggattaaccaccagccgtggcgagccggtacagggtgtctacggctttgcaaagtcgctcctgaaagctctgaaagaagacggtgatgtggtgattgttgtctttgatgcgaaagcgccaagttttcgccacgaagcgtacgaagcttacaaagccgggcgtgctccaacgccggaagactttcctcgccaattggcgcttatgaaggaattagtggatttgcttggcctcgaacgcttggaagttcccggtttcgaggcagacgacgtattagcgactctcgcaaagaaagccgaacgtgagggctatgaagtccagatcttgacagcagatcgcgatcttttccagcttttatctccgcgcatctcggtgttacacccggaagggcatcgtatcaccccggaatggctctgggagaaatatggtttgcgtcccgaacaatgggtggattttcgcgccttagcaggcgatccgagcgacaatattccgggagttaaaggtatcggcgagaagacggcgctcaagctccttaaagaatgggggtcgttggagaacttgcttaagaatttagatcaggtcaaaccagagtcagtgcgtgagaagattcttgcacacctcgaagacctcaaattaagccgcgaattgtcccgtgtacgcaccgatttgccgctcgaagttgatttccgtcgccgccgcgaacctgactgggagggtcttaaagcgtttttagagcgtcttgaatttggttcgctcttgcatgaattcggccttttagaaagcccgttaccagccgaagaagcaccttggccaccgcccgaaggcgcgtttttaggttaccgtttgagtcgcccggaaccgatgtgggccgaattattggctcttgcagcgtctgcccagggacgtgtgtatcgcgcggaagaccctcatggtgcgctccgcggcctcttcgaagtccgtggactccttgccaaagacttagctgttgttgcattgcgcgaaggtcttgatttacctccgactgatgatccaatgcttcttgcgtacctcttggacccgtcaaacacgacgcccgaaggcgtagcccgtcgttacggcggcgagtggaccgaagatgcagcgaaacgcgcgttattggccgaacgtttgcacgccaatttattaggacgtttgcaaggcgaggaacgtctcctctggctttacgaagaagtggagaaaccattgagtcgcgtgctcgcgcatatggaagctaccggtgtcaaattagacgtggcgtatttggaggctctcagccttgaagttgctgccgaaatgcgccgcttggaggaagaagtattccgtttagcaggccactcctttcgccttaattctcgcgatcagttagaacgtgtgttgttcgatgaacttggtctccctcctatcggcaagacagagaagaccggtaaacgtagcacttcagcggcggttttagaagctcttcgcgaagtccatcccattgtggacaagatcttgcagtaccgcgaactcgcgaaattgaaaggcacctatattgaccctcttccggcattagtccacccgaaaacgggacgcctccatacccgcttcaaccaaacagccacggcgaccggtcgtttgtcctcctctgatccaaaccttcagaatattccagtacgtaccccattgggccagaagatccgccgcgcgtttgtagctgaggagggttggcgtttagtggccctcgattatagccaaattgaattacgtgtccttgcccatctttctggcgatgagaacctcatccgcgtgtttcaggaaggcaaagacattcacactcaaacggcaagctggatgtttggattatcagctgaagcgatcgatcctttgatgcgtcgtgcagcgaagaccatcaatttcggtgttctctacggtatgagtgcccatcgtttgtcgcaggaattaggcattccctatgaagaagctgcggcgttcattcagaaatactttcaaagctatcccaaagttaaagcatggatcgagaagactctccgtgaaggccgtacacgtggttacgtagagaccttatttggacgtcgccgctatgttcccgatttaaacgctcgcgtgaaatctgtccgtgaagccgccgaacgcatggcgttcaacatgcctgtacagggcacggcagctgacctcatgaaacttgcaatggtgcgcctttttccacaattgcgtgaagttggtgcccgcatgctcttgcaggtccacgatgaactcttgttagaagcgccaaaagagcgtgcggaagaggtggcagccctcgcgaaagaggttatggaaggcgtgtggcccttagcggtgcctcttgaagtcgaagttggtattggcgaggattggctggctgccaaaggataatga

SEQ ID NO: 2168 - protein, 841 aa, synthetic construct
  REGION 1..841: note = Variant of DNA polymerase I from Thermus sp. strain 2.9
MHHHHHHGGSGVLPVFEPKGRVLLVDGHHLAYRNFFALKGLTTSRGEPVQGVYGFAKSLLKALKEDGDVVIVVFDAKAPSFRHEAYEAYKAGRAPTPEDFPRQLALMKELVDLLGLERLEVPGFEADDVLATLAKKAEREGYEVQILTADRDLFQLLSPRISVLHPEGHRITPEWLWEKYGLRPEQWVDFRALAGDPSDNIPGVKGIGEKTALKLLKEWGSLENLLKNLDQVKPESVREKILAHLEDLKLSRELSRVRTDLPLEVDFRRRREPDWEGLKAFLERLEFGSLLHEFGLLESPLPAEEAPWPPPEGAFLGYRLSRPEPMWAELLALAASAQGRVYRAEDPHGALRGLFEVRGLLAKDLAVVALREGLDLPPTDDPMLLAYLLDPSNTTPEGVARRYGGEWTEDAAKRALLAERLHANLLGRLQGEERLLWLYEEVEKPLSRVLAHMEATGVKLDVAYLEALSLEVAAEMRRLEEEVFRLAGHSFRLNSRDQLERVLFDELGLPPIGKTEKTGKRSTSAAVLEALREVHPIVDKILQYRELAKLKGTYIDPLPALVHPKTGRLHTRFNQTATATGRLSSSDPNLQNIPVRTPLGQKIRRAFVAEEGWRLVALDYSQIELRVLAHLSGDENLIRVFQEGKDIHTQTASWMFGLSAEAIDPLMRRAAKTINFGVLYGMSAHRLSQELGIPYEEAAAFIQKYFQSYPKVKAWIEKTLREGRTRGYVETLFGRRRYVPDLNARVKSVREAAERMAFNMPVQGTAADLMKLAMVRLFPQLREVGARMLLQVHDELLLEAPKERAEEVAALAKEVMEGVWPLAVPLEVEVGIGEDWLAAKG

SEQ ID NO: 2169 - DNA, 2529 bp, synthetic construct
  misc_feature 1..2529: note = Variant of DNA polymerase I from Thermus sp. strain 2.9
  source 1..2529: mol_type = other DNA
atgcaccatcatcatcatcatggcggtagcggcgtgttaccggtgttcgagcctaaaggtcgcgtgcttctggttgatggccatcatctcgcgtatcgtaacttctttgccctgaaaggattaaccaccagccgtggcgagccggtacagggtgtctacggctttgcaaagtcgctcctgaaagctctgaaagaagacggtgatgtggtgattgttgtctttgatgcgaaagcgccaagttttcgccacgaagcgtacgaagcttacaaagccgggcgtgctccaacgccggaagactttcctcgccaattggcgcttatgaaggaattagtggatttgcttggcctcgaacgcttggaagttcccggtttcgaggcagacgacgtattagcgactctcgcaaagaaagccgaacgtgagggctatgaagtccagatcttgacagcagatcgcgatcttttccagcttttatctccgcgcatctcggtgttacacccggaagggcatcgtatcaccccggaatggctctgggagaaatatggtttgcgtcccgaacaatgggtggattttcgcgccttagccggcgatccgagcgacaatattccgggagttaaaggtatcggcgagaagacggcgctcaagctccttaaagaatgggggtcgttggagaacttgcttaagaatttagatcaggtcaaaccagagtcagtgcgtgagaagattcttgcacacctcgaagacctcaaattaagccgtgaattgtcccgtgtacgcaccgatttgccgctcgaagttgatttccgtcgccgccgcgaacctgactgggagggtcttaaagcgtttttagagcgtcttgaatttggttcgctcttgcatgaattcggccttttagaaagcccgttaccagccgtggaagcaccttggccaccgcccgaaggcgcgtttttaggttaccgtttgagtcgcccggaaccgatgtgggccgaattattggctcttgcagcgtctgcccagggacgtgtgtatcgcgcggaagaccctcatggtgcgctccgcggcctcttcgaagtccgtggactccttgccaaagacttagctgttgttgcattgcgcgaaggtcttgatttacctccgactgatgatccaatgcttcttgcgtacctcttggacccgtcaaacacgacgcccgaaggcgtagcccgtcgttacggcggcgagtggaccgaagatgcagcgaaacgcgcgttattggccgaacgtttgcacgccaatttattaggacgtttgcaaggcgaggaacgtctcctctggctttacgaagaagtggagaaaccattgagtcgcgtgctcgcgcatatggaagctaccggtgtcaaattagacgtggcgtatttggaggcgctcagccttgaagttgctgccgaaatgcgccgcttggaggaagaagtattccgtttagcaggccgttcctttcgccttaattctcgcgatcagttagaacgtgtgttgttcgatgaacttggtctccctcctatcggcaagacagagaagaccggtaaacgtagcacttcagcggcggttttagaagctcttcgcgaagtccatcccattgtggacaagatcttgcagtaccgcgaactcgcgaaattgaaaggcacctatattgaccctcttccggcattagtccacccgaaaacgggacgcctccatacccgcttcaaccaaacagccacggcgaccggtcgtttgtcctcctctgatccaaaccttcagaatattccagtacgtaccccattgggccagaagatccgccgcgcgtttgtagctgaggagggttggcgtttagtggccctcgattatagccaaattgaattacgtgtccttgcccatctttctggcgatgagaacctcatccgcgtgtttcaggaaggcaaagacattcacactcaaacggcaagctggatgtttggagagtcagctgaagcgatcgatcctttgatgcgtcgtgcagcgaagaccatcaatttcggtgttctctacggtatgagtgcccatcgtttgtcgcaggaattaggcattccctatgaagaagctgcggcgttcattcagaaatactttcaaagctatcccaaagttaaagcatggatcgagaagactctcgaagaaggccgcacacgtggttacgtagagaccttatttggacgtcgccgctatgttcccgatttaaacgctcgcgtgaaatctgtccgtgaagccgccgaacgcatggcgttcaacatgcctgtacagggcacggcagctgacctcatgaaacttgcaatggtgcgcctttttccacaattgcgtgaagttggtgcccgcatgctcttgcaggtccacgatgaactcttgttagaagcgccaaaagagcgtgcggaagaggtggcagccctcgcgaaagaggttatggaaggcgtgtggcccttagcggtgcctcttgaagtcgaagttggtattggcgaggattggctggctgccaaaggataatga

SEQ ID NO: 2170 - protein, 841 aa, synthetic construct
  REGION 1..841: note = Variant of DNA polymerase I from Thermus sp. strain 2.9
MHHHHHHGGSGVLPVFEPKGRVLLVDGHHLAYRNFFALKGLTTSRGEPVQGVYGFAKSLLKALKEDGDVVIVVFDAKAPSFRHEAYEAYKAGRAPTPEDFPRQLALMKELVDLLGLERLEVPGFEADDVLATLAKKAEREGYEVQILTADRDLFQLLSPRISVLHPEGHRITPEWLWEKYGLRPEQWVDFRALAGDPSDNIPGVKGIGEKTALKLLKEWGSLENLLKNLDQVKPESVREKILAHLEDLKLSRELSRVRTDLPLEVDFRRRREPDWEGLKAFLERLEFGSLLHEFGLLESPLPAVEAPWPPPEGAFLGYRLSRPEPMWAELLALAASAQGRVYRAEDPHGALRGLFEVRGLLAKDLAVVALREGLDLPPTDDPMLLAYLLDPSNTTPEGVARRYGGEWTEDAAKRALLAERLHANLLGRLQGEERLLWLYEEVEKPLSRVLAHMEATGVKLDVAYLEALSLEVAAEMRRLEEEVFRLAGRSFRLNSRDQLERVLFDELGLPPIGKTEKTGKRSTSAAVLEALREVHPIVDKILQYRELAKLKGTYIDPLPALVHPKTGRLHTRFNQTATATGRLSSSDPNLQNIPVRTPLGQKIRRAFVAEEGWRLVALDYSQIELRVLAHLSGDENLIRVFQEGKDIHTQTASWMFGESAEAIDPLMRRAAKTINFGVLYGMSAHRLSQELGIPYEEAAAFIQKYFQSYPKVKAWIEKTLEEGRTRGYVETLFGRRRYVPDLNARVKSVREAAERMAFNMPVQGTAADLMKLAMVRLFPQLREVGARMLLQVHDELLLEAPKERAEEVAALAKEVMEGVWPLAVPLEVEVGIGEDWLAAKG

SEQ ID NO: 2171 - DNA, 2529 bp, synthetic construct
  misc_feature 1..2529: note = Variant of DNA polymerase I from Thermus sp. strain 2.9
  source 1..2529: mol_type = other DNA
atgcaccatcatcatcatcatggcggtagcggcgtgttaccggtgttcgagcctaaaggtcgcgtgcttctggttgatggccatcatctcgcgtatcgtaacttctttgccctgaaaggattaaccaccagccgtggcgagccggtacagggtgtctacggctttgcaaagtcgctcctgaaagctctgaaagaagacggtgatgtggtgattgttgtctttgatgcgaaagcgccaagttttcgccacgaagcgtacgaagcttacaaagccgggcgtgctccaacgccggaagactttcctcgccaattggcgcttatgaaggaattagtggatttgcttggcctcgaacgcttggaagttcccggtttcgaggcagacgacgtattagcgactctcgcaaagaaagccgaacgtgagggctatgaagtccagatcttgacagcagatcgcgatcttttccagcttttatctccgcgcatctcggtgttacacccggaagggcatcgtatcaccccggaatggctctgggagaaatatggtttgcgtcccgaacaatgggtggattttcgcgccttagcaggcgatccgagcgacaatattccgggagttaaaggtatcggcgagaagacggcgctcaagctccttaaagaatgggggtcgttggagaacttgcttaagaatttagatcaggtcaaaccagagtcagtgcgtgagaagattcttgcacacctcgaagacctcaaattaagcctggaattgtcccgtgtacgcaccgatttgccgctcgaagttgatttccgtcgccgccgcgaacctgactgggagggtcttaaagcgtttttagagcgtcttgaatttggttcgctcttgcatgaattcggccttttagaaagcccgttaccagccgaggaagcaccttggccaccgcccgaaggcgcgtttttaggttaccgtttgagtcgcccggaaccgatgtgggccgaattattggctcttgcagcgtctgcccagggacgtgtgtatcgcgcggaagaccctcatggtgcgctccgcggcctcttcgaagtcaatggactccttgccaaagacttagctgttgttgcattgcgcgaaggtcttgatttacctccgactgatgatccaatgcttcttgcgtacctcttggacccgtcaaacacgacgcccgaaggcgtagcccgtcgttacggcggcgagtggaccgaagatgcagcgaaacgcgcgttattggccgaacgtttgcacgccaatttattaggacgtttgcaaggcgaggaacgtctcctctggctttacgaagaagtggagaaaccattgagtcgcgtgctcgcgcatatggaagctaccggtgtcaaattagacgtggcgtatttggagaatctcagccttgaagttgctgccgaaatgcgccgcttggaggaagaagtattccgtttagcaggccgttcctttcgccttaattctcgcgatcagttagaacgtgtgttgttcgatgaacttggtctccctcctatcggcaagacagagaagaccggtaaacgtagcacttcagcggcggttttagaagctcttcgcgaagtccatccaattgtggacaagatcttgcagtaccgcgaactcgcgaaattgaaaggcacctatattgaccctcttccggcattagtccacccgaaaacgggacgcctccatacccgcttcaaccaaacagccacggcgaccggtcgtttgtcctcctctgatccaaaccttcagaatattccagtacgtaccccattgggccagaagatccgccgcgcgtttgtagctgaggagggttggcgtttagtggccctcgattatagccaaattgaattacgtgtccttgcccatctttctggcgatgagaacctcatccgcgtgtttcaggaaggcaaagacattcacactcaaacggcaagctggatgtttggattatcagctgaagcgatcgatcctttgatgcgtcgtgcagcgaagaccatcaatttcggtgttctctacggtatgagtgcctttcgtttgtcgcaggaattaggcattccctatgaagaagctgcggcgttcattcagaaatactttcaaagctatcccaaagttaaagcatggatcgagaagactctcgaagaaggccgcacacgtggttacgtagagaccttatttggacgtcgccgctatgttcccgatttaaacgctcgcgtgaaatctgtccgtgaagccgccgaacgcatggcgttcaacatgcctgtacagggcacggcagctgacctcatgaaacttgcaatggtgcgcctttttccacaattgcgtgaagttggtgcccgcatgctcttgcaggtccacgatgaactcttgttagaagcgccaaaagagcgtgcggaagaggtggcagccctcgcgaaagaggttatggaaggcgtgtggcccttagcggtgcctcttgaagtcgaagttggtattggcgaggattggctggctgccaaaggataatga

SEQ ID NO: 2172 - protein, 841 aa, synthetic construct
  REGION 1..841: note = Variant of DNA polymerase I from Thermus sp. strain 2.9
MHHHHHHGGSGVLPVFEPKGRVLLVDGHHLAYRNFFALKGLTTSRGEPVQGVYGFAKSLLKALKEDGDVVIVVFDAKAPSFRHEAYEAYKAGRAPTPEDFPRQLALMKELVDLLGLERLEVPGFEADDVLATLAKKAEREGYEVQILTADRDLFQLLSPRISVLHPEGHRITPEWLWEKYGLRPEQWVDFRALAGDPSDNIPGVKGIGEKTALKLLKEWGSLENLLKNLDQVKPESVREKILAHLEDLKLSLELSRVRTDLPLEVDFRRRREPDWEGLKAFLERLEFGSLLHEFGLLESPLPAEEAPWPPPEGAFLGYRLSRPEPMWAELLALAASAQGRVYRAEDPHGALRGLFEVNGLLAKDLAVVALREGLDLPPTDDPMLLAYLLDPSNTTPEGVARRYGGEWTEDAAKRALLAERLHANLLGRLQGEERLLWLYEEVEKPLSRVLAHMEATGVKLDVAYLENLSLEVAAEMRRLEEEVFRLAGRSFRLNSRDQLERVLFDELGLPPIGKTEKTGKRSTSAAVLEALREVHPIVDKILQYRELAKLKGTYIDPLPALVHPKTGRLHTRFNQTATATGRLSSSDPNLQNIPVRTPLGQKIRRAFVAEEGWRLVALDYSQIELRVLAHLSGDENLIRVFQEGKDIHTQTASWMFGLSAEAIDPLMRRAAKTINFGVLYGMSAFRLSQELGIPYEEAAAFIQKYFQSYPKVKAWIEKTLEEGRTRGYVETLFGRRRYVPDLNARVKSVREAAERMAFNMPVQGTAADLMKLAMVRLFPQLREVGARMLLQVHDELLLEAPKERAEEVAALAKEVMEGVWPLAVPLEVEVGIGEDWLAAKG

SEQ ID NO: 2173 - DNA, 2529 bp, synthetic construct
  misc_feature 1..2529: note = Variant of DNA polymerase I from Thermus sp. strain 2.9
  source 1..2529: mol_type = other DNA
atgcaccatcatcatcatcatggcggtagcggcgtgttaccggtgttcgagcctaaaggtcgcgtgcttctggttgatggccatcatctcgcgtatcgtaacttctttgccctgaaaggattaaccaccagccgtggcgagccggtacagggtgtctacggctttgcaaagtcgctcctgaaagctctgaaagaagacggtgatgtggtgattgttgtctttgatgcgaaagcgccaagttttcgccacgaagcgtacgaagcttacaaagccgggcgtgctccaacgccggaagactttcctcgccaattggcgcttatgaaggaattagtggatttgcttggcctcgaacgcttggaagttcccggtttcgaggcagacgacgtattagcgactctcgcaaagaaagccgaacgtgagggctatgaagtccagatcttgacagcagatcgcgatcttttccagcttttatctccgcgcatctcggtgttacacccggaagggcatcgtatcaccccggaatggctctgggagaaatatggtttgcgtcccgaacaatgggtggattttcgcgccttagtcggcgatccgagcgacaatattccgggagttaaaggtatcggcgagaagacggcgctcaagctccttaaagaatgggggtcgttggagaacttgcttaagaatttagatcaggtcaaaccagagtcagtgcgtgagaagattcttgcacacctcgaagacctcaaattaagccgcgaattgtcccgtgtacgcaccgatttgccgctcgaagttgatttccgtcgccgccgcgaacctgactgggagggtcttaaagcgtttttagagcgtcttgaatttggttcgctcttgcatgaattcggccttttagaaagcccgttaccagccgtggaagcaccttggccaccgcccgaaggcgcgtttttaggttaccgtttgagtcgcccggaaccgatgtgggccgaattattggctcttgcagcgtctgcccagggacgtgtgtatcgcgcggaagaccctcatggtgcgctccgcggcctcttcgaagtcaatggactccttgccaaagacttagctgttgttgcattgcgcgaaggtcttgatttacctccgactgatgatccaatgcttcttgcgtacctcttggacccgtcaaacacgacgcccgaaggcgtagcccgtcgttacggcggcgagtggaccgaagatgcagcgaaacgcgcgttattggccgaacgtttgcacgccaatttattaggacgtttgcaaggcgaggaacgtctcctctggctttacgaagaagtggagaaaccattgagtcgcgtgctcgcgcatatggaagctaccggtgtcaaattagacgtggcgtatttggagaatctcagccttgaagttgctgccgaaatgcgccgcttggaggaagaagtattccgtttagcaggccgttcctttcgccttaattctcgcgatcagttagaacgtgtgttgttcgatgaacttggtctccctcctatcggcaagacagagaagaccggtaaacgtagcacttcagcggcggttttagaagctcttcgcgaagtccatccaattgtggacaagatcttgcagtaccgcgaactcgcgaaattgaaaggcacctatattgaccctcttccggcattagtccacccgaaaacgggacgcctccatacccgcttcaaccaaacagccacggcgaccggtcgtttgtcctcctctgatccaaaccttcagaatattccagtacgtaccccattgggccagaagatccgccgcgcgtttgtagctgaggagggttggcgtttagtggccctcgattatagccaaattgaattacgtgtccttgcccatctttctggcgatgagaacctcatccgcgtgtttcaggaaggcaaagacattcacactcaaacggcaagctggatgtttggattatcagctgaagcgatcgatcctttgatgcgtcgtgcagcgaagaccatcaatttcggtgttctctacggtatgagtgcccatcgtttgtcgcaggaattaggcattccctatgaagaagctgcggcgttcattcagaaatactttcaaagctatcccaaagttaaagcatggatcgagaagactctcgaagaaggccgcacacgtggttacgtagagaccttatttggacgtcgccgctatgttcccgatttaaacgctcgcgtgaaatctgtccgtgaagccgccgaacgcatggcgttcaacatgcctgtacagggcacggcagctgacctcatgaaacttgcaatggtgcgcctttttccacaattgcgtgaagttggtgcccgcatgctcttgcaggtccacgatgaactcttgttagaagcgccaaaagagcgtgcggaagaggtggcagccctcgcgaaagaggttatggaaggcgtgtggcccttagcggtgcctcttgaagtcgaagttggtattggcgaggattggctggctgccaaaggataatga

SEQ ID NO: 2174 - protein, 841 aa, synthetic construct
  REGION 1..841: note = Variant of DNA polymerase I from Thermus sp. strain 2.9
MHHHHHHGGSGVLPVFEPKGRVLLVDGHHLAYRNFFALKGLTTSRGEPVQGVYGFAKSLLKALKEDGDVVIVVFDAKAPSFRHEAYEAYKAGRAPTPEDFPRQLALMKELVDLLGLERLEVPGFEADDVLATLAKKAEREGYEVQILTADRDLFQLLSPRISVLHPEGHRITPEWLWEKYGLRPEQWVDFRALVGDPSDNIPGVKGIGEKTALKLLKEWGSLENLLKNLDQVKPESVREKILAHLEDLKLSRELSRVRTDLPLEVDFRRRREPDWEGLKAFLERLEFGSLLHEFGLLESPLPAVEAPWPPPEGAFLGYRLSRPEPMWAELLALAASAQGRVYRAEDPHGALRGLFEVNGLLAKDLAVVALREGLDLPPTDDPMLLAYLLDPSNTTPEGVARRYGGEWTEDAAKRALLAERLHANLLGRLQGEERLLWLYEEVEKPLSRVLAHMEATGVKLDVAYLENLSLEVAAEMRRLEEEVFRLAGRSFRLNSRDQLERVLFDELGLPPIGKTEKTGKRSTSAAVLEALREVHPIVDKILQYRELAKLKGTYIDPLPALVHPKTGRLHTRFNQTATATGRLSSSDPNLQNIPVRTPLGQKIRRAFVAEEGWRLVALDYSQIELRVLAHLSGDENLIRVFQEGKDIHTQTASWMFGLSAEAIDPLMRRAAKTINFGVLYGMSAHRLSQELGIPYEEAAAFIQKYFQSYPKVKAWIEKTLEEGRTRGYVETLFGRRRYVPDLNARVKSVREAAERMAFNMPVQGTAADLMKLAMVRLFPQLREVGARMLLQVHDELLLEAPKERAEEVAALAKEVMEGVWPLAVPLEVEVGIGEDWLAAKG

SEQ ID NO: 2175 - DNA, 2529 bp, synthetic construct
  misc_feature 1..2529: note = Variant of DNA polymerase I from Thermus sp. strain 2.9
  source 1..2529: mol_type = other DNA
atgcaccatcatcatcatcatggcggtagcggcgtgttaccggtgttcgagcctaaaggtcgcgtgcttctggttgatggccatcatctcgcgtatcgtaacttctttgccctgaaaggattaaccaccagccgtggcgagccggtacagggtgtctacggctttgcaaagtcgctcctgaaagctctgaaagaagacggtgatgtggtgattgttgtctttgatgcgaaagcgccaagttttcgccacgaagcgtacgaagcttacaaagccgggcgtgctccaacgccggaagactttcctcgccaattggcgcttatgaaggaattagtggatttgcttggcctcgaacgcttggaagttcccggtttcgaggcagacgacgtattagcgactctcgcaaagaaagccgaacgtgagggctatgaagtccagatcttgacagcagatcgcgatcttttccagcttttatctccgcgcatctcggtgttacacccggaagggcatcgtatcaccccggaatggctctgggagaaatatggtttgcgtcccgaacaatgggtggattttcgcgccttagcaggcgatccgagcgacaatattccgggagttaaaggtatcggcgagaagacggcgctcaagctccttaaagaatgggggtcgttggagaacttgcttaagaatttagatcaggtcaaaccagagtcagtgcgtgagaagattcttgcacacctcgaagacctcaaattaagccgcgaattgtcccgtgtacgcaccgatttgccgctcgaagttgatttccgtcgccgccgcgaacctgactgggagggtcttaaagcgtttttagagcgtcttgaatttggttcgctcttgcatgaattcggccttttagaaagcccgttaccagccgaagaagcaccttggccaccgcccgaaggcgcgtttttaggttaccgtttgagtcgcccggaaccgatgtgggccgaattattggctcttgcagcgtctgcccagggacgtgtgtatcgcgcggaagaccctcatggtgcgctccgcggcctcttcgaagtccgtggactccttgccaaagacttagctgttgttgcattgcgcgaaggtcttgatttacctccgactgatgatccaatgcttcttgcgtacctcttggacccgtcaaacacgacgcccgaaggcgtagcccgtcgttacggcggcgagtggaccgaagatgcagcgaaacgcgcgttattggccgaacgtttgcacgccaatttattaggacgtttgcaaggcgaggaacgtctcctctggctttacgaagaagtggagaaaccattgagtcgcgtgctcgcgcatatggaagctaccggtgtcaaattagacgtggcgtatttggaggctctcagccttgaagttgctgccgaaatgcgccgcttggaggaagaagtattccgtttagcaggccattcctttcgccttaattctcgcgatcagttagaacgtgtgttgttcgatgaacttggtctccctcctatcggcaagacagagaagaccggtaaacgtagcacttcagcggcggttttagaagctcttcgcgaagtccatcccattgtggacaagatcttgcagtaccgcgaactcgcgaaattgaaaggcacctatattgaccctcttccggcattagtccacccgaaaacgggacgcctccatacccgcttcaaccaaacagccacggcgaccggtcgtttgtcctcctctgatccaaaccttcagaatattccagtacgtaccccattgggccagaagatccgccgcgcgtttgtagctgaggagggttggcgtttagtggccctcgattatagccaaattgaattacgtgtccttgcccatctttctggcgatgagaacctcatccgcgtgtttcaggaaggcaaagacattcacactcaaacggcaagctggatgtttggattatcagctgaagcgatcgatcctttgatgcgtcgtgcagcgaagaccatcaatttcggtgttctctacggtatgagtgcctttcgtttgtcgcaggaattaggcattccctatgaagaagctgcggcgttcattcagaaatactttcaaagctatcccaaagttaaagcatggatcgagaagactctcgaagaaggccgcacacgtggttacgtagagaccttatttggacgtcgccgctatgttcccgatttaaacgctcgcgtgaaatctgtccgtgaagccgccgaacgcatggcgttcaacatgcctgtacagggcacggcagctgacctcatgaaacttgcaatggtgcgcctttttccacaattgcgtgaagttggtgcccgcatgctcttgcaggtccacgatgaactcttgttagaagcgccaaaagagcgtgcggaagaggtggcagccctcgcgaaagaggttatggaaggcgtgtggcccttagcggtgcctcttgaagtcgaagttggtattggcgaggattggctggctgccaaaggataatga

SEQ ID NO: 2176 - protein, 841 aa, synthetic construct
  REGION 1..841: note = Variant of DNA polymerase I from Thermus sp. strain 2.9
MHHHHHHGGSGVLPVFEPKGRVLLVDGHHLAYRNFFALKGLTTSRGEPVQGVYGFAKSLLKALKEDGDVVIVVFDAKAPSFRHEAYEAYKAGRAPTPEDFPRQLALMKELVDLLGLERLEVPGFEADDVLATLAKKAEREGYEVQILTADRDLFQLLSPRISVLHPEGHRITPEWLWEKYGLRPEQWVDFRALAGDPSDNIPGVKGIGEKTALKLLKEWGSLENLLKNLDQVKPESVREKILAHLEDLKLSRELSRVRTDLPLEVDFRRRREPDWEGLKAFLERLEFGSLLHEFGLLESPLPAEEAPWPPPEGAFLGYRLSRPEPMWAELLALAASAQGRVYRAEDPHGALRGLFEVRGLLAKDLAVVALREGLDLPPTDDPMLLAYLLDPSNTTPEGVARRYGGEWTEDAAKRALLAERLHANLLGRLQGEERLLWLYEEVEKPLSRVLAHMEATGVKLDVAYLEALSLEVAAEMRRLEEEVFRLAGHSFRLNSRDQLERVLFDELGLPPIGKTEKTGKRSTSAAVLEALREVHPIVDKILQYRELAKLKGTYIDPLPALVHPKTGRLHTRFNQTATATGRLSSSDPNLQNIPVRTPLGQKIRRAFVAEEGWRLVALDYSQIELRVLAHLSGDENLIRVFQEGKDIHTQTASWMFGLSAEAIDPLMRRAAKTINFGVLYGMSAFRLSQELGIPYEEAAAFIQKYFQSYPKVKAWIEKTLEEGRTRGYVETLFGRRRYVPDLNARVKSVREAAERMAFNMPVQGTAADLMKLAMVRLFPQLREVGARMLLQVHDELLLEAPKERAEEVAALAKEVMEGVWPLAVPLEVEVGIGEDWLAAKG

SEQ ID NO: 2177 - DNA, 2529 bp, synthetic construct
  misc_feature 1..2529: note = Variant of DNA polymerase I from Thermus sp. strain 2.9
  source 1..2529: mol_type = other DNA
atgcaccatcatcatcatcatggcggtagcggcgtgttaccggtgttcgagcctaaaggtcgcgtgcttctggttgatggccatcatctcgcgtatcgtaacttctttgccctgaaaggattaaccaccagccgtggcgagccggtacagggtgtctacggctttgcaaagtcgctcctgaaagctctgaaagaagacggtgatgtggtgattgttgtctttgatgcgaaagcgccaagttttcgccacgaagcgtacgaagcttacaaagccgggcgtgctccaacgccggaagactttcctcgccaattggcgcttatgaaggaattagtggatttgcttggcctcgaacgcttggaagttcccggtttcgaggcagacgacgtattagcgactctcgcaaagaaagccgaacgtgagggctatgaagtccagatcttgacagcagatcgcgatcttttccagcttttatctccgcgcatctcggtgttacacccggaagggcatcgtatcaccccggaatggctctgggagaaatatggtttgcgtcccgaacaatgggtggattttcgcgccttagtcggcgatccgagcgacaatattccgggagttaaaggtatcggcgagaagacggcgctcaagctccttaaagaatgggggtcgttggagaacttgcttaagaatttagatcaggtcaaaccagagtcagtgcgtgagaagattcttgcacacctcgaagacctcaaattaagcctggaattgtcccgtgtacgcaccgatttgccgctcgaagttgatttccgtggccgccgcgaacctgactgggagggtcttaaagcgtttttagagcgtcttgaatttggttcgctcttgcatgaattcggccttttagaaagcccgttaccagccggggaagcaccttggccaccgcccgaaggcgcgtttttaggttaccgtttgagtcgcccggaaccgatgtgggccgaattactggctcttgcagcgtctgcccagggacgtgtgtatcgcgcggaagaccctcatggtgcgctccgcggcctcttcgaagtccgcggactccttgccaaagacttagctgttgttgcattgcgcgaaggtcttgatttacctccgactgatgatccaatgcttcttgcgtacctcttggacccgtcaaacacgacgcccgaaggcgtagcccgtcgttacggcggcgagtggaccgaagatgcagcgaaacgcgcgttattggccgaacgtttgcacgccaatttattaggacgtttgcaaggcgaggaacgtctcctctggctttacgaagaagtggagaaaccattgagtcgcgtgctcgcgcatatggaagctaccggtgtcaaattagacgtggcgtatttggagaatctcagccttgaagttgctgccgaaatgcgccgcttggaggaagaagtattccgtttagcaggccactcctttcgccttaattctcgcgatcagttagaacgtgtgttgttcgatgaacttggtctccctcctatcggcaagacagagaagaccggtaaacgtagcacttcagcggcggttttagaagctcttcgcgaagtccatcccattgtggacaagatcttgcagtaccgcgaactcgcgaaattgaaaggcacctatattgaccctcttccggcattagtccacccgaaaacgggacgcctccatacccgcttcaaccaaacagccacggcgaccggtcgtttgtcctcctctgatccaaaccttcagaatattccagtacgtaccccattgggccagaagatccgccgcgcgtttgtagctgaggagggttggcgtttagtggccctcgattatagccaaattgaattacgtgtccttgcccatctttctggcgatgagaacctcatccgcgtgtttcaggaaggcaaagacattcacactcaaacggcaagctggatgtttggattatcagctgaagcgatcgatcctttgatgcgtcgtgcagcgaagaccatcaatttcggtgttctctacggtatgagtgcccaccgtttgtcgcaggaattaggcattccctatgaagaagctgcggcgttcattcagaaatactttcaaagctatcccaaagttaaagcatggatcgagaagactctcgaagaaggccgcacacgtggttacgtagagaccttatttggacgtcgccgctatgttcccgatttaaatgctcgcgtgaaatctgtccgtgaagccgccgaacgcatggcgttcaacatgcctgtacagggcacggcagctgacctcatgaaacttgcaatggtgcgcctttttccacaattgcgtgaagttggtgcccgcatgctcttgcaggtccacgatgaactcttgttagaagcgccaaaagagcgtgcggaagaggtggcagccctcgcgaaagaggttatggaaggcgtgtggcccttagcggtgcctcttgaagtcgaagttggtattggcgaggattggctggctgccaaaggataatga

SEQ ID NO: 2178 - protein, 841 aa, synthetic construct
  REGION 1..841: note = Variant of DNA polymerase I from Thermus sp. strain 2.9
MHHHHHHGGSGVLPVFEPKGRVLLVDGHHLAYRNFFALKGLTTSRGEPVQGVYGFAKSLLKALKEDGDVVIVVFDAKAPSFRHEAYEAYKAGRAPTPEDFPRQLALMKELVDLLGLERLEVPGFEADDVLATLAKKAEREGYEVQILTADRDLFQLLSPRISVLHPEGHRITPEWLWEKYGLRPEQWVDFRALVGDPSDNIPGVKGIGEKTALKLLKEWGSLENLLKNLDQVKPESVREKILAHLEDLKLSLELSRVRTDLPLEVDFRGRREPDWEGLKAFLERLEFGSLLHEFGLLESPLPAGEAPWPPPEGAFLGYRLSRPEPMWAELLALAASAQGRVYRAEDPHGALRGLFEVRGLLAKDLAVVALREGLDLPPTDDPMLLAYLLDPSNTTPEGVARRYGGEWTEDAAKRALLAERLHANLLGRLQGEERLLWLYEEVEKPLSRVLAHMEATGVKLDVAYLENLSLEVAAEMRRLEEEVFRLAGHSFRLNSRDQLERVLFDELGLPPIGKTEKTGKRSTSAAVLEALREVHPIVDKILQYRELAKLKGTYIDPLPALVHPKTGRLHTRFNQTATATGRLSSSDPNLQNIPVRTPLGQKIRRAFVAEEGWRLVALDYSQIELRVLAHLSGDENLIRVFQEGKDIHTQTASWMFGLSAEAIDPLMRRAAKTINFGVLYGMSAHRLSQELGIPYEEAAAFIQKYFQSYPKVKAWIEKTLEEGRTRGYVETLFGRRRYVPDLNARVKSVREAAERMAFNMPVQGTAADLMKLAMVRLFPQLREVGARMLLQVHDELLLEAPKERAEEVAALAKEVMEGVWPLAVPLEVEVGIGEDWLAAKG

SEQ ID NO: 2179 - DNA, 2529 bp, synthetic construct
  misc_feature 1..2529: note = Variant of DNA polymerase I from Thermus sp. strain 2.9
  source 1..2529: mol_type = other DNA
atgcaccatcatcatcatcatggcggtagcggcgtgttaccggtgttcgagcctaaaggtcgcgtgcttctggttgatggccatcatctcgcgtatcgtaacttctttgccctgaaaggattaaccaccagccgtggcgagccggtacagggtgtctacggctttgcaaagtcgctcctgaaagctctgaaagaagacggtgatgtggtgattgttgtctttgatgcgaaagcgccaagttttcgccacgaagcgtacgaagcttacaaagccgggcgtgctccaacgccggaagactttcctcgccaattggcgcttatgaaggaattagtggatttgcttggcctcgaacgcttggaagttcccggtttcgaggcagacgacgtattagcgactctcgcaaagaaagccgaacgtgagggctatgaagtccagatcttgacagcagatcgcgatcttttccagcttttatctccgcgcatctcggtgttacacccggaagggcatcgtatcaccccggaatggctctgggagaaatatggtttgcgtcccgaacaatgggtggattttcgcgccttagcaggcgatccgagcgacaatattccgggagttaaaggtatcggcgagaagacggcgctcaagctccttaaagaatgggggtcgttggagaacttgcttaagaatttagatcaggtcaaaccagagtcagtgcgtgagaagattcttgcacacctcgaagacctcaaattaagccgcgaattgtcccgtgtacgcaccgatttgccgctcgaagttgatttccgtggccgccgcgaacctgactgggagggtcttaaagcgtttttagagcgtcttgaatttggttcgctcttgcatgaattcggccttttagaaagcccgttaccagccgaagaagcaccttggccaccgcccgaaggcgcgtttttaggttaccgtttgagtcgcccggaaccgatgtgggccgaattattggctcttgcagcgtctgcccagggacgtgtgtatcgcgcggaagaccctcatggtgcgctccgcggcctcttcgaagtccgtggactccttgccaaagacttagctgttgttgcattgcgcgaaggtcttgatttacctccgactgatgatccaatgcttcttgcgtacctcttggacccgtcaaacacgacgcccgaaggcgtagcccgtcgttacggcggcgagtggaccgaagatgcagcgaaacgcgcgttattggccgaacgtttgcacgccaatttattaggacgtttgcaaggcgaggaacgtctcctctggctttacgaagaagtggagaaaccattgagtcgcgtgctcgcgcatatggaagctaccggtgtcaaattagacgtggcgtatttggaggctctcagccttgaagttgctgccgaaatgcgccgcttggaggaagaagtattccgtttagcaggccactcctttcgccttaattctcgcgatcagttagaacgtgtgttgttcgatgaacttggtctccctcctatcggcaagacagagaagaccggtaaacgtagcacttcagcggcggttttagaagctcttcgcgaagtccatcccattgtggacaagatcttgcagtaccgcgaactcgcgaaattgaaaggcacctatattgaccctcttccggcattagtccacccgaaaacgggacgcctccatacccgcttcaaccaaacagccacggcgaccggtcgtttgtcctcctctgatccaaaccttcagaatattccagtacgtaccccattgggccagaagatccgccgcgcgtttgtagctgaggagggttggcgtttagtggccctcgattatagccaaattgaattacgtgtccttgcccatctttctggcgatgagaacctcatccgcgtgtttcaggaaggcaaagacattcacactcaaacggcaagctggatgtttggattatcagctgaagcgatcgatcctttgatgcgtcgtgcagcgaagaccatcaatttcggtgttctctacggtatgagtgcccaccgtttgtcgcaggaattaggcattccctatgaagaagctgcggcgttcattcagaaatactttcaaagctatcccaaagttaaagcatggatcgagaagactctccgtgaaggccgcacacgtggttacgtagagaccttatttggacgtcgccgctatgttcccgatttaaatgctcgcgtgaaatctgtccgtgaagccgccgaacgcatggcgttcaacatgcctgtacagggcacggcagctgacctcatgaaacttgcaatggtgcgcctttttccacaattgcgtgaagttggtgcccgcatgctcttgcaggtccacgatgaactcttgttagaagcgccaaaagagcgtgcggaagaggtggcagccctcgcgaaagaggttatggaaggcgtgtggcccttagcggtgcctcttgaagtcgaagttggtattggcgaggattggctggctgccaaaggataatga

SEQ ID NO: 2180 - protein, 841 aa, synthetic construct
  REGION 1..841: note = Variant of DNA polymerase I from Thermus sp. strain 2.9
MHHHHHHGGSGVLPVFEPKGRVLLVDGHHLAYRNFFALKGLTTSRGEPVQGVYGFAKSLLKALKEDGDVVIVVFDAKAPSFRHEAYEAYKAGRAPTPEDFPRQLALMKELVDLLGLERLEVPGFEADDVLATLAKKAEREGYEVQILTADRDLFQLLSPRISVLHPEGHRITPEWLWEKYGLRPEQWVDFRALAGDPSDNIPGVKGIGEKTALKLLKEWGSLENLLKNLDQVKPESVREKILAHLEDLKLSRELSRVRTDLPLEVDFRGRREPDWEGLKAFLERLEFGSLLHEFGLLESPLPAEEAPWPPPEGAFLGYRLSRPEPMWAELLALAASAQGRVYRAEDPHGALRGLFEVRGLLAKDLAVVALREGLDLPPTDDPMLLAYLLDPSNTTPEGVARRYGGEWTEDAAKRALLAERLHANLLGRLQGEERLLWLYEEVEKPLSRVLAHMEATGVKLDVAYLEALSLEVAAEMRRLEEEVFRLAGHSFRLNSRDQLERVLFDELGLPPIGKTEKTGKRSTSAAVLEALREVHPIVDKILQYRELAKLKGTYIDPLPALVHPKTGRLHTRFNQTATATGRLSSSDPNLQNIPVRTPLGQKIRRAFVAEEGWRLVALDYSQIELRVLAHLSGDENLIRVFQEGKDIHTQTASWMFGLSAEAIDPLMRRAAKTINFGVLYGMSAHRLSQELGIPYEEAAAFIQKYFQSYPKVKAWIEKTLREGRTRGYVETLFGRRRYVPDLNARVKSVREAAERMAFNMPVQGTAADLMKLAMVRLFPQLREVGARMLLQVHDELLLEAPKERAEEVAALAKEVMEGVWPLAVPLEVEVGIGEDWLAAKG

SEQ ID NO: 2181 - DNA, 2529 bp, synthetic construct
  misc_feature 1..2529: note = Variant of DNA polymerase I from Thermus sp. strain 2.9
  source 1..2529: mol_type = other DNA
atgcaccatcatcatcatcatggcggtagcggcgtgttaccggtgttcgagcctaaaggtcgcgtgcttctggttgatggccatcatctcgcgtatcgtaacttctttgccctgaaaggattaaccaccagccgtggcgagccggtacagggtgtctacggctttgcaaagtcgctcctgaaagctctgaaagaagacggtgatgtggtgattgttgtctttgatgcgaaagcgccaagttttcgccacgaagcgtacgaagcttacaaagccgggcgtgctccaacgccggaagactttcctcgccaattggcgcttatgaaggaattagtggatttgcttggcctcgaacgcttggaagttcccggtttcgaggcagacgacgtattagcgactctcgcaaagaaagccgaacgtgagggctatgaagtccagatcttgacagcagatcgcgatcttttccagcttttatctccgcgcatctcggtgttacacccggaagggcatcgtatcaccccggaatggctctgggagaaatatggtttgcgtcccgaacaatgggtggattttcgcgccttagccggcgatccgagcgacaatattccgggagttaaaggtatcggcgagaagacggcgctcaagctccttaaagaatgggggtcgttggagaacttgcttaagaatttagatcaggtcaaaccagagtcagtgcgtgagaagattcttgcacacctcgaagacctcaaattaagccgtgaattgtcccgtgtacgcaccgatttgccgctcgaagttgatttccgtggccgccgcgaacctgactgggagggtcttaaagcgtttttagagcgtcttgaatttggttcgctcttgcatgaattcggccttttagaaagcccgttaccagccgtggaagcaccttggccaccgcccgaaggcgcgtttttaggttaccgtttgagtcgcccggaaccgatgtgggccgaattattggctcttgcagcgtctgcccagggacgtgtgtatcgcgcggaagaccctcatggtgcgctccgcggcctcttcgaagtccgcggactccttgccaaagacttagctgttgttgcattgcgcgaaggtcttgatttacctccgactgatgatccaatgcttcttgcgtacctcttggacccgtcaaacacgacgcccgaaggcgtagcccgtcgttacggcggcgagtggaccgaagatgcagcgaaacgcgcgttattggccgaacgtttgcacgccaatttattaggacgtttgcaaggcgaggaacgtctcctctggctttacgaagaagtggagaaaccattgagtcgcgtgctcgcgcatatggaagctaccggtgtcaaattagacgtggcgtatttggagaatctcagccttgaagttgctgccgaaatgcgccgcttggaggaagaagtattccgtttagcaggccactcctttcgccttaattctcgcgatcagttagaacgtgtgttgttcgatgaacttggtctccctcctatcggcaagacagagaagaccggtaaacgtagcacttcagcggcggttttagaagctcttcgcgaagtccatccaattgtggacaagatcttgcagtaccgcgaactcgcgaaattgaaaggcacctatattgaccctcttccggcattagtccacccgaaaacgggacgcctccatacccgcttcaaccaaacagccacggcgaccggtcgtttgtcctcctctgatccaaaccttcagaatattccagtacgtaccccattgggccagaagatccgccgcgcgtttgtagctgaggagggttggcgtttagtggccctcgattatagccaaattgaattacgtgtccttgcccatctttctggcgatgagaacctcatccgcgtgtttcaggaaggcaaagacattcacactcaaacggcaagctggatgtttggattatcagctgaagcgatcgatcctttgatgcgtcgtgcagcgaagaccatcaatttcggtgttctctacggtatgagtgcccatcgtttgtcgcaggaattaggcattccctatgaagaagctgcggcgttcattcagaaatactttcaaagctatcccaaagttaaagcatggatcgagaagactctcgaagaaggccgcacacgtggttacgtagagaccttatttggacgtcgccgctatgttcccgatttaaatgctcgcgtgaaatctgtccgtgaagccgccgaacgcatggcgttcaacatgcctgtacagggcacggcagctgacctcatgaaacttgcaatggtgcgcctttttccacaattgcgtgaagttggtgcccgcatgctcttgcaggtccacgatgaactcttgttagaagcgccaaaagagcgtgcggaagaggtggcagccctcgcgaaagaggttatggaaggcgtgtggcccttagcggtgcctcttgaagtcgaagttggtattggcgaggattggctggctgccaaaggataatga

SEQ ID NO: 2182 - protein, 841 aa, synthetic construct
  REGION 1..841: note = Variant of DNA polymerase I from Thermus sp. strain 2.9
MHHHHHHGGSGVLPVFEPKGRVLLVDGHHLAYRNFFALKGLTTSRGEPVQGVYGFAKSLLKALKEDGDVVIVVFDAKAPSFRHEAYEAYKAGRAPTPEDFPRQLALMKELVDLLGLERLEVPGFEADDVLATLAKKAEREGYEVQILTADRDLFQLLSPRISVLHPEGHRITPEWLWEKYGLRPEQWVDFRALAGDPSDNIPGVKGIGEKTALKLLKEWGSLENLLKNLDQVKPESVREKILAHLEDLKLSRELSRVRTDLPLEVDFRGRREPDWEGLKAFLERLEFGSLLHEFGLLESPLPAVEAPWPPPEGAFLGYRLSRPEPMWAELLALAASAQGRVYRAEDPHGALRGLFEVRGLLAKDLAVVALREGLDLPPTDDPMLLAYLLDPSNTTPEGVARRYGGEWTEDAAKRALLAERLHANLLGRLQGEERLLWLYEEVEKPLSRVLAHMEATGVKLDVAYLENLSLEVAAEMRRLEEEVFRLAGHSFRLNSRDQLERVLFDELGLPPIGKTEKTGKRSTSAAVLEALREVHPIVDKILQYRELAKLKGTYIDPLPALVHPKTGRLHTRFNQTATATGRLSSSDPNLQNIPVRTPLGQKIRRAFVAEEGWRLVALDYSQIELRVLAHLSGDENLIRVFQEGKDIHTQTASWMFGLSAEAIDPLMRRAAKTINFGVLYGMSAHRLSQELGIPYEEAAAFIQKYFQSYPKVKAWIEKTLEEGRTRGYVETLFGRRRYVPDLNARVKSVREAAERMAFNMPVQGTAADLMKLAMVRLFPQLREVGARMLLQVHDELLLEAPKERAEEVAALAKEVMEGVWPLAVPLEVEVGIGEDWLAAKG

SEQ ID NO: 2183 - DNA, 2529 bp, synthetic construct
  misc_feature 1..2529: note = Variant of DNA polymerase I from Thermus sp. strain 2.9
  source 1..2529: mol_type = other DNA
atgcaccatcatcatcatcatggcggtagcggcgtgttaccggtgttcgagcctaaaggtcgcgtgcttctggttgatggccatcatctcgcgtatcgtaacttctttgccctgaaaggattaaccaccagccgtggcgagccggtacagggtgtctacggctttgcaaagtcgctcctgaaagctctgaaagaagacggtgatgtggtgattgttgtctttgatgcgaaagcgccaagttttcgccacgaagcgtacgaagcttacaaagccgggcgtgctccaacgccggaagactttcctcgccaattggcgcttatgaaggaattagtggatttgcttggcctcgaacgcttggaagttcccggtttcgaggcagacgacgtattagcgactctcgcaaagaaagccgaacgtgagggctatgaagtccagatcttgacagcagatcgcgatcttttccagcttttatctccgcgcatctcggtgttacacccggaagggcatcgtatcaccccggaatggctctgggagaaatatggtttgcgtcccgaacaatgggtggattttcgcgccttagcaggcgatccgagcgacaatattccgggagttaaaggtatcggcgagaagacggcgctcaagctccttaaagaatgggggtcgttggagaacttgcttaagaatttagatcaggtcaaaccagagtcagtgcgtgagaagattcttgcacacctcgaagacctcaaattaagccgtgaattgtcccgtgtacgcaccgatttgccgctcgaagttgatttccgtcgccgccgcgaacctgactgggagggtcttaaagcgtttttagagcgtcttgaatttggttcgctcttgcatgaattcggccttttagaaagcccgttaccagccggggaagcaccttggccaccgcccgaaggcgcgtttttaggttaccgtttgagtcgcccggaaccgatgtgggccgaattattggctcttgcagcgtctgcccagggacgtgtgtatcgcgcggaagaccctcatggtgcgctccgcggcctcttcgaagtccgtggactccttgccaaagacttagctgttgttgcattgcgcgaaggtcttgatttacctccgactgatgatccaatgcttcttgcgtacctcttggacccgtcaaacacgacgcccgaaggcgtagcccgtcgttacggcggcgagtggaccgaagatgcagcgaaacgcgcgttattggccgaacgtttgcacgccaatttattaggacgtttgcaaggcgaggaacgtctcctctggctttacgaagaagtggagaaaccattgagtcgcgtgctcgcgcatatggaagctaccggtgtcaaattagacgtggcgtatttggaggctctcagccttgaagttgctgccgaaatgcgccgcttggaggaagaagtattccgtttagcaggccactcctttcgccttaattctcgcgatcagttagaacgtgtgttgttcgatgaacttggtctccctcctatcggcaagacagagaagaccggtaaacgtagcacttcagcggcggttttagaagctcttcgcgaagtccatccaattgtggacaagatcttgcagtaccgcgaactcgcgaaattgaaaggcacctatattgaccctcttccggcattagtccacccgaaaacgggacgcctccatacccgcttcaaccaaacagccacggcgaccggtcgtttgtcctcctctgatccaaaccttcagaatattccagtacgtaccccattgggccagaagatccgccgcgcgtttgtagctgaggagggttggcgtttagtggccctcgattatagccaaattgaattacgtgtccttgcccatctttctggcgatgagaacctcatccgcgtgtttcaggaaggcaaagacattcacactcaaacggcaagctggatgtttggactgtcagctgaagcgatcgatcctttgatgcgtcgtgcagcgaagaccatcaatttcggtgttctctacggtatgagtgcctttcgtttgtcgcaggaattaggcattccctatgaagaagctgcggcgttcattcagaaatactttcaaagctatcccaaagttaaagcatggatcgagaagactctcgaagaaggccgcacacgtggttacgtagagaccttatttggacgtcgccgctatgttcccgatttaaacgctcgcgtgaaatctgtccgtgaagccgccgaacgcatggcgttcaacatgcctgtacagggcacggcagctgacctcatgaaacttgcaatggtgcgcctttttccacaattgcgtgaagttggtgcccgcatgctcttgcaggtccacgatgaactcttgttagaagcgccaaaagagcgtgcggaagaggtggcagccctcgcgaaagaggttatggaaggcgtgtggcccttagcggtgcctcttgaagtcgaagttggtattggcgaggattggctggctgccaaaggataatga

SEQ ID NO: 2184 - protein, 841 aa, synthetic construct
  REGION 1..841: note = Variant of DNA polymerase I from Thermus sp. strain 2.9
MHHHHHHGGSGVLPVFEPKGRVLLVDGHHLAYRNFFALKGLTTSRGEPVQGVYGFAKSLLKALKEDGDVVIVVFDAKAPSFRHEAYEAYKAGRAPTPEDFPRQLALMKELVDLLGLERLEVPGFEADDVLATLAKKAEREGYEVQILTADRDLFQLLSPRISVLHPEGHRITPEWLWEKYGLRPEQWVDFRALAGDPSDNIPGVKGIGEKTALKLLKEWGSLENLLKNLDQVKPESVREKILAHLEDLKLSRELSRVRTDLPLEVDFRRRREPDWEGLKAFLERLEFGSLLHEFGLLESPLPAGEAPWPPPEGAFLGYRLSRPEPMWAELLALAASAQGRVYRAEDPHGALRGLFEVRGLLAKDLAVVALREGLDLPPTDDPMLLAYLLDPSNTTPEGVARRYGGEWTEDAAKRALLAERLHANLLGRLQGEERLLWLYEEVEKPLSRVLAHMEATGVKLDVAYLEALSLEVAAEMRRLEEEVFRLAGHSFRLNSRDQLERVLFDELGLPPIGKTEKTGKRSTSAAVLEALREVHPIVDKILQYRELAKLKGTYIDPLPALVHPKTGRLHTRFNQTATATGRLSSSDPNLQNIPVRTPLGQKIRRAFVAEEGWRLVALDYSQIELRVLAHLSGDENLIRVFQEGKDIHTQTASWMFGLSAEAIDPLMRRAAKTINFGVLYGMSAFRLSQELGIPYEEAAAFIQKYFQSYPKVKAWIEKTLEEGRTRGYVETLFGRRRYVPDLNARVKSVREAAERMAFNMPVQGTAADLMKLAMVRLFPQLREVGARMLLQVHDELLLEAPKERAEEVAALAKEVMEGVWPLAVPLEVEVGIGEDWLAAKG

SEQ ID NO: 2185 - DNA, 2529 bp, synthetic construct
  misc_feature 1..2529: note = Variant of DNA polymerase I from Thermus sp. strain 2.9
  source 1..2529: mol_type = other DNA
atgcaccatcatcatcatcatggcggtagcggcgtgttaccggtgttcgagcctaaaggtcgcgtgcttctggttgatggccatcatctcgcgtatcgtaacttctttgccctgaaaggattaaccaccagccgtggcgagccggtacagggtgtctacggctttgcaaagtcgctcctgaaagctctgaaagaagacggtgatgtggtgattgttgtctttgatgcgaaagcgccaagttttcgccacgaagcgtacgaagcttacaaagccgggcgtgctccaacgccggaagactttcctcgccaattggcgcttatgaaggaattagtggatttgcttggcctcgaacgcttggaagttcccggtttcgaggcagacgacgtattagcgactctcgcaaagaaagccgaacgtgagggctatgaagtccagatcttgacagcagatcgcgatcttttccagcttttatctccgcgcatctcggtgttacacccggaagggcatcgtatcaccccggaatggctctgggagaaatatggtttgcgtcccgaacaatgggtggattttcgcgccttagccggcgatccgagcgacaatattccgggagttaaaggtatcggcgagaagacggcgctcaagctccttaaagaatgggggtcgttggagaacttgcttaagaatttagatcaggtcaaaccagagtcagtgcgtgagaagattcttgcacacctcgaagacctcaaattaagcctggaattgtcccgtgtacgcaccgatttgccgctcgaagttgatttccgtcgccgccgcgaacctgactgggagggtcttaaagcgtttttagagcgtcttgaatttggttcgctcttgcatgaattcggccttttagaaagcccgttaccagccggggaagcaccttggccaccgcccgaaggcgcgtttttaggttaccgtttgagtcgcccggaaccgatgtgggccgaattactggctcttgcagcgtctgcccagggacgtgtgtatcgcgcggaagaccctcatggtgcgctccgcggcctcttcgaagtccgtggactccttgccaaagacttagctgttgttgcattgcgcgaaggtcttgatttacctccgactgatgatccaatgcttcttgcgtacctcttggacccgtcaaacacgacgcccgaaggcgtagcccgtcgttacggcggcgagtggaccgaagatgcagcgaaacgcgcgttattggccgaacgtttgcacgccaatttattaggacgtttgcaaggcgaggaacgtctcctctggctttacgaagaagtggagaaaccattgagtcgcgtgctcgcgcatatggaagctaccggtgtcaaattagacgtggcgtatttggaggctctcagccttgaagttgctgccgaaatgcgccgcttggaggaagaagtattccgtttagcaggccgttcctttcgccttaattctcgcgatcagttagaacgtgtgttgttcgatgaacttggtctccctcctatcggcaagacagagaagaccggtaaacgtagcacttcagcggcggttttagaagctcttcgcgaagtccatcccattgtggacaagatcttgcagtaccgcgaactcgcgaaattgaaaggcacctatattgaccctcttccggcattagtccacccgaaaacgggacgcctccatacccgcttcaaccaaacagccacggcgaccggtcgtttgtcctcctctgatccaaaccttcagaatattccagtacgtaccccattgggccagaagatccgccgcgcgtttgtagctgaggagggttggcgtttagtggccctcgattatagccaaattgaattacgtgtccttgcccatctttctggcgatgagaacctcatccgcgtgtttcaggaaggcaaagacattcacactcaaacggcaagctggatgtttggattatcagctgaagcgatcgatcctttgatgcgtcgtgcagcgaagaccatcaatttcggtgttctctacggtatgagtgcccaccgtttgtcgcaggaattaggcattccctatactgaagctgcggcgttcattcagaaatactttcaaagctatcccaaagttaaagcatggatcacgaagactctcgaagaaggccgcacacgtggttacgtagagaccttatttggacgtcgccgctatgttcccgatttaaatgctcgcgtgaaatctgtccgtgaagccgccgaacgcatggcgttcaacatgcctgtacagggcacggcagctgacctcatgaaacttgcaatggtgcgcctttttccacaattgcgtgaagttggtgcccgcatgctcttgcaggtccacgatgaactcttgttagaagcgccaaaagagcgtgcggaagaggtggcagccctcgcgaaagaggttatggaaggcgtgtggcccttagcggtgcctcttgaagtcgaagttggtattggcgaggattggctggctgccaaaggataatga

SEQ ID NO: 2186 - protein, 841 aa, synthetic construct
  REGION 1..841: note = Variant of DNA polymerase I from Thermus sp. strain 2.9
MHHHHHHGGSGVLPVFEPKGRVLLVDGHHLAYRNFFALKGLTTSRGEPVQGVYGFAKSLLKALKEDGDVVIVVFDAKAPSFRHEAYEAYKAGRAPTPEDFPRQLALMKELVDLLGLERLEVPGFEADDVLATLAKKAEREGYEVQILTADRDLFQLLSPRISVLHPEGHRITPEWLWEKYGLRPEQWVDFRALAGDPSDNIPGVKGIGEKTALKLLKEWGSLENLLKNLDQVKPESVREKILAHLEDLKLSLELSRVRTDLPLEVDFRRRREPDWEGLKAFLERLEFGSLLHEFGLLESPLPAGEAPWPPPEGAFLGYRLSRPEPMWAELLALAASAQGRVYRAEDPHGALRGLFEVRGLLAKDLAVVALREGLDLPPTDDPMLLAYLLDPSNTTPEGVARRYGGEWTEDAAKRALLAERLHANLLGRLQGEERLLWLYEEVEKPLSRVLAHMEATGVKLDVAYLEALSLEVAAEMRRLEEEVFRLAGRSFRLNSRDQLERVLFDELGLPPIGKTEKTGKRSTSAAVLEALREVHPIVDKILQYRELAKLKGTYIDPLPALVHPKTGRLHTRFNQTATATGRLSSSDPNLQNIPVRTPLGQKIRRAFVAEEGWRLVALDYSQIELRVLAHLSGDENLIRVFQEGKDIHTQTASWMFGLSAEAIDPLMRRAAKTINFGVLYGMSAHRLSQELGIPYTEAAAFIQKYFQSYPKVKAWITKTLEEGRTRGYVETLFGRRRYVPDLNARVKSVREAAERMAFNMPVQGTAADLMKLAMVRLFPQLREVGARMLLQVHDELLLEAPKERAEEVAALAKEVMEGVWPLAVPLEVEVGIGEDWLAAKG

SEQ ID NO: 2187 - DNA, 2529 bp, synthetic construct
  misc_feature 1..2529: note = Variant of DNA polymerase I from Thermus sp. strain 2.9
  source 1..2529: mol_type = other DNA
atgcaccatcatcatcatcatggcggtagcggcgtgttaccggtgttcgagcctaaaggtcgcgtgcttctggttgatggccatcatctcgcgtatcgtaacttctttgccctgaaaggattaaccaccagccgtggcgagccggtacagggtgtctacggctttgcaaagtcgctcctgaaagctctgaaagaagacggtgatgtggtgattgttgtctttgatgcgaaagcgccaagttttcgccacgaagcgtacgaagcttacaaagccgggcgtgctccaacgccggaagactttcctcgccaattggcgcttatgaaggaattagtggatttgcttggcctcgaacgcttggaagttcccggtttcgaggcagacgacgtattagcgactctcgcaaagaaagccgaacgtgagggctatgaagtccagatcttgacagcagatcgcgatcttttccagcttttatctccgcgcatctcggtgttacacccggaagggcatcgtatcaccccggaatggctctgggagaaatatggtttgcgtcccgaacaatgggtggattttcgcgccttagccggcgatccgagcgacaatattccgggagttaaaggtatcggcgagaagacggcgctcaagctccttaaagaatgggggtcgttggagaacttgcttaagaatttagatcaggtcaaaccagagtcagtgcgtgagaagattcttgcacacctcgaagacctcaaattaagccgcgaattgtcccgtgtacgcaccgatttgccgctcgaagttgatttccgtcgccgccgcgaacctgactgggagggtcttaaagcgtttttagagcgtcttgaatttggttcgctcttgcatgaattcggccttttagaaagcccgttaccagccgaagaagcaccttggccaccgcccgaaggcgcgtttttaggttaccgtttgagtcgcccggaaccgatgtgggccgaattactggctcttgcagcgtctgcccagggacgtgtgtatcgcgcggaagaccctcatggtgcgctccgcggcctcttcgaagtccgtggactccttgccaaagacttagctgttgttgcattgcgcgaaggtcttgatttacctccgactgatgatccaatgcttcttgcgtacctcttggacccgtcaaacacgacgcccgaaggcgtagcccgtcgttacggcggcgagtggaccgaagatgcagcgaaacgcgcgttattggccgaacgtttgcacgccaatttattaggacgtttgcaaggcgaggaacgtctcctctggctttacgaagaagtggagaaaccattgagtcgcgtgctcgcgcatatggaagctaccggtgtcaaattagacgtggcgtatttggaggctctcagccttgaagttgctgccgaaatgcgccgcttggaggaagaagtattccgtttagcaggccgttcctttcgccttaattctcgcgatcagttagaacgtgtgttgttcgatgaacttggtctccctcctatcggcaagacagagaagaccggtaaacgtagcacttcagcggcggttttagaagctcttcgcgaagtccatcccattgtggacaagatcttgcagtaccgcgaactcgcgaaattgaaaggcacctatattgaccctcttccggcattagtccacccgaaaacgggacgcctccatacccgcttcaaccaaacagccacggcgaccggtcgtttgtcctcctctgatccaaaccttcagaatattccagtacgtaccccattgggccagaagatccgccgcgcgtttgtagctgaggagggttggcgtttagtggccctcgattatagccaaattgaattacgtgtccttgcccatctttctggcgatgagaacctcatccgcgtgtttcaggaaggcaaagacattcacactcaaacggcaagctggatgtttggactgtcagctgaagcgatcgatcctttgatgcgtcgtgcagcgaagaccatcaatttcggtgttctctacggtatgagtgcccatcgtttgtcgcaggaattaggcattccctatactgaagctgcggcgttcattcagaaatactttcaaagctatcccaaagttaaagcatggatcgagaagactctcgaagaaggccgcacacgtggttacgtagagaccttatttggacgtcgccgctatgttcccgatttaactgctcgcgtgaaatctgtccgtgaagccgccgaacgcatggcgttcaacatgcctgtacagggcacggcagctgacctcatgaaacttgcaatggtgcgcctttttccacaattgcgtgaagttggtgcccgcatgctcttgcaggtccacgatgaactcttgttagaagcgccaaaagagcgtgcggaagaggtggcagccctcgcgaaagaggttatggaaggcgtgtggcccttagcggtgcctcttgaagtcgaagttggtattggcgaggattggctggctgccaaaggataatga

SEQ ID NO: 2188 - protein, 841 aa, synthetic construct
  REGION 1..841: note = Variant of DNA polymerase I from Thermus sp. strain 2.9
MHHHHHHGGSGVLPVFEPKGRVLLVDGHHLAYRNFFALKGLTTSRGEPVQGVYGFAKSLLKALKEDGDVVIVVFDAKAPSFRHEAYEAYKAGRAPTPEDFPRQLALMKELVDLLGLERLEVPGFEADDVLATLAKKAEREGYEVQILTADRDLFQLLSPRISVLHPEGHRITPEWLWEKYGLRPEQWVDFRALAGDPSDNIPGVKGIGEKTALKLLKEWGSLENLLKNLDQVKPESVREKILAHLEDLKLSRELSRVRTDLPLEVDFRRRREPDWEGLKAFLERLEFGSLLHEFGLLESPLPAEEAPWPPPEGAFLGYRLSRPEPMWAELLALAASAQGRVYRAEDPHGALRGLFEVRGLLAKDLAVVALREGLDLPPTDDPMLLAYLLDPSNTTPEGVARRYGGEWTEDAAKRALLAERLHANLLGRLQGEERLLWLYEEVEKPLSRVLAHMEATGVKLDVAYLEALSLEVAAEMRRLEEEVFRLAGRSFRLNSRDQLERVLFDELGLPPIGKTEKTGKRSTSAAVLEALREVHPIVDKILQYRELAKLKGTYIDPLPALVHPKTGRLHTRFNQTATATGRLSSSDPNLQNIPVRTPLGQKIRRAFVAEEGWRLVALDYSQIELRVLAHLSGDENLIRVFQEGKDIHTQTASWMFGLSAEAIDPLMRRAAKTINFGVLYGMSAHRLSQELGIPYTEAAAFIQKYFQSYPKVKAWIEKTLEEGRTRGYVETLFGRRRYVPDLTARVKSVREAAERMAFNMPVQGTAADLMKLAMVRLFPQLREVGARMLLQVHDELLLEAPKERAEEVAALAKEVMEGVWPLAVPLEVEVGIGEDWLAAKG

SEQ ID NO: 2189 - DNA, 2529 bp, synthetic construct
  misc_feature 1..2529: note = Variant of DNA polymerase I from Thermus sp. strain 2.9
  source 1..2529: mol_type = other DNA
atgcaccatcatcatcatcatggcggtagcggcgtgttaccggtgttcgagcctaaaggtcgcgtgcttctggttgatggccatcatctcgcgtatcgtaacttctttgccctgaaaggattaaccaccagccgtggcgagccggtacagggtgtctacggctttgcaaagtcgctcctgaaagctctgaaagaagacggtgatgtggtgattgttgtctttgatgcgaaagcgccaagttttcgccacgaagcgtacgaagcttacaaagccgggcgtgctccaacgccggaagactttcctcgccaattggcgcttatgaaggaattagtggatttgcttggcctcgaacgcttggaagttcccggtttcgaggcagacgacgtattagcgactctcgcaaagaaagccgaacgtgagggctatgaagtccagatcttgacagcagatcgcgatcttttccagcttttatctccgcgcatctcggtgttacacccggaagggcatcgtatcaccccggaatggctctgggagaaatatggtttgcgtcccgaacaatgggtggattttcgcgccttagtcggcgatccgagcgacaatattccgggagttaaaggtatcggcgagaagacggcgctcaagctccttaaagaatgggggtcgttggagaacttgcttaagaatttagatcaggtcaaaccagagtcagtgcgtgagaagattcttgcacacctcgaagacctcaaattaagccgtgaattgtcccgtgtacgcaccgatttgccgctcgaagttgatttccgtggccgccgcgaacctgactgggagggtcttaaagcgtttttagagcgtcttgaatttggttcgctcttgcatgaattcggccttttagaaagcccgttaccagccgaggaagcaccttggccaccgcccgaaggcgcgtttttaggttaccgtttgagtcgcccggaaccgatgtgggccgaattactggctcttgcagcgtctgcccagggacgtgtgtatcgcgcggaagaccctcatggtgcgctccgcggcctcttcgaagtccgtggactccttgccaaagacttagctgttgttgcattgcgcgaaggtcttgatttacctccgactgatgatccaatgcttcttgcgtacctcttggacccgtcaaacacgacgcccgaaggcgtagcccgtcgttacggcggcgagtggaccgaagatgcagcgaaacgcgcgttattggccgaacgtttgcacgccaatttattaggacgtttgcaaggcgaggaacgtctcctctggctttacgaagaagtggagaaaccattgagtcgcgtgctcgcgcatatggaagctaccggtgtcaaattagacgtggcgtatttggaggcgctcagccttgaagttgctgccgaaatgcgccgcttggaggaagaagtattccgtttagcaggccactcctttcgccttaattctcgcgatcagttagaacgtgtgttgttcgatgaacttggtctccctcctatcggcaagacagagaagaccggtaaacgtagcacttcagcggcggttttagaagctcttcgcgaagtccatcccattgtggacaagatcttgcagtaccgcgaactcgcgaaattgaaaggcacctatattgaccctcttccggcattagtccacccgaaaacgggacgcctccatacccgcttcaaccaaacagccacggcgaccggtcgtttgtcctcctctgatccaaaccttcagaacattccagtacgtaccccattgggccagaagatccgccgcgcgtttgtagctgaggagggttggcgtttagtggccctcgattatagccaaattgaattacgtgtccttgcccatctttctggcgatgagaacctcatccgcgtgtttcaggaaggcaaagacattcacactcaaacggcaagctggatgtttggactgtcagctgaagcgatcgatcctttgatgcgtcgtgcagcgaagaccatcaatttcggtgttctctacggtatgagtgcccatcgtttgtcgcaggaattaggcattccctatgaagaagctgcggcgttcattcagaaatactttcaaagctatcccaaagttaaagcatggatcacgaagactctcgaagaaggccgcacacgtggttacgtagagaccttatttggacgtcgccgctatgttcccgatttaaatgctcgcgtgaaatctgtccgtgaagccgccgaacgcatggcgttcaacatgcctgtacagggcacggcagctgacctcatgaaacttgcaatggtgcgcctttttccacaactgcgtgaagttggtgcccgcatgctcttgcaggtccacgatgaactcttgttagaagcgccaaaagagcgtgcggaagaggtggcagccctcgcgaaagaggttatggaaggcgtgtggcccttagcggtgcctcttgaagtcgaagttggtattggcgaggattggctggctgccaaaggataatga

SEQ ID NO: 2190 - protein, 841 aa, synthetic construct
  REGION 1..841: note = Variant of DNA polymerase I from Thermus sp. strain 2.9
MHHHHHHGGSGVLPVFEPKGRVLLVDGHHLAYRNFFALKGLTTSRGEPVQGVYGFAKSLLKALKEDGDVVIVVFDAKAPSFRHEAYEAYKAGRAPTPEDFPRQLALMKELVDLLGLERLEVPGFEADDVLATLAKKAEREGYEVQILTADRDLFQLLSPRISVLHPEGHRITPEWLWEKYGLRPEQWVDFRALVGDPSDNIPGVKGIGEKTALKLLKEWGSLENLLKNLDQVKPESVREKILAHLEDLKLSRELSRVRTDLPLEVDFRGRREPDWEGLKAFLERLEFGSLLHEFGLLESPLPAEEAPWPPPEGAFLGYRLSRPEPMWAELLALAASAQGRVYRAEDPHGALRGLFEVRGLLAKDLAVVALREGLDLPPTDDPMLLAYLLDPSNTTPEGVARRYGGEWTEDAAKRALLAERLHANLLGRLQGEERLLWLYEEVEKPLSRVLAHMEATGVKLDVAYLEALSLEVAAEMRRLEEEVFRLAGHSFRLNSRDQLERVLFDELGLPPIGKTEKTGKRSTSAAVLEALREVHPIVDKILQYRELAKLKGTYIDPLPALVHPKTGRLHTRFNQTATATGRLSSSDPNLQNIPVRTPLGQKIRRAFVAEEGWRLVALDYSQIELRVLAHLSGDENLIRVFQEGKDIHTQTASWMFGLSAEAIDPLMRRAAKTINFGVLYGMSAHRLSQELGIPYEEAAAFIQKYFQSYPKVKAWITKTLEEGRTRGYVETLFGRRRYVPDLNARVKSVREAAERMAFNMPVQGTAADLMKLAMVRLFPQLREVGARMLLQVHDELLLEAPKERAEEVAALAKEVMEGVWPLAVPLEVEVGIGEDWLAAKG

SEQ ID NO: 2191 - DNA, 2529 bp, synthetic construct
  misc_feature 1..2529: note = Variant of DNA polymerase I from Thermus sp. strain 2.9
  source 1..2529: mol_type = other DNA
atgcaccatcatcatcatcatggcggtagcggcgtgttaccggtgttcgagcctaaaggtcgcgtgcttctggttgatggccatcatctcgcgtatcgtaacttctttgccctgaaaggattaaccaccagccgtggcgagccggtacagggtgtctacggctttgcaaagtcgctcctgaaagctctgaaagaagacggtgatgtggtgattgttgtctttgatgcgaaagcgccaagttttcgccacgaagcgtacgaagcttacaaagccgggcgtgctccaacgccggaagactttcctcgccaattggcgcttatgaaggaattagtggatttgcttggcctcgaacgcttggaagttcccggtttcgaggcagacgacgtattagcgactctcgcaaagaaagccgaacgtgagggctatgaagtccagatcttgacagcagatcgcgatcttttccagcttttatctccgcgcatctcggtgttacacccggaagggcatcgtatcaccccggaatggctctgggagaaatatggtttgcgtcccgaacaatgggtggattttcgcgccttagccggcgatccgagcgacaatattccgggagttaaaggtatcggcgagaagacggcgctcaagctccttaaagaatgggggtcgttggagaacttgcttaagaatttagatcaggtcaaaccagagtcagtgcgtgagaagattcttgcacacctcgaagacctcaaattaagccgcgaattgtcccgtgtacgcaccgatttgccgctcgaagttgatttccgtggccgccgcgaacctgactgggagggtcttaaagcgtttttagagcgtcttgaatttggttcgctcttgcatgaattcggccttttagaaagcccgttaccagccggggaagcaccttggccaccgcccgaaggcgcgtttttaggttaccgtttgagtcgcccggaaccgatgtgggccgaattattggctcttgcagcgtctgcccagggacgtgtgtatcgcgcggaagaccctcatggtgcgctccgcggcctcttcgaagtccgtggactccttgccaaagacttagctgttgttgcattgcgcgaaggtcttgatttacctccgactgatgatccaatgcttcttgcgtacctcttggacccgtcaaacacgacgcccgaaggcgtagcccgtcgttacggcggcgagtggaccgaagatgcagcgaaacgcgcgttattggccgaacgtttgcacgccaatttattaggacgtttgcaaggcgaggaacgtctcctctggctttacgaagaagtggagaaaccattgagtcgcgtgctcgcgcatatggaagctaccggtgtcaaattagacgtggcgtatttggaggcgctcagccttgaagttgctgccgaaatgcgccgcttggaggaagaagtattccgtttagcaggccactcctttcgccttaattctcgcgatcagttagaacgtgtgttgttcgatgaacttggtctccctcctatcggcaagacagagaagaccggtaaacgtagcacttcagcggcggttttagaagctcttcgcgaagtccatcccattgtggacaagatcttgcagtaccgcgaactcgcgaaattgaaaggcacctatattgaccctcttccggcattagtccacccgaaaacgggacgcctccatacccgcttcaaccaaacagccacggcgaccggtcgtttgtcctcctctgatccaaaccttcagaatattccagtacgtaccccattgggccagaagatccgccgcgcgtttgtagctgaggagggttggcgtttagtggccctcgattatagccaaattgaattacgtgtccttgcccatctttctggcgatgagaacctcatccgcgtgtttcaggaaggcaaagacattcacactcaaacggcaagctggatgtttggattatcagctgaagcgatcgatcctttgatgcgtcgtgcagcgaagaccatcaatttcggtgttctctacggtatgagtgcccatcgtttgtcgcaggaattaggcattccctatgaagaagctgcggcgttcattcagaaatactttcaaagctatcccaaagttaaagcatggatcgagaagactctcgaagaaggccgcacacgtggttacgtagagaccttatttggacgtcgccgctatgttcccgatttaaacgctcgcgtgaaatctgtccgtgaagccgccgaacgcatggcgttcaacatgcctgtacagggcacggcagctgacctcatgaaacttgcaatggtgcgcctttttccacaattgcgtgaagttggtgcccgcatgctcttgcaggtccacgatgaactcttgttagaagcgccaaaagagcgtgcggaagaggtggcagccctcgcgaaagaggttatggaaggcgtgtggcccttagcggtgcctcttgaagtcgaagttggtattggcgaggattggctggctgccaaaggataatga

SEQ ID NO: 2192 - protein, 841 aa, synthetic construct
  REGION 1..841: note = Variant of DNA polymerase I from Thermus sp. strain 2.9
MHHHHHHGGSGVLPVFEPKGRVLLVDGHHLAYRNFFALKGLTTSRGEPVQGVYGFAKSLLKALKEDGDVVIVVFDAKAPSFRHEAYEAYKAGRAPTPEDFPRQLALMKELVDLLGLERLEVPGFEADDVLATLAKKAEREGYEVQILTADRDLFQLLSPRISVLHPEGHRITPEWLWEKYGLRPEQWVDFRALAGDPSDNIPGVKGIGEKTALKLLKEWGSLENLLKNLDQVKPESVREKILAHLEDLKLSRELSRVRTDLPLEVDFRGRREPDWEGLKAFLERLEFGSLLHEFGLLESPLPAGEAPWPPPEGAFLGYRLSRPEPMWAELLALAASAQGRVYRAEDPHGALRGLFEVRGLLAKDLAVVALREGLDLPPTDDPMLLAYLLDPSNTTPEGVARRYGGEWTEDAAKRALLAERLHANLLGRLQGEERLLWLYEEVEKPLSRVLAHMEATGVKLDVAYLEALSLEVAAEMRRLEEEVFRLAGHSFRLNSRDQLERVLFDELGLPPIGKTEKTGKRSTSAAVLEALREVHPIVDKILQYRELAKLKGTYIDPLPALVHPKTGRLHTRFNQTATATGRLSSSDPNLQNIPVRTPLGQKIRRAFVAEEGWRLVALDYSQIELRVLAHLSGDENLIRVFQEGKDIHTQTASWMFGLSAEAIDPLMRRAAKTINFGVLYGMSAHRLSQELGIPYEEAAAFIQKYFQSYPKVKAWIEKTLEEGRTRGYVETLFGRRRYVPDLNARVKSVREAAERMAFNMPVQGTAADLMKLAMVRLFPQLREVGARMLLQVHDELLLEAPKERAEEVAALAKEVMEGVWPLAVPLEVEVGIGEDWLAAKG

SEQ ID NO: 2193 - DNA, 2529 bp, synthetic construct
  misc_feature 1..2529: note = Variant of DNA polymerase I from Thermus sp. strain 2.9
  source 1..2529: mol_type = other DNA
atgcaccatcatcatcatcatggcggtagcggcgtgttaccggtgttcgagcctaaaggtcgcgtgcttctggttgatggccatcatctcgcgtatcgtaacttctttgccctgaaaggattaaccaccagccgtggcgagccggtacagggtgtctacggctttgcaaagtcgctcctgaaagctctgaaagaagacggtgatgtggtgattgttgtctttgatgcgaaagcgccaagttttcgccacgaagcgtacgaagcttacaaagccgggcgtgctccaacgccggaagactttcctcgccaattggcgcttatgaaggaattagtggatttgcttggcctcgaacgcttggaagttcccggtttcgaggcagacgacgtattagcgactctcgcaaagaaagccgaacgtgagggctatgaagtccagatcttgacagcagatcgcgatcttttccagcttttatctccgcgcatctcggtgttacacccggaagggcatcgtatcaccccggaatggctctgggagaaatatggtttgcgtcccgaacaatgggtggattttcgcgccttagccggcgatccgagcgacaatattccgggagttaaaggtatcggcgagaagacggcgctcaagctccttaaagaatgggggtcgttggagaacttgcttaagaatttagatcaggtcaaaccagagtcagtgcgtgagaagattcttgcacacctcgaagacctcaaattaagcctggaattgtcccgtgtacgcaccgatttgccgctcgaagttgatttccgtcgccgccgcgaacctgactgggagggtcttaaagcgtttttagagcgtcttgaatttggttcgctcttgcatgaattcggccttttagaaagcccgttaccagccgaggaagcaccttggccaccgcccgaaggcgcgtttttaggttaccgtttgagtcgcccggaaccgatgtgggccgaattattggctcttgcagcgtctgcccagggacgtgtgtatcgcgcggaagaccctcatggtgcgctccgcggcctcttcgaagtccgtggactccttgccaaagacttagctgttgttgcattgcgcgaaggtcttgatttacctccgactgatgatccaatgcttcttgcgtacctcttggacccgtcaaacacgacgcccgaaggcgtagcccgtcgttacggcggcgagtggaccgaagatgcagcgaaacgcgcgttattggccgaacgtttgcacgccaatttattaggacgtttgcaaggcgaggaacgtctcctctggctttacgaagaagtggagaaaccattgagtcgcgtgctcgcgcatatggaagctaccggtgtcaaattagacgtggcgtatttggaggcgctcagccttgaagttgctgccgaaatgcgccgcttggaggaagaagtattccgtttagcaggccactcctttcgccttaattctcgcgatcagttagaacgtgtgttgttcgatgaacttggtctccctcctatcggcaagacagagaagaccggtaaacgtagcacttcagcggcggttttagaagctcttcgcgaagtccatcccattgtggacaagatcttgcagtaccgcgaactcgcgaaattgaaaggcacctatattgaccctcttccggcattagtccacccgaaaacgggacgcctccatacccgcttcaaccaaacagccacggcgaccggtcgtttgtcctcctctgatccaaaccttcagaatattccagtacgtaccccattgggccagaagatccgccgcgcgtttgtagctgaggagggttggcgtttagtggccctcgattatagccaaattgaattacgtgtccttgcccatctttctggcgatgagaacctcatccgcgtgtttcaggaaggcaaagacattcacactcaaacggcaagctggatgtttggattatcagctgaagcgatcgatcctttgatgcgtcgtgcagcgaagaccatcaatttcggtgttctctacggtatgagtgcccatcgtttgtcgcaggaattaggcattccctatgaagaagctgcggcgttcattcagaaatactttcaaagctatcccaaagttaaagcatggatcgagaagactctcgaagaaggccgcacacgtggttacgtagagaccttatttggacgtcgccgctatgttcccgatttaaacgctcgcgtgaaatctgtccgtgaagccgccgaacgcatggcgttcaacatgcctgtacagggcacggcagctgacctcatgaaacttgcaatggtgcgcctttttccacaattgcgtgaagttggtgcccgcatgctcttgcaggtccacgatgaactcttgttagaagcgccaaaagagcgtgcggaagaggtggcagccctcgcgaaagaggttatggaaggcgtgtggcccttagcggtgcctcttgaagtcgaagttggtattggcgaggattggctggctgccaaaggataatga

SEQ ID NO: 2194 - protein, 841 aa, synthetic construct
  REGION 1..841: note = Variant of DNA polymerase I from Thermus sp. strain 2.9
MHHHHHHGGSGVLPVFEPKGRVLLVDGHHLAYRNFFALKGLTTSRGEPVQGVYGFAKSLLKALKEDGDVVIVVFDAKAPSFRHEAYEAYKAGRAPTPEDFPRQLALMKELVDLLGLERLEVPGFEADDVLATLAKKAEREGYEVQILTADRDLFQLLSPRISVLHPEGHRITPEWLWEKYGLRPEQWVDFRALAGDPSDNIPGVKGIGEKTALKLLKEWGSLENLLKNLDQVKPESVREKILAHLEDLKLSLELSRVRTDLPLEVDFRRRREPDWEGLKAFLERLEFGSLLHEFGLLESPLPAEEAPWPPPEGAFLGYRLSRPEPMWAELLALAASAQGRVYRAEDPHGALRGLFEVRGLLAKDLAVVALREGLDLPPTDDPMLLAYLLDPSNTTPEGVARRYGGEWTEDAAKRALLAERLHANLLGRLQGEERLLWLYEEVEKPLSRVLAHMEATGVKLDVAYLEALSLEVAAEMRRLEEEVFRLAGHSFRLNSRDQLERVLFDELGLPPIGKTEKTGKRSTSAAVLEALREVHPIVDKILQYRELAKLKGTYIDPLPALVHPKTGRLHTRFNQTATATGRLSSSDPNLQNIPVRTPLGQKIRRAFVAEEGWRLVALDYSQIELRVLAHLSGDENLIRVFQEGKDIHTQTASWMFGLSAEAIDPLMRRAAKTINFGVLYGMSAHRLSQELGIPYEEAAAFIQKYFQSYPKVKAWIEKTLEEGRTRGYVETLFGRRRYVPDLNARVKSVREAAERMAFNMPVQGTAADLMKLAMVRLFPQLREVGARMLLQVHDELLLEAPKERAEEVAALAKEVMEGVWPLAVPLEVEVGIGEDWLAAKG

SEQ ID NO: 2195 - DNA, 2529 bp, synthetic construct
  misc_feature 1..2529: note = Variant of DNA polymerase I from Thermus sp. strain 2.9
  source 1..2529: mol_type = other DNA
atgcaccatcatcatcatcatggcggtagcggcgtgttaccggtgttcgagcctaaaggtcgcgtgcttctggttgatggccatcatctcgcgtatcgtaacttctttgccctgaaaggattaaccaccagccgtggcgagccggtacagggtgtctacggctttgcaaagtcgctcctgaaagctctgaaagaagacggtgatgtggtgattgttgtctttgatgcgaaagcgccaagttttcgccacgaagcgtacgaagcttacaaagccgggcgtgctccaacgccggaagactttcctcgccaattggcgcttatgaaggaattagtggatttgcttggcctcgaacgcttggaagttcccggtttcgaggcagacgacgtattagcgactctcgcaaagaaagccgaacgtgagggctatgaagtccagatcttgacagcagatcgcgatcttttccagcttttatctccgcgcatctcggtgttacacccggaagggcatcgtatcaccccggaatggctctgggagaaatatggtttgcgtcccgaacaatgggtggattttcgcgccttagcaggcgatccgagcgacaatattccgggagttaaaggtatcggcgagaagacggcgctcaagctccttaaagaatgggggtcgttggagaacttgcttaagaatttagatcaggtcaaaccagagtcagtgcgtgagaagattcttgcacacctcgaagacctcaaattaagcctggaattgtcccgtgtacgcaccgatttgccgctcgaagttgatttccgtcgccgccgcgaacctgactgggagggtcttaaagcgtttttagagcgtcttgaatttggttcgctcttgcatgaattcggccttttagaaagcccgttaccagccgaggaagcaccttggccaccgcccgaaggcgcgtttttaggttaccgtttgagtcgcccggaaccgatgtgggccgaattattggctcttgcagcgtctgcccagggacgtgtgtatcgcgcggaagaccctcatggtgcgctccgcggcctcttcgaagtccgtggactccttgccaaagacttagctgttgttgcattgcgcgaaggtcttgatttacctccgactgatgatccaatgcttcttgcgtacctcttggacccgtcaaacacgacgcccgaaggcgtagcccgtcgttacggcggcgagtggaccgaagatgcagcgaaacgcgcgttattggccgaacgtttgcacgccaatttattaggacgtttgcaaggcgaggaacgtctcctctggctttacgaagaagtggagaaaccattgagtcgcgtgctcgcgcatatggaagctaccggtgtcaaattagacgtggcgtatttggaggctctcagccttgaagttgctgccgaaatgcgccgcttggaggaagaagtattccgtttagcaggccactcctttcgccttaattctcgcgatcagttagaacgtgtgttgttcgatgaacttggtctccctcctatcggcaagacagagaagaccggtaaacgtagcacttcagcggcggttttagaagctcttcgcgaagtccatcccattgtggacaagatcttgcagtaccgcgaactcgcgaaattgaaaggcacctatattgaccctcttccggcattagtccacccgaaaacgggacgcctccatacccgcttcaaccaaacagccacggcgaccggtcgtttgtcctcctctgatccaaaccttcagaatattccagtacgtaccccattgggccagaagatccgccgcgcgtttgtagctgaggagggttggcgtttagtggccctcgattatagccaaattgaattacgtgtccttgcccatctttctggcgatgagaacctcatccgcgtgtttcaggaaggcaaagacattcacactcaaacggcaagctggatgtttggattatcagctgaagcgatcgatcctttgatgcgtcgtgcagcgaagaccatcaatttcggtgttctctacggtatgagtgcctttcgtttgtcgcaggaattaggcattccctatgaagaagctgcggcgttcattcagaaatactttcaaagctatcccaaagttaaagcatggatcgagaagactctcgaagaaggccgcacacgtggttacgtagagaccttatttggacgtcgccgctatgttcccgatttaaacgctcgcgtgaaatctgtccgtgaagccgccgaacgcatggcgttcaacatgcctgtacagggcacggcagctgacctcatgaaacttgcaatggtgcgcctttttccacaattgcgtgaagttggtgcccgcatgctcttgcaggtccacgatgaactcttgttagaagcgccaaaagagcgtgcggaagaggtggcagccctcgcgaaagaggttatggaaggcgtgtggcccttagcggtgcctcttgaagtcgaagttggtattggcgaggattggctggctgccaaaggataatga

SEQ ID NO: 2196 - protein, 841 aa, synthetic construct
  REGION 1..841: note = Variant of DNA polymerase I from Thermus sp. strain 2.9
MHHHHHHGGSGVLPVFEPKGRVLLVDGHHLAYRNFFALKGLTTSRGEPVQGVYGFAKSLLKALKEDGDVVIVVFDAKAPSFRHEAYEAYKAGRAPTPEDFPRQLALMKELVDLLGLERLEVPGFEADDVLATLAKKAEREGYEVQILTADRDLFQLLSPRISVLHPEGHRITPEWLWEKYGLRPEQWVDFRALAGDPSDNIPGVKGIGEKTALKLLKEWGSLENLLKNLDQVKPESVREKILAHLEDLKLSLELSRVRTDLPLEVDFRRRREPDWEGLKAFLERLEFGSLLHEFGLLESPLPAEEAPWPPPEGAFLGYRLSRPEPMWAELLALAASAQGRVYRAEDPHGALRGLFEVRGLLAKDLAVVALREGLDLPPTDDPMLLAYLLDPSNTTPEGVARRYGGEWTEDAAKRALLAERLHANLLGRLQGEERLLWLYEEVEKPLSRVLAHMEATGVKLDVAYLEALSLEVAAEMRRLEEEVFRLAGHSFRLNSRDQLERVLFDELGLPPIGKTEKTGKRSTSAAVLEALREVHPIVDKILQYRELAKLKGTYIDPLPALVHPKTGRLHTRFNQTATATGRLSSSDPNLQNIPVRTPLGQKIRRAFVAEEGWRLVALDYSQIELRVLAHLSGDENLIRVFQEGKDIHTQTASWMFGLSAEAIDPLMRRAAKTINFGVLYGMSAFRLSQELGIPYEEAAAFIQKYFQSYPKVKAWIEKTLEEGRTRGYVETLFGRRRYVPDLNARVKSVREAAERMAFNMPVQGTAADLMKLAMVRLFPQLREVGARMLLQVHDELLLEAPKERAEEVAALAKEVMEGVWPLAVPLEVEVGIGEDWLAAKG

SEQ ID NO: 2197 - DNA, 2529 bp, synthetic construct
  misc_feature 1..2529: note = Variant of DNA polymerase I from Thermus sp. strain 2.9
  source 1..2529: mol_type = other DNA
atgcaccatcatcatcatcatggcggtagcggcgtgttaccggtgttcgagcctaaaggtcgcgtgcttctggttgatggccatcatctcgcgtatcgtaacttctttgccctgaaaggattaaccaccagccgtggcgagccggtacagggtgtctacggctttgcaaagtcgctcctgaaagctctgaaagaagacggtgatgtggtgattgttgtctttgatgcgaaagcgccaagttttcgccacgaagcgtacgaagcttacaaagccgggcgtgctccaacgccggaagactttcctcgccaattggcgcttatgaaggaattagtggatttgcttggcctcgaacgcttggaagttcccggtttcgaggcagacgacgtattagcgactctcgcaaagaaagccgaacgtgagggctatgaagtccagatcttgacagcagatcgcgatcttttccagcttttatctccgcgcatctcggtgttacacccggaagggcatcgtatcaccccggaatggctctgggagaaatatggtttgcgtcccgaacaatgggtggattttcgcgccttagcaggcgatccgagcgacaatattccgggagttaaaggtatcggcgagaagacggcgctcaagctccttaaagaatgggggtcgttggagaacttgcttaagaatttagatcaggtcaaaccagagtcagtgcgtgagaagattcttgcacacctcgaagacctcaaattaagccgtgaattgtcccgtgtacgcaccgatttgccgctcgaagttgatttccgtcgccgccgcgaacctgactgggagggtcttaaagcgtttttagagcgtcttgaatttggttcgctcttgcatgaattcggccttttagaaagcccgttaccagccggggaagcaccttggccaccgcccgaaggcgcgtttttaggttaccgtttgagtcgcccggaaccgatgtgggccgaattattggctcttgcagcgtctgcccagggacgtgtgtatcgcgcggaagaccctcatggtgcgctccgcggcctcttcgaagtccgtggactccttgccaaagacttagctgttgttgcattgcgcgaaggtcttgatttacctccgactgatgatccaatgcttcttgcgtacctcttggacccgtcaaacacgacgcccgaaggcgtagcccgtcgttacggcggcgagtggaccgaagatgcagcgaaacgcgcgttattggccgaacgtttgcacgccaatttattaggacgtttgcaaggcgaggaacgtctcctctggctttacgaagaagtggagaaaccattgagtcgcgtgctcgcgcatatggaagctaccggtgtcaaattagacgtggcgtatttggagaatctcagccttgaagttgctgccgaaatgcgccgcttggaggaagaagtattccgtttagcaggccgttcctttcgccttaattctcgcgatcagttagaacgtgtgttgttcgatgaacttggtctccctcctatcggcaagacagagaagaccggtaaacgtagcacttcagcggcggttttagaagctcttcgcgaagtccatcccattgtggacaagatcttgcagtaccgcgaactcgcgaaattgaaaggcacctatattgaccctcttccggcattagtccacccgaaaacgggacgcctccatacccgcttcaaccaaacagccacggcgaccggtcgtttgtcctcctctgatccaaaccttcagaatattccagtacgtaccccattgggccagaagatccgccgcgcgtttgtagctgaggagggttggcgtttagtggccctcgattatagccaaattgaattacgtgtccttgcccatctttctggcgatgagaacctcatccgcgtgtttcaggaaggcaaagacattcacactcaaacggcaagctggatgtttggattatcagctgaagcgatcgatcctttgatgcgtcgtgcagcgaagaccatcaatttcggtgttctctacggtatgagtgcccatcgtttgtcgcaggaattaggcattccctatgaagaagctgcggcgttcattcagaaatactttcaaagctatcccaaagttaaagcatggatcacgaagactctcgaagaaggccgcacacgtggttacgtagagaccttatttggacgtcgccgctatgttcccgatttaaacgctcgcgtgaaatctgtccgtgaagccgccgaacgcatggcgttcaacatgcctgtacagggcacggcagctgacctcatgaaacttgcaatggtgcgcctttttccacaattgcgtgaagttggtgcccgcatgctcttgcaggtccacgatgaactcttgttagaagcgccaaaagagcgtgcggaagaggtggcagccctcgcgaaagaggttatggaaggcgtgtggcccttagcggtgcctcttgaagtcgaagttggtattggcgaggattggctggctgccaaaggataatga

SEQ ID NO: 2198 - protein, 841 aa, synthetic construct
  REGION 1..841: note = Variant of DNA polymerase I from Thermus sp. strain 2.9
MHHHHHHGGSGVLPVFEPKGRVLLVDGHHLAYRNFFALKGLTTSRGEPVQGVYGFAKSLLKALKEDGDVVIVVFDAKAPSFRHEAYEAYKAGRAPTPEDFPRQLALMKELVDLLGLERLEVPGFEADDVLATLAKKAEREGYEVQILTADRDLFQLLSPRISVLHPEGHRITPEWLWEKYGLRPEQWVDFRALAGDPSDNIPGVKGIGEKTALKLLKEWGSLENLLKNLDQVKPESVREKILAHLEDLKLSRELSRVRTDLPLEVDFRRRREPDWEGLKAFLERLEFGSLLHEFGLLESPLPAGEAPWPPPEGAFLGYRLSRPEPMWAELLALAASAQGRVYRAEDPHGALRGLFEVRGLLAKDLAVVALREGLDLPPTDDPMLLAYLLDPSNTTPEGVARRYGGEWTEDAAKRALLAERLHANLLGRLQGEERLLWLYEEVEKPLSRVLAHMEATGVKLDVAYLENLSLEVAAEMRRLEEEVFRLAGRSFRLNSRDQLERVLFDELGLPPIGKTEKTGKRSTSAAVLEALREVHPIVDKILQYRELAKLKGTYIDPLPALVHPKTGRLHTRFNQTATATGRLSSSDPNLQNIPVRTPLGQKIRRAFVAEEGWRLVALDYSQIELRVLAHLSGDENLIRVFQEGKDIHTQTASWMFGLSAEAIDPLMRRAAKTINFGVLYGMSAHRLSQELGIPYEEAAAFIQKYFQSYPKVKAWITKTLEEGRTRGYVETLFGRRRYVPDLNARVKSVREAAERMAFNMPVQGTAADLMKLAMVRLFPQLREVGARMLLQVHDELLLEAPKERAEEVAALAKEVMEGVWPLAVPLEVEVGIGEDWLAAKG

SEQ ID NO: 2199 - DNA, 2529 bp, synthetic construct
  misc_feature 1..2529: note = Variant of DNA polymerase I from Thermus sp. strain 2.9
  source 1..2529: mol_type = other DNA
atgcaccatcatcatcatcatggcggtagcggcgtgttaccggtgttcgagcctaaaggtcgcgtgcttctggttgatggccatcatctcgcgtatcgtaacttctttgccctgaaaggattaaccaccagccgtggcgagccggtacagggtgtctacggctttgcaaagtcgctcctgaaagctctgaaagaagacggtgatgtggtgattgttgtctttgatgcgaaagcgccaagttttcgccacgaagcgtacgaagcttacaaagccgggcgtgctccaacgccggaagactttcctcgccaattggcgcttatgaaggaattagtggatttgcttggcctcgaacgcttggaagttcccggtttcgaggcagacgacgtattagcgactctcgcaaagaaagccgaacgtgagggctatgaagtccagatcttgacagcagatcgcgatcttttccagcttttatctccgcgcatctcggtgttacacccggaagggcatcgtatcaccccggaatggctctgggagaaatatggtttgcgtcccgaacaatgggtggattttcgcgccttagccggcgatccgagcgacaatattccgggagttaaaggtatcggcgagaagacggcgctcaagctccttaaagaatgggggtcgttggagaacttgcttaagaatttagatcaggtcaaaccagagtcagtgcgtgagaagattcttgcacacctcgaagacctcaaattaagccgcgaattgtcccgtgtacgcaccgatttgccgctcgaagttgatttccgtcgccgccgcgaacctgactgggagggtcttaaagcgtttttagagcgtcttgaatttggttcgctcttgcatgaattcggccttttagaaagcccgttaccagccggggaagcaccttggccaccgcccgaaggcgcgtttttaggttaccgtttgagtcgcccggaaccgatgtgggccgaattactggctcttgcagcgtctgcccagggacgtgtgtatcgcgcggaagaccctcatggtgcgctccgcggcctcttcgaagtcaatggactccttgccaaagacttagctgttgttgcattgcgcgaaggtcttgatttacctccgactgatgatccaatgcttcttgcgtacctcttggacccgtcaaacacgacgcccgaaggcgtagcccgtcgttacggcggcgagtggaccgaagatgcagcgaaacgcgcgttattggccgaacgtttgcacgccaatttattaggacgtttgcaaggcgaggaacgtctcctctggctttacgaagaagtggagaaaccattgagtcgcgtgctcgcgcatatggaagctaccggtgtcaaattagacgtggcgtatttggagaatctcagccttgaagttgctgccgaaatgcgccgcttggaggaagaagtattccgtttagcaggccactcctttcgccttaattctcgcgatcagttagaacgtgtgttgttcgatgaacttggtctccctcctatcggcaagacagagaagaccggtaaacgtagcacttcagcggcggttttagaagctcttcgcgaagtccatcccattgtggacaagatcttgcagtaccgcgaactcgcgaaattgaaaggcacctatattgaccctcttccggcattagtccacccgaaaacgggacgcctccatacccgcttcaaccaaacagccacggcgaccggtcgtttgtcctcctctgatccaaaccttcaggccattccagtacgtaccccattgggccagaagatccgccgcgcgtttgtagctgaggagggttggcgtttagtggccctcgattatagccaaattgaattacgtgtccttgcccatctttctggcgatgagaacctcatccgcgtgtttcaggaaggcaaagacattcacactcaaacggcaagctggatgtttggattatcagctgaagcgatcgatcctttgatgcgtcgtgcagcgaagaccatcaatttcggtgttctctacggtatgagtgcccatcgtttgtcgcaggaattaggcattccctatgaagaagctgcggcgttcattcagaaatactttcaaagctatcccaaagttaaagcatggatcgagaagactctcgaagaaggccgcacacgtggttacgtagagaccttatttggacgtcgccgctatgttcccgatttaaatgctcgcgtgaaatctgtccgtgaagccgccgaacgcatggcgttcaacatgcctgtacagggcacggcagctgacctcatgaaacttgcaatggtgcgcctttttccacaattgcgtgaagttggtgcccgcatgctcttgcaggtccacgatgaactcttgttagaagcgccaaaagagcgtgcggaagaggtggcagccctcgcgaaagaggttatggaaggcgtgtggcccttagcggtgcctcttgaagtcgaagttggtattggcgaggattggctggctgccaaaggataatga

SEQ ID NO: 2200 - protein, 841 aa, synthetic construct
  REGION 1..841: note = Variant of DNA polymerase I from Thermus sp. strain 2.9
MHHHHHHGGSGVLPVFEPKGRVLLVDGHHLAYRNFFALKGLTTSRGEPVQGVYGFAKSLLKALKEDGDVVIVVFDAKAPSFRHEAYEAYKAGRAPTPEDFPRQLALMKELVDLLGLERLEVPGFEADDVLATLAKKAEREGYEVQILTADRDLFQLLSPRISVLHPEGHRITPEWLWEKYGLRPEQWVDFRALAGDPSDNIPGVKGIGEKTALKLLKEWGSLENLLKNLDQVKPESVREKILAHLEDLKLSRELSRVRTDLPLEVDFRRRREPDWEGLKAFLERLEFGSLLHEFGLLESPLPAGEAPWPPPEGAFLGYRLSRPEPMWAELLALAASAQGRVYRAEDPHGALRGLFEVNGLLAKDLAVVALREGLDLPPTDDPMLLAYLLDPSNTTPEGVARRYGGEWTEDAAKRALLAERLHANLLGRLQGEERLLWLYEEVEKPLSRVLAHMEATGVKLDVAYLENLSLEVAAEMRRLEEEVFRLAGHSFRLNSRDQLERVLFDELGLPPIGKTEKTGKRSTSAAVLEALREVHPIVDKILQYRELAKLKGTYIDPLPALVHPKTGRLHTRFNQTATATGRLSSSDPNLQAIPVRTPLGQKIRRAFVAEEGWRLVALDYSQIELRVLAHLSGDENLIRVFQEGKDIHTQTASWMFGLSAEAIDPLMRRAAKTINFGVLYGMSAHRLSQELGIPYEEAAAFIQKYFQSYPKVKAWIEKTLEEGRTRGYVETLFGRRRYVPDLNARVKSVREAAERMAFNMPVQGTAADLMKLAMVRLFPQLREVGARMLLQVHDELLLEAPKERAEEVAALAKEVMEGVWPLAVPLEVEVGIGEDWLAAKG

SEQ ID NO: 2201 - DNA, 2529 bp, synthetic construct
  misc_feature 1..2529: note = Variant of DNA polymerase I from Thermus sp. strain 2.9
  source 1..2529: mol_type = other DNA
atgcaccatcatcatcatcatggcggtagcggcgtgttaccggtgttcgagcctaaaggtcgcgtgcttctggttgatggccatcatctcgcgtatcgtaacttctttgccctgaaaggattaaccaccagccgtggcgagccggtacagggtgtctacggctttgcaaagtcgctcctgaaagctctgaaagaagacggtgatgtggtgattgttgtctttgatgcgaaagcgccaagttttcgccacgaagcgtacgaagcttacaaagccgggcgtgctccaacgccggaagactttcctcgccaattggcgcttatgaaggaattagtggatttgcttggcctcgaacgcttggaagttcccggtttcgaggcagacgacgtattagcgactctcgcaaagaaagccgaacgtgagggctatgaagtccagatcttgacagcagatcgcgatcttttccagcttttatctccgcgcatctcggtgttacacccggaagggcatcgtatcaccccggaatggctctgggagaaatatggtttgcgtcccgaacaatgggtggattttcgcgccttagtcggcgatccgagcgacaatattccgggagttaaaggtatcggcgagaagacggcgctcaagctccttaaagaatgggggtcgttggagaacttgcttaagaatttagatcaggtcaaaccagagtcagtgcgtgagaagattcttgcacacctcgaagacctcaaattaagccgcgaattgtcccgtgtacgcaccgatttgccgctcgaagttgatttccgtggccgccgcgaacctgactgggagggtcttaaagcgtttttagagcgtcttgaatttggttcgctcttgcatgaattcggccttttagaaagcccgttaccagccggggaagcaccttggccaccgcccgaaggcgcgtttttaggttaccgtttgagtcgcccggaaccgatgtgggccgaattactggctcttgcagcgtctgcccagggacgtgtgtatcgcgcggaagaccctcatggtgcgctccgcggcctcttcgaagtccgtggactccttgccaaagacttagctgttgttgcattgcgcgaaggtcttgatttacctccgactgatgatccaatgcttcttgcgtacctcttggacccgtcaaacacgacgcccgaaggcgtagcccgtcgttacggcggcgagtggaccgaagatgcagcgaaacgcgcgttattggccgaacgtttgcacgccaatttattaggacgtttgcaaggcgaggaacgtctcctctggctttacgaagaagtggagaaaccattgagtcgcgtgctcgcgcatatggaagctaccggtgtcaaattagacgtggcgtatttggaggctctcagccttgaagttgctgccgaaatgcgccgcttggaggaagaagtattccgtttagcaggccattcctttcgccttaattctcgcgatcagttagaacgtgtgttgttcgatgaacttggtctccctcctatcggcaagacagagaagaccggtaaacgtagcacttcagcggcggttttagaagctcttcgcgaagtccatccaattgtggacaagatcttgcagtaccgcgaactcgcgaaattgaaaggcacctatattgaccctcttccggcattagtccacccgaaaacgggacgcctccatacccgcttcaaccaaacagccacggcgaccggtcgtttgtcctcctctgatccaaaccttcagaatattccagtacgtaccccattgggccagaagatccgccgcgcgtttgtagctgaggagggttggcgtttagtggccctcgattatagccaaattgaattacgtgtccttgcccatctttctggcgatgagaacctcatccgcgtgtttcaggaaggcaaagacattcacactcaaacggcaagctggatgtttggattatcagctgaagcgatcgatcctttgatgcgtcgtgcagcgaagaccatcaatttcggtgttctctacggtatgagtgcccaccgtttgtcgcaggaattaggcattccctatgaagaagctgcggcgttcattcagaaatactttcaaagctatcccaaagttaaagcatggatcgagaagactctcgaagaaggccgcacacgtggttacgtagagaccttatttggacgtcgccgctatgttcccgatttaaatgctcgcgtgaaatctgtccgtgaagccgccgaacgcatggcgttcaacatgcctgtacagggcacggcagctgacctcatgaaacttgcaatggtgcgcctttttccacaattgcgtgaagttggtgcccgcatgctcttgcaggtccacgatgaactcttgttagaagcgccaaaagagcgtgcggaagaggtggcagccctcgcgaaagaggttatggaaggcgtgtggcccttagcggtgcctcttgaagtcgaagttggtattggcgaggattggctggctgccaaaggataatga

SEQ ID NO: 2202 - protein, 841 aa, synthetic construct
  REGION 1..841: note = Variant of DNA polymerase I from Thermus sp. strain 2.9
MHHHHHHGGSGVLPVFEPKGRVLLVDGHHLAYRNFFALKGLTTSRGEPVQGVYGFAKSLLKALKEDGDVVIVVFDAKAPSFRHEAYEAYKAGRAPTPEDFPRQLALMKELVDLLGLERLEVPGFEADDVLATLAKKAEREGYEVQILTADRDLFQLLSPRISVLHPEGHRITPEWLWEKYGLRPEQWVDFRALVGDPSDNIPGVKGIGEKTALKLLKEWGSLENLLKNLDQVKPESVREKILAHLEDLKLSRELSRVRTDLPLEVDFRGRREPDWEGLKAFLERLEFGSLLHEFGLLESPLPAGEAPWPPPEGAFLGYRLSRPEPMWAELLALAASAQGRVYRAEDPHGALRGLFEVRGLLAKDLAVVALREGLDLPPTDDPMLLAYLLDPSNTTPEGVARRYGGEWTEDAAKRALLAERLHANLLGRLQGEERLLWLYEEVEKPLSRVLAHMEATGVKLDVAYLEALSLEVAAEMRRLEEEVFRLAGHSFRLNSRDQLERVLFDELGLPPIGKTEKTGKRSTSAAVLEALREVHPIVDKILQYRELAKLKGTYIDPLPALVHPKTGRLHTRFNQTATATGRLSSSDPNLQNIPVRTPLGQKIRRAFVAEEGWRLVALDYSQIELRVLAHLSGDENLIRVFQEGKDIHTQTASWMFGLSAEAIDPLMRRAAKTINFGVLYGMSAHRLSQELGIPYEEAAAFIQKYFQSYPKVKAWIEKTLEEGRTRGYVETLFGRRRYVPDLNARVKSVREAAERMAFNMPVQGTAADLMKLAMVRLFPQLREVGARMLLQVHDELLLEAPKERAEEVAALAKEVMEGVWPLAVPLEVEVGIGEDWLAAKG

SEQ ID NO: 2203 - DNA, 2529 bp, synthetic construct
  misc_feature 1..2529: note = Variant of DNA polymerase I from Thermus sp. strain 2.9
  source 1..2529: mol_type = other DNA
atgcaccatcatcatcatcatggcggtagcggcgtgttaccggtgttcgagcctaaaggtcgcgtgcttctggttgatggccatcatctcgcgtatcgtaacttctttgccctgaaaggattaaccaccagccgtggcgagccggtacagggtgtctacggctttgcaaagtcgctcctgaaagctctgaaagaagacggtgatgtggtgattgttgtctttgatgcgaaagcgccaagttttcgccacgaagcgtacgaagcttacaaagccgggcgtgctccaacgccggaagactttcctcgccaattggcgcttatgaaggaattagtggatttgcttggcctcgaacgcttggaagttcccggtttcgaggcagacgacgtattagcgactctcgcaaagaaagccgaacgtgagggctatgaagtccagatcttgacagcagatcgcgatcttttccagcttttatctccgcgcatctcggtgttacacccggaagggcatcgtatcaccccggaatggctctgggagaaatatggtttgcgtcccgaacaatgggtggattttcgcgccttagtcggcgatccgagcgacaatattccgggagttaaaggtatcggcgagaagacggcgctcaagctccttaaagaatgggggtcgttggagaacttgcttaagaatttagatcaggtcaaaccagagtcagtgcgtgagaagattcttgcacacctcgaagacctcaaattaagcctggaattgtcccgtgtacgcaccgatttgccgctcgaagttgatttccgtcgccgccgcgaacctgactgggagggtcttaaagcgtttttagagcgtcttgaatttggttcgctcttgcatgaattcggccttttagaaagcccgttaccagccggggaagcaccttggccaccgcccgaaggcgcgtttttaggttaccgtttgagtcgcccggaaccgatgtgggccgaattattggctcttgcagcgtctgcccagggacgtgtgtatcgcgcggaagaccctcatggtgcgctccgcggcctcttcgaagtcaatggactccttgccaaagacttagctgttgttgcattgcgcgaaggtcttgatttacctccgactgatgatccaatgcttcttgcgtacctcttggacccgtcaaacacgacgcccgaaggcgtagcccgtcgttacggcggcgagtggaccgaagatgcagcgaaacgcgcgttattggccgaacgtttgcacgccaatttattaggacgtttgcaaggcgaggaacgtctcctctggctttacgaagaagtggagaaaccattgagtcgcgtgctcgcgcatatggaagctaccggtgtcaaattagacgtggcgtatttggagaatctcagccttgaagttgctgccgaaatgcgccgcttggaggaagaagtattccgtttagcaggccattcctttcgccttaattctcgcgatcagttagaacgtgtgttgttcgatgaacttggtctccctcctatcggcaagacagagaagaccggtaaacgtagcacttcagcggcggttttagaagctcttcgcgaagtccatcccattgtggacaagatcttgcagtaccgcgaactcgcgaaattgaaaggcacctatattgaccctcttccggcattagtccacccgaaaacgggacgcctccatacccgcttcaaccaaacagccacggcgaccggtcgtttgtcctcctctgatccaaaccttcagaacattccagtacgtaccccattgggccagaagatccgccgcgcgtttgtagctgaggagggttggcgtttagtggccctcgattatagccaaattgaattacgtgtccttgcccatctttctggcgatgagaacctcatccgcgtgtttcaggaaggcaaagacattcacactcaaacggcaagctggatgtttggagagtcagctgaagcgatcgatcctttgatgcgtcgtgcagcgaagaccatcaatttcggtgttctctacggtatgagtgcccatcgtttgtcgcaggaattaggcattccctatgaagaagctgcggcgttcattcagaaatactttcaaagctatcccaaagttaaagcatggatcgagaagactctcgaagaaggccgcacacgtggttacgtagagaccttatttggacgtcgccgctatgttcccgatttaaacgctcgcgtgaaatctgtccgtgaagccgccgaacgcatggcgttcaacatgcctgtacagggcacggcagctgacctcatgaaacttgcaatggtgcgcctttttccacaattgcgtgaagttggtgcccgcatgctcttgcaggtccacgatgaactcttgttagaagcgccaaaagagcgtgcggaagaggtggcagccctcgcgaaagaggttatggaaggcgtgtggcccttagcggtgcctcttgaagtcgaagttggtattggcgaggattggctggctgccaaaggataatga

SEQ ID NO: 2204 - protein, 841 aa, synthetic construct
  REGION 1..841: note = Variant of DNA polymerase I from Thermus sp. strain 2.9
MHHHHHHGGSGVLPVFEPKGRVLLVDGHHLAYRNFFALKGLTTSRGEPVQGVYGFAKSLLKALKEDGDVVIVVFDAKAPSFRHEAYEAYKAGRAPTPEDFPRQLALMKELVDLLGLERLEVPGFEADDVLATLAKKAEREGYEVQILTADRDLFQLLSPRISVLHPEGHRITPEWLWEKYGLRPEQWVDFRALVGDPSDNIPGVKGIGEKTALKLLKEWGSLENLLKNLDQVKPESVREKILAHLEDLKLSLELSRVRTDLPLEVDFRRRREPDWEGLKAFLERLEFGSLLHEFGLLESPLPAGEAPWPPPEGAFLGYRLSRPEPMWAELLALAASAQGRVYRAEDPHGALRGLFEVNGLLAKDLAVVALREGLDLPPTDDPMLLAYLLDPSNTTPEGVARRYGGEWTEDAAKRALLAERLHANLLGRLQGEERLLWLYEEVEKPLSRVLAHMEATGVKLDVAYLENLSLEVAAEMRRLEEEVFRLAGHSFRLNSRDQLERVLFDELGLPPIGKTEKTGKRSTSAAVLEALREVHPIVDKILQYRELAKLKGTYIDPLPALVHPKTGRLHTRFNQTATATGRLSSSDPNLQNIPVRTPLGQKIRRAFVAEEGWRLVALDYSQIELRVLAHLSGDENLIRVFQEGKDIHTQTASWMFGESAEAIDPLMRRAAKTINFGVLYGMSAHRLSQELGIPYEEAAAFIQKYFQSYPKVKAWIEKTLEEGRTRGYVETLFGRRRYVPDLNARVKSVREAAERMAFNMPVQGTAADLMKLAMVRLFPQLREVGARMLLQVHDELLLEAPKERAEEVAALAKEVMEGVWPLAVPLEVEVGIGEDWLAAKG

SEQ ID NO: 2205 - DNA, 2529 bp, synthetic construct
  misc_feature 1..2529: note = Variant of DNA polymerase I from Thermus sp. strain 2.9
  source 1..2529: mol_type = other DNA
atgcaccatcatcatcatcatggcggtagcggcgtgttaccggtgttcgagcctaaaggtcgcgtgcttctggttgatggccatcatctcgcgtatcgtaacttctttgccctgaaaggattaaccaccagccgtggcgagccggtacagggtgtctacggctttgcaaagtcgctcctgaaagctctgaaagaagacggtgatgtggtgattgttgtctttgatgcgaaagcgccaagttttcgccacgaagcgtacgaagcttacaaagccgggcgtgctccaacgccggaagactttcctcgccaattggcgcttatgaaggaattagtggatttgcttggcctcgaacgcttggaagttcccggtttcgaggcagacgacgtattagcgactctcgcaaagaaagccgaacgtgagggctatgaagtccagatcttgacagcagatcgcgatcttttccagcttttatctccgcgcatctcggtgttacacccggaagggcatcgtatcaccccggaatggctctgggagaaatatggtttgcgtcccgaacaatgggtggattttcgcgccttagtcggcgatccgagcgacaatattccgggagttaaaggtatcggcgagaagacggcgctcaagctccttaaagaatgggggtcgttggagaacttgcttaagaatttagatcaggtcaaaccagagtcagtgcgtgagaagattcttgcacacctcgaagacctcaaattaagcctggaattgtcccgtgtacgcaccgatttgccgctcgaagttgatttccgtcgccgccgcgaacctgactgggagggtcttaaagcgtttttagagcgtcttgaatttggttcgctcttgcatgaattcggccttttagaaagcccgttaccagccggggaagcaccttggccaccgcccgaaggcgcgtttttaggttaccgtttgagtcgcccggaaccgatgtgggccgaattattggctcttgcagcgtctgcccagggacgtgtgtatcgcgcggaagaccctcatggtgcgctccgcggcctcttcgaagtccgtggactccttgccaaagacttagctgttgttgcattgcgcgaaggtcttgatttacctccgactgatgatccaatgcttcttgcgtacctcttggacccgtcaaacacgacgcccgaaggcgtagcccgtcgttacggcggcgagtggaccgaagatgcagcgaaacgcgcgttattggccgaacgtttgcacgccaatttattaggacgtttgcaaggcgaggaacgtctcctctggctttacgaagaagtggagaaaccattgagtcgcgtgctcgcgcatatggaagctaccggtgtcaaattagacgtggcgtatttggaggcgctcagccttgaagttgctgccgaaatgcgccgcttggaggaagaagtattccgtttagcaggccactcctttcgccttaattctcgcgatcagttagaacgtgtgttgttcgatgaacttggtctccctcctatcggcaagacagagaagaccggtaaacgtagcacttcagcggcggttttagaagctcttcgcgaagtccatcccattgtggacaagatcttgcagtaccgcgaactcgcgaaattgaaaggcacctatattgaccctcttccggcattagtccacccgaaaacgggacgcctccatacccgcttcaaccaaacagccacggcgaccggtcgtttgtcctcctctgatccaaaccttcagaatattccagtacgtaccccattgggccagaagatccgccgcgcgtttgtagctgaggagggttggcgtttagtggccctcgattatagccaaattgaattacgtgtccttgcccatctttctggcgatgagaacctcatccgcgtgtttcaggaaggcaaagacattcacactcaaacggcaagctggatgtttggattatcagctgaagcgatcgatcctttgatgcgtcgtgcagcgaagaccatcaatttcggtgttctctacggtatgagtgcccaccgtttgtcgcaggaattaggcattccctatgaagaagctgcggcgttcattcagaaatactttcaaagctatcccaaagttaaagcatggatcgagaagactctcgaagaaggccgcacacgtggttacgtagagaccttatttggacgtcgccgctatgttcccgatttaaacgctcgcgtgaaatctgtccgtgaagccgccgaacgcatggcgttcaacatgcctgtacagggcacggcagctgacctcatgaaacttgcaatggtgcgcctttttccacaattgcgtgaagttggtgcccgcatgctcttgcaggtccacgatgaactcttgttagaagcgccaaaagagcgtgcggaagaggtggcagccctcgcgaaagaggttatggaaggcgtgtggcccttagcggtgcctcttgaagtcgaagttggtattggcgaggattggctggctgccaaaggataatga

SEQ ID NO: 2206 - protein, 841 aa, synthetic construct
  REGION 1..841: note = Variant of DNA polymerase I from Thermus sp. strain 2.9
MHHHHHHGGSGVLPVFEPKGRVLLVDGHHLAYRNFFALKGLTTSRGEPVQGVYGFAKSLLKALKEDGDVVIVVFDAKAPSFRHEAYEAYKAGRAPTPEDFPRQLALMKELVDLLGLERLEVPGFEADDVLATLAKKAEREGYEVQILTADRDLFQLLSPRISVLHPEGHRITPEWLWEKYGLRPEQWVDFRALVGDPSDNIPGVKGIGEKTALKLLKEWGSLENLLKNLDQVKPESVREKILAHLEDLKLSLELSRVRTDLPLEVDFRRRREPDWEGLKAFLERLEFGSLLHEFGLLESPLPAGEAPWPPPEGAFLGYRLSRPEPMWAELLALAASAQGRVYRAEDPHGALRGLFEVRGLLAKDLAVVALREGLDLPPTDDPMLLAYLLDPSNTTPEGVARRYGGEWTEDAAKRALLAERLHANLLGRLQGEERLLWLYEEVEKPLSRVLAHMEATGVKLDVAYLEALSLEVAAEMRRLEEEVFRLAGHSFRLNSRDQLERVLFDELGLPPIGKTEKTGKRSTSAAVLEALREVHPIVDKILQYRELAKLKGTYIDPLPALVHPKTGRLHTRFNQTATATGRLSSSDPNLQNIPVRTPLGQKIRRAFVAEEGWRLVALDYSQIELRVLAHLSGDENLIRVFQEGKDIHTQTASWMFGLSAEAIDPLMRRAAKTINFGVLYGMSAHRLSQELGIPYEEAAAFIQKYFQSYPKVKAWIEKTLEEGRTRGYVETLFGRRRYVPDLNARVKSVREAAERMAFNMPVQGTAADLMKLAMVRLFPQLREVGARMLLQVHDELLLEAPKERAEEVAALAKEVMEGVWPLAVPLEVEVGIGEDWLAAKG

SEQ ID NO: 2207 - DNA, 2529 bp, synthetic construct
  misc_feature 1..2529: note = Variant of DNA polymerase I from Thermus sp. strain 2.9
  source 1..2529: mol_type = other DNA
atgcaccatcatcatcatcatggcggtagcggcgtgttaccggtgttcgagcctaaaggtcgcgtgcttctggttgatggccatcatctcgcgtatcgtaacttctttgccctgaaaggattaaccaccagccgtggcgagccggtacagggtgtctacggctttgcaaagtcgctcctgaaagctctgaaagaagacggtgatgtggtgattgttgtctttgatgcgaaagcgccaagttttcgccacgaagcgtacgaagcttacaaagccgggcgtgctccaacgccggaagactttcctcgccaattggcgcttatgaaggaattagtggatttgcttggcctcgaacgcttggaagttcccggtttcgaggcagacgacgtattagcgactctcgcaaagaaagccgaacgtgagggctatgaagtccagatcttgacagcagatcgcgatcttttccagcttttatctccgcgcatctcggtgttacacccggaagggcatcgtatcaccccggaatggctctgggagaaatatggtttgcgtcccgaacaatgggtggattttcgcgccttagtcggcgatccgagcgacaatattccgggagttaaaggtatcggcgagaagacggcgctcaagctccttaaagaatgggggtcgttggagaacttgcttaagaatttagatcaggtcaaaccagagtcagtgcgtgagaagattcttgcacacctcgaagacctcaaattaagccgcgaattgtcccgtgtacgcaccgatttgccgctcgaagttgatttccgtcgccgccgcgaacctgactgggagggtcttaaagcgtttttagagcgtcttgaatttggttcgctcttgcatgaattcggccttttagaaagcccgttaccagccgaagaagcaccttggccaccgcccgaaggcgcgtttttaggttaccgtttgagtcgcccggaaccgatgtgggccgaattactggctcttgcagcgtctgcccagggacgtgtgtatcgcgcggaagaccctcatggtgcgctccgcggcctcttcgaagtccgcggactccttgccaaagacttagctgttgttgcattgcgcgaaggtcttgatttacctccgactgatgatccaatgcttcttgcgtacctcttggacccgtcaaacacgacgcccgaaggcgtagcccgtcgttacggcggcgagtggaccgaagatgcagcgaaacgcgcgttattggccgaacgtttgcacgccaatttattaggacgtttgcaaggcgaggaacgtctcctctggctttacgaagaagtggagaaaccattgagtcgcgtgctcgcgcatatggaagctaccggtgtcaaattagacgtggcgtatttggaggctctcagccttgaagttgctgccgaaatgcgccgcttggaggaagaagtattccgtttagcaggccactcctttcgccttaattctcgcgatcagttagaacgtgtgttgttcgatgaacttggtctccctcctatcggcaagacagagaagaccggtaaacgtagcacttcagcggcggttttagaagctcttcgcgaagtccatcccattgtggacaagatcttgcagtaccgcgaactcgcgaaattgaaaggcacctatattgaccctcttccggcattagtccacccgaaaacgggacgcctccatacccgcttcaaccaaacagccacggcgaccggtcgtttgtcctcctctgatccaaaccttcagaatattccagtacgtaccccattgggccagaagatccgccgcgcgtttgtagctgaggagggttggcgtttagtggccctcgattatagccaaattgaattacgtgtccttgcccatctttctggcgatgagaacctcatccgcgtgtttcaggaaggcaaagacattcacactcaaacggcaagctggatgtttggattatcagctgaagcgatcgatcctttgatgcgtcgtgcagcgaagaccatcaatttcggtgttctctacggtatgagtgcccatcgtttgtcgcaggaattaggcattccctatgaagaagctgcggcgttcattcagaaatactttcaaagctatcccaaagttaaagcatggatcgagaagactctccgtgaaggccgcacacgtggttacgtagagaccttatttggacgtcgccgctatgttcccgatttaaacgctcgcgtgaaatctgtccgtgaagccgccgaacgcatggcgttcaacatgcctgtacagggcacggcagctgacctcatgaaacttgcaatggtgcgcctttttccacaattgcgtgaagttggtgcccgcatgctcttgcaggtccacgatgaactcttgttagaagcgccaaaagagcgtgcggaagaggtggcagccctcgcgaaagaggttatggaaggcgtgtggcccttagcggtgcctcttgaagtcgaagttggtattggcgaggattggctggctgccaaaggataatga

SEQ ID NO: 2208 - protein, 841 aa, synthetic construct
  REGION 1..841: note = Variant of DNA polymerase I from Thermus sp. strain 2.9
MHHHHHHGGSGVLPVFEPKGRVLLVDGHHLAYRNFFALKGLTTSRGEPVQGVYGFAKSLLKALKEDGDVVIVVFDAKAPSFRHEAYEAYKAGRAPTPEDFPRQLALMKELVDLLGLERLEVPGFEADDVLATLAKKAEREGYEVQILTADRDLFQLLSPRISVLHPEGHRITPEWLWEKYGLRPEQWVDFRALVGDPSDNIPGVKGIGEKTALKLLKEWGSLENLLKNLDQVKPESVREKILAHLEDLKLSRELSRVRTDLPLEVDFRRRREPDWEGLKAFLERLEFGSLLHEFGLLESPLPAEEAPWPPPEGAFLGYRLSRPEPMWAELLALAASAQGRVYRAEDPHGALRGLFEVRGLLAKDLAVVALREGLDLPPTDDPMLLAYLLDPSNTTPEGVARRYGGEWTEDAAKRALLAERLHANLLGRLQGEERLLWLYEEVEKPLSRVLAHMEATGVKLDVAYLEALSLEVAAEMRRLEEEVFRLAGHSFRLNSRDQLERVLFDELGLPPIGKTEKTGKRSTSAAVLEALREVHPIVDKILQYRELAKLKGTYIDPLPALVHPKTGRLHTRFNQTATATGRLSSSDPNLQNIPVRTPLGQKIRRAFVAEEGWRLVALDYSQIELRVLAHLSGDENLIRVFQEGKDIHTQTASWMFGLSAEAIDPLMRRAAKTINFGVLYGMSAHRLSQELGIPYEEAAAFIQKYFQSYPKVKAWIEKTLREGRTRGYVETLFGRRRYVPDLNARVKSVREAAERMAFNMPVQGTAADLMKLAMVRLFPQLREVGARMLLQVHDELLLEAPKERAEEVAALAKEVMEGVWPLAVPLEVEVGIGEDWLAAKG

SEQ ID NO: 2209 - DNA, 2529 bp, synthetic construct
  misc_feature 1..2529: note = Variant of DNA polymerase I from Thermus sp. strain 2.9
  source 1..2529: mol_type = other DNA
atgcaccatcatcatcatcatggcggtagcggcgtgttaccggtgttcgagcctaaaggtcgcgtgcttctggttgatggccatcatctcgcgtatcgtaacttctttgccctgaaaggattaaccaccagccgtggcgagccggtacagggtgtctacggctttgcaaagtcgctcctgaaagctctgaaagaagacggtgatgtggtgattgttgtctttgatgcgaaagcgccaagttttcgccacgaagcgtacgaagcttacaaagccgggcgtgctccaacgccggaagactttcctcgccaattggcgcttatgaaggaattagtggatttgcttggcctcgaacgcttggaagttcccggtttcgaggcagacgacgtattagcgactctcgcaaagaaagccgaacgtgagggctatgaagtccagatcttgacagcagatcgcgatcttttccagcttttatctccgcgcatctcggtgttacacccggaagggcatcgtatcaccccggaatggctctgggagaaatatggtttgcgtcccgaacaatgggtggattttcgcgccttagcaggcgatccgagcgacaatattccgggagttaaaggtatcggcgagaagacggcgctcaagctccttaaagaatgggggtcgttggagaacttgcttaagaatttagatcaggtcaaaccagagtcagtgcgtgagaagattcttgcacacctcgaagacctcaaattaagccgcgaattgtcccgtgtacgcaccgatttgccgctcgaagttgatttccgtcgccgccgcgaacctgactgggagggtcttaaagcgtttttagagcgtcttgaatttggttcgctcttgcatgaattcggccttttagaaagcccgttaccagccgaagaagcaccttggccaccgcccgaaggcgcgtttttaggttaccgtttgagtcgcccggaaccgatgtgggccgaattattggctcttgcagcgtctgcccagggacgtgtgtatcgcgcggaagaccctcatggtgcgctccgcggcctcttcgaagtccgtggactccttgccaaagacttagctgttgttgcattgcgcgaaggtcttgatttacctccgactgatgatccaatgcttcttgcgtacctcttggacccgtcaaacacgacgcccgaaggcgtagcccgtcgttacggcggcgagtggaccgaagatgcagcgaaacgcgcgttattggccgaacgtttgcacgccaatttattaggacgtttgcaaggcgaggaacgtctcctctggctttacgaagaagtggagaaaccattgagtcgcgtgctcgcgcatatggaagctaccggtgtcaaattagacgtggcgtatttggaggctctcagccttgaagttgctgccgaaatgcgccgcttggaggaagaagtattccgtttagcaggccactcctttcgccttaattctcgcgatcagttagaacgtgtgttgttcgatgaacttggtctccctcctatcggcaagacagagaagaccggtaaacgtagcacttcagcggcggttttagaagctcttcgcgaagtccatcccattgtggacaagatcttgcagtaccgcgaactcgcgaaattgaaaggcacctatattgaccctcttccggcattagtccacccgaaaacgggacgcctccatacccgcttcaaccaaacagccacggcgaccggtcgtttgtcctcctctgatccaaaccttcagaatattccagtacgtaccccattgggccagaagatccgccgcgcgtttgtagctgaggagggttggcgtttagtggccctcgattatagccaaattgaattacgtgtccttgcccatctttctggcgatgagaacctcatccgcgtgtttcaggaaggcaaagacattcacactcaaacggcaagctggatgtttggattatcagctgaagcgatcgatcctttgatgcgtcgtgcagcgaagaccatcaatttcggtgttctctacggtatgagtgcccaccgtttgtcgcaggaattaggcattccctatactgaagctgcggcgttcattcagaaatactttcaaagctatcccaaagttaaagcatggatcgagaagactctcgaagaaggccgcacacgtggttacgtagagaccttatttggacgtcgccgctatgttcccgatttaaacgctcgcgtgaaatctgtccgtgaagccgccgaacgcatggcgttcaacatgcctgtacagggcacggcagctgacctcatgaaacttgcaatggtgcgcctttttccacaattgcgtgaagttggtgcccgcatgctcttgcaggtccacgatgaactcttgttagaagcgccaaaagagcgtgcggaagaggtggcagccctcgcgaaagaggttatggaaggcgtgtggcccttagcggtgcctcttgaagtcgaagttggtattggcgaggattggctggctgccaaaggataatga

SEQ ID NO: 2210 - protein, 841 aa, synthetic construct
  REGION 1..841: note = Variant of DNA polymerase I from Thermus sp. strain 2.9
MHHHHHHGGSGVLPVFEPKGRVLLVDGHHLAYRNFFALKGLTTSRGEPVQGVYGFAKSLLKALKEDGDVVIVVFDAKAPSFRHEAYEAYKAGRAPTPEDFPRQLALMKELVDLLGLERLEVPGFEADDVLATLAKKAEREGYEVQILTADRDLFQLLSPRISVLHPEGHRITPEWLWEKYGLRPEQWVDFRALAGDPSDNIPGVKGIGEKTALKLLKEWGSLENLLKNLDQVKPESVREKILAHLEDLKLSRELSRVRTDLPLEVDFRRRREPDWEGLKAFLERLEFGSLLHEFGLLESPLPAEEAPWPPPEGAFLGYRLSRPEPMWAELLALAASAQGRVYRAEDPHGALRGLFEVRGLLAKDLAVVALREGLDLPPTDDPMLLAYLLDPSNTTPEGVARRYGGEWTEDAAKRALLAERLHANLLGRLQGEERLLWLYEEVEKPLSRVLAHMEATGVKLDVAYLEALSLEVAAEMRRLEEEVFRLAGHSFRLNSRDQLERVLFDELGLPPIGKTEKTGKRSTSAAVLEALREVHPIVDKILQYRELAKLKGTYIDPLPALVHPKTGRLHTRFNQTATATGRLSSSDPNLQNIPVRTPLGQKIRRAFVAEEGWRLVALDYSQIELRVLAHLSGDENLIRVFQEGKDIHTQTASWMFGLSAEAIDPLMRRAAKTINFGVLYGMSAHRLSQELGIPYTEAAAFIQKYFQSYPKVKAWIEKTLEEGRTRGYVETLFGRRRYVPDLNARVKSVREAAERMAFNMPVQGTAADLMKLAMVRLFPQLREVGARMLLQVHDELLLEAPKERAEEVAALAKEVMEGVWPLAVPLEVEVGIGEDWLAAKG

SEQ ID NO: 2211 - DNA, 2529 bp, synthetic construct
  misc_feature 1..2529: note = Variant of DNA polymerase I from Thermus sp. strain 2.9
  source 1..2529: mol_type = other DNA
atgcaccatcatcatcatcatggcggtagcggcgtgttaccggtgttcgagcctaaaggtcgcgtgcttctggttgatggccatcatctcgcgtatcgtaacttctttgccctgaaaggattaaccaccagccgtggcgagccggtacagggtgtctacggctttgcaaagtcgctcctgaaagctctgaaagaagacggtgatgtggtgattgttgtctttgatgcgaaagcgccaagttttcgccacgaagcgtacgaagcttacaaagccgggcgtgctccaacgccggaagactttcctcgccaattggcgcttatgaaggaattagtggatttgcttggcctcgaacgcttggaagttcccggtttcgaggcagacgacgtattagcgactctcgcaaagaaagccgaacgtgagggctatgaagtccagatcttgacagcagatcgcgatcttttccagcttttatctccgcgcatctcggtgttacacccggaagggcatcgtatcaccccggaatggctctgggagaaatatggtttgcgtcccgaacaatgggtggattttcgcgccttagcaggcgatccgagcgacaatattccgggagttaaaggtatcggcgagaagacggcgctcaagctccttaaagaatgggggtcgttggagaacttgcttaagaatttagatcaggtcaaaccagagtcagtgcgtgagaagattcttgcacacctcgaagacctcaaattaagccgtgaattgtcccgtgtacgcaccgatttgccgctcgaagttgatttccgtggccgccgcgaacctgactgggagggtcttaaagcgtttttagagcgtcttgaatttggttcgctcttgcatgaattcggccttttagaaagcccgttaccagccggggaagcaccttggccaccgcccgaaggcgcgtttttaggttaccgtttgagtcgcccggaaccgatgtgggccgaattactggctcttgcagcgtctgcccagggacgtgtgtatcgcgcggaagaccctcatggtgcgctccgcggcctcttcgaagtccgtggactccttgccaaagacttagctgttgttgcattgcgcgaaggtcttgatttacctccgactgatgatccaatgcttcttgcgtacctcttggacccgtcaaacacgacgcccgaaggcgtagcccgtcgttacggcggcgagtggaccgaagatgcagcgaaacgcgcgttattggccgaacgtttgcacgccaatttattaggacgtttgcaaggcgaggaacgtctcctctggctttacgaagaagtggagaaaccattgagtcgcgtgctcgcgcatatggaagctaccggtgtcaaattagacgtggcgtatttggaggctctcagccttgaagttgctgccgaaatgcgccgcttggaggaagaagtattccgtttagcaggccgttcctttcgccttaattctcgcgatcagttagaacgtgtgttgttcgatgaacttggtctccctcctatcggcaagacagagaagaccggtaaacgtagcacttcagcggcggttttagaagctcttcgcgaagtccatcccattgtggacaagatcttgcagtaccgcgaactcgcgaaattgaaaggcacctatattgaccctcttccggcattagtccacccgaaaacgggacgcctccatacccgcttcaaccaaacagccacggcgaccggtcgtttgtcctcctctgatccaaaccttcagaacattccagtacgtaccccattgggccagaagatccgccgcgcgtttgtagctgaggagggttggcgtttagtggccctcgattatagccaaattgaattacgtgtccttgcccatctttctggcgatgagaacctcatccgcgtgtttcaggaaggcaaagacattcacactcaaacggcaagctggatgtttggattatcagctgaagcgatcgatcctttgatgcgtcgtgcagcgaagaccatcaatttcggtgttctctacggtatgagtgcctttcgtttgtcgcaggaattaggcattccctatgaagaagctgcggcgttcattcagaaatactttcaaagctatcccaaagttaaagcatggatcgagaagactctcgaagaaggccgcacacgtggttacgtagagaccttatttggacgtcgccgctatgttcccgatttaaacgctcgcgtgaaatctgtccgtgaagccgccgaacgcatggcgttcaacatgcctgtacagggcacggcagctgacctcatgaaacttgcaatggtgcgcctttttccacaattgcgtgaagttggtgcccgcatgctcttgcaggtccacgatgaactcttgttagaagcgccaaaagagcgtgcggaagaggtggcagccctcgcgaaagaggttatggaaggcgtgtggcccttagcggtgcctcttgaagtcgaagttggtattggcgaggattggctggctgccaaaggataatga

SEQ ID NO: 2212 - protein, 841 aa, synthetic construct
  REGION 1..841: note = Variant of DNA polymerase I from Thermus sp. strain 2.9
MHHHHHHGGSGVLPVFEPKGRVLLVDGHHLAYRNFFALKGLTTSRGEPVQGVYGFAKSLLKALKEDGDVVIVVFDAKAPSFRHEAYEAYKAGRAPTPEDFPRQLALMKELVDLLGLERLEVPGFEADDVLATLAKKAEREGYEVQILTADRDLFQLLSPRISVLHPEGHRITPEWLWEKYGLRPEQWVDFRALAGDPSDNIPGVKGIGEKTALKLLKEWGSLENLLKNLDQVKPESVREKILAHLEDLKLSRELSRVRTDLPLEVDFRGRREPDWEGLKAFLERLEFGSLLHEFGLLESPLPAGEAPWPPPEGAFLGYRLSRPEPMWAELLALAASAQGRVYRAEDPHGALRGLFEVRGLLAKDLAVVALREGLDLPPTDDPMLLAYLLDPSNTTPEGVARRYGGEWTEDAAKRALLAERLHANLLGRLQGEERLLWLYEEVEKPLSRVLAHMEATGVKLDVAYLEALSLEVAAEMRRLEEEVFRLAGRSFRLNSRDQLERVLFDELGLPPIGKTEKTGKRSTSAAVLEALREVHPIVDKILQYRELAKLKGTYIDPLPALVHPKTGRLHTRFNQTATATGRLSSSDPNLQNIPVRTPLGQKIRRAFVAEEGWRLVALDYSQIELRVLAHLSGDENLIRVFQEGKDIHTQTASWMFGLSAEAIDPLMRRAAKTINFGVLYGMSAFRLSQELGIPYEEAAAFIQKYFQSYPKVKAWIEKTLEEGRTRGYVETLFGRRRYVPDLNARVKSVREAAERMAFNMPVQGTAADLMKLAMVRLFPQLREVGARMLLQVHDELLLEAPKERAEEVAALAKEVMEGVWPLAVPLEVEVGIGEDWLAAKG

SEQ ID NO: 2213 - DNA, 2529 bp, synthetic construct
  misc_feature 1..2529: note = Variant of DNA polymerase I from Thermus sp. strain 2.9
  source 1..2529: mol_type = other DNA
atgcaccatcatcatcatcatggcggtagcggcgtgttaccggtgttcgagcctaaaggtcgcgtgcttctggttgatggccatcatctcgcgtatcgtaacttctttgccctgaaaggattaaccaccagccgtggcgagccggtacagggtgtctacggctttgcaaagtcgctcctgaaagctctgaaagaagacggtgatgtggtgattgttgtctttgatgcgaaagcgccaagttttcgccacgaagcgtacgaagcttacaaagccgggcgtgctccaacgccggaagactttcctcgccaattggcgcttatgaaggaattagtggatttgcttggcctcgaacgcttggaagttcccggtttcgaggcagacgacgtattagcgactctcgcaaagaaagccgaacgtgagggctatgaagtccagatcttgacagcagatcgcgatcttttccagcttttatctccgcgcatctcggtgttacacccggaagggcatcgtatcaccccggaatggctctgggagaaatatggtttgcgtcccgaacaatgggtggattttcgcgccttagcaggcgatccgagcgacaatattccgggagttaaaggtatcggcgagaagacggcgctcaagctccttaaagaatgggggtcgttggagaacttgcttaagaatttagatcaggtcaaaccagagtcagtgcgtgagaagattcttgcacacctcgaagacctcaaattaagccgcgaattgtcccgtgtacgcaccgatttgccgctcgaagttgatttccgtcgccgccgcgaacctgactgggagggtcttaaagcgtttttagagcgtcttgaatttggttcgctcttgcatgaattcggccttttagaaagcccgttaccagccgtggaagcaccttggccaccgcccgaaggcgcgtttttaggttaccgtttgagtcgcccggaaccgatgtgggccgaattattggctcttgcagcgtctgcccagggacgtgtgtatcgcgcggaagaccctcatggtgcgctccgcggcctcttcgaagtccgtggactccttgccaaagacttagctgttgttgcattgcgcgaaggtcttgatttacctccgactgatgatccaatgcttcttgcgtacctcttggacccgtcaaacacgacgcccgaaggcgtagcccgtcgttacggcggcgagtggaccgaagatgcagcgaaacgcgcgttattggccgaacgtttgcacgccaatttattaggacgtttgcaaggcgaggaacgtctcctctggctttacgaagaagtggagaaaccattgagtcgcgtgctcgcgcatatggaagctaccggtgtcaaattagacgtggcgtatttggaggctctcagccttgaagttgctgccgaaatgcgccgcttggaggaagaagtattccgtttagcaggccattcctttcgccttaattctcgcgatcagttagaacgtgtgttgttcgatgaacttggtctccctcctatcggcaagacagagaagaccggtaaacgtagcacttcagcggcggttttagaagctcttcgcgaagtccatcccattgtggacaagatcttgcagtaccgcgaactcgcgaaattgaaaggcacctatattgaccctcttccggcattagtccacccgaaaacgggacgcctccatacccgcttcaaccaaacagccacggcgaccggtcgtttgtcctcctctgatccaaaccttcagaatattccagtacgtaccccattgggccagaagatccgccgcgcgtttgtagctgaggagggttggcgtttagtggccctcgattatagccaaattgaattacgtgtccttgcccatctttctggcgatgagaacctcatccgcgtgtttcaggaaggcaaagacattcacactcaaacggcaagctggatgtttggattatcagctgaagcgatcgatcctttgatgcgtcgtgcagcgaagaccatcaatttcggtgttctctacggtatgagtgcccatcgtttgtcgcaggaattaggcattccctatgaagaagctgcggcgttcattcagaaatactttcaaagctatcccaaagttaaagcatggatcgagaagactctcgaagaaggccgcacacgtggttacgtagagaccttatttggacgtcgccgctatgttcccgatttaaacgctcgcgtgaaatctgtccgtgaagccgccgaacgcatggcgttcaacatgcctgtacagggcacggcagctgacctcatgaaacttgcaatggtgcgcctttttccacaattgcgtgaagttggtgcccgcatgctcttgcaggtccacgatgaactcttgttagaagcgccaaaagagcgtgcggaagaggtggcagccctcgcgaaagaggttatggaaggcgtgtggcccttagcggtgcctcttgaagtcgaagttggtattggcgaggattggctggctgccaaaggataatga

SEQ ID NO: 2214 - protein, 841 aa, synthetic construct; identical to SEQ ID NO: 2146
  REGION 1..841: note = Variant of DNA polymerase I from Thermus sp. strain 2.9

SEQ ID NO: 2215 - DNA, 2529 bp, synthetic construct
  misc_feature 1..2529: note = Variant of DNA polymerase I from Thermus sp. strain 2.9
  source 1..2529: mol_type = other DNA
atgcaccatcatcatcatcatggcggtagcggcgtgttaccggtgttcgagcctaaaggtcgcgtgcttctggttgatggccatcatctcgcgtatcgtaacttctttgccctgaaaggattaaccaccagccgtggcgagccggtacagggtgtctacggctttgcaaagtcgctcctgaaagctctgaaagaagacggtgatgtggtgattgttgtctttgatgcgaaagcgccaagttttcgccacgaagcgtacgaagcttacaaagccgggcgtgctccaacgccggaagactttcctcgccaattggcgcttatgaaggaattagtggatttgcttggcctcgaacgcttggaagttcccggtttcgaggcagacgacgtattagcgactctcgcaaagaaagccgaacgtgagggctatgaagtccagatcttgacagcagatcgcgatcttttccagcttttatctccgcgcatctcggtgttacacccggaagggcatcgtatcaccccggaatggctctgggagaaatatggtttgcgtcccgaacaatgggtggattttcgcgccttagccggcgatccgagcgacaatattccgggagttaaaggtatcggcgagaagacggcgctcaagctccttaaagaatgggggtcgttggagaacttgcttaagaatttagatcaggtcaaaccagagtcagtgcgtgagaagattcttgcacacctcgaagacctcaaattaagccgcgaattgtcccgtgtacgcaccgatttgccgctcgaagttgatttccgtggccgccgcgaacctgactgggagggtcttaaagcgtttttagagcgtcttgaatttggttcgctcttgcatgaattcggccttttagaaagcccgttaccagccgaggaagcaccttggccaccgcccgaaggcgcgtttttaggttaccgtttgagtcgcccggaaccgatgtgggccgaattattggctcttgcagcgtctgcccagggacgtgtgtatcgcgcggaagaccctcatggtgcgctccgcggcctcttcgaagtccgcggactccttgccaaagacttagctgttgttgcattgcgcgaaggtcttgatttacctccgactgatgatccaatgcttcttgcgtacctcttggacccgtcaaacacgacgcccgaaggcgtagcccgtcgttacggcggcgagtggaccgaagatgcagcgaaacgcgcgttattggccgaacgtttgcacgccaatttattaggacgtttgcaaggcgaggaacgtctcctctggctttacgaagaagtggagaaaccattgagtcgcgtgctcgcgcatatggaagctaccggtgtcaaattagacgtggcgtatttggaggctctcagccttgaagttgctgccgaaatgcgccgcttggaggaagaagtattccgtttagcaggccactcctttcgccttaattctcgcgatcagttagaacgtgtgttgttcgatgaacttggtctccctcctatcggcaagacagagaagaccggtaaacgtagcacttcagcggcggttttagaagctcttcgcgaagtccatccaattgtggacaagatcttgcagtaccgcgaactcgcgaaattgaaaggcacctatattgaccctcttccggcattagtccacccgaaaacgggacgcctccatacccgcttcaaccaaacagccacggcgaccggtcgtttgtcctcctctgatccaaaccttcagaacattccagtacgtaccccattgggccagaagatccgccgcgcgtttgtagctgaggagggttggcgtttagtggccctcgattatagccaaattgaattacgtgtccttgcccatctttctggcgatgagaacctcatccgcgtgtttcaggaaggcaaagacattcacactcaaacggcaagctggatgtttggactgtcagctgaagcgatcgatcctttgatgcgtcgtgcagcgaagaccatcaatttcggtgttctctacggtatgagtgcccaccgtttgtcgcaggaattaggcattccctatgaagaagctgcggcgttcattcagaaatactttcaaagctatcccaaagttaaagcatggatcgagaagactctcgaagaaggccgcacacgtggttacgtagagaccttatttggacgtcgccgctatgttcccgatttaaatgctcgcgtgaaatctgtccgtgaagccgccgaacgcatggcgttcaacatgcctgtacagggcacggcagctgacctcatgaaacttgcaatggtgcgcctttttccacaattgcgtgaagttggtgcccgcatgctcttgcaggtccacgatgaactcttgttagaagcgccaaaagagcgtgcggaagaggtggcagccctcgcgaaagaggttatggaaggcgtgtggcccttagcggtgcctcttgaagtcgaagttggtattggcgaggattggctggctgccaaaggataatga

SEQ ID NO: 2216 - protein, 841 aa, synthetic construct; identical to SEQ ID NO: 2152
  REGION 1..841: note = Variant of DNA polymerase I from Thermus sp. strain 2.9

SEQ ID NO: 2217 - DNA, 2529 bp, synthetic construct
  misc_feature 1..2529: note = Variant of DNA polymerase I from Thermus sp. strain 2.9
  source 1..2529: mol_type = other DNA
atgcaccatcatcatcatcatggcggtagcggcgtgttaccggtgttcgagcctaaaggtcgcgtgcttctggttgatggccatcatctcgcgtatcgtaacttctttgccctgaaaggattaaccaccagccgtggcgagccggtacagggtgtctacggctttgcaaagtcgctcctgaaagctctgaaagaagacggtgatgtggtgattgttgtctttgatgcgaaagcgccaagttttcgccacgaagcgtacgaagcttacaaagccgggcgtgctccaacgccggaagactttcctcgccaattggcgcttatgaaggaattagtggatttgcttggcctcgaacgcttggaagttcccggtttcgaggcagacgacgtattagcgactctcgcaaagaaagccgaacgtgagggctatgaagtccagatcttgacagcagatcgcgatcttttccagcttttatctccgcgcatctcggtgttacacccggaagggcatcgtatcaccccggaatggctctgggagaaatatggtttgcgtcccgaacaatgggtggattttcgcgccttagccggcgatccgagcgacaatattccgggagttaaaggtatcggcgagaagacggcgctcaagctccttaaagaatgggggtcgttggagaacttgcttaagaatttagatcaggtcaaaccagagtcagtgcgtgagaagattcttgcacacctcgaagacctcaaattaagccgtgaattgtcccgtgtacgcaccgatttgccgctcgaagttgatttccgtggccgccgcgaacctgactgggagggtcttaaagcgtttttagagcgtcttgaatttggttcgctcttgcatgaattcggccttttagaaagcccgttaccagccgaagaagcaccttggccaccgcccgaaggcgcgtttttaggttaccgtttgagtcgcccggaaccgatgtgggccgaattactggctcttgcagcgtctgcccagggacgtgtgtatcgcgcggaagaccctcatggtgcgctccgcggcctcttcgaagtccgtggactccttgccaaagacttagctgttgttgcattgcgcgaaggtcttgatttacctccgactgatgatccaatgcttcttgcgtacctcttggacccgtcaaacacgacgcccgaaggcgtagcccgtcgttacggcggcgagtggaccgaagatgcagcgaaacgcgcgttattggccgaacgtttgcacgccaatttattaggacgtttgcaaggcgaggaacgtctcctctggctttacgaagaagtggagaaaccattgagtcgcgtgctcgcgcatatggaagctaccggtgtcaaattagacgtggcgtatttggagaatctcagccttgaagttgctgccgaaatgcgccgcttggaggaagaagtattccgtttagcaggccgttcctttcgccttaattctcgcgatcagttagaacgtgtgttgttcgatgaacttggtctccctcctatcggcaagacagagaagaccggtaaacgtagcacttcagcggcggttttagaagctcttcgcgaagtccatcccattgtggacaagatcttgcagtaccgcgaactcgcgaaattgaaaggcacctatattgaccctcttccggcattagtccacccgaaaacgggacgcctccatacccgcttcaaccaaacagccacggcgaccggtcgtttgtcctcctctgatccaaaccttcagaacattccagtacgtaccccattgggccagaagatccgccgcgcgtttgtagctgaggagggttggcgtttagtggccctcgattatagccaaattgaattacgtgtccttgcccatctttctggcgatgagaacctcatccgcgtgtttcaggaaggcaaagacattcacactcaaacggcaagctggatgtttggagtgtcagctgaagcgatcgatcctttgatgcgtcgtgcagcgaagaccatcaatttcggtgttctctacggtatgagtgcctttcgtttgtcgcaggaattaggcattccctatgaagaagctgcggcgttcattcagaaatactttcaaagctatcccaaagttaaagcatggatcgagaagactctcgaagaaggccgcacacgtggttacgtagagaccttatttggacgtcgccgctatgttcccgatttaaacgctcgcgtgaaatctgtccgtgaagccgccgaacgcatggcgttcaacatgcctgtacagggcacggcagctgacctcatgaaacttgcaatggtgcgcctttttccacaattgcgtgaagttggtgcccgcatgctcttgcaggtccacgatgaactcttgttagaagcgccaaaagagcgtgcggaagaggtggcagccctcgcgaaagaggttatggaaggcgtgtggcccttagcggtgcctcttgaagtcgaagttggtattggcgaggattggctggctgccaaaggataatga

SEQ ID NO: 2218 - protein, 841 aa, synthetic construct
  REGION 1..841: note = Variant of DNA polymerase I from Thermus sp. strain 2.9
MHHHHHHGGSGVLPVFEPKGRVLLVDGHHLAYRNFFALKGLTTSRGEPVQGVYGFAKSLLKALKEDGDVVIVVFDAKAPSFRHEAYEAYKAGRAPTPEDFPRQLALMKELVDLLGLERLEVPGFEADDVLATLAKKAEREGYEVQILTADRDLFQLLSPRISVLHPEGHRITPEWLWEKYGLRPEQWVDFRALAGDPSDNIPGVKGIGEKTALKLLKEWGSLENLLKNLDQVKPESVREKILAHLEDLKLSRELSRVRTDLPLEVDFRGRREPDWEGLKAFLERLEFGSLLHEFGLLESPLPAEEAPWPPPEGAFLGYRLSRPEPMWAELLALAASAQGRVYRAEDPHGALRGLFEVRGLLAKDLAVVALREGLDLPPTDDPMLLAYLLDPSNTTPEGVARRYGGEWTEDAAKRALLAERLHANLLGRLQGEERLLWLYEEVEKPLSRVLAHMEATGVKLDVAYLENLSLEVAAEMRRLEEEVFRLAGRSFRLNSRDQLERVLFDELGLPPIGKTEKTGKRSTSAAVLEALREVHPIVDKILQYRELAKLKGTYIDPLPALVHPKTGRLHTRFNQTATATGRLSSSDPNLQNIPVRTPLGQKIRRAFVAEEGWRLVALDYSQIELRVLAHLSGDENLIRVFQEGKDIHTQTASWMFGVSAEAIDPLMRRAAKTINFGVLYGMSAFRLSQELGIPYEEAAAFIQKYFQSYPKVKAWIEKTLEEGRTRGYVETLFGRRRYVPDLNARVKSVREAAERMAFNMPVQGTAADLMKLAMVRLFPQLREVGARMLLQVHDELLLEAPKERAEEVAALAKEVMEGVWPLAVPLEVEVGIGEDWLAAKG

SEQ ID NO: 2219 - DNA, 2529 bp, synthetic construct
  misc_feature 1..2529: note = Variant of DNA polymerase I from Thermus sp. strain 2.9
  source 1..2529: mol_type = other DNA
atgcaccatcatcatcatcatggcggtagcggcgtgttaccggtgttcgagcctaaaggtcgcgtgcttctggttgatggccatcatctcgcgtatcgtaacttctttgccctgaaaggattaaccaccagccgtggcgagccggtacagggtgtctacggctttgcaaagtcgctcctgaaagctctgaaagaagacggtgatgtggtgattgttgtctttgatgcgaaagcgccaagttttcgccacgaagcgtacgaagcttacaaagccgggcgtgctccaacgccggaagactttcctcgccaattggcgcttatgaaggaattagtggatttgcttggcctcgaacgcttggaagttcccggtttcgaggcagacgacgtattagcgactctcgcaaagaaagccgaacgtgagggctatgaagtccagatcttgacagcagatcgcgatcttttccagcttttatctccgcgcatctcggtgttacacccggaagggcatcgtatcaccccggaatggctctgggagaaatatggtttgcgtcccgaacaatgggtggattttcgcgccttagcaggcgatccgagcgacaatattccgggagttaaaggtatcggcgagaagacggcgctcaagctccttaaagaatgggggtcgttggagaacttgcttaagaatttagatcaggtcaaaccagagtcagtgcgtgagaagattcttgcacacctcgaagacctcaaattaagcctggaattgtcccgtgtacgcaccgatttgccgctcgaagttgatttccgtcgccgccgcgaacctgactgggagggtcttaaagcgtttttagagcgtcttgaatttggttcgctcttgcatgaattcggccttttagaaagcccgttaccagccgtggaagcaccttggccaccgcccgaaggcgcgtttttaggttaccgtttgagtcgcccggaaccgatgtgggccgaattattggctcttgcagcgtctgcccagggacgtgtgtatcgcgcggaagaccctcatggtgcgctccgcggcctcttcgaagtccgtggactccttgccaaagacttagctgttgttgcattgcgcgaaggtcttgatttacctccgactgatgatccaatgcttcttgcgtacctcttggacccgtcaaacacgacgcccgaaggcgtagcccgtcgttacggcggcgagtggaccgaagatgcagcgaaacgcgcgttattggccgaacgtttgcacgccaatttattaggacgtttgcaaggcgaggaacgtctcctctggctttacgaagaagtggagaaaccattgagtcgcgtgctcgcgcatatggaagctaccggtgtcaaattagacgtggcgtatttggaggctctcagccttgaagttgctgccgaaatgcgccgcttggaggaagaagtattccgtttagcaggccactcctttcgccttaattctcgcgatcagttagaacgtgtgttgttcgatgaacttggtctccctcctatcggcaagacagagaagaccggtaaacgtagcacttcagcggcggttttagaagctcttcgcgaagtccatccaattgtggacaagatcttgcagtaccgcgaactcgcgaaattgaaaggcacctatattgaccctcttccggcattagtccacccgaaaacgggacgcctccatacccgcttcaaccaaacagccacggcgaccggtcgtttgtcctcctctgatccaaaccttcagaatattccagtacgtaccccattgggccagaagatccgccgcgcgtttgtagctgaggagggttggcgtttagtggccctcgattatagccaaattgaattacgtgtccttgcccatctttctggcgatgagaacctcatccgcgtgtttcaggaaggcaaagacattcacactcaaacggcaagctggatgtttggattatcagctgaagcgatcgatcctttgatgcgtcgtgcagcgaagaccatcaatttcggtgttctctacggtatgagtgcccatcgtttgtcgcaggaattaggcattccctatgaagaagctgcggcgttcattcagaaatactttcaaagctatcccaaagttaaagcatggatcgagaagactctcgaagaaggccgcacacgtggttacgtagagaccttatttggacgtcgccgctatgttcccgatttaaacgctcgcgtgaaatctgtccgtgaagccgccgaacgcatggcgttcaacatgcctgtacagggcacggcagctgacctcatgaaacttgcaatggtgcgcctttttccacaattgcgtgaagttggtgcccgcatgctcttgcaggtccacgatgaactcttgttagaagcgccaaaagagcgtgcggaagaggtggcagccctcgcgaaagaggttatggaaggcgtgtggcccttagcggtgcctcttgaagtcgaagttggtattggcgaggattggctggctgccaaaggataatga

SEQ ID NO: 2220 - protein, 841 aa, synthetic construct
  REGION 1..841: note = Variant of DNA polymerase I from Thermus sp. strain 2.9
MHHHHHHGGSGVLPVFEPKGRVLLVDGHHLAYRNFFALKGLTTSRGEPVQGVYGFAKSLLKALKEDGDVVIVVFDAKAPSFRHEAYEAYKAGRAPTPEDFPRQLALMKELVDLLGLERLEVPGFEADDVLATLAKKAEREGYEVQILTADRDLFQLLSPRISVLHPEGHRITPEWLWEKYGLRPEQWVDFRALAGDPSDNIPGVKGIGEKTALKLLKEWGSLENLLKNLDQVKPESVREKILAHLEDLKLSLELSRVRTDLPLEVDFRRRREPDWEGLKAFLERLEFGSLLHEFGLLESPLPAVEAPWPPPEGAFLGYRLSRPEPMWAELLALAASAQGRVYRAEDPHGALRGLFEVRGLLAKDLAVVALREGLDLPPTDDPMLLAYLLDPSNTTPEGVARRYGGEWTEDAAKRALLAERLHANLLGRLQGEERLLWLYEEVEKPLSRVLAHMEATGVKLDVAYLEALSLEVAAEMRRLEEEVFRLAGHSFRLNSRDQLERVLFDELGLPPIGKTEKTGKRSTSAAVLEALREVHPIVDKILQYRELAKLKGTYIDPLPALVHPKTGRLHTRFNQTATATGRLSSSDPNLQNIPVRTPLGQKIRRAFVAEEGWRLVALDYSQIELRVLAHLSGDENLIRVFQEGKDIHTQTASWMFGLSAEAIDPLMRRAAKTINFGVLYGMSAHRLSQELGIPYEEAAAFIQKYFQSYPKVKAWIEKTLEEGRTRGYVETLFGRRRYVPDLNARVKSVREAAERMAFNMPVQGTAADLMKLAMVRLFPQLREVGARMLLQVHDELLLEAPKERAEEVAALAKEVMEGVWPLAVPLEVEVGIGEDWLAAKG

SEQ ID NO: 2221 - DNA, 2529 bp, synthetic construct; identical to SEQ ID NO: 2151
  misc_feature 1..2529: note = Variant of DNA polymerase I from Thermus sp. strain 2.9
  source 1..2529: mol_type = other DNA

SEQ ID NO: 2222 - protein, 841 aa, synthetic construct; identical to SEQ ID NO: 2152
  REGION 1..841: note = Variant of DNA polymerase I from Thermus sp. strain 2.9

SEQ ID NO: 2223 - DNA, 2529 bp, synthetic construct
  misc_feature 1..2529: note = Variant of DNA polymerase I from Thermus sp. strain 2.9
  source 1..2529: mol_type = other DNA
atgcaccatcatcatcatcatggcggtagcggcgtgttaccggtgttcgagcctaaaggtcgcgtgcttctggttgatggccatcatctcgcgtatcgtaacttctttgccctgaaaggattaaccaccagccgtggcgagccggtacagggtgtctacggctttgcaaagtcgctcctgaaagctctgaaagaagacggtgatgtggtgattgttgtctttgatgcgaaagcgccaagtttccgccacgaagcgtacgaagcttacaaagccgggcgtgctccaacgccggaagactttcctcgccaattggcgcttatgaaggaattagtggatttgcttggcctcgaacgcttggaagttcccggtttcgaggcagacgacgtattagcgactctcgcaaagaaagccgaacgtgagggctatgaagtccagatcttgacagcagatcgcgatcttttccagcttttatctccgcgcatctcggtgttacacccggaagggcatcgtatcaccccggaatggctctgggagaaatatggtttgcgtcccgaacaatgggtggattttcgcgccttagcaggcgatccgagcgacaatattccgggagttaaaggtatcggcgagaagacggcgctcaagctccttaaagaatgggggtcgttggagaacttgcttgagaatttagatcaggtcaaaccagagtcagtgcgtgagaagattcttgcacacctggaagacctcaaattaagccgcgaattgtcccgtgtacgcaccgatttgccgctcgaagttgatttccgtcgccgccgcgaacctgactgggagggtcttaaagcgtttttagagcgtcttgaatttggttcgctcttgcatgaattcggccttttagaaagcccgttaccagccgaagaagcaccttggccaccgcccgaaggcgcgtttttaggttaccgtttgagtcgcccggaaccgatgtgggccgaattattggctcttgcagcgtctgcccagggacgtgtgtatcgcgcggaagaccctcatggtgcgctccgcggcctcttcgaagtccgtggactccttgccaaagacttagctgttgttgcattgcgcgaaggtcttgatttacctccgactgatgatccaatgcttcttgcgtacctcttggacccgtcaaacacgacgcccgaaggcgtagcccgtcgttacggcggcgagtggaccgaagatgcagcgaaacgcgcgttattggccgaacgtttgcacgccaatttattaggacgtttgcaaggcgaggaacgtctcctctggctttacgaagaagtggataaaccattgagtcgcgtgctcgcgcatatggaagctaccggtgtcaaattagacgtggcgtatttggaggctctcagccttgaagttgctgccgaaatgcgccgcttggaggaagaagtattccgtttagcaggccattcctttcgccttaattctcgcgatcagttagaacgtgtgttgttcgatgaacttggtctccctcctatcggcaagacagagaagaccggtaaacgtagcacttcagcggcggttttagaagctcttcgcgaagtccatcccattgtggacaagatcttgcagtaccgcgaactcgcgaaattgaaaggcacctatattgaccctcttccggcattagtccacccgaaaacgggacgcctccatacccgcttcaaccaaacagccacggcgaccggtcgtttgtcctcctctgatccaaaccttcagaatattccagtacgtaccccattgggccagaagatccgccgcgcgtttgtagctgaggagggttggcgtttagtggcgctcgattatagccaaattgaattacgtgtccttgcccatctttctggcgatgagaacctcatccgcgtgtttcaggaaggcaaagacattcacactcaaacggcaagctggatgtttggattatcagctgaagcgatcgatcctttgatgcgtcgtgcagcgaagaccatcaatttcggtgttctctacggtatgagtgcctttcgtttgtcgcaggaattaggcattccctatgaagaagctgcggcgttcattcagaaatactttcaaagctatcccaaagttaaagcatggatcgagaagactctcgaagaaggccgcacacgtggttacgtagagaccttatttggacgtcgccgctatgttcccgatttaaacgctcgcgtgaaatctgtccgtgaagccgccgaacgccgtgcgttcaacatgcctgtacagggcacggcagctgacctcatgaaacttgcaatggtgcgcctttttccacaattgcgtgaagttggtgcccgcatgctcttgcaggtccacgatgaactcttgttagaagcgccaaaagagcgtgcggaagaggtggcagccctcgcgaaagaggttatggaaggcgtgtggcccttagcggtgcctcttgaagtcgaagttggtattggcgaggattggctggctgccaaaggataatga

SEQ ID NO: 2224 - protein, 841 aa, synthetic construct
  REGION 1..841: note = Variant of DNA polymerase I from Thermus sp. strain 2.9
MHHHHHHGGSGVLPVFEPKGRVLLVDGHHLAYRNFFALKGLTTSRGEPVQGVYGFAKSLLKALKEDGDVVIVVFDAKAPSFRHEAYEAYKAGRAPTPEDFPRQLALMKELVDLLGLERLEVPGFEADDVLATLAKKAEREGYEVQILTADRDLFQLLSPRISVLHPEGHRITPEWLWEKYGLRPEQWVDFRALAGDPSDNIPGVKGIGEKTALKLLKEWGSLENLLENLDQVKPESVREKILAHLEDLKLSRELSRVRTDLPLEVDFRRRREPDWEGLKAFLERLEFGSLLHEFGLLESPLPAEEAPWPPPEGAFLGYRLSRPEPMWAELLALAASAQGRVYRAEDPHGALRGLFEVRGLLAKDLAVVALREGLDLPPTDDPMLLAYLLDPSNTTPEGVARRYGGEWTEDAAKRALLAERLHANLLGRLQGEERLLWLYEEVDKPLSRVLAHMEATGVKLDVAYLEALSLEVAAEMRRLEEEVFRLAGHSFRLNSRDQLERVLFDELGLPPIGKTEKTGKRSTSAAVLEALREVHPIVDKILQYRELAKLKGTYIDPLPALVHPKTGRLHTRFNQTATATGRLSSSDPNLQNIPVRTPLGQKIRRAFVAEEGWRLVALDYSQIELRVLAHLSGDENLIRVFQEGKDIHTQTASWMFGLSAEAIDPLMRRAAKTINFGVLYGMSAFRLSQELGIPYEEAAAFIQKYFQSYPKVKAWIEKTLEEGRTRGYVETLFGRRRYVPDLNARVKSVREAAERRAFNMPVQGTAADLMKLAMVRLFPQLREVGARMLLQVHDELLLEAPKERAEEVAALAKEVMEGVWPLAVPLEVEVGIGEDWLAAKG

SEQ ID NO: 2225 - DNA, 2529 bp, synthetic construct
  misc_feature 1..2529: note = Variant of DNA polymerase I from Thermus sp. strain 2.9
  source 1..2529: mol_type = other DNA
atgcaccatcatcatcatcatggcggtagcggcgtgttaccggtgttcgagcctaaaggtcgcgtgcttctggttgatggccatcatctcgcgtatcgtaacttctttgccctgaaaggattaaccaccagccgtggcgagccggtacagggtgtctacggctttgcaaagtcgctcctgaaagctctgaaaaatgacggtgatgtggtgattgttgtctttgatgcgaaagcgccaagttttcgccacgaagcgtacgaagcttacaaagccgggcgtgctccaacgccggaagactttcctcgccaattggcgcttatgaaggaattagtggatttgcttggcctcgaacgcttggaagttcccggtttcgaggcagacgacgtattagcgactctcgcaaagaaagccgaacgtgagggctatgaagtccagatcttgacagcagatcgcgatcttttccagcttttatctccgcgcatctcggtgttacacccggaagggcatcgtatcaccccggaatggctctgggagaaatatggtttgcgtcccgaacaatgggtggattttcgcgccttagcaggcgatccgagcgacaatattccgggagttaaaggtatcggcgagaagacggcgctcaagctccttaaagaatgggggtcgttggagaacttgcttaagaatttagatcaggtctcgccagagtcagtgcgtgagaagattcttgcacacctcgaagacctcaaattaagccgcgaattgtcccgtgtacgcaccgatttgccgctcgaagttgatttccgtcgccgccgcgaacctgactgggagggtcttaaagcgtttttagagcgtcttgaatttggttcgctcttgcatgaattcggccttttagaaagcccgttaccagccgaagaagcaccttggccaccgcccgagggcgcgtttttaggttaccgtttgagtcgcccggaaccgatgtgggccgaattattggctcttgcagcgtctgcccagggacgtgtgtatcgcgcggaagaccctcatggtgccctccgcggcctcttcgaagtccgtggactccttgccaaagacttagctgttgttgcattgcgcgaaggtcttgatttacctccgactgatgatccaatgcttcttgcgtacctcttggacccgtcaaacacgacgcccgaaggcgtagcccgtcgttacggcggcgagtggaccgaagatgcagcgaaacgcgcgttattggccgaacgtttgcacgccaatttattaggacgtttgcaaggcgaggaacgtctcctctggctttacgaagaagtggagaaaccattgagtcgcgtgctcgcgcatatggaagctaccggtgtcaaattagacgtggcgtatttggaggctctcagccttgaagttgctgccgaaatgcgccgcttggaggaagaagtattccgtttagcaggccattcctttcgccttaattctcgcgatcagttagaacgtgtgttgttcgatgaacttggtctcccacctatcggcaagacagagaagaccggtaaacgtagcacttcagcggcggttttagaagctcttcgcgaagtccatcccattgtggacaagatcttggtctaccgcgaactcgcgaaattgaaaggcacctatattgaccctcttccggcattagtccacccgaaaacgggacgcctccatacccgcttcaaccaaacagccacggcgaccggtcgtttgtcctcctctgatccaaaccttcagaatattccagtacgtaccccattgggccagaagatccgccgcgcgtttgtagctgaggagggttggcgtttagtggccctcgattatcgccaaattgaattacgtgtccttgcccatctttctggcgatgagaacctcatccgcgtgtttcaggaaggcaaagacattcacactcaaacggcaagctggatgtttggattatcagctgaagcgatcgatcctttgatgcgtcgtgcagcgaagaccatcaatttcggtgttctctacggtatgagtgcctttcgtttgtcgcaggaattaggcattccctatgaagaagctgcggcgttcattcagaaatactttcaaagctatcccaaagttaaagcatggatcgagaagactctcgaagaaggccgcacacgtggttacgtagagaccttatttggacgtcgccgctatgttcccgatttaaacgctcgcgtgaaaagtgtccgtgaagccgccgaacgcatggcgttcaacatgcctgtacagggcacggcagctgacctcatgaaacttgcaatggtgcgcctttttccacaattgcgtgaagttggtgcccgcatgctcttgcaggtccacgatgaactcttgttagaagcgccaaaagagcgtgcggaagaggtggcagccctcgcgaaagaagttatggaaggcgtgtggcccttagcggtgcctcttgaagtcgaagttggtattggcgaggattggctggctgccaaaggataatga

SEQ ID NO: 2226 - protein, 841 aa, synthetic construct
  REGION 1..841: note = Variant of DNA polymerase I from Thermus sp. strain 2.9
MHHHHHHGGSGVLPVFEPKGRVLLVDGHHLAYRNFFALKGLTTSRGEPVQGVYGFAKSLLKALKNDGDVVIVVFDAKAPSFRHEAYEAYKAGRAPTPEDFPRQLALMKELVDLLGLERLEVPGFEADDVLATLAKKAEREGYEVQILTADRDLFQLLSPRISVLHPEGHRITPEWLWEKYGLRPEQWVDFRALAGDPSDNIPGVKGIGEKTALKLLKEWGSLENLLKNLDQVSPESVREKILAHLEDLKLSRELSRVRTDLPLEVDFRRRREPDWEGLKAFLERLEFGSLLHEFGLLESPLPAEEAPWPPPEGAFLGYRLSRPEPMWAELLALAASAQGRVYRAEDPHGALRGLFEVRGLLAKDLAVVALREGLDLPPTDDPMLLAYLLDPSNTTPEGVARRYGGEWTEDAAKRALLAERLHANLLGRLQGEERLLWLYEEVEKPLSRVLAHMEATGVKLDVAYLEALSLEVAAEMRRLEEEVFRLAGHSFRLNSRDQLERVLFDELGLPPIGKTEKTGKRSTSAAVLEALREVHPIVDKILVYRELAKLKGTYIDPLPALVHPKTGRLHTRFNQTATATGRLSSSDPNLQNIPVRTPLGQKIRRAFVAEEGWRLVALDYRQIELRVLAHLSGDENLIRVFQEGKDIHTQTASWMFGLSAEAIDPLMRRAAKTINFGVLYGMSAFRLSQELGIPYEEAAAFIQKYFQSYPKVKAWIEKTLEEGRTRGYVETLFGRRRYVPDLNARVKSVREAAERMAFNMPVQGTAADLMKLAMVRLFPQLREVGARMLLQVHDELLLEAPKERAEEVAALAKEVMEGVWPLAVPLEVEVGIGEDWLAAKG

SEQ ID NO: 2227 - DNA, 2529 bp, synthetic construct
  misc_feature 1..2529: note = Variant of DNA polymerase I from Thermus sp. strain 2.9
  source 1..2529: mol_type = other DNA
atgcaccatcatcatcatcatggcggtagcggcgtgttaccggtgttcgagcctaaaggtcgcgtgcttctggttgatggccatcatctcgcgtatcgtaacttctttgccctgaaaggattaaccaccagccgtggcgagccggtacagggtgtctacggctttgcaaagtcgctcctgaaagctctgaaagaagacggtgatgtggtgattgttgtctttgatgcgaaagcgccaagttttcgccacgaagcgtacgaagcttacaaagccgggcgtgctccaacgccggaagactttcctcgccaattggcgcttatgaaggaattagtggatttgcttggcctcgaacgcttggaagttcccggtttcgaggcagacgacgtattagcgactctcgcaaagaaagccgaacgtgagggctatgaagtccagatcttgacagcagatcgcgatcttttccagcttttatctccgcgcatctcggtgttacacccggaagggcatcgtatcaccccggaatggctctgggagaaatatggtttgcgtcccgaacaatgggtggattttcgcgccttagcaggcgatccgagcgacaatattccgggagttaaaggtatcggcgagaagacggcgctcaagctccttaaagaatgggggtcgttggagaacttgcttaagaatttagatcaggtcaaaccagagtcagtgcgtgagaagattcttgcacacctcgaagacctcaaattaagccgcgaattgtcccgtgtacgcaccgatttgccgctcgaagttgatttccgtcgccgccgcgaacctgactgggagggtcttaaagcgtttttagagcgtcttgaatttggttcgctcttgcacgaattcggccttttagaaagcccgttaccagccgaagaagcaccttggccaccgcccgaaggcgcgtttttaggttaccgtttgagtcgcccggaaccgatgtgggccgaattattggctcttgcagcgtctgcccagggacgtgtgtatcgcgcggaagaccctcatggtgcgctccgcggcctcttcgaagtccgtggactccttgccaaagacttagctgttgttgcattgcgcgaaggtcttgatttacctccgactgatgatccaatgcttcttgcgtacctcttggacccgtcaaacacgacgcccgaaggcgtagcccgtcgttacggcggcgagtggaccgaagatgcagcgaaacgcgcgttattggccgaacgtttgcacgccaatttattaggacgtttgcaaggcgaggaacgtctcctctggctttacgaagaagtggagaaaccattgagtcgcgtgctcgcgcatatggaagctaccggtgtcaaattagacgtggcgtatttggaggctctcagccttgaagttgctgccgaaatgcgccgcttggaggaagaagtattccgtttagcaggccattcctttcgccttaattctcgcgatcagttagaacgtgtgttgttcgatgaacttggtctccctcctatcggcaagacagagaagaccggtaaacgtagcacttcagcggcggttttagaagctcttcgcgaagtccatcccattgtggacaagatcttggtctaccgcgaactcgcgaaattgaaaggcacctatattgaccctcttccggcattagtccacccgaaaacgggacgcctccatacccgcttcaaccaaacagccacggcgaccggtcgtttgtcctcctctgatccaaaccttcagaatattccagtacgtaccccattgggccagaagatccgccgcgcgtttgtagctgaggagggttggcgtttagtggccctcgattatagccaaattgaattacgtgtccttgcccatctttctggcgatgagaacctcatccgcgtgtttcaggaaggcaaagacattcacactcaaacggcaagctggatgtttggattatcagctgaagcgatcgatcctttgatgcgtcgtgcagcgaagaccatcaatttcggtgttctctacggtatgagtgcctttcgtttgtcgcaggaattaggcattccctatgaagaagcttcggcgttcattcagaaatactttcaaagctatcccaaagttaaagcatggatcgagaagactctcgaagaaggccgcacacgtggttacgtagagaccttatttggacgtcgccgctatgttcccgatttaaacgctcgcgtgaaatctgtccgtgaagccgccgaacgcatggcgttcaacatgcctgtacagggcacggcagctgacctcatgaaacttgcaatggtgcgcctttttccacaattgcgtgaagttggtgcccgcatgctcttgcaggtccacgatgaactcttgttagaagcgccaaaagagcgtgcggaagaggtggcagccctcgcgaaaacggttatggaaggcgtgtggcccttagcggtgcctcttgaagtcgaagttggtattggcgaggattggctggctgccaaaggataatga

SEQ ID NO: 2228 - protein, 841 aa, synthetic construct
  REGION 1..841: note = Variant of DNA polymerase I from Thermus sp. strain 2.9
MHHHHHHGGSGVLPVFEPKGRVLLVDGHHLAYRNFFALKGLTTSRGEPVQGVYGFAKSLLKALKEDGDVVIVVFDAKAPSFRHEAYEAYKAGRAPTPEDFPRQLALMKELVDLLGLERLEVPGFEADDVLATLAKKAEREGYEVQILTADRDLFQLLSPRISVLHPEGHRITPEWLWEKYGLRPEQWVDFRALAGDPSDNIPGVKGIGEKTALKLLKEWGSLENLLKNLDQVKPESVREKILAHLEDLKLSRELSRVRTDLPLEVDFRRRREPDWEGLKAFLERLEFGSLLHEFGLLESPLPAEEAPWPPPEGAFLGYRLSRPEPMWAELLALAASAQGRVYRAEDPHGALRGLFEVRGLLAKDLAVVALREGLDLPPTDDPMLLAYLLDPSNTTPEGVARRYGGEWTEDAAKRALLAERLHANLLGRLQGEERLLWLYEEVEKPLSRVLAHMEATGVKLDVAYLEALSLEVAAEMRRLEEEVFRLAGHSFRLNSRDQLERVLFDELGLPPIGKTEKTGKRSTSAAVLEALREVHPIVDKILVYRELAKLKGTYIDPLPALVHPKTGRLHTRFNQTATATGRLSSSDPNLQNIPVRTPLGQKIRRAFVAEEGWRLVALDYSQIELRVLAHLSGDENLIRVFQEGKDIHTQTASWMFGLSAEAIDPLMRRAAKTINFGVLYGMSAFRLSQELGIPYEEASAFIQKYFQSYPKVKAWIEKTLEEGRTRGYVETLFGRRRYVPDLNARVKSVREAAERMAFNMPVQGTAADLMKLAMVRLFPQLREVGARMLLQVHDELLLEAPKERAEEVAALAKTVMEGVWPLAVPLEVEVGIGEDWLAAKG

SEQ ID NO: 2229 - DNA, 2529 bp, synthetic construct
  misc_feature 1..2529: note = Variant of DNA polymerase I from Thermus sp. strain 2.9
  source 1..2529: mol_type = other DNA
atgcaccatcatcatcatcatggcggtagcggcgtgttaccggtgttcgagcctaaaggtcgcgtgcttctggttgatggccatcatctcgcgtatcgtaacttctttgccctgaaaggattaaccaccagcagcggcgagccggtacagggtgtctacggctttgcaaagtcgctcctgaaagctctgaaagaagacggtgatgtggtgattgttgtctttgatgcgaaagcgccaagttttcgccacgaagcgtacgaagcttacaaagccgggcgtgctccaacgccggaagactttcctcgccaattggcgcttatgaaggaattagtggatttgcttggcctcgaacgcttggaagttcccggtttcgaggcagacgacgtattagcgactctcgcaaagaaagccgaacgtgagggctatgaagtccagatcttgacagcagatcgcgatcttttccagcttttatctccgcgcatctcggtgttacacccggaagggcatcgtatcaccccggaatggctctgggagaaatatggtttgcgtcccgaacaatgggtggattttcgcgccttagcaggcgatccgagcgacaatattccgggagttaaaggtatcggcgagaagacggcgctcaagctccttaaagaatgggggtcgttggagaacttgcttaagaatttagatcaggtcaaaccagagtcagtgcgtgagaagattcttgcacacctcgaagacctcaaattaagccgcgaattgtcccgtgtacgcaccgatttgccgctcgaagttgatttccgtcgccgccgcgaacctgactgggagggtcttaaagcgtttttagagcgtcttgaatttggttcgctcttgcatgaattcggccttttagaaagcccgttaccagccgaagaagcaccttggccaccgcccgagggcgcgtttttaggttaccgtttgagtcgcccggaaccgatgtgggccgaattattggctcttgcagcgtctgcccagggacgtgtgtatcgcgcggaagaccctcatggtgcgctccgcggcctcttcgaagtccgtggactccttgccaaagacttagctgttgttgcattgcgcgaaggtcttgatttacctccgactgatgatccaatgcttcttgcgtacctcttggacccgtcaaacacgacgcccgaaggcgtagcccgtcgttacggcggcgagtggaccgaagatgcagcgaaacgcgcgttattggccgaacgtttgcacgccaatttattaggacgtttgcaaggcgaggaacgtctcctctggctttacgaagaagtggagaaaccattgagtcgcgtgctcgcgcatatggaagctaccggtgtcaaattagacgtggcgtatttggaggctctcagccttgaagttgctgccgaaatgcgccgcttggaggaagaagtattccgtttagcaggccattcctttcgccttaattctcgcgatcagttagaacgtgtgttgttcgatgaacttggtctccctcctatcggcaagacagagaagaccggtaaacgtagcacttcagcggcggttttagaagctcttcgcgaagtccatcccattgtggacaagatcttgcagtaccgcgaactcgcgaaattgaaaggcacctatattgaccctcttccggcattagtccacccgaaaacgggacgcctccatacccgcttcaaccaaacagccacggcgaccggtcgtttgtcctcctctgatccaaaccttcagaatattccagtacgtaccccattgggccagaagatccgccgcgcgtttgtagctgaggagggttggcgtttagtggccctcgattatagccaaattgaattacgtgtccttgcccatctttctggcgatgagaacctcatccgcgtgtttcaggaaggcaaagacattcacactcaaacggcaagctggatgtttggattatcagctgaagcgatcgatcctttgatgcgtcgtgcagcgaagaccatcaatttcggtgttctctacggtatgagtgcctttcgtttgtcgcaggaattaggcattccctatgaagaagctcaggcgttcattcagaaatactttcaaagctatcccaaagttaaagcatggatcgagaagactctcgaagaaggccgcacacgtggttacgtagagaccttatttggacgtcgccgctatgttcccgatttaaacgctcgcgtgaaaggcaagcgtgaagccgccgaacgcatggcgttcaacatgcctgtacagggcacggcagctgacctcatgaaacttgcaatggtgcgcctttttccacaattgcgtgaagttggtgcccgcatgctcttgcaggtccacgatgaactcttgttagaagcgccaaaagagcgtgcggaagaggtggcagccctcgcgaaagaggttatggaaggcgtgtggcccttagcggtgcctcttgaagtcgaagttggtattggcgaggattggctggctgccaaaggataatga

SEQ ID NO: 2230 - protein, 841 aa, synthetic construct
  REGION 1..841: note = Variant of DNA polymerase I from Thermus sp. strain 2.9
MHHHHHHGGSGVLPVFEPKGRVLLVDGHHLAYRNFFALKGLTTSSGEPVQGVYGFAKSLLKALKEDGDVVIVVFDAKAPSFRHEAYEAYKAGRAPTPEDFPRQLALMKELVDLLGLERLEVPGFEADDVLATLAKKAEREGYEVQILTADRDLFQLLSPRISVLHPEGHRITPEWLWEKYGLRPEQWVDFRALAGDPSDNIPGVKGIGEKTALKLLKEWGSLENLLKNLDQVKPESVREKILAHLEDLKLSRELSRVRTDLPLEVDFRRRREPDWEGLKAFLERLEFGSLLHEFGLLESPLPAEEAPWPPPEGAFLGYRLSRPEPMWAELLALAASAQGRVYRAEDPHGALRGLFEVRGLLAKDLAVVALREGLDLPPTDDPMLLAYLLDPSNTTPEGVARRYGGEWTEDAAKRALLAERLHANLLGRLQGEERLLWLYEEVEKPLSRVLAHMEATGVKLDVAYLEALSLEVAAEMRRLEEEVFRLAGHSFRLNSRDQLERVLFDELGLPPIGKTEKTGKRSTSAAVLEALREVHPIVDKILQYRELAKLKGTYIDPLPALVHPKTGRLHTRFNQTATATGRLSSSDPNLQNIPVRTPLGQKIRRAFVAEEGWRLVALDYSQIELRVLAHLSGDENLIRVFQEGKDIHTQTASWMFGLSAEAIDPLMRRAAKTINFGVLYGMSAFRLSQELGIPYEEAQAFIQKYFQSYPKVKAWIEKTLEEGRTRGYVETLFGRRRYVPDLNARVKGKREAAERMAFNMPVQGTAADLMKLAMVRLFPQLREVGARMLLQVHDELLLEAPKERAEEVAALAKEVMEGVWPLAVPLEVEVGIGEDWLAAKG

SEQ ID NO: 2231 - DNA, 2529 bp, synthetic construct
  misc_feature 1..2529: note = Variant of DNA polymerase I from Thermus sp. strain 2.9
  source 1..2529: mol_type = other DNA
atgcaccatcatcatcatcatggcggtagcggcgtgttaccggtgttcgagcctaaaggtcgcgtgcttctggttgatggccatcatctcgcgtatcgtaacttctttgccctgaaaggattaaccaccagcctgggcgagccggtacagggtgtctacggctttgcaaagtcgctcctgaaagctctgaaagaagacggtgatgtggtgattgttgtctttgatgcgaaagcgccaagttttcgccacgaagcgtacgaagcttacaaagccgggcgtgctccaacgccggaagactttcctcgccaattggcgcttatgaaggaattagtggatttgcttggcctcgaacgcttggaagttcccggtttcgaggcagacgacgtattagcgactctcgcaaagaaagccgaacgtgagggctatgaagtccagatcttgacagcagatcgcgatcttttccagcttttatctccgcgcatctcggtgttacacccggaagggcatcgtatcaccccggaatggctctgggagaaatatggtttgcgtcccgaacaatgggtggattttcgcgccttagcaggcgatccgagcgacaatattccgggagttaaaggtatcggcgagaagacggcgctcaagctccttaaagaatgggggtcgttggagaacttgcttaagaatttagatcaggtcaaaccagagtcagtgcgtgagaagattcttgcacacctcgaagacctcaaattaagccgcgaattgtcccgtgtacgcaccgatttgccgctcgaagttgatttccgtcgccgccgcgaacctgactgggagggtcttaaagcgtttttagagcgtcttgaatttggttcgctcttgcatgaattcggccttttagaaagcccgttaccagccgaagaagcaccttggccaccgcccgaaggcgcgtttttaggttaccgtttgagtcgcccggaaccgatgtgggccgaattattggctcttgcagcgtctgcccagggacgtgtgtatcgcgcggaagaccctcatggtgcgctccgcggcctcttcgaagtccgtggactccttgccaaagacttagctgttgttgcattgcgcgaaggtcttgatttacctccgactgatgatccaatgcttcttgcgtacctcttggacccgtcaaacacgacgcccgaaggcgtagcccgtcgttacggcggcgagtggaccgaagatgcagcgaaacgcgcgttattggccgaacgtttgcacgccaatttattaggacgtttgcaaggcgaggaacgtctcctctggctttacgaagaagtggagaaaccattgagtcgcgtgctcgcgcatatggaagctaccggtgtcaaattagacgtggcgtatttggaggctctcagccttgaagttgctgccgaaatgcgccgcttggaggaagaagtattccgtttagcaggccattcctttcgccttaattctcgcgatcagttagaacgtgtgttgttcgatgaacttggtctccctcctatcggcaagacagagaagaccggtaaacgtagcacttcagcggcggttttagaagctcttcgcgaagtccatcccattgtggacaagatcttgcagtaccgcgaactcgcgaaattgaaaggcacctatattgaccctcttccggcattagtccacccgaaaacgggacgcctccatacccgcttcaaccaaacagccacggcgaccggtcgtttgtcctcctctgatccaaaccttcagaatattccagtacgtaccccattgggccagaagatccgccgcgcgtttgtagctgaggagggttggcgtttagtggccctcgattatcgccaaattgaattacgtgtccttgcccatctttctggcgatgagaacctcatccgcgtgtttcaggaaggcaaagacattcacactcaaacggcaagctggatgtttggattatcagctgaagcgatcgatcctttgatgcgtcgtgcagcgaagaccatcaatttcggtgttctctacggtatgagtgcctttcgtttgtcgcaggaattaggcattccctatgaagaagctgcggcgttcattcagaaatactttcaaagctatcccaaagttaaagcatggatcgagaagactctcgaagaaggccgcacacgtggttacgtagagaccttatttggacgtcgccgctatgttcccgatttaaacgctcgcgtgaaatctgtccgtgaagccgccgaacgcatggcgttcaacatgcctgtacagggcacggcagctgacctcatgaaacttgcaatggtgcgcctttttccacaattgcgtgaagttggtgcccgcatgctcttgcaggtccacgatgaactcttgttagaagcgccaaaagagcgtgcggaagaggtggcagccctcgcgaaagaagttatggaaggcgtgtggcccttagcggtgcctcttgaagtcgaagttggtattggcgaggattggctggctgccaaaggataatga

SEQ ID NO: 2232 - protein, 841 aa, synthetic construct
  REGION 1..841: note = Variant of DNA polymerase I from Thermus sp. strain 2.9
MHHHHHHGGSGVLPVFEPKGRVLLVDGHHLAYRNFFALKGLTTSLGEPVQGVYGFAKSLLKALKEDGDVVIVVFDAKAPSFRHEAYEAYKAGRAPTPEDFPRQLALMKELVDLLGLERLEVPGFEADDVLATLAKKAEREGYEVQILTADRDLFQLLSPRISVLHPEGHRITPEWLWEKYGLRPEQWVDFRALAGDPSDNIPGVKGIGEKTALKLLKEWGSLENLLKNLDQVKPESVREKILAHLEDLKLSRELSRVRTDLPLEVDFRRRREPDWEGLKAFLERLEFGSLLHEFGLLESPLPAEEAPWPPPEGAFLGYRLSRPEPMWAELLALAASAQGRVYRAEDPHGALRGLFEVRGLLAKDLAVVALREGLDLPPTDDPMLLAYLLDPSNTTPEGVARRYGGEWTEDAAKRALLAERLHANLLGRLQGEERLLWLYEEVEKPLSRVLAHMEATGVKLDVAYLEALSLEVAAEMRRLEEEVFRLAGHSFRLNSRDQLERVLFDELGLPPIGKTEKTGKRSTSAAVLEALREVHPIVDKILQYRELAKLKGTYIDPLPALVHPKTGRLHTRFNQTATATGRLSSSDPNLQNIPVRTPLGQKIRRAFVAEEGWRLVALDYRQIELRVLAHLSGDENLIRVFQEGKDIHTQTASWMFGLSAEAIDPLMRRAAKTINFGVLYGMSAFRLSQELGIPYEEAAAFIQKYFQSYPKVKAWIEKTLEEGRTRGYVETLFGRRRYVPDLNARVKSVREAAERMAFNMPVQGTAADLMKLAMVRLFPQLREVGARMLLQVHDELLLEAPKERAEEVAALAKEVMEGVWPLAVPLEVEVGIGEDWLAAKG

SEQ ID NO: 2233 - DNA, 2529 bp, synthetic construct
  misc_feature 1..2529: note = Variant of DNA polymerase I from Thermus sp. strain 2.9
  source 1..2529: mol_type = other DNA
atgcaccatcatcatcatcatggcggtagcggcgtgttaccggtgttcgagcctaaaggtcgcgtgcttctggttgatggccatcatctcgcgtatcgtaacttctttgccctgaaaggattaaccaccagccgtggcgagccggtacagggtgtctacggctttgcaaagtcgctcctgaaagctctgaaagaagacggtgatgtggtgattgttgtctttgatgcgaaagcgccaagttttcgccacgaagcgtacgaagcttacaaagccgggcgtgctccaacgccggaagactttcctcgccaattggcgcttatgaaggaattagtggatttgcttggcctcgaacgcttggaagttcccggtttcgaggcagacgacgtattagcgactctcgcaaagaaagccgaacgtgagggctatgaagtccagatcttgacagcagatcgcgatcttttccagcttttatctccgcgcatctcggtgttacacccggaagggcatcgtatcaccccggaatggctctgggagaaatatggtttgcgtcccgaacaatgggtggattttcgcgccttagcaggcgatccgagcgacaatattccgggagttaaaggtatcggcgagaagacggcgctcaagctccttaaagaatgggggtcgttggagaacttgcttaagaatttagatcaggtcaaaccagagtcagtgcgtgagaagattcttgcacacctcgaagacctcaaattaagccgcgaattgtcccgtgtacgcaccgatttgccgctcgaagttgatttccgtcgccgccgcgaacctgactgggagggtcttaaagcgtttttagagcgtcttgaatttggttcgctcttgcatgaattcggccttttagaaagcccgttaccagccgaagaagcaccttggccaccgcccgaaggcgcgtttttaggttaccgtttgagtcgcccggaaccgatgtgggccgaattattggctcttgcagcgtctgcccagggacgtgtgtatcgcgcggaagaccctcatggtgcgctccgcggcctcttcgaagtcaacggactccttgccaaagacttagctgttgttgcattgcgcgaaggtcttgatttacctccgactgatgatccaatgcttcttgcgtacctcttggacccgtcaaacacgacgcccgaaggcgtagcccgtcgttacggcggcgagtggaccgaagatgcagcgaaacgcgcgttattggccgaacgtttgcacgccaatttattaggacgtttgcaaggcgaggaacgtctcctctggctttacgaagaagtggagaaaccattgagtcgcgtgctcgcgcatatggaagctaccggtgtcaaattagacgtggcgtatttggagaacctcagccttgaagttgctgccgaaatgcgccgcttggaggaagaagtattccgtttagcaggccattcctttcgccttaattctcgcgatcagttagaacgtgtgttgttcgatgaacttggtctccctcctatcggcaagacagagaagaccggtaaacgtagcacttcagcggcggttttagaagctcttcgcgaagtccatcccattgtggacaagatcttgcagtaccgcgaactcgcgaaattgaaaggcacctatattgaccctcttccggcattagtccacccgaaaacgggacgcctccatacccgcttcaaccaaacagccacggcgaccggtcgtttgtcctcctctgatccaaaccttcagaatattccagtacgtaccccattgggccagaagatccgccgcgcgtttgtagctgaggagggttggcgtttagtggccctcgattatagccaaattgaattacgtgtccttgcccatctttctggcgatgagaacctcatccgcgtgtttcaggaaggcaaagacattcacactcaaacggcaagctggatgtttggattatcagctgaagcgatcgatcctttgatgcgtcgtgcagcgaagaccatcaatttcggtgttctctacggtatgagtgcctttcgtttgtcgcaggaattaggcattccctatgaagaagctgcggcgttcattcagaaatactttcaaagctatcccaaagttaaagcatggatcgagaagactctcgaagaaggccgcacacgtggttacgtagagaccttatttggacgtcgccgctatgttcccgatttaaacgctcgcgtgaaatctgtccgtgaagccgccgaacgcatggcgttcaacatgcctgtacagggcacggcagctgacctcatgaaacttgcaatggtgcgcctttttccacaattgcgtgaagttggtgcccgcatgctcttgcaggtccacgatgaactcttgttagaagcgccaaaagagcgtgcggaagaggtggcagccctcgcgaaagaggttatggaaggcgtgtggcccttagcggtgcctcttgaagtcgaagttggtattggcgaggattggctggctgccaaaggataatga

SEQ ID NO: 2234 - protein, 841 aa, synthetic construct
  REGION 1..841: note = Variant of DNA polymerase I from Thermus sp. strain 2.9
MHHHHHHGGSGVLPVFEPKGRVLLVDGHHLAYRNFFALKGLTTSRGEPVQGVYGFAKSLLKALKEDGDVVIVVFDAKAPSFRHEAYEAYKAGRAPTPEDFPRQLALMKELVDLLGLERLEVPGFEADDVLATLAKKAEREGYEVQILTADRDLFQLLSPRISVLHPEGHRITPEWLWEKYGLRPEQWVDFRALAGDPSDNIPGVKGIGEKTALKLLKEWGSLENLLKNLDQVKPESVREKILAHLEDLKLSRELSRVRTDLPLEVDFRRRREPDWEGLKAFLERLEFGSLLHEFGLLESPLPAEEAPWPPPEGAFLGYRLSRPEPMWAELLALAASAQGRVYRAEDPHGALRGLFEVNGLLAKDLAVVALREGLDLPPTDDPMLLAYLLDPSNTTPEGVARRYGGEWTEDAAKRALLAERLHANLLGRLQGEERLLWLYEEVEKPLSRVLAHMEATGVKLDVAYLENLSLEVAAEMRRLEEEVFRLAGHSFRLNSRDQLERVLFDELGLPPIGKTEKTGKRSTSAAVLEALREVHPIVDKILQYRELAKLKGTYIDPLPALVHPKTGRLHTRFNQTATATGRLSSSDPNLQNIPVRTPLGQKIRRAFVAEEGWRLVALDYSQIELRVLAHLSGDENLIRVFQEGKDIHTQTASWMFGLSAEAIDPLMRRAAKTINFGVLYGMSAFRLSQELGIPYEEAAAFIQKYFQSYPKVKAWIEKTLEEGRTRGYVETLFGRRRYVPDLNARVKSVREAAERMAFNMPVQGTAADLMKLAMVRLFPQLREVGARMLLQVHDELLLEAPKERAEEVAALAKEVMEGVWPLAVPLEVEVGIGEDWLAAKG

SEQ ID NO: 2235 - DNA, 2529 bp, synthetic construct
  misc_feature 1..2529: note = Variant of DNA polymerase I from Thermus sp. strain 2.9
  source 1..2529: mol_type = other DNA
atgcaccatcatcatcatcatggcggtagcggcgtgttaccggtgttcgagcctaaaggtcgcgtgcttctggttgatggccatcatctcgcgtatcgtaacttctttgccctgaaaggattaaccaccagccgcggcgagccggtacagggtgtctacggctttgcaaagtcgctcctgaaagctctgaaagaggacggtgatgtggtgattgttgtctttgatgcgaaagcgccaagttttcgccacgaagcgtacgaagcttacaaagccgggcgtgctccaacgccggaagactttcctcgccaattggcgcttatgaaggaattagtggatttgcttggcctcgaacgcttggaagttcccggtttcgaggcagacgacgtattagcgactctcgcaaagaaagccgaacgtgagggctatgaagtccagatcttgacagcagatcgcgatcttttccagcttttatctccgcgcatctcggtgttacacccggaagggcatcgtatcaccccggaatggctctgggagaaatatggtttgcgtcccgaacaatgggtggattttcgcgccttagcaggcgatccgagcgacaatattccgggagttaaaggtatcggcgagaagacggcgctcaagctccttaaagaatgggggtcgttggagaacttgcttaagaatttagatcaggtcaaaccagagtcagtgcgtgagaagattcttgcacacctcgaagacctcaaattaagccgcgaattgtcccgtgtacgcaccgatttgccgctcgaagttgatttcggtcgccgccgcgaacctgactgggagggtcttaaagcgtttttagagcgtcttgaatttggttcgctcttgcatgaattcggccttttagaaagcccgttaccagccgaagaagcaccttggccaccgcccgaaggcgcgtttttaggttaccgtttgagtcgcccggaaccgatgtgggccgaattattggctcttgcagcgtctgcccagggacgcgtgtatcgcgcggaagaccctcatggtgcgctccgcggcctcttcgaagtccgtggactccttgccaaagacttagctgttgttgcattgcgcgaaggtcttgatttacctccgactgatgatccaatgcttcttgcgtacctcttggacccgtcaaacacgacgcccgaaggcgtagcccgtcgttacggcggcgagtggaccgaagatgcagcgaaacgcgcgttattggccgaacgtttgcacgccaatttattaggacgtttgcaaaccgaggaacgtctcctctggctttacgaagaagtggagaaaccattgagtcgcgtgctcgcgcatatggaagctaccggtgtcaaattagacgtggcgtatttggaggctctcagccttgaagttgctgccgaaatgcgccgcttggaggaagaagtattccgtttagcaggccattcctttcgccttaattctcgcgatcagttagaacgtgtgttgttcgatgaacttggtctccctcctatcggcaagacagagaagaccggtaaacgtagcacttcagcggcggttttagaagctcttcgcgaagtccatcccattgtggacaagatcttgcagtaccgcgaactcgcgaaattgaaaggcacctatattgaccctcttccggcattagtccacccgaaaacgggacgcctccatacccgcttcaaccaaacagccacggcgaccggtcgtttgtcctcctctgatccaaaccttcagaatattccagtacgtaccccattgggccagaagatccgcaaggcgtttgtagctgaggagggttggcgtttagtggccctcgattatagccaaattgaattacgtgtccttgcccatctttctggcgatgagaacctcatccgcgtgtttcaggaaggcaaagacattcacactcaaacggcaagctggatgtttggattatcagctgaagcgatcgatcctttgatgcgtcgtgcagcgaagaccatcaatttcggtgttctctacggtatgagtgcctttcgtttgtcgcaggaattaggcattccctatgaagaagctgcggcgttcattcagaaatactttcaaagctatcccaaagttaaagcatggatcgagaagactctcgaagaaggccgcacacgtggttacgtagagaccttatttggacgtcgccgctatgttcccgatttaaacgctcgcgtgaaaagcaagcgtgaagccgccgaacgcatggcgttcaacatgcctgtacagggcacggcagctgacctcatgaaacttgcaatggtgcgcctttttccacaattgcgtgaagttggtgcccgcatgctcttgcaggtccacgatgaactcttgttagaagcgccaaaagagcgtgcggaagaggtggcagccctcgcgaaagaagttatggaaggcgtgtggcccttagcggtgcctcttgaagtcgaagttggtattggcgaggattggctggctgccaaaggataatga

SEQ ID NO: 2236 - protein, 841 aa, synthetic construct
  REGION 1..841: note = Variant of DNA polymerase I from Thermus sp. strain 2.9
MHHHHHHGGSGVLPVFEPKGRVLLVDGHHLAYRNFFALKGLTTSRGEPVQGVYGFAKSLLKALKEDGDVVIVVFDAKAPSFRHEAYEAYKAGRAPTPEDFPRQLALMKELVDLLGLERLEVPGFEADDVLATLAKKAEREGYEVQILTADRDLFQLLSPRISVLHPEGHRITPEWLWEKYGLRPEQWVDFRALAGDPSDNIPGVKGIGEKTALKLLKEWGSLENLLKNLDQVKPESVREKILAHLEDLKLSRELSRVRTDLPLEVDFGRRREPDWEGLKAFLERLEFGSLLHEFGLLESPLPAEEAPWPPPEGAFLGYRLSRPEPMWAELLALAASAQGRVYRAEDPHGALRGLFEVRGLLAKDLAVVALREGLDLPPTDDPMLLAYLLDPSNTTPEGVARRYGGEWTEDAAKRALLAERLHANLLGRLQTEERLLWLYEEVEKPLSRVLAHMEATGVKLDVAYLEALSLEVAAEMRRLEEEVFRLAGHSFRLNSRDQLERVLFDELGLPPIGKTEKTGKRSTSAAVLEALREVHPIVDKILQYRELAKLKGTYIDPLPALVHPKTGRLHTRFNQTATATGRLSSSDPNLQNIPVRTPLGQKIRKAFVAEEGWRLVALDYSQIELRVLAHLSGDENLIRVFQEGKDIHTQTASWMFGLSAEAIDPLMRRAAKTINFGVLYGMSAFRLSQELGIPYEEAAAFIQKYFQSYPKVKAWIEKTLEEGRTRGYVETLFGRRRYVPDLNARVKSKREAAERMAFNMPVQGTAADLMKLAMVRLFPQLREVGARMLLQVHDELLLEAPKERAEEVAALAKEVMEGVWPLAVPLEVEVGIGEDWLAAKG

SEQ ID NO: 2237 - DNA, 2529 bp, synthetic construct
  misc_feature 1..2529: note = Variant of DNA polymerase I from Thermus sp. strain 2.9
  source 1..2529: mol_type = other DNA
atgcaccatcatcatcatcatggcggtagcggcgtgttaccggtgttcgagcctaaaggtcgcgtgcttctggttgatggccatcatctcgcgtatcgtaacttctttgccctgaaaggattaaccaccagccgtggcgagccggtacagggtgtctacggctttgcaaagtcgctcctgaaagctctgaaagaagacggtgatgtggtgattgttgtctttgatgcgaaagcgccaagttttcgccacgaagcgtacgaagcttacaaagccgggcgtgctccaacgccggaagactttcctcgccaattggcgcttatgaaggaattagtggatttgcttggcctcgaacgcttggaagttcccggtttcgaggcagacgacgtattagcgactctcgcaaagaaagccgaacgtgagggctatgaagtccagatcttgacagcagatcgcgatcttttccagcttttatctccgcgcatctcggtgttacacccggaagggcatcgtatcaccccggaatggctctgggagaaatatggtttgcgtcccgaacaatgggtggattttcgcgccttagcaggcgatccgagcgacaatattccgggagttaaaggtatcggcgagaagacggcgctcaagctccttaaagaatgggggtcgttggagaacttgcttaagaatttagatcaggtcaaaccagagtcagtgcgtgagaagattcttgcacacctcgaagacctcaaattaagccgcgaattgtcccgtgtacgcaccgatttgccgctcgaagttgatttccgtcgccgccgcgaacctgactgggagggtcttaaagcgtttttagagcgtcttgaatttggttcgctcttgcatgaattcggccttttagaaagcccgttaccagccgaagaagcaccttggccaccgcccgaaggcgcgtttttaggttaccgtttgagtcgcccggaaccgatgtgggccgaattattggctcttgcagcgtctgcccagggacgtgtgtatcgcgcggaagaccctcatggtgcgctccgcggcctcttcgaagtccgtggactccttgccaaagacttagctgttgttgcattgcgcgaaggtcttgatttacctccgactgatgatccaatgcttcttgcgtacctcttggacccgtcaaacacgacgcccgaaggcgtagcccgtcgttacggcggcgagtggaccgaagatgcagcgaaacgcgcgttattggccgaacgtttgcacgccaatttattaggacgtttgcaaggcgaggaacgtctcctctggctttacgaagaagtggagaaaccattgagtcgcgtgctcgcgcatatggaagctaccggtgtcaaattagacgtggcgtatttggaggctctcagccttgaagttgctgccgaaatgcgccgcttggaggaagaagtattccgtttagcaggccattcctttcgccttaattctcgcgatcagttagaacgtgtgttgttcgatgaacttggtctccctcctatcggcaagacagagaagaccggtaaacgtagcacttcagcggcggttttagaagctcttcgcgaagtccatcccattgtggacaagatcttgcagtaccgcgaactcgcgaaattgaaaggcgtgtatattgaccctcttccggcattagtccacccgaaaacgggacgcctccatacccgcttcaaccaaacagccacggcgaccggtcgtttgtcctcctctgatccaaaccttcagaatattccagtacgtaccccattgggccagaagatccgccgcgcgtttgtagctgaggagggttggcgtttagtggccctcgattatagccaaattgaattacgtgtccttgcccatctttctggcgatgagaacctcatccgcgtgtttcaggaaggcaaagacattcacactcaaacggcaagctggatgtttggattatcagctgaagcgatcgatcctttgatgcgtcgtgcagcgaagaccatcaatttcggtgttctctacggtatgagtgcctttcgtttgtcgcaggaattaggcattccctatgaagaagctgcggcgttcattcagaaatactttcaaagctatcccaaagttaaagcatggatcgagaagactctcgaagaaggccgcacacgtggttacgtagagaccttatttggacgtcgccgctatgttcccgatttaaacgctcgcgtgaaatctgtccgtgaagccgccgaacgcatggcgttcaacatgcctgtacagggcacggcagctgacctcatgaaacttgcaatggtgcgcctttttccacaattgcgtgaagttggtgcccgcatgctcttgcaggtccacgatgaactcttgttagaagcgccaaaagagcgtgcggaagaggtggcagccctcgcgaaagaggttatggaaggcgtgtggcccttagcggtgcctcttgaagtcgaagttggtattggcgaggattggctggctgccaaaggataatga

SEQ ID NO: 2238 - protein, 841 aa, synthetic construct
  REGION 1..841: note = Variant of DNA polymerase I from Thermus sp. strain 2.9
MHHHHHHGGSGVLPVFEPKGRVLLVDGHHLAYRNFFALKGLTTSRGEPVQGVYGFAKSLLKALKEDGDVVIVVFDAKAPSFRHEAYEAYKAGRAPTPEDFPRQLALMKELVDLLGLERLEVPGFEADDVLATLAKKAEREGYEVQILTADRDLFQLLSPRISVLHPEGHRITPEWLWEKYGLRPEQWVDFRALAGDPSDNIPGVKGIGEKTALKLLKEWGSLENLLKNLDQVKPESVREKILAHLEDLKLSRELSRVRTDLPLEVDFRRRREPDWEGLKAFLERLEFGSLLHEFGLLESPLPAEEAPWPPPEGAFLGYRLSRPEPMWAELLALAASAQGRVYRAEDPHGALRGLFEVRGLLAKDLAVVALREGLDLPPTDDPMLLAYLLDPSNTTPEGVARRYGGEWTEDAAKRALLAERLHANLLGRLQGEERLLWLYEEVEKPLSRVLAHMEATGVKLDVAYLEALSLEVAAEMRRLEEEVFRLAGHSFRLNSRDQLERVLFDELGLPPIGKTEKTGKRSTSAAVLEALREVHPIVDKILQYRELAKLKGVYIDPLPALVHPKTGRLHTRFNQTATATGRLSSSDPNLQNIPVRTPLGQKIRRAFVAEEGWRLVALDYSQIELRVLAHLSGDENLIRVFQEGKDIHTQTASWMFGLSAEAIDPLMRRAAKTINFGVLYGMSAFRLSQELGIPYEEAAAFIQKYFQSYPKVKAWIEKTLEEGRTRGYVETLFGRRRYVPDLNARVKSVREAAERMAFNMPVQGTAADLMKLAMVRLFPQLREVGARMLLQVHDELLLEAPKERAEEVAALAKEVMEGVWPLAVPLEVEVGIGEDWLAAKG

SEQ ID NO: 2239 - DNA, 2529 bp, synthetic construct
  misc_feature 1..2529: note = Variant of DNA polymerase I from Thermus sp. strain 2.9
  source 1..2529: mol_type = other DNA
atgcaccatcatcatcatcatggcggtagcggcgtgttaccggtgttcgagcctaaaggtcgcgtgcttctggttgatggccatcatctcgcgtatcgtaacttctttgccctgaaaggattaaccaccagccgtggcgagccggtacagggtgtctacggctttgcaaagtcgctcctgaaagctctgaaagaagacggtgatgtggtgattgttgtctttgatgcgaaagcgccaagttttcgccacgaagcgtacgaagcttacaaagccgggcgtgctccaacgccggaagactttcctcgccaattggcgcttatgaaggaattagtggatttgcttggcctcgaacgcttggaagttcccggtttcgaggcagacgacgtattagcgactctcgcaaagaaagccgaacgtgagggctatgaagtccagatcttgacagcagatcgcgatcttttccagcttttatctccgcgcatctcggtgttacacccggaagggcatcgtatcaccccggaatggctctgggagaaatatggtttgcgtcccgaacaatgggtggattttcgcgccttagcaggcgatccgagcgacaatattccgggagttaaaggtatcggcgagaagacggcgctcaagctccttaaagaatgggggtcgttggagaacttgcttaagaatttagatcaggtcaaaccagagtcagtgcgtgagaagattcttgctcacctcgaagacctcaaattaagccgcgaattgtcccgtgtacgcaccgatttgccgctcgaagttgatttccgtcgccgccgcgaacctgactgggagggtcttaaagcgtttttagagcgtcttgaatttggttcgctcttgcatgaattcggccttttagaaagcccgttaccagccgaagaagcaccttggccaccgcccgaaggcgcgtttttaggttaccgtttgagtcgcccggaaccgatgtgggccgaattatccgctcttgcagcgtctgcccagggacgtgtgtatcgcgcggaagaccctcatggtgcgctccgcggcctcttcgaagtccgtggactccttgccaaagacttagctgttgttgcattgcgcgaaggtcttgatttacctccgactgatgatccaatgcttcttgcgtacctcttggacccgtcaaacacgacgcccgaaggcgtagcccgtcgttacggcggcgagtggaccgaagatgcagcgaaacgcgcgttattggccgaacgtttgcacgccaatttattaggacgtttgcaaggcgaggaacgtctcctctggctttacgaagaagtggagaaaccattgagtcgcgtgctcgcgcatatggaagctaccggtgtcaaattagacgtggcgtatttggaggctctcagccttgaagttgctgccgaaatgcgccgcttggaggaagaagtattccgtttagcaggccactcctttcgccttaattctcgcgatcagttagaacgtgtgttgttcgatgaacttggtctccctcctatcggcaagacagagaagaccggtaaacgtagcacttcagcggcggttttagaagctcttcgcgaagtccatcccattgtggacaagatcttgcagtaccgcgaactcgcgaaattgaaaggcacctatattgaccctcttccggcattagtccacccgaaaacgggacgcctccatacccgcttcaaccaaacagccacggcgaccggtcgtttgtcctcctctgatccaaaccttcagaatattccagtacgtaccccattgggccagaagatccgcaaggcgtttgtagctgaggagggttggcgtttagtggccctcgattatagccaaattgaattacgtgtccttgcccatctttctggcgatgagaacctcatccgcgtgtttcaggaaggcaaagacattcacactcaaacggcaagctggatgtttggattatcagctgaagcgatcgatcctttgatgcgtcgtgcagcgaagaccatcaatttcggtgttctctacggtatgagtgcctttcgtttgtcgcaggaattaggcattccctatgaagaagctgcggcgttcattcagaaatactttcaaagctatcccaaagttaaagcatggatcgagaagactctcgaagaaggccgcacacgtggttacgtagagaccttatttggacgtcgccgctatgttcccgatttaaacgctcgcgtgaaatctgtccgtgaagccgccgaacgcatggcgttcaacatgcctgtacagggcacggcagctgacctcatgaaacttgcaatggtgcgcctttttccacaattgcgtgaagttggtgcccgcatgctcttgcaggtccacgatgaactcttgttagaagcgccaaaagagcgtgcggaagaggtggcagccctcgcgaaagaggttatggaaggcgtgtggcccttagcggtgcctcttgaagtcgaagttggtattggcgaggattggctggctgccaaaggataatga

SEQ ID NO: 2240 - protein, 841 aa, synthetic construct
  REGION 1..841: note = Variant of DNA polymerase I from Thermus sp. strain 2.9
MHHHHHHGGSGVLPVFEPKGRVLLVDGHHLAYRNFFALKGLTTSRGEPVQGVYGFAKSLLKALKEDGDVVIVVFDAKAPSFRHEAYEAYKAGRAPTPEDFPRQLALMKELVDLLGLERLEVPGFEADDVLATLAKKAEREGYEVQILTADRDLFQLLSPRISVLHPEGHRITPEWLWEKYGLRPEQWVDFRALAGDPSDNIPGVKGIGEKTALKLLKEWGSLENLLKNLDQVKPESVREKILAHLEDLKLSRELSRVRTDLPLEVDFRRRREPDWEGLKAFLERLEFGSLLHEFGLLESPLPAEEAPWPPPEGAFLGYRLSRPEPMWAELSALAASAQGRVYRAEDPHGALRGLFEVRGLLAKDLAVVALREGLDLPPTDDPMLLAYLLDPSNTTPEGVARRYGGEWTEDAAKRALLAERLHANLLGRLQGEERLLWLYEEVEKPLSRVLAHMEATGVKLDVAYLEALSLEVAAEMRRLEEEVFRLAGHSFRLNSRDQLERVLFDELGLPPIGKTEKTGKRSTSAAVLEALREVHPIVDKILQYRELAKLKGTYIDPLPALVHPKTGRLHTRFNQTATATGRLSSSDPNLQNIPVRTPLGQKIRKAFVAEEGWRLVALDYSQIELRVLAHLSGDENLIRVFQEGKDIHTQTASWMFGLSAEAIDPLMRRAAKTINFGVLYGMSAFRLSQELGIPYEEAAAFIQKYFQSYPKVKAWIEKTLEEGRTRGYVETLFGRRRYVPDLNARVKSVREAAERMAFNMPVQGTAADLMKLAMVRLFPQLREVGARMLLQVHDELLLEAPKERAEEVAALAKEVMEGVWPLAVPLEVEVGIGEDWLAAKG

SEQ ID NO: 2241 - DNA, 2529 bp, synthetic construct
  misc_feature 1..2529: note = Variant of DNA polymerase I from Thermus sp. strain 2.9
  source 1..2529: mol_type = other DNA
atgcaccatcatcatcatcatggcggtagcggcgtgttaccggtgttcgagcctaaaggtcgcgtgcttctggttgatggccatcatctcgcgtatcgtaacttctttgccctgaaaggattaaccaccagccgtggcgagccggtacagggtgtctacggctttgcaaagtcgctcctgaaagctctgaaagaagacggtgatgtggtgattgttgtctttgatgcgaaagcgccaagttttcgccacgaagcgtacgaagcttacaaagccgggcgtgctccaacgccggaagactttcctcgccaattggcgcttatgaaggaattagtggatttgcttggcctcgaacgcttggaagttcccggtttcgaggcagacgacgtattagcgactctcgcaaagaaagccgaacgtgagggctatgaagtccagatcttgacagcagatcgcgatcttttccagcttttatctccgcgcatctcggtgttacacccggaagggcatcgtatcaccccggaatggctctgggagaaatatggtttgcgtcccgaacaatgggtggattttcgcgccttagcaggcgatccgagcgacaatattccgggagttaaaggtatcggcgagaagacggcgctcaagctccttaaagaatgggggtcgttggagaacttgcttaagaatttagatcaggtcaaaccagagtcagtgcgtgagaagattcttgcacacctcgaagacctcaaattaagccgcgaattgtcccgtgtacgcaccgatttgccgctcgaagttgatttccgtcgccgccgcgaacctgactgggagggtcttaaagcgtttttagagcgtcttgaatttggttcgctcttgcatgaattcggccttttagaaagcccgttaccagccgaagaagcaccttggccaccgcccgaaggcgcgtttttaggttaccgtttgagtcgcccggaaccgatgtgggccgaattattggctcttgcagcgtctgcccagggacgtgtgtatcgcgcggaagaccctcatggtgcgctccgcggcctcttcgaagtccgtggactccttgccaaagacttagctgttgttgcattgcgcgaaggtcttgatttacctccgactgatgatccaatgcttcttgcgtacctcttggacccgtcaaacacgacgcccgaaggcgtagcccgtcgttacggcggcgagtggaccgaagatgcagcgaaacgcgcgttattggccgaacgtttgcacgccaatttattaggacgtttgcaaggcgaggaacgtctcctctggctttacgaagaagtggagaaaccattgagtcgcgtgctcgcgcatatggaagctaccggtgtcaaattagacgtggcgtatttggaggctctcagccttgaagttgctgccgaaatgcgccgcttggaggaagaagtattccgtttagcaggccattcctttcgccttaattctcgcgatcagttagaacgtgtgttgttcgatgaacttggtctccctcctatcggcaagacagagaagaccggtaaacgtagcacttcagcggcggttttagaagctcttcgcgaagtccatcccattgtggacaagatcttgcagtaccgcgaactcgcgaaattgaaaggcacctatattgaccctcttccggcattagtccacccgaaaacgggacgcctccatacccgcttcaaccaaacagccacggcgaccggtcgtttgtcctcctctgatccaaaccttcagaatattccagtacgtaatccattgggccagaagatccgccgcgcgtttgtagctgaggagggttggcgtttagtggccctcgattatagccaaattgaattacgtgtccttgcccatctttctggcgatgagaacctcatccgcgtgtttcaggaaggcaaagacattcacactcaaacggcaagctggatgtttggattatcagctgaagcgatcgatcctttgatgcgtcgtgcagcgaagaccatcaatttcggtgttctctacggtatgagtgcctttcgtttgtcgcaggaattaggcattccctatgaagaagctgcggcgttcattcagaaatactttcaaagctatcccaaagttaaagcatggatcgagaagactctcgaagaaggccgcacacgtggttacgtagagaccttatttggacgtcgccgctatgttcccgatttaaacgctcgcgtgaaatctgtccgtgaagccgccgaacgcatggcgttcaacatgcctgtacagggcacggcagctgacctcatgaaacttgcaatggtgcgcctttttccacaattgcgtgaagttggtgcccgcatgctcttgcaggtccacgatgaactcttgttagaagcgccaaaagagcgtgcggaagaggtggcagccctcgcgaaagaggttatggaaggcgtgtggcccttagcggtgcctcttgaagtcgaagttggtattggcgaggattggctggctgccaaaggataatga

SEQ ID NO: 2242 - protein, 841 aa, synthetic construct
  REGION 1..841: note = Variant of DNA polymerase I from Thermus sp. strain 2.9
MHHHHHHGGSGVLPVFEPKGRVLLVDGHHLAYRNFFALKGLTTSRGEPVQGVYGFAKSLLKALKEDGDVVIVVFDAKAPSFRHEAYEAYKAGRAPTPEDFPRQLALMKELVDLLGLERLEVPGFEADDVLATLAKKAEREGYEVQILTADRDLFQLLSPRISVLHPEGHRITPEWLWEKYGLRPEQWVDFRALAGDPSDNIPGVKGIGEKTALKLLKEWGSLENLLKNLDQVKPESVREKILAHLEDLKLSRELSRVRTDLPLEVDFRRRREPDWEGLKAFLERLEFGSLLHEFGLLESPLPAEEAPWPPPEGAFLGYRLSRPEPMWAELLALAASAQGRVYRAEDPHGALRGLFEVRGLLAKDLAVVALREGLDLPPTDDPMLLAYLLDPSNTTPEGVARRYGGEWTEDAAKRALLAERLHANLLGRLQGEERLLWLYEEVEKPLSRVLAHMEATGVKLDVAYLEALSLEVAAEMRRLEEEVFRLAGHSFRLNSRDQLERVLFDELGLPPIGKTEKTGKRSTSAAVLEALREVHPIVDKILQYRELAKLKGTYIDPLPALVHPKTGRLHTRFNQTATATGRLSSSDPNLQNIPVRNPLGQKIRRAFVAEEGWRLVALDYSQIELRVLAHLSGDENLIRVFQEGKDIHTQTASWMFGLSAEAIDPLMRRAAKTINFGVLYGMSAFRLSQELGIPYEEAAAFIQKYFQSYPKVKAWIEKTLEEGRTRGYVETLFGRRRYVPDLNARVKSVREAAERMAFNMPVQGTAADLMKLAMVRLFPQLREVGARMLLQVHDELLLEAPKERAEEVAALAKEVMEGVWPLAVPLEVEVGIGEDWLAAKG

SEQ ID NO: 2243 - DNA, 2529 bp, synthetic construct
  misc_feature 1..2529: note = Variant of DNA polymerase I from Thermus sp. strain 2.9
  source 1..2529: mol_type = other DNA
atgcaccatcatcatcatcatggcggtagcggcgtgttaccggtgttcgagcctaaaggtcgcgtgcttctggttgatggccatcatctcgcgtatcgtaacttctttgccctgaaaggattaaccaccagcagcggcgagccggtacagggtgtctacggctttgcaaagtcgctcctgaaagctctgaaagaagacggtgatgtggtgattgttgtctttgatgcgaaagcgccaagttttcgccacgaagcgtacgaagcttacaaagccgggcgtgctccaacgccggaagactttcctcgccaattggcgcttatgaaggaattagtggatttgcttggcctcgaacgcttggaagttcccggtttcgaggcagacgacgtattagcgactctcgcaaagaaagccgaacgtgagggctatgaagtccagatcttgacagcagatcgcgatcttttccagcttttatctccgcgcatctcggtgttacacccggaagggcatcgtatcaccccggaatggctctgggagaaatatggtttgcgtcccgaacaatgggtggattttcgcgccttagcaggcgatccgagcgacaatattccgggagttaaaggtatcggcgagaagacggcgctcaagctccttaaagaatgggggtcgttggagaacttgcttaagaatttagatcaggtcaaaccagagtcagtgcgtgagaagattcttaatcacctcgaagacctcaaattaagccgcgaattgtcccgtgtacgcaccgatttgccgctcgaagttgatttccgtcgccgccgcgaacctgactgggagggtcttaaagcgtttttagagcgtcttgaatttggttcgctcttgcatgaattcggccttttagaaagcccgttaccagccgaagaagcaccttggccaccgccccagggcgcgtttttaggttaccgtttgagtcgcccggaaccgatgtgggccgaattattggctcttgcagcgtctgcccagggaacggtgtatcgcgcggaagaccctcatggtgcgctccgcggcctcttcgaagtccgtggactccttgccaaagacttagctgttgttgcattgcgcgaaggtcttgatttacctccgactgatgatccaatgcttcttgcgtacctcttggacccgtcaaacacgacgcccgaaggcgtagcccgtcgttacggcggcgagtggaccgaagatgcagcgaaacgcgcgttattggccgaacgtttgcacgagaatttattaggacgtttgcaaggcgaggaacgtctcctctggctttacgaagaagtggagaaaccattgagtcgcgtgctcgcgcatatggaagctaccggtgtcaaattagacgtggcgtatttggaggctctcagccttgaagttgctgccgaaatgcgccgcttggaggaagaagtattccgtttagcaggccattcctttcgccttaattctcgcgatcagttagaacgtgtgttgttcgatgaacttggtctccctcctatcggcaagacagagaagaccggtaaacgtagcacttcagcggcggttttagaagctcttcgcgaagtccatcccattgtggacaagatcttggcgtaccgcgaactcgcgaaattgaaaggcacctatattgaccctcttccggcattagtccacccgaaaacgggacgcctccatacccgcttcaaccaaacagccacggcgaccggtcgtttgtcctcctctgatccaaaccttcagaatattccagtacgtaccccattgggccagaagatccgccgcgcgtttgtagctgaggagggttggcgtttagtggccctcgattatagccaaattgaattacgtgtccttgcccatctttctggcgatgagaacctcatccgcgtgtttcaggaaggcaaagacattcacactcaaacggcaagctggatgtttggattatcagctgaagcgatcgatcctttgatgcgtcgtgcagcgaagaccatcaatttcggtgttctctacggtatgagtgcctttcgtttgtcgcaggaattaggcattccctatgaagaagctgcggcgttcattcagaaatactttcaaagctatcccaaagttaaagcatggatcgagaagactctcgaagaaggccgcacacgtggttacgtagagaccttatttggacgtcgccgctatgttcccgatttaaacgctcgcgtgaaatctgtccgtgaagccgccgaacgcatggcgttcaacatgcctgtacagggcacggcagctgacctcatgaaacttgcaatggtgcgcctttttccacaattgcgtgaagttggtgcccgcatgctcttgcaggtccacgatgaactcttgttagaagcgccaaaagagcgtgcggaagaggtggcagccctcgcgaaaacggttatggaaggcgtgtggcccttagcggtgcctcttgaagtcgaagttggtattggcgaggattggctggctgccaaaggataatga

SEQ ID NO: 2244 - protein, 841 aa, synthetic construct
  REGION 1..841: note = Variant of DNA polymerase I from Thermus sp. strain 2.9
MHHHHHHGGSGVLPVFEPKGRVLLVDGHHLAYRNFFALKGLTTSSGEPVQGVYGFAKSLLKALKEDGDVVIVVFDAKAPSFRHEAYEAYKAGRAPTPEDFPRQLALMKELVDLLGLERLEVPGFEADDVLATLAKKAEREGYEVQILTADRDLFQLLSPRISVLHPEGHRITPEWLWEKYGLRPEQWVDFRALAGDPSDNIPGVKGIGEKTALKLLKEWGSLENLLKNLDQVKPESVREKILNHLEDLKLSRELSRVRTDLPLEVDFRRRREPDWEGLKAFLERLEFGSLLHEFGLLESPLPAEEAPWPPPQGAFLGYRLSRPEPMWAELLALAASAQGTVYRAEDPHGALRGLFEVRGLLAKDLAVVALREGLDLPPTDDPMLLAYLLDPSNTTPEGVARRYGGEWTEDAAKRALLAERLHENLLGRLQGEERLLWLYEEVEKPLSRVLAHMEATGVKLDVAYLEALSLEVAAEMRRLEEEVFRLAGHSFRLNSRDQLERVLFDELGLPPIGKTEKTGKRSTSAAVLEALREVHPIVDKILAYRELAKLKGTYIDPLPALVHPKTGRLHTRFNQTATATGRLSSSDPNLQNIPVRTPLGQKIRRAFVAEEGWRLVALDYSQIELRVLAHLSGDENLIRVFQEGKDIHTQTASWMFGLSAEAIDPLMRRAAKTINFGVLYGMSAFRLSQELGIPYEEAAAFIQKYFQSYPKVKAWIEKTLEEGRTRGYVETLFGRRRYVPDLNARVKSVREAAERMAFNMPVQGTAADLMKLAMVRLFPQLREVGARMLLQVHDELLLEAPKERAEEVAALAKTVMEGVWPLAVPLEVEVGIGEDWLAAKG

SEQ ID NO: 2245 - DNA, 2529 bp, synthetic construct
  misc_feature 1..2529: note = Variant of DNA polymerase I from Thermus sp. strain 2.9
  source 1..2529: mol_type = other DNA
atgcaccatcatcatcatcatggcggtagcggcgtgttaccggtgttcgagcctaaaggtcgcgtgcttctggttgatggccatcatctcgcgtatcgtaacttctttgccctgaaaggattaaccaccagcagcggcgagccggtacagggtgtctacggctttgcaaagtcgctcctgaaagctctgaaaaacgacggtgatgtggtgattgttgtctttgatgcgaaagcgccaagttttcgccacgaagcgtacgaagcttacaaagccgggcgtgctccaacgccggaagactttcctcgccaattggcgcttatgaaggaattagtggatttgcttggcctcgaacgcttggaagttcccggtttcgaggcagacgacgtattagcgactctcgcaaagaaagccgaacgtgagggctatgaagtccagatcttgacagcagatcgcgatcttttccagcttttatctccgcgcatctcggtgttacacccggaagggcatcgtatcaccccggaatggctctgggagaaatatggtttgcgtcccgaacaatgggtggattttcgcgccttagcaggcgatccgagcgacaatattccgggagttaaaggtatcggcgagaagacggcgctcaagctccttaaagaatgggggtcgttggagaacttgcttaagaatttagatcaggtcaaaccagagtcagtgcgtgagaagattcttaatcacctcgaagacctcaaattaagccgcgaattgtcccgtgtacgcaccgatttgccgctcgaagttgatttccagcgccgccgcgaacctgactgggagggtcttaaagcgtttttagagcgtcttgaatttggttcgctcttgcatgaattcggccttttagaaagcccgttaccagccgaagaagcaccttggccaccgcccgaaggcgcgtttttaggttaccgtttgagtcgcccggaaccgatgtgggccgaattattggctcttgcagcgtctgcccagggacgtgtgtatcgcgcggaagaccctcatggtgcgctccgcggcctcttcgaagtccgtggactccttgccaaagacttagctgttgttgcattgcgcgaaggtcttgatttacctccgactgatgatccaatgcttcttgcgtacctcttggacccgtcaaacacgacgcccgaaggcgtagcccgtcgttacggcggcgagtggaccgaagatgcagcgaaacgcgcgttattggccgaacgtttgcacgccaatttattaggacgtttgcaaggcgaggaacgtctcctctggctttacgaagaagtggagaaaccattgagtcgcgtgctcgcgcatatggaagctaccggtgtcaaattagacgtggcgtatttggaggctctcagccttgaagttgctgccgaaatgcgccgcttggaggaagaagtattccgtttagcaggccattcctttcgccttaattctcgcgatcagttagaacgtgtgttgttcgatgaacttggtctccctcctatcggcaagacagagaagaccggtaaacgtagcacttcagcggcggttttagaagctcttcgcgaagtccatcccattgtggacaagatcttgcagtaccgcgaactcgcgaaattgaaaggcacctatattgaccctcttccggcattagtccacccgaaaacgggacgcctccatacccgcttcaaccaaacagccacggcgaccggtcgtttgtcctcctctgatccaaaccttcagaatattccagtacgtaccccattgggccagaagatccgccgcgcgtttgtagctgaggagggttggcgtttagtggccctcgattatagccaaattgaattacgtgtccttgcccatctttctggcgatgagaacctcatccgcgtgtttcaggaaggcaaagacattcacactcaaacggcaagctggatgtttggattatcagctgaagcgatcgatcctttgatgcgtcgtgcagcgaagaccatcaatttcggtgttctctacggtatgagtgcctttcgtttgtcgcaggaattaggcattccctatgaagaagctgcggcgttcattcagaaatactttcaaagctatcccaaagttaaagcatggatcgagaagactctcgaagaaggccgcacacgtggttacgtagagaccttatttggacgtcgccgctatgttcccgatttaaacgctcgcgtgaaatctgtccgtgaagccgccgaacgcatggcgttcaacatgcctgtacagggcacggcagctgacctcatgaaacttgcaatggtgcgcctttttccacaattgcgtgaagttggtgcccgcatgctcttgcaggtccacgatgaactcttgttagaagcgccaaaagagcgtgcggaagaggtggcagccctcgcgaaagaagttatggaaggcgtgtggcccttagcggtgcctcttgaagtcgaagttggtattggcgaggattggctggctgccaaaggataatga

SEQ ID NO: 2246 - protein, 841 aa, synthetic construct
  REGION 1..841: note = Variant of DNA polymerase I from Thermus sp. strain 2.9
MHHHHHHGGSGVLPVFEPKGRVLLVDGHHLAYRNFFALKGLTTSSGEPVQGVYGFAKSLLKALKNDGDVVIVVFDAKAPSFRHEAYEAYKAGRAPTPEDFPRQLALMKELVDLLGLERLEVPGFEADDVLATLAKKAEREGYEVQILTADRDLFQLLSPRISVLHPEGHRITPEWLWEKYGLRPEQWVDFRALAGDPSDNIPGVKGIGEKTALKLLKEWGSLENLLKNLDQVKPESVREKILNHLEDLKLSRELSRVRTDLPLEVDFQRRREPDWEGLKAFLERLEFGSLLHEFGLLESPLPAEEAPWPPPEGAFLGYRLSRPEPMWAELLALAASAQGRVYRAEDPHGALRGLFEVRGLLAKDLAVVALREGLDLPPTDDPMLLAYLLDPSNTTPEGVARRYGGEWTEDAAKRALLAERLHANLLGRLQGEERLLWLYEEVEKPLSRVLAHMEATGVKLDVAYLEALSLEVAAEMRRLEEEVFRLAGHSFRLNSRDQLERVLFDELGLPPIGKTEKTGKRSTSAAVLEALREVHPIVDKILQYRELAKLKGTYIDPLPALVHPKTGRLHTRFNQTATATGRLSSSDPNLQNIPVRTPLGQKIRRAFVAEEGWRLVALDYSQIELRVLAHLSGDENLIRVFQEGKDIHTQTASWMFGLSAEAIDPLMRRAAKTINFGVLYGMSAFRLSQELGIPYEEAAAFIQKYFQSYPKVKAWIEKTLEEGRTRGYVETLFGRRRYVPDLNARVKSVREAAERMAFNMPVQGTAADLMKLAMVRLFPQLREVGARMLLQVHDELLLEAPKERAEEVAALAKEVMEGVWPLAVPLEVEVGIGEDWLAAKG

SEQ ID NO: 2247 - DNA, 2529 bp, synthetic construct
  misc_feature 1..2529: note = Variant of DNA polymerase I from Thermus sp. strain 2.9
  source 1..2529: mol_type = other DNA
atgcaccatcatcatcatcatggcggtagcggcgtgttaccggtgttcgagcctaaaggtcgcgtgcttctggttgatggccatcatctcgcgtatcgtaacttctttgccctgaaaggattaaccaccagccgtggcgagccggtacagggtgtctacggctttgcaaagtcgctcctgaaagctctgaaagaagacggtgatgtggtgattgttgtctttgatgcgaaagcgccaagttttcgccacgaagcgtacgaagcttacaaagccgggcgtgctccaacgccggaagactttcctcgccaattggcgcttatgaaggaattagtggatttgcttggcctcgaacgcttggaagttcccggtttcgaggcagacgacgtattagcgactctcgcaaagaaagccgaacgtgagggctatgaagtccagatcttgacagcagatcgcgatcttttccagcttttatctccgcgcatctcggtgttacacccggaagggcatcgtatcaccccggaatggctctgggagaaatatggtttgcgtcccgaacaatgggtggattttcgcgccttagcaggcgatccgagcgacaatattccgggagttaaaggtatcggcgagaagacggcgctcaagctccttaaagaatgggggtcgttggagaacttgcttaagaatttagatcaggtcaaaccagagtcagtgcgtgagaagattcttgcacacctcgaagacctcaaattaagcctggaattgtcccgtgtacgcaccgatttgccgctcgaagttgatttccgtcgccgccgcgaacctgactgggagggtcttaaagcgtttttagagcgtcttgaatttggttcgctcttgcatgaattcggccttttagaaagcccgttaccagccgaagaagcaccttggccaccgcccgaaggcgcgtttttaggttaccgtttgagtcgcccggaaccgatgtgggccgaattattggctcttgcagcgtctgcccagggacgtgtgtatcgcgcggaagaccctcatggtgcgctccgcggcctcttcgaagtccgtggactccttgccaaagacttagctgttgttgcattgcgcgaaggtcttgatttacctccgactgatgatccaatgcttcttgcgtacctcttggacccgtcaaacacgacgcccgaaggcgtagcccgtcgttacggcggcgagtggaccgaagatgcagcgaaacgcgcgttattggccgaacgtttgcacgccaatttattaggacgtttgcaaggcgaggaacgtctcctctggctttacgaagaagtggagaaaccattgagtcgcgtgctcgcgcatatggaagctaccggtgtcaaattagacgtggcgtatttggaggctctcagccttgaagttgctgccgaaatgcgccgcttggaggaagaagtattccgtttagcaggccattcctttcgccttaattctcgcgatcagttagaacgtgtgttgttcgatgaacttggtctccctcctatcggcaagacagagaagaccggtaaacgtagcacttcagcggcggttttagaagctcttcgcgaagtccatcccattgtggacaagatcttgcagtaccgcgaactcgcgaaattgaaaggcacctatattgaccctcttccggcattagtccacccgaaaacgggacgcctccatacccgcttcaaccaaacagccacggcgaccggtcgtttgtcctcctctgatccaaaccttcagaatattccagtacgtaccccattgggccagaagatccgccgcgcgtttgtagctgaggagggttggcgtttagtggccctcgattatagccaaattgaattacgtgtccttgcccatctttctggcgatgagaacctcatccgcgtgtttcaggaaggcaaagacattcacactcaaacggcaagctggatgtttggattatcagctgaagcgatcgatcctttgatgcgtcgtgcagcgaagaccatcaatttcggtgttctctacggtatgagtgcctttcgtttgtcgcaggaattaggcattccctatgaagaagctgcggcgttcattcagaaatactttcaaagctatcccaaagttaaagcatggatcgagaagactctcgaagaaggccgcacacgtggttacgtagagaccttatttggacgtcgccgctatgttcccgatttaaacgctcgcgtgaaatctgtccgtgaagccgccgaacgcatggcgttcaacatgcctgtacagggcacggcagctgacctcatgaaacttgcaatggtgcgcctttttccacaattgcgtgaagttggtgcccgcatgctcttgcaggtccacgatgaactcttgttagaagcgccaaaagagcgtgcggaagaggtggcagccctcgcgaaagaggttatggaaggcgtgtggcccttagcggtgcctcttgaagtcgaagttggtattggcgaggattggctggctgccaaaggataatga

SEQ ID NO: 2248 - protein, 841 aa, synthetic construct; identical to SEQ ID NO: 2196
  REGION 1..841: note = Variant of DNA polymerase I from Thermus sp. strain 2.9

SEQ ID NO: 2249 - DNA, 2529 bp, synthetic construct
  misc_feature 1..2529: note = Variant of DNA polymerase I from Thermus sp. strain 2.9
  source 1..2529: mol_type = other DNA
atgcaccatcatcatcatcatggcggtagcggcgtgttaccggtgttcgagcctaaaggtcgcgtgcttctggttgatggccatcatctcgcgtatcgtaacttctttgccctgaaaggattaaccaccagcagcggcgagccggtacagggtgtctacggctttgcaaagtcgctcctgaaagctctgaaagaagacggtgatgtggtgattgttgtctttgatgcgaaagcgccaagttttcgccacgaagcgtacgaagcttacaaagccgggcgtgctccaacgccggaagactttcctcgccaattggcgcttatgaaggaattagtggatttgcttggcctcgaacgcttggaagttcccggtttcgaggcagacgacgtattagcgactctcgcaaagaaagccgaacgtgagggctatgaagtccagatcttgacagcagatcgcgatcttttccagcttttatctccgcgcatctcggtgttacacccggaagggcatcgtatcaccccggaatggctctgggagaaatatggtttgcgtcccgaacaatgggtggattttcgcgccttagcaggcgatccgagcgacaatattccgggagttaaaggtatcggcgagaagacggcgctcaagctccttaaagaatgggggtcgttggagaacttgcttaagaatttagatcaggtcaaaccagagtcagtgcgtgagaagattcttgcacacctcgaagacctcaaattaagccgcgaattgtcccgtgtacgcaccgatttgccgctcgaagttgatttccgtcgccgccgcgaacctgactgggagggtcttaaagcgtttttagagcgtcttgaatttggttcgctcttgcatgaattcggccttttagaaagcccgttaccagccgaagaagcaccttggccaccgcccgagggcgcgtttttaggttaccgtttgagtcgcccggaaccgatgtgggccgaattattggctcttgcagcgtctgcccagggaacggtgtatcgcgcggaagaccctcatggtgcgctccgcggcctcttcgaagtccgtggactccttgccaaagacttagctgttgttgcattgcgcgaaggtcttgatttacctccgactgatgatccaatgcttcttgcgtacctcttggacccgtcaaacacgacgcccgaaggcgtagcccgtcgttacggcggcgagtggaccgaagatgcagcgaaacgcgcgttattggccgaacgtttgcacgagaatttattaggacgtttgcaaggcgaggaacgtctcctctggctttacgaagaagtggagaaaccattgagtcgcgtgctcgcgcatatggaagctaccggtgtcaaattagacgtggcgtatttggaggctctcagccttgaagttgctgccgaaatgcgccgcttggaggaagaagtattccgtttagcaggccattcctttcgccttaattctcgcgatcagttagaacgtgtgttgttcgatgaacttggtctccctcctatcggcaagacagagaagaccggtaaacgtagcacttcagcggcggttttagaagctcttcgcgaagtccatcccattgtggacaagatcttgcagtaccgcgaactcgcgaaattgaaaggcacctatattgaccctcttccggcattagtccacccgaaaacgggacgcctccatacccgcttcaaccaaacagccacggcgaccggtcgtttgtcctcctctgatccaaaccttcagaatattccagtacgtaccccattgggccagaagatccgccgcgcgtttgtagctgaggagggttggcgtttagtggccctcgattatagccaaattgaattacgtgtccttgcccatctttctggcgatgagaacctcatccgcgtgtttcaggaaggcaaagacattcacactcaaacggcaagctggatgtttggattatcagctgaagcgatcgatcctttgatgcgtcgtgcagcgaagaccatcaatttcggtgttctctacggtatgagtgcctttcgtttgtcgcaggaattaggcattccctatgaagaagctgcggcgttcattcagaaatactttcaaagctatcccaaagttaaagcatggatcgagaagactctcgaagaaggccgcacacgtggttacgtagagaccttatttggacgtcgccgctatgttcccgatttaaacgctcgcgtgaaatctgtccgtgaagccgccgaacgcatggcgttcaacatgcctgtacagggcacggcagctgacctcatgaaacttgcaatggtgcgcctttttccacaattgcgtgaagttggtgcccgcatgctcttgcaggtccacgatgaactcttgttagaagcgccaaaagagcgtgcggaagaggtggcagccctcgcgaaaacggttatggaaggcgtgtggcccttagcggtgcctcttgaagtcgaagttggtattggcgaggattggctggctgccaaaggataatga

SEQ ID NO: 2250 - protein, 841 aa, synthetic construct
  REGION 1..841: note = Variant of DNA polymerase I from Thermus sp. strain 2.9
MHHHHHHGGSGVLPVFEPKGRVLLVDGHHLAYRNFFALKGLTTSSGEPVQGVYGFAKSLLKALKEDGDVVIVVFDAKAPSFRHEAYEAYKAGRAPTPEDFPRQLALMKELVDLLGLERLEVPGFEADDVLATLAKKAEREGYEVQILTADRDLFQLLSPRISVLHPEGHRITPEWLWEKYGLRPEQWVDFRALAGDPSDNIPGVKGIGEKTALKLLKEWGSLENLLKNLDQVKPESVREKILAHLEDLKLSRELSRVRTDLPLEVDFRRRREPDWEGLKAFLERLEFGSLLHEFGLLESPLPAEEAPWPPPEGAFLGYRLSRPEPMWAELLALAASAQGTVYRAEDPHGALRGLFEVRGLLAKDLAVVALREGLDLPPTDDPMLLAYLLDPSNTTPEGVARRYGGEWTEDAAKRALLAERLHENLLGRLQGEERLLWLYEEVEKPLSRVLAHMEATGVKLDVAYLEALSLEVAAEMRRLEEEVFRLAGHSFRLNSRDQLERVLFDELGLPPIGKTEKTGKRSTSAAVLEALREVHPIVDKILQYRELAKLKGTYIDPLPALVHPKTGRLHTRFNQTATATGRLSSSDPNLQNIPVRTPLGQKIRRAFVAEEGWRLVALDYSQIELRVLAHLSGDENLIRVFQEGKDIHTQTASWMFGLSAEAIDPLMRRAAKTINFGVLYGMSAFRLSQELGIPYEEAAAFIQKYFQSYPKVKAWIEKTLEEGRTRGYVETLFGRRRYVPDLNARVKSVREAAERMAFNMPVQGTAADLMKLAMVRLFPQLREVGARMLLQVHDELLLEAPKERAEEVAALAKTVMEGVWPLAVPLEVEVGIGEDWLAAKG

SEQ ID NO: 2251 - DNA, 2529 bp, synthetic construct
  misc_feature 1..2529: note = Variant of DNA polymerase I from Thermus sp. strain 2.9
  source 1..2529: mol_type = other DNA
atgcaccatcatcatcatcatggcggtagcggcgtgttaccggtgttcgagcctaaaggtcgcgtgcttctggttgatggccatcatctcgcgtatcgtaacttctttgccctgaaaggattaaccaccagcagcggcgagccggtacagggtgtctacggctttgcaaagtcgctcctgaaagctctgaaagaagacggtgatgtggtgattgttgtctttgatgcgaaagcgccaagttttcgccacgaagcgtacgaagcttacaaagccgggcgtgctccaacgccggaagactttcctcgccaattggcgcttatgaaggaattagtggatttgcttggcctcgaacgcttggaagttcccggtttcgaggcagacgacgtattagcgactctcgcaaagaaagccgaacgtgagggctatgaagtccagatcttgacagcagatcgcgatcttttccagcttttatctccgcgcatctcggtgttacacccggaagggcatcgtatcaccccggaatggctctgggagaaatatggtttgcgtcccgaacaatgggtggattttcgcgccttagcaggcgatccgagcgacaatattccgggagttaaaggtatcggcgagaagacggcgctcaagctccttaaagaatgggggtcgttggagaacttgcttaagaatttagatcaggtcaaaccagagtcagtgcgtgagaagattcttgctcacctcgaagacctcaaattaagccgcgaattgtcccgtgtacgcaccgatttgccgctcgaagttgatttccgtcgccgccgcgaacctgactgggagggtcttaaagcgtttttagagcgtcttgaatttggttcgctcttgcatgaattcggccttttagaaagcccgttaccagccgaagaagcaccttggccaccgcccgaaggcgcgtttttaggttaccgtttgagtcgcccggaaccgatgtgggccgaattattggctcttgcagcgtctgcccagggacgtgtgtatcgcgcggaagaccctcatggtgcgctccgcggcctcttcgaagtccgtggactccttgccaaagacttagctgttgttgcattgcgcgaaggtcttgatttacctccgactgatgatccaatgcttcttgcgtacctcttggacccgtcaaacacgacgcccgaaggcgtagcccgtcgttacggcggcgagtggaccgaagatgcagcgaaacgcgcgttattggccgaacgtttgcacgcgaatttattaggacgtttgcaaggcgaggaacgtctcctctggctttacgaagaagtggagaaaccattgagtcgcgtgctcgcgcatatggaagctaccggtgtcaaattagacgtggcgtatttggaggctctcagccttgaagttgctgccgaaatgcgccgcttggaggaagaagtattccgtttagcaggccgctcctttcgccttaattctcgcgatcagttagaacgtgtgttgttcgatgaacttggtctccctcctatcggcaagacagagaagaccggtaaacgtagcacttcagcggcggttttagaagctcttcgcgaagtccatcccattgtggacaagatcttgcagtaccgcgaactcgcgaaattgaaaggcacctatattgaccgtcttccggcattagtccacccgaaaacgggacgcctccatacccgcttcaaccaaacagccacggcgaccggtcgtttgtcctcctctgatccaaaccttcagaatattccagtacgtaccccattgggccagaagatccgccgcgcgtttgtagctgaggagggttggcgtttagtggccctcgattatagccaaattgaattacgtgtccttgcccatctttctggcgatgagaacctcatccgcgtgtttcaggaaggcaaagacattcacactcaaacggcaagctggatgtttggattatcagctgaagcgatcgatcctttgatgcgtcgtgcagcgaagaccatcaatttcggtgttctctacggtatgagtgcctttcgtttgtcgcaggaattaggcattccctatgaagaagctgcggcgttcattcagaaatactttcaaagctatcccaaagttaaagcatggatcgagaagactctcgaagaaggccgcacacgtggttacgtagagaccttatttggacgtcgccgctatgttcccgatttaaacgctcgcgtgaaaagcaagcgtgaagccgccgaacgcatggcgttcaacatgcctgtacagggcacggcagctgacctcatgaaacttgcaatggtgcgcctttttccacaattgcgtgaagttggtgcccgcatgctcttgcaggtccacgatgaactcttgttagaagcgccaaaagagcgtgcggaagaggtggcagccctcgcgaaagaggttatggaaggcgtgtggcccttagcggtgcctcttgaagtcgaagttggtattggcgaggattggctggctgccaaaggataatga

SEQ ID NO: 2252 - protein, 841 aa, synthetic construct
  REGION 1..841: note = Variant of DNA polymerase I from Thermus sp. strain 2.9
MHHHHHHGGSGVLPVFEPKGRVLLVDGHHLAYRNFFALKGLTTSSGEPVQGVYGFAKSLLKALKEDGDVVIVVFDAKAPSFRHEAYEAYKAGRAPTPEDFPRQLALMKELVDLLGLERLEVPGFEADDVLATLAKKAEREGYEVQILTADRDLFQLLSPRISVLHPEGHRITPEWLWEKYGLRPEQWVDFRALAGDPSDNIPGVKGIGEKTALKLLKEWGSLENLLKNLDQVKPESVREKILAHLEDLKLSRELSRVRTDLPLEVDFRRRREPDWEGLKAFLERLEFGSLLHEFGLLESPLPAEEAPWPPPEGAFLGYRLSRPEPMWAELLALAASAQGRVYRAEDPHGALRGLFEVRGLLAKDLAVVALREGLDLPPTDDPMLLAYLLDPSNTTPEGVARRYGGEWTEDAAKRALLAERLHANLLGRLQGEERLLWLYEEVEKPLSRVLAHMEATGVKLDVAYLEALSLEVAAEMRRLEEEVFRLAGRSFRLNSRDQLERVLFDELGLPPIGKTEKTGKRSTSAAVLEALREVHPIVDKILQYRELAKLKGTYIDRLPALVHPKTGRLHTRFNQTATATGRLSSSDPNLQNIPVRTPLGQKIRRAFVAEEGWRLVALDYSQIELRVLAHLSGDENLIRVFQEGKDIHTQTASWMFGLSAEAIDPLMRRAAKTINFGVLYGMSAFRLSQELGIPYEEAAAFIQKYFQSYPKVKAWIEKTLEEGRTRGYVETLFGRRRYVPDLNARVKSKREAAERMAFNMPVQGTAADLMKLAMVRLFPQLREVGARMLLQVHDELLLEAPKERAEEVAALAKEVMEGVWPLAVPLEVEVGIGEDWLAAKG

SEQ ID NO: 2253 - DNA, 2529 bp, synthetic construct
  misc_feature 1..2529: note = Variant of DNA polymerase I from Thermus sp. strain 2.9
  source 1..2529: mol_type = other DNA
atgcaccatcatcatcatcatggcggtagcggcgtgttaccggtgttcgagcctaaaggtcgcgtgcttctggttgatggccatcatctcgcgtatcgtaacttctttgccctgaaaggattaaccaccagccgtggcgagccggtacagggtgtctacggctttgcaaagtcgctcctgaaagctctgaaagaagacggtgatgtggtgattgttgtctttgatgcgaaagcgccaagttttcgccacgaagcgtacgaagcttacaaagccgggcgtgctccaacgccggaagactttcctcgccaattggcgcttatgaaggaattagtggatttgcttggcctcgaacgcttggaagttcccggtttcgaggcagacgacgtattagcgactctcgcaaagaaagccgaacgtgagggctatgaagtccagatcttgacagcagatcgcgatcttttccagcttttatctccgcgcatctcggtgttacacccggaagggcatcgtatcaccccggaatggctctgggagaaatatggtttgcgtcccgaacaatgggtggattttcgcgccttagcaggcgatccgagcgacaatattccgggagttaaaggtatcggcgagaagacggcgctcaagctccttaaagaatgggggtcgttggagaacttgcttaagaatttagatcaggtcaaaccagagtcagtgcgtgagaagattcttgcacacctcgaagacctcaaattaagccgcgaattgtcccgtgtacgcaccgatttgccgctcgaagttgatttccgtcgccgccgcgaacctgactgggagggtcttaaagcgtttttagagcgtcttgaatttggttcgctcttgcatgaattcggccttttagaaagcccgttaccagccgaagaagcaccttggccaccgcccgaaggcgcgtttttaggttaccgtttgagtcgcccggaaccgatgtgggccgaattattggctcttgcagcgtctgcccagggacgtgtgtatcgcgcggaagaccctcatggtgcgctccgcggcctcttcgaagtccgtggactccttgccaaagacttagctgttgttgcattgcgcgaaggtcttgatttacctccgactgatgatccaatgcttcttgcgtacctcttggacccgtcaaacacgacgcccgaaggcgtagcccgtcgttacggcggcgagtggaccgaagatgcagcgaaacgcgcgttattggccgaacgtttgcacgccaatttattaggacgtttgcaaggcgaggaacgtctcctctggctttacgaagaagtggagaaaccattgagtcgcgtgctcgcgcatatggaagctaccggtgtcaaattagacgtggcgtatttggaggctctcagccttgaagttgctgccgaaatgcgccgcttggaggaagaagtattccgtttagcaggccgttcctttcgccttaactctcgcgatcagttagaacgtgtgttgttcgatgaacttggtctccgtcctatcggcaagacagagaagaccggtaaacgtagcacttcagcggcggttttagaagctcttcgcgaagtccatcccattgtggacaagatcttgcagtaccgcgaactcgcgaaattgaaaggcacctatattgaccctcttccggcattagtccacccgaaaacgggacgcctccatacccgcttcaaccaaacagccacggcgaccggtcgtttgtcctcctctgatccaaaccttcagaatattccagtacgtaccccattgggccagaagatccgccgcgcgtttgtagctgaggagggttggcgtttagtggccctcgattatagccaaattgaattacgtgtccttgcccatctttctggcgatgagaacctcatccgcgtgtttcaggaaggcaaagacattcacactcaaacggcaagctggatgtttggattatcagctgaagcgatcgatcctttgatgcgtcgtgcagcgaagaccatcaatttcggtgttctctacggtatgagtgcctttcgtttgtcgcaggaattaggcattccctatgaagaagctgcggcgttcattcagaaatactttcaaagctatcccaaagttaaagcatggatcgagaagactctcgaggaaggccgcacacgtggttacgtagagaccttatttggacgtcgccgctatgttcccgatttaaacgctcgcgtgaaatctgtccgtgaagccgccgaacgcatggcgttcaacatgcctgtacagggcacggcagctgacctcatgaaacttgcaatggtgcgcctttttccacaattgcgtgaagttggtgcccgcatgctcttgcaggtccacgatgaactcttgttagaagcgccaaaagagcgtgcggaagaggtggcagccctcgcgaaagaggttatggaaggcgtgtggcccttagcggtgcctcttgaagtcgaagttggtattggcgaggattggctggctgccaaaggataatga

SEQ ID NO: 2254 - protein, 841 aa, synthetic construct
  REGION 1..841: note = Variant of DNA polymerase I from Thermus sp. strain 2.9
MHHHHHHGGSGVLPVFEPKGRVLLVDGHHLAYRNFFALKGLTTSRGEPVQGVYGFAKSLLKALKEDGDVVIVVFDAKAPSFRHEAYEAYKAGRAPTPEDFPRQLALMKELVDLLGLERLEVPGFEADDVLATLAKKAEREGYEVQILTADRDLFQLLSPRISVLHPEGHRITPEWLWEKYGLRPEQWVDFRALAGDPSDNIPGVKGIGEKTALKLLKEWGSLENLLKNLDQVKPESVREKILAHLEDLKLSRELSRVRTDLPLEVDFRRRREPDWEGLKAFLERLEFGSLLHEFGLLESPLPAEEAPWPPPEGAFLGYRLSRPEPMWAELLALAASAQGRVYRAEDPHGALRGLFEVRGLLAKDLAVVALREGLDLPPTDDPMLLAYLLDPSNTTPEGVARRYGGEWTEDAAKRALLAERLHANLLGRLQGEERLLWLYEEVEKPLSRVLAHMEATGVKLDVAYLEALSLEVAAEMRRLEEEVFRLAGRSFRLNSRDQLERVLFDELGLRPIGKTEKTGKRSTSAAVLEALREVHPIVDKILQYRELAKLKGTYIDPLPALVHPKTGRLHTRFNQTATATGRLSSSDPNLQNIPVRTPLGQKIRRAFVAEEGWRLVALDYSQIELRVLAHLSGDENLIRVFQEGKDIHTQTASWMFGLSAEAIDPLMRRAAKTINFGVLYGMSAFRLSQELGIPYEEAAAFIQKYFQSYPKVKAWIEKTLEEGRTRGYVETLFGRRRYVPDLNARVKSVREAAERMAFNMPVQGTAADLMKLAMVRLFPQLREVGARMLLQVHDELLLEAPKERAEEVAALAKEVMEGVWPLAVPLEVEVGIGEDWLAAKG

SEQ ID NO: 2255 - DNA, 2529 bp, synthetic construct
  misc_feature 1..2529: note = Variant of DNA polymerase I from Thermus sp. strain 2.9
  source 1..2529: mol_type = other DNA
atgcaccatcatcatcatcatggcggtagcggcgtgttaccggtgttcgagcctaaaggtcgcgtgcttctggttgatggccatcatctcgcgtatcgtaacttctttgccctgaaaggattaaccaccagccgtggcgagccggtacagggtgtctacggctttgcaaagtcgctcctgaaagctctgaaagaagacggtgatgtggtgattgttgtctttgatgcgaaagcgccaagttttcgccacgaagcgtacgaagcttacaaagccgggcgtgctccaacgccggaagactttcctcgccaattggcgcttatgaaggaattagtggatttgcttggcctcgaacgcttggaagttcccggtttcgaggcagacgacgtattagcgactctcgcaaagaaagccgaacgtgagggctatgaagtccagatcttgacagcagatcgcgatcttttccagcttttatctccgcgcatctcggtgttacacccggaagggcatcgtatcaccccggaatggctctgggagaaatatggtttgcgtcccgaacaatgggtggattttcgcgccttagcaggcgatccgagcgacaatattccgggagttaaaggtatcggcgagaagacggcgctcaagctccttaaagaatgggggtcgttggagaacttgcttaagaatttagatcaggtcaaaccagagtcagtgcgtgagaagattcttgcacacctcgaagacctcaaattaagccgcgaattgtcccgtgtacgcaccgatttgccgctcgaagttgatttccgtcgccgccgcgaacctgactgggagggtcttaaagcgtttttagagcgtcttgaatttggttcgctcttgcatgaattcggccttttagaaagcccgttaccagccgaagaagcaccttggccaccgcccgaaggcgcgtttttaggttaccgtttgagtcgcccggaaccgatgtgggccgaattattggctcttgcagcgtctgcccagggaacggtgtatcgcgcggaagaccctcatggtgcgctccgcggcctcttcgaagtccgtggactccttgccaaagacttagctgttgttgcattgcgcgaaggtcttgatttacctccgactgatgatccaatgcttcttgcgtacctcttggacccgtcaaacacgacgcccgaaggcgtagcccgtcgttacggcggcgagtggaccgaagatgcagcgaaacgcgcgttattggccgaacgtttgcacgccaatttattaggacgtttgcaaggcgaggaacgtctcctctggctttacgaagaagtggagaaaccattgagtcgcgtgctcgcgcatatggaagctaccggtgtcaaattagacgtggcgtatttggaggctctcagccttgaagttgctgccgaaatgcgccgcttggaggaagaagtattccgtttagcaggccgctcctttcgccttaattctcgcgatcagttagaacgtgtgttgttcgatgaacttggtctccctcctatcggcaagacagagaagaccggtaaacgtagcacttcagcggcggttttagaagctcttcgcgaagtccatcccattgtggacaagatcttgcagtaccgcgaactcgcgaaattgaaaggcacctatattgaccctcttccggcattagtccacccgaaaacgggacgcctccatacccgcttcaaccaaacagccacggcgaccggtcgtttgtcctcctctgatccaaaccttcagaatattccagtacgtaccccattgggccagaagatccgccgcgcgtttgtagctgaggagggttggcgtttagtggccctcgattatagccaaattgaattacgtgtccttgcccatctttctggcgatgagaacctcatccgcgtgtttcaggaaggcaaagacattcacactcaaacggcaagctggatgtttggattaagtgctgaagcgatcgatcctttgatgcgtcgtgcagcgaagaccatcaatttcggtgttctctacggtatgagtgcctttcgtttgtcgcaggaattaggcattccctatgaagaagctgcggcgttcattcagaaatactttcaaagctatcccaaagttaaagcatggatcgagaagactctcgaagaaggccgcacacgtggttacgtagagaccttatttggacgtcgccgctatgttcccgatttaaacgctcgcgtgaaatctgtccgtgaagccgccgaacgcatggcgttcaacatgcctgtacagggcacggcagctgacctcatgaaacttgcaatggtgcgcctttttccacaattgcgtgaagttggtgcccgcatgctcttgcaggtccacgatgaactcttgttagaagcgccaaaagagcgtgcggaagaggtggcagccctcgcgaaagaagttatggaaggcgtgtggcccttagcggtgcctcttgaagtcgaagttggtattggcgaggattggctggctgccaaaggataatga

SEQ ID NO: 2256 - protein, 841 aa, synthetic construct
  REGION 1..841: note = Variant of DNA polymerase I from Thermus sp. strain 2.9
MHHHHHHGGSGVLPVFEPKGRVLLVDGHHLAYRNFFALKGLTTSRGEPVQGVYGFAKSLLKALKEDGDVVIVVFDAKAPSFRHEAYEAYKAGRAPTPEDFPRQLALMKELVDLLGLERLEVPGFEADDVLATLAKKAEREGYEVQILTADRDLFQLLSPRISVLHPEGHRITPEWLWEKYGLRPEQWVDFRALAGDPSDNIPGVKGIGEKTALKLLKEWGSLENLLKNLDQVKPESVREKILAHLEDLKLSRELSRVRTDLPLEVDFRRRREPDWEGLKAFLERLEFGSLLHEFGLLESPLPAEEAPWPPPEGAFLGYRLSRPEPMWAELLALAASAQGTVYRAEDPHGALRGLFEVRGLLAKDLAVVALREGLDLPPTDDPMLLAYLLDPSNTTPEGVARRYGGEWTEDAAKRALLAERLHANLLGRLQGEERLLWLYEEVEKPLSRVLAHMEATGVKLDVAYLEALSLEVAAEMRRLEEEVFRLAGRSFRLNSRDQLERVLFDELGLPPIGKTEKTGKRSTSAAVLEALREVHPIVDKILQYRELAKLKGTYIDPLPALVHPKTGRLHTRFNQTATATGRLSSSDPNLQNIPVRTPLGQKIRRAFVAEEGWRLVALDYSQIELRVLAHLSGDENLIRVFQEGKDIHTQTASWMFGLSAEAIDPLMRRAAKTINFGVLYGMSAFRLSQELGIPYEEAAAFIQKYFQSYPKVKAWIEKTLEEGRTRGYVETLFGRRRYVPDLNARVKSVREAAERMAFNMPVQGTAADLMKLAMVRLFPQLREVGARMLLQVHDELLLEAPKERAEEVAALAKEVMEGVWPLAVPLEVEVGIGEDWLAAKG

SEQ ID NO: 2257 - DNA, 2529 bp, synthetic construct
  misc_feature 1..2529: note = Variant of DNA polymerase I from Thermus sp. strain 2.9
  source 1..2529: mol_type = other DNA
atgcaccatcatcatcatcatggcggtagcggcgtgttaccggtgttcgagcctaaaggtcgcgtgcttctggttgatggccatcatctcgcgtatcgtaacttctttgccctgaaaggattaaccaccagccgtggcgagccggtacagggtgtctacggctttgcaaagtcgctcctgaaagctctgaaagaagacggtgatgtggtgattgttgtctttgatgcgaaagcgccaagttttcgccacgaagcgtacgaagcttacaaagccgggcgtgctccaacgccggaagactttcctcgccaattggcgcttatgaaggaattagtggatttgcttggcctcgaacgcttggaagttcccggtttcgaggcagacgacgtattagcgactctcgcaaagaaagccgaacgtgagggctatgaagtccagatcttgacagcagatcgcgatcttttccagcttttatctccgcgcatctcggtgttacacccggaagggcatcgtatcaccccggaatggctctgggagaaatatggtttgcgtcccgaacaatgggtggattttcgcgccttagcaggcgatccgagcgacaatattccgggagttaaaggtatcggcgagaagacggcgctcaagctccttaaagaatgggggtcgttggagaacttgcttaagaatttagatcaggtcaaaccagagtcagtgcgtgagaagattcttgcacacctcgaagacctcaaattaagccgcgaattgtcccgtgtacgcaccgatttgccgctcgaagttgatttccgtcgtcgccgcgaacctgactgggagggtcttaaagcgtttttagagcgtcttgaatttggttcgctcttgcatgaattcggccttttagaaagcccgctgccagccgaagaagcaccttggccaccgcccgaaggcgcgtttttaggttaccgtttgagtcgcccggaaccgatgtgggccgaattattggctcttgcagcgtctgcccagggacgtgtgtatcgcgcggaagaccctcatggtgcgctccgcggcctcttcgaagtccgtggactccttgccaaagacttagctgttgttgcattgcgcgaaggtcttgatttacctccgactgatgatccaatgcttcttgcgtacctcttggacccgtcaaacacgacgcccgaaggcgtagcccgtcgttacggcggcgagtggaccgaagatgcagcgaaacgcgcgttattggccgaacgtttgcacgccaatttattaggacgtttgcaaggcgaggaacgtctcctctggctttacgaagaagtggagaaaccattgagtcgcgtgctcgcgcatatggaagctaccggtgtcaaattagacgtggcgtatttggaggctctcagccttgaagttgctgccgaaatgcgccgcttggaggaagaagtattccgtttagcaggccgttcctttcgccttaattctcgcgatcagttagaacgtgtgttgttcgatgaacttggtctccctcctatcggcaagacagagaagaccggtaaacgtagcacttcagcggcggttttagaagctcttcgcgaagtccatcccattgtggacaagatcttgcagtaccgcgaactcgcgaaattgaaaggcacctatattgaccctcttccggcattagtccacccgaaaacgggacgcctccatacccgcttcaaccaaacagccacggcgaccggtcgtttgtcctcctctgatccaaaccttcagaatattccagtacgtaccccattgggccagaagatccgccgcgcgtttgtagctgaggagggttggcgtttagtggccctcgattatcgccaaattgaattacgtgtccttgcccatctttctggcgatgagaacctcatccgcgtgtttcaggaaggcaaagacattcacactcaaacggcaagctggatgtttggattatcagctgaagcgatcgatcctttgatgcgtcgtgcagcgaagaccatcaatttcggtgttctctacggtatgagtgcctttcgtttgtcgcaggaattaggcattccctatgaagaagctgcggcgttcattcagaaatactttcaaagctatcccaaagttaaagcatggatcgagaagactctcgaggaaggccgcacacgtggttacgtagagaccttatttggacgtcgccgctatgttcccgatttaaacgctcgcgtgaaatctgtccgtgaagccgccgaacgcatggcgttcaacatgcctgtacagggcacggcagctgacctcatgaaacttgcaatggtgcgcctttttccacaattgcgtgaagttggtgcccgcatgctcttgcaggtccacgatgaactcttgttagaagcgccaaaagagcgtgcggaagaggtggcagccctcgcgaaaacggttatggaaggcgtgtggcccttagcggtgcctcttgaagtcgaagttggtattggcgaggattggctggctgccaaaggataatga

SEQ ID NO: 2258 - protein, 841 aa, synthetic construct
  REGION 1..841: note = Variant of DNA polymerase I from Thermus sp. strain 2.9
MHHHHHHGGSGVLPVFEPKGRVLLVDGHHLAYRNFFALKGLTTSRGEPVQGVYGFAKSLLKALKEDGDVVIVVFDAKAPSFRHEAYEAYKAGRAPTPEDFPRQLALMKELVDLLGLERLEVPGFEADDVLATLAKKAEREGYEVQILTADRDLFQLLSPRISVLHPEGHRITPEWLWEKYGLRPEQWVDFRALAGDPSDNIPGVKGIGEKTALKLLKEWGSLENLLKNLDQVKPESVREKILAHLEDLKLSRELSRVRTDLPLEVDFRRRREPDWEGLKAFLERLEFGSLLHEFGLLESPLPAEEAPWPPPEGAFLGYRLSRPEPMWAELLALAASAQGRVYRAEDPHGALRGLFEVRGLLAKDLAVVALREGLDLPPTDDPMLLAYLLDPSNTTPEGVARRYGGEWTEDAAKRALLAERLHANLLGRLQGEERLLWLYEEVEKPLSRVLAHMEATGVKLDVAYLEALSLEVAAEMRRLEEEVFRLAGRSFRLNSRDQLERVLFDELGLPPIGKTEKTGKRSTSAAVLEALREVHPIVDKILQYRELAKLKGTYIDPLPALVHPKTGRLHTRFNQTATATGRLSSSDPNLQNIPVRTPLGQKIRRAFVAEEGWRLVALDYRQIELRVLAHLSGDENLIRVFQEGKDIHTQTASWMFGLSAEAIDPLMRRAAKTINFGVLYGMSAFRLSQELGIPYEEAAAFIQKYFQSYPKVKAWIEKTLEEGRTRGYVETLFGRRRYVPDLNARVKSVREAAERMAFNMPVQGTAADLMKLAMVRLFPQLREVGARMLLQVHDELLLEAPKERAEEVAALAKTVMEGVWPLAVPLEVEVGIGEDWLAAKG

SEQ ID NO: 2259 - DNA, 2529 bp, synthetic construct
  misc_feature 1..2529: note = Variant of DNA polymerase I from Thermus sp. strain 2.9
  source 1..2529: mol_type = other DNA
atgcaccatcatcatcatcatggcggtagcggcgtgttaccggtgttcgagcctaaaggtcgcgtgcttctggttgatggccatcatctcgcgtatcgtaacttctttgccctgaaaggattaaccaccagccgtggcgagccggtacagggtgtctacggctttgcaaagtcgctcctgaaagctctgaaagaagacggtgatgtggtgattgttgtctttgatgcgaaagcgccaagttttcgccacgaagcgtacgaagcttacaaagccgggcgtgctccaacgccggaagactttcctcgccaattggcgcttatgaaggaattagtggatttgcttggcctcgaacgcttggaagttcccggtttcgaggcagacgacgtattagcgactctcgcaaagaaagccgaacgtgagggctatgaagtccagatcttgacagcagatcgcgatcttttccagcttttatctccgcgcatctcggtgttacacccggaagggcatcgtatcaccccggaatggctctgggagaaatatggtttgcgtcccgaacaatgggtggattttcgcgccttagcaggcgatccgagcgacaatattccgggagttaaaggtatcggcgagaagacggcgctcaagctccttaaagaatgggggtcgttggagaacttgcttaagaatttagatcaggtcaaaccagagtcagtgcgtgagaagattcttgcacacctcgaagacctcaaattaagccgcgaattgtcccgtgtacgcaccgatttgccgctcgaagttgatttccgtcgccgccgcgaacctgactgggagggtcttaaagcgtttttagagcgtcttgaatttggttcgctcttgcatgaattcggccttttagaaagcccgttaccagccggggaagcaccttggccaccgcccgaaggcgcgtttttaggttaccgtttgagtcgcccggaaccgatgtgggccgaattattggctcttgcagcgtctgcccagggacgtgtgtatcgcgcggaagaccctcatggtgcgctccgcggcctcttcgaagtccgtggactccttgccaaagacttagctgttgttgcattgcgcgaaggtcttgatttacctccgactgatgatccaatgcttcttgcgtacctcttggacccgtcaaacacgacgcccgaaggcgtagcccgtcgttacggcggcgagtggaccgaagatgcagcgaaacgcgcgttattggccgaacgtttgcacgccaatttattaggacgtttgcaaggcgaggaacgtctcctctggctttacgaagaagtggagaaaccattgagtcgcgtgctcgcgcatatggaagctaccggtgtcaaattagacgtggcgtatttggaggctctcagccttgaagttgctgccgaaatgcgccgcttggaggaagaagtattccgtttagcaggccgttcctttcgccttaattctcgcgatcagttagaacgtgtgttgttcgatgaacttggtctccctcctatcggcaagacagagaagaccggtaaacgtagcacttcagcggcggttttagaagctcttcgcgaagtccatcccattgtggacaagatcttgcagtaccgcgaactcgcgaaattgaaaggcacctatattgaccctcttccggcattagtccacccgaaaacgggacgcctccatacccgcttcaaccaaacagccacggcgaccggtcgtttgtcctcctctgatccaaaccttcagaatattccagtacgtaccccattgggccagaagatccgccgcgcgtttgtagctgaggagggttggcgtttagtggccctcgattatagccaaattgaattacgtgtccttgcccatctttctggcgatgagaacctcatccgcgtgtttcaggaaggcaaagacattcacactcaaacggcaagctggatgtttggattatcagctgaagcgatcgatcctttgatgcgtcgtgcagcgaagaccatcaatttcggtgttctctacggtatgagtgcctttcgtttgtcgcaggaattaggcattccctatgaagaagctgcggcgttcattcagaaatactttcaaagctatcccaaagttaaagcatggatcgagaagactctcgaagaaggccgcacacgtggttacgtagagaccttatttggacgtcgccgctatgttcccgatttaaacgctcgcgtgaaatctgtccgtgaagccgccgaacgcatggcgttcaacatgcctgtacagggcacggcagctgacctcatgaaacttgcaatggtgcgcctttttccacaattgcgtgaagttggtgcccgcatgctcttgcaggtccacgatgaactcttgttagaagcgccaaaagagcgtgcggaagaggtggcagccctcgcgaaagaggttatggaaggcgtgtggcccttagcggtgcctcttgaagtcgaagttggtattggcgaggattggctggctgccaaaggataatga

SEQ ID NO: 2260 - protein, 841 aa, synthetic construct
  REGION 1..841: note = Variant of DNA polymerase I from Thermus sp. strain 2.9
MHHHHHHGGSGVLPVFEPKGRVLLVDGHHLAYRNFFALKGLTTSRGEPVQGVYGFAKSLLKALKEDGDVVIVVFDAKAPSFRHEAYEAYKAGRAPTPEDFPRQLALMKELVDLLGLERLEVPGFEADDVLATLAKKAEREGYEVQILTADRDLFQLLSPRISVLHPEGHRITPEWLWEKYGLRPEQWVDFRALAGDPSDNIPGVKGIGEKTALKLLKEWGSLENLLKNLDQVKPESVREKILAHLEDLKLSRELSRVRTDLPLEVDFRRRREPDWEGLKAFLERLEFGSLLHEFGLLESPLPAGEAPWPPPEGAFLGYRLSRPEPMWAELLALAASAQGRVYRAEDPHGALRGLFEVRGLLAKDLAVVALREGLDLPPTDDPMLLAYLLDPSNTTPEGVARRYGGEWTEDAAKRALLAERLHANLLGRLQGEERLLWLYEEVEKPLSRVLAHMEATGVKLDVAYLEALSLEVAAEMRRLEEEVFRLAGRSFRLNSRDQLERVLFDELGLPPIGKTEKTGKRSTSAAVLEALREVHPIVDKILQYRELAKLKGTYIDPLPALVHPKTGRLHTRFNQTATATGRLSSSDPNLQNIPVRTPLGQKIRRAFVAEEGWRLVALDYSQIELRVLAHLSGDENLIRVFQEGKDIHTQTASWMFGLSAEAIDPLMRRAAKTINFGVLYGMSAFRLSQELGIPYEEAAAFIQKYFQSYPKVKAWIEKTLEEGRTRGYVETLFGRRRYVPDLNARVKSVREAAERMAFNMPVQGTAADLMKLAMVRLFPQLREVGARMLLQVHDELLLEAPKERAEEVAALAKEVMEGVWPLAVPLEVEVGIGEDWLAAKG

SEQ ID NO: 2261 - DNA, 2529 bp, synthetic construct
  misc_feature 1..2529: note = Variant of DNA polymerase I from Thermus sp. strain 2.9
  source 1..2529: mol_type = other DNA
atgcaccatcatcatcatcatggcggtagcggcgtgttaccggtgttcgagcctaaaggtcgcgtgcttctggttgatggccatcatctcgcgtatcgtaacttctttgccctgaaaggattaaccaccagccgcggcgagccggtacagggtgtctacggctttgcaaagtcgctcctgaaagctctgaaagaggacggtgatgtggtgattgttgtctttgatgcgaaagcgccaagttttcgccacgaagcgtacgaagcttacaaagccgggcgtgctccaacgccggaagactttcctcgccaattggcgcttatgaaggaattagtggatttgcttggcctcgaacgcttggaagttcccggtttcgaggcagacgacgtattagcgactctcgcaaagaaagccgaacgtgagggctatgaagtccagatcttgacagcagatcgcgatcttttccagcttttatctccgcgcatctcggtgttacacccggaagggcatcgtatcaccccggaatggctctgggagaaatatggtttgcgtcccgaacaatgggtggattttcgcgccttagcaggcgatccgagcgacaatattccgggagttaaaggtatcggcgagaagacggcgctcaagctccttaaagaatgggggtcgttggagaacttgcttaagaatttagatcaggtcaaaccagagtcagtgcgtgagaagattcttgcacacctcgaagacctcaaattaagccgcgaattgtcccgtgtacgcaccgatttgccgctcgaagttgatttccagcgccgccgcgaacctgactgggagggtcttaaagcgtttttagagcgtcttgaatttggttcgctcttgcatgaattcggccttttagaaagcccgttaccagccgaagaagcaccttggccaccgcccgaaggcgcgtttttaggttaccgtttgagtcgcccggaaccgatgtgggccgaattattggctcttgcagcgtctgcccagggacgcgtgtatcgcgcggaagaccctcatggtgcgctccgcggcctcttcgaagtccgtggactccttgccaaagacttagctgttgttgcattgcgcgaaggtcttgatttacctccgactgatgatccaatgcttcttgcgtacctcttggacccgtcaaacacgacgcccgaaggcgtagcccgtcgttacggcggcgagtggaccgaagatgcagcgaaacgcgcgttattggccgaacgtttgcacgagaatttattaggacgtttgcaaaccgaggaacgtctcctctggctttacgaagaagtggagaaaccattgagtcgcgtgctcgcgcatatggaagctaccggtgtcaaattagacgtggcgtatttggaggctctcagccttgaagttgctgccgaaatgcgccgcttggaggaagaagtattccgtttagcaggccattcctttcgccttaattctcgcgatcagttagaacgtgtgttgttcgatgaacttggtctccctcctatcggcaagacagagaagaccggtaaacgtagcacttcagcggcggttttagaagctcttcgcgaagtccatcccattgtggacaagatcttggcgtaccgcgaactcgcgaaattgaaaggcacctatattgaccgtcttccggcattagtccacccgaaaacgggacgcctccatacccgcttcaaccaaacagccacggcgaccggtcgtttgtcctcctctgatccaaaccttcagaatattccagtacgtaccccattgggccagaagatccgcaaggcgtttgtagctgaggagggttggcgtttagtggccctcgattatagccaaattgaattacgtgtccttgcccatctttctggcgatgagaacctcatccgcgtgtttcaggaaggcaaagacattcacactcaaacggcaagctggatgtttggattatcagctgaagcgatcgatcctttgatgcgtcgtgcagcgaagaccatcaatttcggtgttctctacggtatgagtgcctttcgtttgtcgcaggaattaggcattccctatgaagaagctgcggcgttcattcagaaatactttcaaagctatcccaaagttaaagcatggatcgagaagactctcgaagaaggccgcacacgtggttacgtagagaccttatttggacgtcgccgctatgttcccgatttaaacgctcgcgtgaaatctgtccgtgaagccgccgaacgcatggcgttcaacatgcctgtacagggcacggcagctgacctcatgaaacttgcaatggtgcgcctttttccacaattgcgtgaagttggtgcccgcatgctcttgcaggtccacgatgaactcttgttagaagcgccaaaagagcgtgcggaagaggtggcagccctcgcgaaaacggttatggaaggcgtgtggcccttagcggtgcctcttgaagtcgaagttggtattggcgaggattggctggctgccaaaggataatga

SEQ ID NO: 2262 - protein, 841 aa, synthetic construct
  REGION 1..841: note = Variant of DNA polymerase I from Thermus sp. strain 2.9
MHHHHHHGGSGVLPVFEPKGRVLLVDGHHLAYRNFFALKGLTTSRGEPVQGVYGFAKSLLKALKEDGDVVIVVFDAKAPSFRHEAYEAYKAGRAPTPEDFPRQLALMKELVDLLGLERLEVPGFEADDVLATLAKKAEREGYEVQILTADRDLFQLLSPRISVLHPEGHRITPEWLWEKYGLRPEQWVDFRALAGDPSDNIPGVKGIGEKTALKLLKEWGSLENLLKNLDQVKPESVREKILAHLEDLKLSRELSRVRTDLPLEVDFQRRREPDWEGLKAFLERLEFGSLLHEFGLLESPLPAEEAPWPPPEGAFLGYRLSRPEPMWAELLALAASAQGRVYRAEDPHGALRGLFEVRGLLAKDLAVVALREGLDLPPTDDPMLLAYLLDPSNTTPEGVARRYGGEWTEDAAKRALLAERLHENLLGRLQTEERLLWLYEEVEKPLSRVLAHMEATGVKLDVAYLEALSLEVAAEMRRLEEEVFRLAGHSFRLNSRDQLERVLFDELGLPPIGKTEKTGKRSTSAAVLEALREVHPIVDKILAYRELAKLKGTYIDRLPALVHPKTGRLHTRFNQTATATGRLSSSDPNLQNIPVRTPLGQKIRKAFVAEEGWRLVALDYSQIELRVLAHLSGDENLIRVFQEGKDIHTQTASWMFGLSAEAIDPLMRRAAKTINFGVLYGMSAFRLSQELGIPYEEAAAFIQKYFQSYPKVKAWIEKTLEEGRTRGYVETLFGRRRYVPDLNARVKSVREAAERMAFNMPVQGTAADLMKLAMVRLFPQLREVGARMLLQVHDELLLEAPKERAEEVAALAKTVMEGVWPLAVPLEVEVGIGEDWLAAKG

SEQ ID NO: 2263 - DNA, 2529 bp, synthetic construct
  misc_feature 1..2529: note = Variant of DNA polymerase I from Thermus sp. strain 2.9
  source 1..2529: mol_type = other DNA
atgcaccatcatcatcatcatggcggtagcggcgtgttaccggtgttcgagcctaaaggtcgcgtgcttctggttgatggccatcatctcgcgtatcgtaacttctttgccctgaaaggattaaccaccagccgtggcgagccggtacagggtgtctacggctttgcaaagtcgctcctgaaagctctgaaagaagacggtgatgtggtgattgttgtctttgatgcgaaagcgccaagttttcgccacgaagcgtacgaagcttacaaagccgggcgtgctccaacgccggaagactttcctcgccaattggcgcttatgaaggaattagtggatttgcttggcctcgaacgcttggaagttcccggtttcgaggcagacgacgtattagcgactctcgcaaagaaagccgaacgtgagggctatgaagtccagatcttgacagcagatcgcgatcttttccagcttttatctccgcgcatctcggtgttacacccggaagggcatcgtatcaccccggaatggctctgggagaaatatggtttgcgtcccgaacaatgggtggattttcgcgccttagcaggcgatccgagcgacaatattccgggagttaaaggtatcggcgagaagacggcgctcaagctccttaaagaatgggggtcgttggagaacttgcttaagaatttagatcaggtcaaaccagagtcagtgcgtgagaagattcttgcacacctcgaagacctcaaattaagccgcgaattgtcccgtgtacgcaccgatttgccgctcgaagttgatttccgtcgccgccgcgaacctgactgggagggtcttaaagcgtttttagagcgtcttgaatttggttcgctcttgcatgaattcggccttttagaaagcccgttaccagccgaagaagcaccttggccaccgcccgaaggcgcgtttttaggttaccgtttgagtcgcccggaaccgatgtgggccgaattattggctcttgcagcgtctgcccagggacgtgtgtatcgcgcggaagaccctcatggtgcgctccgcggcctcttcgaagtccgtggactccttgccaaagacttagctgttgttgcattgcgcgaaggtcttgatttacctccgactgatgatccaatgcttcttgcgtacctcttggacccgtcaaacacgacgcccgaaggcgtagcccgtcgttacggcggcgagtggaccgaagatgcagcgaaacgcgcgttattggccgaacgtttgcacgccaatttattaggacgtttgcaaggcgaggaacgtctcctctggctttacgaagaagtggagaaaccattgagtcgcgtgctcgcgcatatggaagctaccggtgtcaaattagacgtggcgtatttggaggctctcagccttgaagttgctgccgaaatgcgccgcttggaggaagaagtattccgtttagcaggccattcctttcgccttaattctcgcgatcagttagaacgtgtgttgttcgatgaacttggtctccctcctatcggcaagacagagaagaccttgaaacgtagcacttcagcggcggttttagaagctcttcgcgaagtccatcccattgtggacaagatcttgcagtaccgcgaactcgcgaaattgaaaggcacctatattgaccctcttccggcattagtccacccgaaaacgggacgcctccatacccgcttcaaccaaacagccacggcgaccggtcgtttgtcctcctctgatccaaaccttcagaatattccagtacgtaccccattgggccagaagatccgccgcgcgtttgtagctgaggagggttggcgtttagtggccctcgattatagccaaattgaattacgtgtccttgcccatctttctggcgatgagaacctcatccgcgtgtttcaggaaggcaaagacattcacactcaaacggcaagctggatgtttggattatcagctgaagcgatcgatcctttgatgcgtcgtgcagcgaagaccatcaatttcggtgttctctacggtatgagtgcctttcgtttgtcgcaggaattaggcattccctatgaagaagctgcggcgttcattcagaaatactttcaaagctatcccaaagttaaagcatggatcgagaagactctcgaagaaggccgcacacgtggttacgtagagaccttatttggacgtcgccgctatgttcccgatttaaacgctcgcgtgaaatctgtccgtgaagccgccgaacgcatggcgttcaacatgcctgtacagggcacggcagctgacctcatgaaacttgcaatggtgcgcctttttccacaattgcgtgaagttggtgcccgcatgctcttgcaggtccacgatgaactcttgttagaagcgccaaaagagcgtgcggaagaggtggcagccctcgcgaaagaggttatggaaggcgtgtggcccttagcggtgcctcttgaagtcgaagttggtattggcgaggattggctggctgccaaaggataatga

SEQ ID NO: 2264 - protein, 841 aa, synthetic construct
  REGION 1..841: note = Variant of DNA polymerase I from Thermus sp. strain 2.9
MHHHHHHGGSGVLPVFEPKGRVLLVDGHHLAYRNFFALKGLTTSRGEPVQGVYGFAKSLLKALKEDGDVVIVVFDAKAPSFRHEAYEAYKAGRAPTPEDFPRQLALMKELVDLLGLERLEVPGFEADDVLATLAKKAEREGYEVQILTADRDLFQLLSPRISVLHPEGHRITPEWLWEKYGLRPEQWVDFRALAGDPSDNIPGVKGIGEKTALKLLKEWGSLENLLKNLDQVKPESVREKILAHLEDLKLSRELSRVRTDLPLEVDFRRRREPDWEGLKAFLERLEFGSLLHEFGLLESPLPAEEAPWPPPEGAFLGYRLSRPEPMWAELLALAASAQGRVYRAEDPHGALRGLFEVRGLLAKDLAVVALREGLDLPPTDDPMLLAYLLDPSNTTPEGVARRYGGEWTEDAAKRALLAERLHANLLGRLQGEERLLWLYEEVEKPLSRVLAHMEATGVKLDVAYLEALSLEVAAEMRRLEEEVFRLAGHSFRLNSRDQLERVLFDELGLPPIGKTEKTLKRSTSAAVLEALREVHPIVDKILQYRELAKLKGTYIDPLPALVHPKTGRLHTRFNQTATATGRLSSSDPNLQNIPVRTPLGQKIRRAFVAEEGWRLVALDYSQIELRVLAHLSGDENLIRVFQEGKDIHTQTASWMFGLSAEAIDPLMRRAAKTINFGVLYGMSAFRLSQELGIPYEEAAAFIQKYFQSYPKVKAWIEKTLEEGRTRGYVETLFGRRRYVPDLNARVKSVREAAERMAFNMPVQGTAADLMKLAMVRLFPQLREVGARMLLQVHDELLLEAPKERAEEVAALAKEVMEGVWPLAVPLEVEVGIGEDWLAAKG

SEQ ID NO: 2265 - DNA, 2529 bp, synthetic construct
  misc_feature 1..2529: note = Variant of DNA polymerase I from Thermus sp. strain 2.9
  source 1..2529: mol_type = other DNA
atgcaccatcatcatcatcatggcggtagcggcgtgttaccggtgttcgagcctaaaggtcgcgtgcttctggttgatggccatcatctcgcgtatcgtaacttctttgccctgaaaggattaaccaccagccgtggcgagccggtacagggtgtctacggctttgcaaagtcgctcctgaaagctctgaaagaagacggtgatgtggtgattgttgtctttgatgcgaaagcgccaagttttcgccacgaagcgtacgaagcttacaaagccgggcgtgctccaacgccggaagactttcctcgccaattggcgcttatgaaggaattagtggatttgcttggcctcgaacgcttggaagttcccggtttcgaggcagacgacgtattagcgactctcgcaaagaaagccgaacgtgagggctatgaagtccagatcttgacagcagatcgcgatcttttccagcttttatctccgcgcatctcggtgttacacccggaagggcatcgtatcaccccggaatggctctgggagaaatatggtttgcgtcccgaacaatgggtggattttcgcgccttagcaggcgatccgagcgacaatattccgggagttaaaggtatcggcgagaagacggcgctcaagctccttaaagaatgggggtcgttggagaacttgcttaagaatttagatcaggtcaaaccagagtcagtgcgtgagaagattcttgcacacctcgaagacctcaaattaagccgcgaattgtcccgtgtacgcaccgatttgccgctcgaagttgatttccgtcgccgccgcgaacctgactgggagggtcttaaagcgtttttagagcgtcttgaatttggttcgctcttgcatgaattcggccttttagaaagcccgttaccagccgaagaagcaccttggccaccgcccgaaggcgcgtttttaggttaccgtttgagtcgcccggaaccgatgtgggccgaattattggctcttgcagcgtctgcccagggacgtgtgtatcgcgcggaagaccctcatggtgcgctccgcggcctcttcgaagtccgtggactccttgccaaagacttagctgttgttgcattgcgcgaaggtcttgatttacctccgactgatgatccaatgcttcttgcgtacctcttggacccgtcaaacacgacgcccgaaggcgtagcccgtcgttacggtggcgagtggaccgaagatgcagcgaaacgcgcgttattggccgaacgtttgcacgccaatttattaggacgtttgcaaggcgaggaacgtctcctctggctttacgaagaagtggagaaaccattgagtcgcgtgctcgcgcatatggaagctaccggtgtcaaattagacgtggcgtatttggaggctctcagccttgaagttgctgccgaaatgcgccgcttggaggaagaagtattccgtttagcaggccattcctttcgccttaattctcgcgatcagttagaacgtgtgttgttcgatgaacttggtctccctcctatcggcaagacagagaagaccggtaaacgtagcacttcagcggcggttttagaagctcttcgcacggtccatcccattgtggacaagatcttgcagtaccgcgaactcgcgaaattgaaaggcacctatattgaccctcttccggcattagtccacccgaaaacgggacgcctccatacccgcttcaaccaaacagccacggcgaccggtcgtttgtcctcctctgatccaaaccttcagaatattccagtacgtaccccattgggccagaagatccgccgcgcgtttgtagctgaggagggttggcgtttagtggccctcgattatagccaaattgaattacgtgtccttgcccatctttctggcgatgagaacctcatccgcgtgtttcaggaaggcaaagacattcacactcaaacggcaagctggatgtttggattatcagctgaagcgatcgatcctttgatgcgtcgtgcagcgaagaccatcaatttcggtgttctctacggtatgagtgcctttcgtttgtcgcaggaattaggcattccctatgaagaagctgcggcgttcattcagaaatactttcaaagctatcccaaagttaaagcatggatcgagaagactctcgaagaaggccgcacacgtggttacgtagagaccttatttggacgtcgccgctatgttcccgatttaaacgctcgcgtgaaatctgtccgtgaagccgccgaacgcatggcgttcaacatgcctgtacagggcacggcagctgacctcatgaaacttgcaatggtgcgcctttttccacaattgcgtgaagttggtgcccgcatgctcttgcaggtccacgatgaactcttgttagaagcgccaaaagagcgtgcggaagaggtggcagccctcgcgaaagaggttatggaaggcgtgtggcccttagcggtgcctcttgaagtcgaagttggtattggcgaggattggctggctgccaaaggataatga

SEQ ID NO: 2266 - protein, 841 aa, synthetic construct
  REGION 1..841: note = Variant of DNA polymerase I from Thermus sp. strain 2.9
MHHHHHHGGSGVLPVFEPKGRVLLVDGHHLAYRNFFALKGLTTSRGEPVQGVYGFAKSLLKALKEDGDVVIVVFDAKAPSFRHEAYEAYKAGRAPTPEDFPRQLALMKELVDLLGLERLEVPGFEADDVLATLAKKAEREGYEVQILTADRDLFQLLSPRISVLHPEGHRITPEWLWEKYGLRPEQWVDFRALAGDPSDNIPGVKGIGEKTALKLLKEWGSLENLLKNLDQVKPESVREKILAHLEDLKLSRELSRVRTDLPLEVDFRRRREPDWEGLKAFLERLEFGSLLHEFGLLESPLPAEEAPWPPPEGAFLGYRLSRPEPMWAELLALAASAQGRVYRAEDPHGALRGLFEVRGLLAKDLAVVALREGLDLPPTDDPMLLAYLLDPSNTTPEGVARRYGGEWTEDAAKRALLAERLHANLLGRLQGEERLLWLYEEVEKPLSRVLAHMEATGVKLDVAYLEALSLEVAAEMRRLEEEVFRLAGHSFRLNSRDQLERVLFDELGLPPIGKTEKTGKRSTSAAVLEALRTVHPIVDKILQYRELAKLKGTYIDPLPALVHPKTGRLHTRFNQTATATGRLSSSDPNLQNIPVRTPLGQKIRRAFVAEEGWRLVALDYSQIELRVLAHLSGDENLIRVFQEGKDIHTQTASWMFGLSAEAIDPLMRRAAKTINFGVLYGMSAFRLSQELGIPYEEAAAFIQKYFQSYPKVKAWIEKTLEEGRTRGYVETLFGRRRYVPDLNARVKSVREAAERMAFNMPVQGTAADLMKLAMVRLFPQLREVGARMLLQVHDELLLEAPKERAEEVAALAKEVMEGVWPLAVPLEVEVGIGEDWLAAKG

SEQ ID NO: 2267 - DNA, 2529 bp, synthetic construct
  misc_feature 1..2529: note = Variant of DNA polymerase I from Thermus sp. strain 2.9
  source 1..2529: mol_type = other DNA
atgcaccatcatcatcatcatggcggtagcggcgtgttaccggtgttcgagcctaaaggtcgcgtgcttctggttgatggccatcatctcgcgtatcgtaacttctttgccctgaaaggattaaccaccagccgtggcgagccggtacagggtgtctacggctttgcaaagtcgctcctgaaagctctgaaagaagacggtgatgtggtgattgttgtctttgatgcgaaagcgccaagttttcgccacgaagcgtacgaagcttacaaagccgggcgtgctccaacgccggaagactttcctcgccaattggcgcttatgaaggaattagtggatttgcttggcctcgaacgcttggaagttcccggtttcgaggcagacgacgtattagcgactctcgcaaagaaagccgaacgtgagggctatgaagtccagatcttgacagcagatcgcgatcttttccagcttttatctccgcgcatctcggtgttacacccggaagggcatcgtatcaccccggaatggctctgggagaaatatggtttgcgtcccgaacaatgggtggattttcgcgccttagcaggcgatccgagcgacaatattccgggagttaaaggtatcggcgagaagacggcgctcaagctccttaaagaatgggggtcgttggagaacttgcttaagaatttagatcaggtcaaaccagagtcagtgcgtgagaagattcttgcacacctcgaagacctcaaattaagccgcgaattgtcccgtgtacgcaccgatttgccgctcgaagttgatttccgtcgccgccgcgaacctgactgggagggtcttaaagcgtttttagagcgtcttgaatttggttcgctcttgcatgaattcggccttttagaaagcccgttaccagccgaagaagcaccttggccaccgcccgaaggcgcgtttttaggttaccgtttgagtcgcccggaaccgatgtgggccgaattattggctcttgcagcgtctgcccagggacgtgtgtatcgcgcggaagaccctcatggtgcgctccgcggcctcttcgaagtccgtggactccttgccaaagacttagctgttgttgcattgcgcgaaggtcttgatttacctccgactgatgatccaatgcttcttgcgtacctcttggacccgtcaaacacgacgcccgaaggcgtagcccgtcgttacggcggcgagtggaccgaagatgcagcgaaacgcgcgttattggccgaacgtttgcacgccaatttattaggacgtttgcaaggcgaggaacgtctcctctggctttacgaagaagtggagaaaccattgagtcgcgtgctcgcgcatatggaagctaccggtgtcaaattagacgtggcgtatttggaggctctcagccttgaagttgctgccgaaatgcgccgcttggaggaagaagtattccgtttagcaggccgttcctttcgccttaattctcgcgatcagttagaacgtgtgttgttcgatgaacttggtctccctcctatcggcaagacagagaagaccggtaaacgtagcacttcagcggcggttttagaagctcttcgcgaagtccatcccattgtggacaagatcttgcagtaccgcgaactcgcgaaattgaaaggcacctatattgaccctcttccggcattagtccacccgaaaacgggacgcctccatacccgcttcaaccaaacagccacggcgaccggtcgtttgtcctcctctgatccaaaccttcagaatattccagtacgtaccccattgggccagaagatccgccgcgcgtttgtagctgaggagggttggcgtttagtggccctcgattatagccaaattgaattacgtgtccttgcccatctttctggcgatgagaacctcatccgcgtgtttcaggaaggcaaagacattcacactcaaacggcaagctggatgtttggattatcagctgaagcgatcgatcctttgatgcgtcgtgcagcgaagaccatcaatttcggtgttctctacggtatgagtgcctttcgtttgtcgcaggaattaggcattccctatgaagaagctgcggcgttcattcagaaatactttcaaagctatcccaaagttaaagcatggatcgagaagactctcgaagaaggccgcacacgtggttacgtagagaccttatttggacgtcgccgctatgttcccgatttaaacgctcgcgtgaaatctgtccgtgaagccgccgaacgcatggcgttcaacatgcctgtacagggcacggcagctgacctcatgaaacttgcaatggtgcgcctttttccacaattgcgtgaagttggtgcccgcatgctcttgcaggtccacgatgaactcttgttagaagcgccaaaagagcgtgcggaagaggtggcagccctcgcgaaagaggttatggaaggcgtgtggcccttagcggtgcctcttgaagtcgaagttggtattggcgaggattggctggctgccaaaggataatga

SEQ ID NO: 2268 - protein, 841 aa, synthetic construct
  REGION 1..841: note = Variant of DNA polymerase I from Thermus sp. strain 2.9
MHHHHHHGGSGVLPVFEPKGRVLLVDGHHLAYRNFFALKGLTTSRGEPVQGVYGFAKSLLKALKEDGDVVIVVFDAKAPSFRHEAYEAYKAGRAPTPEDFPRQLALMKELVDLLGLERLEVPGFEADDVLATLAKKAEREGYEVQILTADRDLFQLLSPRISVLHPEGHRITPEWLWEKYGLRPEQWVDFRALAGDPSDNIPGVKGIGEKTALKLLKEWGSLENLLKNLDQVKPESVREKILAHLEDLKLSRELSRVRTDLPLEVDFRRRREPDWEGLKAFLERLEFGSLLHEFGLLESPLPAEEAPWPPPEGAFLGYRLSRPEPMWAELLALAASAQGRVYRAEDPHGALRGLFEVRGLLAKDLAVVALREGLDLPPTDDPMLLAYLLDPSNTTPEGVARRYGGEWTEDAAKRALLAERLHANLLGRLQGEERLLWLYEEVEKPLSRVLAHMEATGVKLDVAYLEALSLEVAAEMRRLEEEVFRLAGRSFRLNSRDQLERVLFDELGLPPIGKTEKTGKRSTSAAVLEALREVHPIVDKILQYRELAKLKGTYIDPLPALVHPKTGRLHTRFNQTATATGRLSSSDPNLQNIPVRTPLGQKIRRAFVAEEGWRLVALDYSQIELRVLAHLSGDENLIRVFQEGKDIHTQTASWMFGLSAEAIDPLMRRAAKTINFGVLYGMSAFRLSQELGIPYEEAAAFIQKYFQSYPKVKAWIEKTLEEGRTRGYVETLFGRRRYVPDLNARVKSVREAAERMAFNMPVQGTAADLMKLAMVRLFPQLREVGARMLLQVHDELLLEAPKERAEEVAALAKEVMEGVWPLAVPLEVEVGIGEDWLAAKG

SEQ ID NO: 2269 - DNA, 2529 bp, synthetic construct
  misc_feature 1..2529: note = Variant of DNA polymerase I from Thermus sp. strain 2.9
  source 1..2529: mol_type = other DNA
atgcaccatcatcatcatcatggcggtagcggcgtgttaccggtgttcgagcctaaaggtcgcgtgcttctggttgatggccatcatctcgcgtatcgtaacttctttgccctgaaaggattaaccaccagccgtggcgagccggtacagggtgtctacggctttgcaaagtcgctcctgaaagctctgaaagaagacggtgatgtggtgattgttgtctttgatgcgaaagcgccaagttttcgccacgaagcgtacgaagcttacaaagccgggcgtgctccaacgccggaagactttcctcgccaattggcgcttatgaaggaattagtggatttgcttggcctcgaacgcttggaagttcccggtttcgaggcagacgacgtattagcgactctcgcaaagaaagccgaacgtgagggctatgaagtccagatcttgacagcagatcgcgatcttttccagcttttatctccgcgcatctcggtgttacacccggaagggcatcgtatcaccccggaatggctctgggagaaatatggtttgcgtcccgaacaatgggtggattttcgcgccttagcaggcgatccgagcgacaatattccgggagttaaaggtatcggcgagaagacggcgctcaagctccttaaagaatgggggtcgttggagaacttgcttaagaatttagatcaggtcaaaccagagtcagtgcgtgagaagattcttgcacacctcgaagacctcaaattaagccgcgaattgtcccgtgtacgcaccgatttgccgctcgaagttgatttccgtcgccgccgcgaacctgactgggagggtcttaaagcgtttttagagcgtcttgaatttggttcgctcttgcatgaattcggccttttagaaagcccgttaccagccgaagaagcaccttggccaccgcccgaaggcgcgtttttaggttaccgtttgagtcgcccggaaccgatgtgggccgaattattggctcttgcagcgtctgcccagggacgtgtgtatcgcgcggaagaccctcatggtgcgctccgcggcctcttcgaagtccgtggactccttgccaaagacttagctgttgttgcattgcgcgaaggtcttgatttacctccgactgatgatccaatgcttcttgcgtacctcttggacccgtcaaacacgacgcccgaaggcgtagcccgtcgttacggcggcgagtggaccgaagatgcagcgaaacgcgcgttattggccgaacgtttgcacgccaatttattaggacgtttgcaaggcgaggaacgtctcctctggctttacgaagaagtggagaaaccattgagtcgcgtgctcgcgcatatggaagctaccggtgtcaaattagacgtggcgtatttggaggctctcagccttgaagttgctgccgaaatgcgccgcttggaggaagaagtattccgtttagcaggccattcctttcgccttaattctcgcgatcagttagaacgtgtgttgttcgatgaacttggtctccctcctatcggcaagacagagaagaccggtaaacgtagcacttcagcggcggttttagaagctcttcgcgaagtccatcccattgtggacaagatcttgcagtaccgcgaactcgcgaaattgaaaggcacctatattgaccctcttccggcattagtccacccgaaaacgggacgcctccatacccgcttcaaccaaacagccacggcgaccggtcgtttgtcctcctctgatccaaaccttcagaatattccagtacgtaccccattgggccagaagatccgccgcgcgtttgtagctgaggagggttggcgtttagtggccctcgattataagcaaattgaattacgtgtccttgcccatctttctggcgatgagaacctcatccgcgtgtttcaggaaggcaaagacattcacactcaaacggcaagctggatgtttggattatcagctgaagcgatcgatcctttgatgcgtcgtgcagcgaagaccatcaatttcggtgttctctacggtatgagtgcctttcgtttgtcgcaggaattaggcattccctatgaagaagctgcggcgttcattcagaaatactttcaaagctatcccaaagttaaagcatggatcgagaagactctcgaagaaggccgcacacgtggttacgtagagaccttatttggacgtcgccgctatgttcccgatttaaacgctcgcgtgaaatctgtccgtgaagccgccgaacgcatggcgttcaacatgcctgtacagggcacggcagctgacctcatgaaacttgcaatggtgcgcctttttccacaattgcgtgaagttggtgcccgcatgctcttgcaggtccacgatgaactcttgttagaagcgccaaaagagcgtgcggaagaggtggcagccctcgcgaaagaggttatggaaggcgtgtggcccttagcggtgcctcttgaagtcgaagttggtattggcgaggattggctggctgccaaaggataatga

SEQ ID NO: 2270 - protein, 841 aa, synthetic construct
  REGION 1..841: note = Variant of DNA polymerase I from Thermus sp. strain 2.9
MHHHHHHGGSGVLPVFEPKGRVLLVDGHHLAYRNFFALKGLTTSRGEPVQGVYGFAKSLLKALKEDGDVVIVVFDAKAPSFRHEAYEAYKAGRAPTPEDFPRQLALMKELVDLLGLERLEVPGFEADDVLATLAKKAEREGYEVQILTADRDLFQLLSPRISVLHPEGHRITPEWLWEKYGLRPEQWVDFRALAGDPSDNIPGVKGIGEKTALKLLKEWGSLENLLKNLDQVKPESVREKILAHLEDLKLSRELSRVRTDLPLEVDFRRRREPDWEGLKAFLERLEFGSLLHEFGLLESPLPAEEAPWPPPEGAFLGYRLSRPEPMWAELLALAASAQGRVYRAEDPHGALRGLFEVRGLLAKDLAVVALREGLDLPPTDDPMLLAYLLDPSNTTPEGVARRYGGEWTEDAAKRALLAERLHANLLGRLQGEERLLWLYEEVEKPLSRVLAHMEATGVKLDVAYLEALSLEVAAEMRRLEEEVFRLAGHSFRLNSRDQLERVLFDELGLPPIGKTEKTGKRSTSAAVLEALREVHPIVDKILQYRELAKLKGTYIDPLPALVHPKTGRLHTRFNQTATATGRLSSSDPNLQNIPVRTPLGQKIRRAFVAEEGWRLVALDYKQIELRVLAHLSGDENLIRVFQEGKDIHTQTASWMFGLSAEAIDPLMRRAAKTINFGVLYGMSAFRLSQELGIPYEEAAAFIQKYFQSYPKVKAWIEKTLEEGRTRGYVETLFGRRRYVPDLNARVKSVREAAERMAFNMPVQGTAADLMKLAMVRLFPQLREVGARMLLQVHDELLLEAPKERAEEVAALAKEVMEGVWPLAVPLEVEVGIGEDWLAAKG

SEQ ID NO: 2271 - DNA, 2529 bp, synthetic construct
  misc_feature 1..2529: note = Variant of DNA polymerase I from Thermus sp. strain 2.9
  source 1..2529: mol_type = other DNA
atgcaccatcatcatcatcatggcggtagcggcgtgttaccggtgttcgagcctaaaggtcgcgtgcttctggttgatggccatcatctcgcgtatcgtaacttctttgccctgaaaggattaaccaccagccgtggcgagccggtacagggtgtctacggctttgcaaagtcgctcctgaaagctctgaaagaagacggtgatgtggtgattgttgtctttgatgcgaaagcgccaagttttcgccacgaagcgtacgaagcttacaaagccgggcgtgctccaacgccggaagactttcctcgccaattggcgcttatgaaggaattagtggatttgcttggcctcgaacgcttggaagttcccggtttcgaggcagacgacgtattagcgactctcgcaaagaaagccgaacgtgagggctatgaagtccagatcttgacagcagatcgcgatcttttccagcttttatctccgcgcatctcggtgttacacccggaagggcatcgtatcaccccggaatggctctgggagaaatatggtttgcgtcccgaacaatgggtggattttcgagccttagcaggcgatccgagcgacaatattccgggagttaaaggtatcggcgagaagacggcgctcaagctccttaaagaatgggggtcgttggagaacttgcttaagaatttagatcaggtcaaaccagagtcagtgcgtgagaagattcttgcacacctcgaagacctcaaattaagccgcgaattgtcccgtgtacgcaccgatttgccgctcgaagttgatttccgtcgccgccgcgaacctgactgggagggtcttaaagcgtttttagagcgtcttgaatttggttcgctcttgcatgaattcggccttttagaaagcccgttaccagccgaagaagcaccttggccaccgcccgaaggcgcgtttttaggttaccgtttgagtcgcccggaaccgatgtgggccgaattattggctcttgcagcgtctgcccagggacgtgtgtatcgcgcggaagaccctcatggtgcgctccgcggcctcttcgaagtccgtggactccttgccaaagacttagctgttgttgcattgcgcgaaggtcttgatttacctccgactgatgatccaatgcttcttgcgtacctcttggacccgtcaaacacgacgcccgaaggcgtagcccgtcgttacggcggcgagtggaccgaagatgcagcgaaacgcgcgttattggccgaacgtttgcacgccaatttattaggacgtttgcaaggcgaggaacgtctcctctggctttacgaagaagtggagaaaccattgagtcgcgtgctcgcgcatatggaagctaccggtgtcaaattagacgtggcgtatttggaggctctcagccttgaagttgctgccgaaatgcgccgcttggaggaagaagtattccgtttagcaggccattcctttcgccttaattctcgcgatcagttagaacgtgtgttgttcgatgaacttggtctccctcctatcggcaagacagagaagaccggtaaacgtagcacttcagcggcggttttagaagctcttcgcgaagtccatcccattgtggacaagatcttgcagtaccgcgaactcgcgaaattgaaaggcacctatattgaccctcttccggcattagtccacccgaaaacgggacgcctccatacccgcttcaaccaaacagccacggcgaccggtcgtttgtcctcctctgatccaaaccttcagaatattccagtacgtaccccattgggccagaagatccgccgcgcgtttgtagctgaggagggttggcgtttagtggccctcgattatagccaaattgaattacgtgtccttgcccatctttctggcgatgagaacctcatccgcgtgtttcaggaaggcaaagacattcacactcaaacggcaagctggatgtttggattatcagctgaagcgatcgatcctttgatgcgtcgtgcagcgaagaccatcaatttcggtgttctctacggtatgagtgcctttcgtttgtcgcaggaattaggcattccctatcaagaagctgcggcgttcattcagaaatactttcaaagctatcccaaagttaaagcatggatcgagaagactctcgaagaaggccgcacacgtggttacgtagagaccttatttggacgtcgccgctatgttcccgatttaaacgctcgcgtgaaatctgtccgtgaagccgccgaacgcatggcgttcaacatgcctgtacagggcacggcagctgacctcatgaaacttgcaatggtgcgcctttttccacaattgcgtgaagttggtgcccgcatgctcttgcaggtccacgatgaactcttgttagaagcgccaaaagagcgtgcggaagaggtggcagccctcgcgaaagaggttatggaaggcgtgtggcccttagcggtgcctcttgaagtcgaagttggtattggcgaggattggctggctgccaaaggataatga

SEQ ID NO: 2272 - protein, 841 aa, synthetic construct
  REGION 1..841: note = Variant of DNA polymerase I from Thermus sp. strain 2.9
MHHHHHHGGSGVLPVFEPKGRVLLVDGHHLAYRNFFALKGLTTSRGEPVQGVYGFAKSLLKALKEDGDVVIVVFDAKAPSFRHEAYEAYKAGRAPTPEDFPRQLALMKELVDLLGLERLEVPGFEADDVLATLAKKAEREGYEVQILTADRDLFQLLSPRISVLHPEGHRITPEWLWEKYGLRPEQWVDFRALAGDPSDNIPGVKGIGEKTALKLLKEWGSLENLLKNLDQVKPESVREKILAHLEDLKLSRELSRVRTDLPLEVDFRRRREPDWEGLKAFLERLEFGSLLHEFGLLESPLPAEEAPWPPPEGAFLGYRLSRPEPMWAELLALAASAQGRVYRAEDPHGALRGLFEVRGLLAKDLAVVALREGLDLPPTDDPMLLAYLLDPSNTTPEGVARRYGGEWTEDAAKRALLAERLHANLLGRLQGEERLLWLYEEVEKPLSRVLAHMEATGVKLDVAYLEALSLEVAAEMRRLEEEVFRLAGHSFRLNSRDQLERVLFDELGLPPIGKTEKTGKRSTSAAVLEALREVHPIVDKILQYRELAKLKGTYIDPLPALVHPKTGRLHTRFNQTATATGRLSSSDPNLQNIPVRTPLGQKIRRAFVAEEGWRLVALDYSQIELRVLAHLSGDENLIRVFQEGKDIHTQTASWMFGLSAEAIDPLMRRAAKTINFGVLYGMSAFRLSQELGIPYQEAAAFIQKYFQSYPKVKAWIEKTLEEGRTRGYVETLFGRRRYVPDLNARVKSVREAAERMAFNMPVQGTAADLMKLAMVRLFPQLREVGARMLLQVHDELLLEAPKERAEEVAALAKEVMEGVWPLAVPLEVEVGIGEDWLAAKG

SEQ ID NO: 2273 - DNA, 2529 bp, synthetic construct
  misc_feature 1..2529: note = Variant of DNA polymerase I from Thermus sp. strain 2.9
  source 1..2529: mol_type = other DNA
atgcaccatcatcatcatcatggcggtagcggcgtgttaccggtgttcgagcctaaaggtcgcgtgcttctggttgatggccatcatctcgcgtatcgtaacttctttgccctgaaaggattaaccaccagcagcggcgagccggtacagggtgtctacggctttgcaaagtcgctcctgaaagctctgaaagaagacggtgatgtggtgattgttgtctttgatgcgaaagcgccaagttttcgccacgaagcgtacgaagcttacaaagccgggcgtgctccaacgccggaagactttcctcgccaattggcgcttatgaaggaattagtggatttgcttggcctcgaacgcttggaagttcccggtttcgaggcagacgacgtattagcgactctcgcaaagaaagccgaacgtgagggctatgaagtccagatcttgacagcagatcgcgatcttttccagcttttatctccgcgcatctcggtgttacacccggaagggcatcgtatcaccccggaatggctctgggagaaatatggtttgcgtcccgaacaatgggtggattttcgcgccttagcaggcgatccgagcgacaatattccgggagttaaaggtatcggcgagaagacggcgctcaagctccttaaagaatgggggtcgttggagaacttgcttaagaatttagatcaggtcaaaccagagtcagtgcgtgagaagattcttgcacacctcgaagacctcaaattaagccgcgaattgtcccgtgtacgcaccgatttgccgctcgaagttgatttcggtcgccgccgcgaacctgactgggagggtcttaaagcgtttttagagcgtcttgaatttggttcgctcttgcatgaattcggccttttagaaagcccgttaccagccgaagaagcaccttggccaccgccccagggcgcgtttttaggttaccgtttgagtcgcccggaaccgatgtgggccgaattattggctcttgcagcgtctgcccagggacgtgtgtatcgcgcggaagaccctcatggtgcgctccgcggcctcttcgaagtccgtggactccttgccaaagacttagctgttgttgcattgcgcgaaggtcttgatttacctccgactgatgatccaatgcttcttgcgtacctcttggacccgtcaaacacgacgcccgaaggcgtagcccgtcgttacggcggcgagtggaccgaagatgcagcgaaacgcgcgttattggccgaacgtttgcacgccaatttattaggacgtttgcaaggggaggaacgtctcctctggctttacgaagaagtggagaaaccattgagtcgcgtgctcgcgcatatggaagctaccggtgtcaaattagacgtggcgtatttggaggctctcagccttgaagttgctgccgaaatgcgccgcttggaggaagaagtattccgtttagcaggccattcctttcgccttaattctcgcgatcagttagaacgtgtgttgttcgatgaacttggtctccctcctatcggcaagacagagaagaccggtaaacgtagcacttcagcggcggttttagaagctcttcgcgaagtccatcccattgtggacaagatcttgcagtaccgcgaactcgcgaaattgaaaggcacctatattgaccctcttccggcattagtccacccgaaaacgggacgcctccatacccgcttcaaccaaacagccacggcgaccggtcgtttgtcctcctctgatccaaaccttcagaatattccagtacgtaccccattgggccagaagatccgcaaggcgtttgtagctgaggagggttggcgtttagtggccctcgattatagccaaattgaattacgtgtccttgcccatctttctggcgatgagaacctcatccgcgtgtttcaggaaggcaaagacattcacactcaaacggcaagctggatgtttggattatcagctgaagcgatcgatcctttgatgcgtcgtgcagcgaagaccatcaatttcggtgttctctacggtatgagtgcctttcgtttgtcgcaggaattaggcattccctatgaagaagctgcggcgttcattcagaaatactttcaaagctatcccaaagttaaagcatggatcgagaagactctcgaagaaggccgcacacgtggttacgtagagaccttatttggacgtcgccgctatgttcccgatttaaacgctcgcgtgaaaggcaagcgtgaagccgccgaacgcatggcgttcaacatgcctgtacagggcacggcagctgacctcatgaaacttgcaatggtgcgcctttttccacaattgcgtgaagttggtgcccgcatgctcttgcaggtccacgatgaactcttgttagaagcgccaaaagagcgtgcggaagaggtggcagccctcgcgaaaacggttatggaaggcgtgtggcccttagcggtgcctcttgaagtcgaagttggtattggcgaggattggctggctgccaaaggataatga

SEQ ID NO: 2274 - protein, 841 aa, synthetic construct
  REGION 1..841: note = Variant of DNA polymerase I from Thermus sp. strain 2.9
MHHHHHHGGSGVLPVFEPKGRVLLVDGHHLAYRNFFALKGLTTSSGEPVQGVYGFAKSLLKALKEDGDVVIVVFDAKAPSFRHEAYEAYKAGRAPTPEDFPRQLALMKELVDLLGLERLEVPGFEADDVLATLAKKAEREGYEVQILTADRDLFQLLSPRISVLHPEGHRITPEWLWEKYGLRPEQWVDFRALAGDPSDNIPGVKGIGEKTALKLLKEWGSLENLLKNLDQVKPESVREKILAHLEDLKLSRELSRVRTDLPLEVDFGRRREPDWEGLKAFLERLEFGSLLHEFGLLESPLPAEEAPWPPPQGAFLGYRLSRPEPMWAELLALAASAQGRVYRAEDPHGALRGLFEVRGLLAKDLAVVALREGLDLPPTDDPMLLAYLLDPSNTTPEGVARRYGGEWTEDAAKRALLAERLHANLLGRLQGEERLLWLYEEVEKPLSRVLAHMEATGVKLDVAYLEALSLEVAAEMRRLEEEVFRLAGHSFRLNSRDQLERVLFDELGLPPIGKTEKTGKRSTSAAVLEALREVHPIVDKILQYRELAKLKGTYIDPLPALVHPKTGRLHTRFNQTATATGRLSSSDPNLQNIPVRTPLGQKIRKAFVAEEGWRLVALDYSQIELRVLAHLSGDENLIRVFQEGKDIHTQTASWMFGLSAEAIDPLMRRAAKTINFGVLYGMSAFRLSQELGIPYEEAAAFIQKYFQSYPKVKAWIEKTLEEGRTRGYVETLFGRRRYVPDLNARVKGKREAAERMAFNMPVQGTAADLMKLAMVRLFPQLREVGARMLLQVHDELLLEAPKERAEEVAALAKTVMEGVWPLAVPLEVEVGIGEDWLAAKG

SEQ ID NO: 2275 - DNA, 2529 bp, synthetic construct
  misc_feature 1..2529: note = Variant of DNA polymerase I from Thermus sp. strain 2.9
  source 1..2529: mol_type = other DNA
atgcaccatcatcatcatcatggcggtagcggcgtgttaccggtgttcgagcctaaaggtcgcgtgcttctggttgatggccatcatctcgcgtatcgtaacttctttgccctgaaaggattaaccaccagccgtggcgagccggtacagggtgtctacggctttgcaaagtcgctcctgaaagctctgaaagaagacggtgatgtggtgattgttgtctttgatgcgaaagcgccaagttttcgccacgaagcgtacgaagcttacaaagccgggcgtgctccaacgccggaagactttcctcgccaattggcgcttatgaaggaattagtggatttgcttggcctcgaacgcttggaagttcccggtttcgaggcagacgacgtattagcgactctcgcaaagaaagccgaacgtgagggctatgaagtccagatcttgacagcagatcgcgatcttttccagcttttatctccgcgcatctcggtgttacacccggaagggcatcgtatcaccccggaatggctctgggagaaatatggtttgcgtcccgaacaatgggtggattttcgcgccttagcaggcgatccgagcgacaatattccgggagttaaaggtatcggcgagaagacggcgctcaagctccttaaagaatgggggtcgttggagaacttgcttaagaatttagatcaggtcaaaccagagtcagtgcgtgagaagattcttgcacacctcgaagacctcaaattaagccgcgaattgtcccgtgtacgcaccgatttgccgctcgaagttgatttccgtcgccgccgcgaacctgactgggagggtcttaaagcgtttttagagcgtcttgaatttggttcgctcttggaggaattcggccttttagaaagcccgttaccagccgaagaagcaccttggccaccgcccgaaggcgcgtttttaggttaccgtttgagtcgcccggaaccgatgtgggccgaattattggctcttgcagcgtctgcccagggacgtgtgtatcgcgcggaagaccctcatggtgcgctccgcggcctcttcgaagtccgtggactccttgccaaagacttagctgttgttgcattgcgcgaaggtcttgatttacctccgactgatgatccaatgcttcttgcgtacctcttggacccgtcaaacacgacgcccgaaggcgtagcccgtcgttacggcggcgagtggaccgaagatgcagcgaaacgcgcgttattggccgaacgtttgcacgccaatttattaggacgtttgcatggcgaggaacgtctcctctggctttacgaagaagtggagaaaccattgagtcgcgtgctcgcgcatatggaagctaccggtgtcaaattagacgtggcgtatttggaggctctcagccttgaagttgctgccgaaatgcgccgcttggaggaagaagtattccgtttagcaggccattcctttcgccttaattctcgcgatcagttagaacgtgtgttgttcgatgaacttggtctccctcctatcggcaagacagagaagaccggtaaacgtagcacttcagcggcggttttagaagctcttcgcgaagtccatcccattgtggacaagatcttgcagtaccgcgaactcgcgaaattgaaaggcacctatattgaccctcttccggcattagtccacccgaaaacgggacgcctccatacccgcttcaaccaaacagccacggcgaccggtcgtttgtcctcctctgatccaaaccttcagaatattccagtacgtaccccattgggccagaagatccgccgcgcgtttgtagctgaggagggttggcgtttagtggccctcgattatagccaaattgaattacgtgtccttgcccatctttctggcgatgagaacctcatccgcgtgtttcaggaaggcaaagacattcacactcaaacggcaagctggatgtttggattatcagctgaagcgatcgatcctttgatgcgtcgtgcagcgaagaccatcaatttcggtgttctctacggtatgagtgcctttcgtttgtcgcaggaattaggcattccctatgaagaagctgcggcgttcattcagaaatactttcaaagctatcccaaagttaaagcatggatcgagaagactctcgaagaaggccgcacacgtggttacgtagagaccttatttggacgtcgccgctatgttcccgatttaaacgctcgcgtgaaatctgtccgtgaagccgccgaacgcatggcgttcaacatgcctgtacagggcacggcagctgacctcatgaaacttgcaatggtgcgcctttttccacaattgcgtgaagttggtgcccgcatgctcttgcaggtccacgatgaactcttgttagaagcgccaaaagagcgtgcggaagaggtggcagccctcgcgaaagaggttatggaaggcgtgtggcccttagcggtgcctcttgaagtcgaagttggtattggcgaggattggctggctgccaaaggataatga

SEQ ID NO: 2276 - protein, 841 aa, synthetic construct
  REGION 1..841: note = Variant of DNA polymerase I from Thermus sp. strain 2.9
MHHHHHHGGSGVLPVFEPKGRVLLVDGHHLAYRNFFALKGLTTSRGEPVQGVYGFAKSLLKALKEDGDVVIVVFDAKAPSFRHEAYEAYKAGRAPTPEDFPRQLALMKELVDLLGLERLEVPGFEADDVLATLAKKAEREGYEVQILTADRDLFQLLSPRISVLHPEGHRITPEWLWEKYGLRPEQWVDFRALAGDPSDNIPGVKGIGEKTALKLLKEWGSLENLLKNLDQVKPESVREKILAHLEDLKLSRELSRVRTDLPLEVDFRRRREPDWEGLKAFLERLEFGSLLEEFGLLESPLPAEEAPWPPPEGAFLGYRLSRPEPMWAELLALAASAQGRVYRAEDPHGALRGLFEVRGLLAKDLAVVALREGLDLPPTDDPMLLAYLLDPSNTTPEGVARRYGGEWTEDAAKRALLAERLHANLLGRLHGEERLLWLYEEVEKPLSRVLAHMEATGVKLDVAYLEALSLEVAAEMRRLEEEVFRLAGHSFRLNSRDQLERVLFDELGLPPIGKTEKTGKRSTSAAVLEALREVHPIVDKILQYRELAKLKGTYIDPLPALVHPKTGRLHTRFNQTATATGRLSSSDPNLQNIPVRTPLGQKIRRAFVAEEGWRLVALDYSQIELRVLAHLSGDENLIRVFQEGKDIHTQTASWMFGLSAEAIDPLMRRAAKTINFGVLYGMSAFRLSQELGIPYEEAAAFIQKYFQSYPKVKAWIEKTLEEGRTRGYVETLFGRRRYVPDLNARVKSVREAAERMAFNMPVQGTAADLMKLAMVRLFPQLREVGARMLLQVHDELLLEAPKERAEEVAALAKEVMEGVWPLAVPLEVEVGIGEDWLAAKG

SEQ ID NO: 2277 - DNA, 2529 bp, synthetic construct
  misc_feature 1..2529: note = Variant of DNA polymerase I from Thermus sp. strain 2.9
  source 1..2529: mol_type = other DNA
atgcaccatcatcatcatcatggcggtagcggcgtgttaccggtgttcgagcctaaaggtcgcgtgcttctggttgatggccatcatctcgcgtatcgtaacttctttgccctgaaaggattaaccaccagccgtggcgagccggtacagggtgtctacggctttgcaaagtcgctcctgaaagctctgaaagaagacggtgatgtggtgattgttgtctttgatgcgaaagcgccaagttttcgccacgaagcgtacgaagcttacaaagccgggcgtgctccaacgccggaagactttcctcgccaattggcgcttatgaaggaattagtggatttgcttggcctcgaacgcttggaagttcccggtttcgaggcagacgacgtattagcgactctcgcaaagaaagccgaacgtgagggctatgaagtccagatcttgacagcagatcgcgatcttttccagcttttatctccgcgcatctcggtgttacacccggaagggcatcgtatcaccccggaatggctctgggagaaatatggtttgcgtcccgaacaatgggtggattttcgcgccttagcaggcgatccgagcgacaatattccgggagttaaaggtatcggcgagaagacggcgctcaagctccttaaagaatgggggtcgttggagaacttgcttaagaatttagatcaggtcaaaccagagtcagtgcgtgagaagattcttgcacacctcgaagacctcaaattaagccgcgaattgtcccgtgtacgcaccgatttgccgctcgaagttgatttccgtcgccgccgcgaacctgactgggagggtcttaaagcgtttttagagcgtcttgaatttggttcgctcttgcatgaattcggccttttagaaagcccgttaccagccgaagaagcaccttggccaccgcccgaaggcgcgtttttaggttaccgtttgagtcgcccggaaccgatgtgggccgaattattggctcttgcagcgtctgcccagggacgtgtgtatcgcgcggaagaccctcatggtgcgctccgcggcctcttcgaagtccgtggactccttgccaaagacttagctgttgttgcattgcgcgaaggtcttgatttacctccgactgatgatccaatgcttcttgcgtacctcttggacccgtcaaacacgacgcccgaaggcgtagcccgtcgttacggcggcgagtggaccgaagatgcagcgaaacgcgcgttattggccgaacgtttgcacgccaatttattaggacgtttgcaaggcgaggaacgtctcctctggctttacgaagaagtggagaaaccattgagtcgcgtgctcgcgcatatggaagctaccggtgtcaaattagacgtggcgtatttggaggctctcagccttgaagttgctgccgaaatgcgccgcttggaggaagaagtattccgtttagcaggccattcctttcgccttaattctcgcgatcagttagaacgtgtgttgttcgatgaacttggtctccgtcctatcggcaagacagagaagaccggtaaacgtagcacttcagcggcggttttagaagctcttcgcgaagtccatcccattgtggacaagatcttgcagtaccgcgaactcgcgaaattgaaaggcacctatattgaccctcttccggcattagtccacccgaaaacgggacgcctccatacccgcttcaaccaaacagccacggcgaccggtcgtttgtcctcctctgatccaaaccttcagaatattccagtacgtaccccattgggccagaagatccgccgcgcgtttgtagctgaggagggttggcgtttagtggccctcgattatagccaaattgaattacgtgtccttgcccatctttctggcgatgagaacctcatccgcgtgtttcaggaaggcaaagacattcacactcaaacggcaagctggatgtttggattatcagctgaagcgatcgatcctttgatgcgtcgtgcagcgaagaccatcaatttcggtgttctctacggtatgagtgcctttcgtttgtcgcaggaattaggcattccctatgaagaagctgcggcgttcattcagaaatactttcaaagctatcccaaagttaaagcatggatcgagaagactctcgaagaaggccgcacacgtggttacgtagagaccttatttggacgtcgccgctatgttcccgatttaaacgctcgcgtgaaatctgtccgtgaagccgccgaacgcatggcgttcaacatgcctgtacagggcacggcagctgacctcatgaaacttgcaatggtgcgcctttttccacaattgcgtgaagttggtgcccgcatgctcttgcaggtccacgatgaactcttgttagaagcgccaaaagagcgtgcggaagaggtggcagccctcgcgaaagaggttatggaaggcgtgtggcccttagcggtgcctcttgaagtcgaagttggtattggcgaggattggctggctgccaaaggataatga

SEQ ID NO: 2278 - protein, 841 aa, synthetic construct
  REGION 1..841: note = Variant of DNA polymerase I from Thermus sp. strain 2.9
MHHHHHHGGSGVLPVFEPKGRVLLVDGHHLAYRNFFALKGLTTSRGEPVQGVYGFAKSLLKALKEDGDVVIVVFDAKAPSFRHEAYEAYKAGRAPTPEDFPRQLALMKELVDLLGLERLEVPGFEADDVLATLAKKAEREGYEVQILTADRDLFQLLSPRISVLHPEGHRITPEWLWEKYGLRPEQWVDFRALAGDPSDNIPGVKGIGEKTALKLLKEWGSLENLLKNLDQVKPESVREKILAHLEDLKLSRELSRVRTDLPLEVDFRRRREPDWEGLKAFLERLEFGSLLHEFGLLESPLPAEEAPWPPPEGAFLGYRLSRPEPMWAELLALAASAQGRVYRAEDPHGALRGLFEVRGLLAKDLAVVALREGLDLPPTDDPMLLAYLLDPSNTTPEGVARRYGGEWTEDAAKRALLAERLHANLLGRLQGEERLLWLYEEVEKPLSRVLAHMEATGVKLDVAYLEALSLEVAAEMRRLEEEVFRLAGHSFRLNSRDQLERVLFDELGLRPIGKTEKTGKRSTSAAVLEALREVHPIVDKILQYRELAKLKGTYIDPLPALVHPKTGRLHTRFNQTATATGRLSSSDPNLQNIPVRTPLGQKIRRAFVAEEGWRLVALDYSQIELRVLAHLSGDENLIRVFQEGKDIHTQTASWMFGLSAEAIDPLMRRAAKTINFGVLYGMSAFRLSQELGIPYEEAAAFIQKYFQSYPKVKAWIEKTLEEGRTRGYVETLFGRRRYVPDLNARVKSVREAAERMAFNMPVQGTAADLMKLAMVRLFPQLREVGARMLLQVHDELLLEAPKERAEEVAALAKEVMEGVWPLAVPLEVEVGIGEDWLAAKG

SEQ ID NO: 2279 - DNA, 2529 bp, synthetic construct
  misc_feature 1..2529: note = Variant of DNA polymerase I from Thermus sp. strain 2.9
  source 1..2529: mol_type = other DNA
atgcaccatcatcatcatcatggcggtagcggcgtgttaccggtgttcgagcctaaaggtcgcgtgcttctggttgatggccatcatctcgcgtatcgtaacttctttgccctgaaaggattaaccaccagcagcggcgagccggtacagggtgtctacggctttgcaaagtcgctcctgaaagctctgaaagaagacggtgatgtggtgattgttgtctttgatgcgaaagcgccaagttttcgccacgaagcgtacgaagcttacaaagccgggcgtgctccaacgccggaagactttcctcgccaattggcgcttatgaaggaattagtggatttgcttggcctcgaacgcttggaagttcccggtttcgaggcagacgacgtattagcgactctcgcaaagaaagccgaacgtgagggctatgaagtccagatcttgacagcagatcgcgatcttttccagcttttatctccgcgcatctcggtgttacacccggaagggcatcgtatcaccccggaatggctctgggagaaatatggtttgcgtcccgaacaatgggtggattttcgcgccttagcaggcgatccgagcgacaatattccgggagttaaaggtatcggcgagaagacggcgctcaagctccttaaagaatgggggtcgttggagaacttgcttaagaatttagatcaggtcaaaccagagtcagtgcgtgagaagattcttgcacacctcgaagacctcaaattaagccgcgaattgtcccgtgtacgcaccgatttgccgctcgaagttgatttccgtcgccgccgcgaacctgactgggagggtcttaaagcgtttttagagcgtcttgaatttggttcgctcttgcatgaattcggccttttagaaagcccgttaccagccgaagaagcaccttggccaccgcccgagggcgcgtttttaggttaccgtttgagtcgcccggaaccgatgtgggccgaattattggctcttgcagcgtctgcccagggaacggtgtatcgcgcggaagaccctcatggtgcgctccgcggcctcttcgaagtccgtggactccttgccaaagacttagctgttgttgcattgcgcgaaggtcttgatttacctccgactgatgatccaatgcttcttgcgtacctcttggacccgtcaaacacgacgcccgaaggcgtagcccgtcgttacggcggcgagtggaccgaagatgcagcgaaacgcgcgttattggccgaacgtttgcacgccaatttattaggacgtttgcaaggcgaggaacgtctcctctggctttacgaagaagtggagaaaccattgagtcgcgtgctcgcgcatatggaagctaccggtgtcaaattagacgtggcgtatttggaggctctcagccttgaagttgctgccgaaatgcgccgcttggaggaagaagtattccgtttagcaggccattcctttcgccttaattctcgcgatcagttagaacgtgtgttgttcgatgaacttggtctccctcctatcggcaagacagagaagaccggtaaacgtagcacttcagcggcggttttagaagctcttcgcgaagtccatcccattgtggacaagatcttgcagtaccgcgaactcgcgaaattgaaaggcacctatattgaccgtcttccggcattagtccacccgaaaacgggacgcctccatacccgcttcaaccaaacagccacggcgaccggtcgtttgtcctcctctgatccaaaccttcagaatattccagtacgtaccccattgggccagaagatccgccgcgcgtttgtagctgaggagggttggcgtttagtggccctcgattatagccaaattgaattacgtgtccttgcccatctttctggcgatgagaacctcatccgcgtgtttcaggaaggcaaagacattcacactcaaacggcaagctggatgtttggattatcagctgaagcgatcgatcctttgatgcgtcgtgcagcgaagaccatcaatttcggtgttctctacggtatgagtgcctttcgtttgtcgcaggaattaggcattccctatgaagaagctgcggcgttcattcagaaatactttcaaagctatcccaaagttaaagcatggatcgagaagactctcgaagaaggccgcacacgtggttacgtagagaccttatttggacgtcgccgctatgttcccgatttaaacgctcgcgtgaaatctgtccgtgaagccgccgaacgcatggcgttcaacatgcctgtacagggcacggcagctgacctcatgaaacttgcaatggtgcgcctttttccacaattgcgtgaagttggtgcccgcatgctcttgcaggtccacgatgaactcttgttagaagcgccaaaagagcgtgcggaagaggtggcagccctcgcgaaagaggttatggaaggcgtgtggcccttagcggtgcctcttgaagtcgaagttggtattggcgaggattggctggctgccaaaggataatga

SEQ ID NO: 2280 - protein, 841 aa, synthetic construct
  REGION 1..841: note = Variant of DNA polymerase I from Thermus sp. strain 2.9
MHHHHHHGGSGVLPVFEPKGRVLLVDGHHLAYRNFFALKGLTTSSGEPVQGVYGFAKSLLKALKEDGDVVIVVFDAKAPSFRHEAYEAYKAGRAPTPEDFPRQLALMKELVDLLGLERLEVPGFEADDVLATLAKKAEREGYEVQILTADRDLFQLLSPRISVLHPEGHRITPEWLWEKYGLRPEQWVDFRALAGDPSDNIPGVKGIGEKTALKLLKEWGSLENLLKNLDQVKPESVREKILAHLEDLKLSRELSRVRTDLPLEVDFRRRREPDWEGLKAFLERLEFGSLLHEFGLLESPLPAEEAPWPPPEGAFLGYRLSRPEPMWAELLALAASAQGTVYRAEDPHGALRGLFEVRGLLAKDLAVVALREGLDLPPTDDPMLLAYLLDPSNTTPEGVARRYGGEWTEDAAKRALLAERLHANLLGRLQGEERLLWLYEEVEKPLSRVLAHMEATGVKLDVAYLEALSLEVAAEMRRLEEEVFRLAGHSFRLNSRDQLERVLFDELGLPPIGKTEKTGKRSTSAAVLEALREVHPIVDKILQYRELAKLKGTYIDRLPALVHPKTGRLHTRFNQTATATGRLSSSDPNLQNIPVRTPLGQKIRRAFVAEEGWRLVALDYSQIELRVLAHLSGDENLIRVFQEGKDIHTQTASWMFGLSAEAIDPLMRRAAKTINFGVLYGMSAFRLSQELGIPYEEAAAFIQKYFQSYPKVKAWIEKTLEEGRTRGYVETLFGRRRYVPDLNARVKSVREAAERMAFNMPVQGTAADLMKLAMVRLFPQLREVGARMLLQVHDELLLEAPKERAEEVAALAKEVMEGVWPLAVPLEVEVGIGEDWLAAKG

SEQ ID NO: 2281 - DNA, 2529 bp, synthetic construct
  misc_feature 1..2529: note = Variant of DNA polymerase I from Thermus sp. strain 2.9
  source 1..2529: mol_type = other DNA
atgcaccatcatcatcatcatggcggtagcggcgtgttaccggtgttcgagcctaaaggtcgcgtgcttctggttgatggccatcatctcgcgtatcgtaacttctttgccctgaaaggattaaccaccagcagcggcgagccggtacagggtgtctacggctttgcaaagtcgctcctgaaagctctgaaagaagacggtgatgtggtgattgttgtctttgatgcgaaagcgccaagttttcgccacgaagcgtacgaagcttacaaagccgggcgtgctccaacgccggaagactttcctcgccaattggcgcttatgaaggaattagtggatttgcttggcctcgaacgcttggaagttcccggtttcgaggcagacgacgtattagcgactctcgcaaagaaagccgaacgtgagggctatgaagtccagatcttgacagcagatcgcgatcttttccagcttttatctccgcgcatctcggtgttacacccggaagggcatcgtatcaccccggaatggctctgggagaaatatggtttgcgtcccgaacaatgggtggattttcgcgccttagcaggcgatccgagcgacaatattccgggagttaaaggtatcggcgagaagacggcgctcaagctccttaaagaatgggggtcgttggagaacttgcttaagaatttagatcaggtcaaaccagagtcagtgcgtgagaagattcttgcacacctcgaagacctcaaattaagccgcgaattgtcccgtgtacgcaccgatttgccgctcgaagttgatttccagcgccgccgcgaacctgactgggagggtcttaaagcgtttttagagcgtcttgaatttggttcgctcttgcatgaattcggccttttagaaagcccgttaccagccgaagaagcaccttggccaccgcccgagggcgcgtttttaggttaccgtttgagtcgcccggaaccgatgtgggccgaattattggctcttgcagcgtctgcccagggacgcgtgtatcgcgcggaagaccctcatggtgcgctccgcggcctcttcgaagtccgtggactccttgccaaagacttagctgttgttgcattgcgcgaaggtcttgatttacctccgactgatgatccaatgcttcttgcgtacctcttggacccgtcaaacacgacgcccgaaggcgtagcccgtcgttacggcggcgagtggaccgaagatgcagcgaaacgcgcgttattggccgaacgtttgcacgccaatttattaggacgtttgcaaggggaggaacgtctcctctggctttacgaagaagtggagaaaccattgagtcgcgtgctcgcgcatatggaagctaccggtgtcaaattagacgtggcgtatttggaggctctcagccttgaagttgctgccgaaatgcgccgcttggaggaagaagtattccgtttagcaggccgctcctttcgccttaattctcgcgatcagttagaacgtgtgttgttcgatgaacttggtctccctcctatcggcaagacagagaagaccggtaaacgtagcacttcagcggcggttttagaagctcttcgcgaagtccatcccattgtggacaagatcttgcagtaccgcgaactcgcgaaattgaaaggcacctatattgaccgtcttccggcattagtccacccgaaaacgggacgcctccatacccgcttcaaccaaacagccacggcgaccggtcgtttgtcctcctctgatccaaaccttcagaatattccagtacgtaccccattgggccagaagatccgccgtgcgtttgtagctgaggagggttggcgtttagtggccctcgattatagccaaattgaattacgtgtccttgcccatctttctggcgatgagaacctcatccgcgtgtttcaggaaggcaaagacattcacactcaaacggcaagctggatgtttggattaagtgctgaagcgatcgatcctttgatgcgtcgtgcagcgaagaccatcaatttcggtgttctctacggtatgagtgcctttcgtttgtcgcaggaattaggcattccctatgaagaagctgcggcgttcattcagaaatactttcaaagctatcccaaagttaaagcatggatcgagaagactctcgaagaaggccgcacacgtggttacgtagagaccttatttggacgtcgccgctatgttcccgatttaaacgctcgcgtgaaaggcaagcgtgaagccgccgaacgcatggcgttcaacatgcctgtacagggcacggcagctgacctcatgaaacttgcaatggtgcgcctttttccacaattgcgtgaagttggtgcccgcatgctcttgcaggtccacgatgaactcttgttagaagcgccaaaagagcgtgcggaagaggtggcagccctcgcgaaagaagttatggaaggcgtgtggcccttagcggtgcctcttgaagtcgaagttggtattggcgaggattggctggctgccaaaggataatga

SEQ ID NO: 2282 - protein, 841 aa, synthetic construct
  REGION 1..841: note = Variant of DNA polymerase I from Thermus sp. strain 2.9
MHHHHHHGGSGVLPVFEPKGRVLLVDGHHLAYRNFFALKGLTTSSGEPVQGVYGFAKSLLKALKEDGDVVIVVFDAKAPSFRHEAYEAYKAGRAPTPEDFPRQLALMKELVDLLGLERLEVPGFEADDVLATLAKKAEREGYEVQILTADRDLFQLLSPRISVLHPEGHRITPEWLWEKYGLRPEQWVDFRALAGDPSDNIPGVKGIGEKTALKLLKEWGSLENLLKNLDQVKPESVREKILAHLEDLKLSRELSRVRTDLPLEVDFQRRREPDWEGLKAFLERLEFGSLLHEFGLLESPLPAEEAPWPPPEGAFLGYRLSRPEPMWAELLALAASAQGRVYRAEDPHGALRGLFEVRGLLAKDLAVVALREGLDLPPTDDPMLLAYLLDPSNTTPEGVARRYGGEWTEDAAKRALLAERLHANLLGRLQGEERLLWLYEEVEKPLSRVLAHMEATGVKLDVAYLEALSLEVAAEMRRLEEEVFRLAGRSFRLNSRDQLERVLFDELGLPPIGKTEKTGKRSTSAAVLEALREVHPIVDKILQYRELAKLKGTYIDRLPALVHPKTGRLHTRFNQTATATGRLSSSDPNLQNIPVRTPLGQKIRRAFVAEEGWRLVALDYSQIELRVLAHLSGDENLIRVFQEGKDIHTQTASWMFGLSAEAIDPLMRRAAKTINFGVLYGMSAFRLSQELGIPYEEAAAFIQKYFQSYPKVKAWIEKTLEEGRTRGYVETLFGRRRYVPDLNARVKGKREAAERMAFNMPVQGTAADLMKLAMVRLFPQLREVGARMLLQVHDELLLEAPKERAEEVAALAKEVMEGVWPLAVPLEVEVGIGEDWLAAKG

SEQ ID NO: 2283 - DNA, 2529 bp, synthetic construct
  misc_feature 1..2529: note = Variant of DNA polymerase I from Thermus sp. strain 2.9
  source 1..2529: mol_type = other DNA
atgcaccatcatcatcatcatggcggtagcggcgtgttaccggtgttcgagcctaaaggtcgcgtgcttctggttgatggccatcatctcgcgtatcgtaacttctttgccctgaaaggattaaccaccagccgtggcgagccggtacagggtgtctacggctttgcaaagtcgctcctgaaagctctgaaagaagacggtgatgtggtgattgttgtctttgatgcgaaagcgccaagttttcgccacgaagcgtacgaagcttacaaagccgggcgtgctccaacgccggaagactttcctcgccaattggcgcttatgaaggaattagtggatttgcttggcctcgaacgcttggaagttcccggtttcgaggcagacgacgtattagcgactctcgcaaagaaagccgaacgtgagggctatgaagtccagatcttgacagcagatcgcgatcttttccagcttttatctccgcgcatctcggtgttacacccggaagggcatcgtatcaccccggaatggctctgggagaaatatggtttgcgtcccgaacaatgggtggattttcgcgccttagcaggcgatccgagcgacaatattccgggagttaaaggtatcggcgagaagacggcgctcaagctccttaaagaatgggggtcgttggagaacttgcttaagaatttagatcaggtcaaaccagagtcagtgcgtgagaagattcttgcacacctcgaagacctcaaattaagccgcgaattgtcccgtgtacgcaccgatttgccgctcgaagttgatttccgtcgccgccgcgaacctgactgggagggtcttaaagcgtttttagagcgtcttgaatttggttcgctcttgcatgaattcggccttttagaaagcccgttaccagccgaagaagcaccttggccaccgcccgaaggcgcgtttttaggttaccgtttgagtcgcccggaaccgatgtgggccgaattattggctcttgcagcgtctgcccagggacgtgtgtatcgcgcggaagaccctcatggtgcgctccgcggcctcttcgaagtccgtggactccttgccaaagacttagctgttgttgcattgcgcgaaggtcttgatttacctccgactgatgatccaatgcttcttgcgtacctcttggacccgtcaaacacgacgcccgaaggcgtagcccgtcgttacggcggcgagtggaccgaagatgcagcgaaacgcgcgttattggccgaacgtttgcacgccaatttattaggacgtttgcaaggcgaggaacgtctcctctggctttacgaagaagtggagaaaccattgagtcgcgtgctcgcgcatatggaagctaccggtgtcaaattagacgtggcgtatttggaggctctcagccttgaagttgctgccgaaatgcgccgcttggaggaagaagtattccgtttagcaggccattcctttcgccttaattctcgcgatcagttagaacgtgtgttgttcgatgaacttggtctccctcctatcggcaagacagagaagaccggtaaacgtagcacttcagcggcggttttagaagctcttcgcgaagtccatcccattgtggacaagatcttgcagtaccgcgaactcgcgaaattgaaaggcacctatattgaccctcttccggcattagtccacccgaaaacgggacgcctccatacccgcttcaaccaaacagccacggcgaccggtcgtttgtcctcctctgatccaaaccttcagaatattccagtacgtaccccattgggccagaagatccgccgcgcgtttgtagctgaggagggttggcgtttagtggccctcgattataggcaaattgaattacgtgtccttgcccatctttctggcgatgagaacctcatccgcgtgtttcaggaaggcaaagacattcacactcaaacggcaagctggatgtttggattatcagctgaagcgatcgatcctttgatgcgtcgtgcagcgaagaccatcaatttcggtgttctctacggtatgagtgcctttcgtttgtcgcaggaattaggcattccctatgaagaagctgcggcgttcattcagaaatactttcaaagctatcccaaagttaaagcatggatcgagaagactctcgaagaaggccgcacacgtggttacgtagagaccttatttggacgtcgccgctatgttcccgatttaaacgctcgcgtgaaatctgtccgtgaagccgccgaacgcatggcgttcaacatgcctgtacagggcacggcagctgacctcatgaaacttgcaatggtgcgcctttttccacaattgcgtgaagttggtgcccgcatgctcttgcaggtccacgatgaactcttgttagaagcgccaaaagagcgtgcggaagaggtggcagccctcgcgaaagaggttatggaaggcgtgtggcccttagcggtgcctcttgaagtcgaagttggtattggcgaggattggctggctgccaaaggataatga

SEQ ID NO: 2284 - protein, 841 aa, synthetic construct
  REGION 1..841: note = Variant of DNA polymerase I from Thermus sp. strain 2.9
MHHHHHHGGSGVLPVFEPKGRVLLVDGHHLAYRNFFALKGLTTSRGEPVQGVYGFAKSLLKALKEDGDVVIVVFDAKAPSFRHEAYEAYKAGRAPTPEDFPRQLALMKELVDLLGLERLEVPGFEADDVLATLAKKAEREGYEVQILTADRDLFQLLSPRISVLHPEGHRITPEWLWEKYGLRPEQWVDFRALAGDPSDNIPGVKGIGEKTALKLLKEWGSLENLLKNLDQVKPESVREKILAHLEDLKLSRELSRVRTDLPLEVDFRRRREPDWEGLKAFLERLEFGSLLHEFGLLESPLPAEEAPWPPPEGAFLGYRLSRPEPMWAELLALAASAQGRVYRAEDPHGALRGLFEVRGLLAKDLAVVALREGLDLPPTDDPMLLAYLLDPSNTTPEGVARRYGGEWTEDAAKRALLAERLHANLLGRLQGEERLLWLYEEVEKPLSRVLAHMEATGVKLDVAYLEALSLEVAAEMRRLEEEVFRLAGHSFRLNSRDQLERVLFDELGLPPIGKTEKTGKRSTSAAVLEALREVHPIVDKILQYRELAKLKGTYIDPLPALVHPKTGRLHTRFNQTATATGRLSSSDPNLQNIPVRTPLGQKIRRAFVAEEGWRLVALDYRQIELRVLAHLSGDENLIRVFQEGKDIHTQTASWMFGLSAEAIDPLMRRAAKTINFGVLYGMSAFRLSQELGIPYEEAAAFIQKYFQSYPKVKAWIEKTLEEGRTRGYVETLFGRRRYVPDLNARVKSVREAAERMAFNMPVQGTAADLMKLAMVRLFPQLREVGARMLLQVHDELLLEAPKERAEEVAALAKEVMEGVWPLAVPLEVEVGIGEDWLAAKG

SEQ ID NO: 2285 - DNA, 2529 bp, synthetic construct
  misc_feature 1..2529: note = Variant of DNA polymerase I from Thermus sp. strain 2.9
  source 1..2529: mol_type = other DNA
atgcaccatcatcatcatcatggcggtagcggcgtgttaccggtgttcgagcctaaaggtcgcgtgcttctggttgatggccatcatctcgcgtatcgtaacttctttgccctgaaaggattaaccaccagcagcggcgagccggtacagggtgtctacggctttgcaaagtcgctcctgaaagctctgaaagaagacggtgatgtggtgattgttgtctttgatgcgaaagcgccaagttttcgccacgaagcgtacgaagcttacaaagccgggcgtgctccaacgccggaagactttcctcgccaattggcgcttatgaaggaattagtggatttgcttggcctcgaacgcttggaagttcccggtttcgaggcagacgacgtattagcgactctcgcaaagaaagccgaacgtgagggctatgaagtccagatcttgacagcagatcgcgatcttttccagcttttatctccgcgcatctcggtgttacacccggaagggcatcgtatcaccccggaatggctctgggagaaatatggtttgcgtcccgaacaatgggtggattttcgcgccttagcaggcgatccgagcgacaatattccgggagttaaaggtatcggcgagaagacggcgctcaagctccttaaagaatgggggtcgttggagaacttgcttaagaatttagatcaggtcaaaccagagtcagtgcgtgagaagattcttaatcacctcgaagacctcaaattaagccgcgaattgtcccgtgtacgcaccgatttgccgctcgaagttgatttccgtcgccgccgcgaacctgactgggagggtcttaaagcgtttttagagcgtcttgaatttggttcgctcttgcatgaattcggccttttagaaagcccgttaccagccgaagaagcaccttggccaccgccccagggcgcgtttttaggttaccgtttgagtcgcccggaaccgatgtgggccgaattagccgctcttgcagcgtctgcccagggacgtgtgtatcgcgcggaagaccctcatggtgcgctccgcggcctcttcgaagtccgtggactccttgccaaagacttagctgttgttgcattgcgcgaaggtcttgatttacctccgactgatgatccaatgcttcttgcgtacctcttggacccgtcaaacacgacgcccgaaggcgtagcccgtcgttacggcggcgagtggaccgaagatgcagcgaaacgcgcgttattggccgaacgtttgcacgcgaatttattaggacgtttgcaaggcgaggaacgtctcctctggctttacgaagaagtggagaaaccattgagtcgcgtgctcgcgcatatggaagctaccggtgtcaaattagacgtggcgtatttggaggctctcagccttgaagttgctgccgaaatgcgccgcttggaggaagaagtattccgtttagcaggccattcctttcgccttaattctcgcgatcagttagaacgtgtgttgttcgatgaacttggtctccctcctatcggcaagacagagaagaccggtaaacgtagcacttcagcggcggttttagaagctcttcgcgaagtccatcccattgtggacaagatcttgcagtaccgcgaactcgcgaaattgaaaggcacctatattgaccgtcttccggcattagtccacccgaaaacgggacgcctccatacccgcttcaaccaaacagccacggcgaccggtcgtttgtcctcctctgatccaaaccttcagaatattccagtacgtaccccattgggccagaagatccgccgcgcgtttgtagctgaggagggttggcgtttagtggccctcgattatagccaaattgaattacgtgtccttgcccatctttctggcgatgagaacctcatccgcgtgtttcaggaaggcaaagacattcacactcaaacggcaagctggatgtttggattatcagctgaagcgatcgatcctttgatgcgtcgtgcagcgaagaccatcaatttcggtgttctctacggtatgagtgcctttcgtttgtcgcaggaattaggcattccctatgaagaagctgcggcgttcattcagaaatactttcaaagctatcccaaagttaaagcatggatcgagaagactctcgaagaaggccgcacacgtggttacgtagagaccttatttggacgtcgccgctatgttcccgatttaaacgctcgcgtgaaatctgtccgtgaagccgccgaacgcatggcgttcaacatgcctgtacagggcacggcagctgacctcatgaaacttgcaatggtgcgcctttttccacaattgcgtgaagttggtgcccgcatgctcttgcaggtccacgatgaactcttgttagaagcgccaaaagagcgtgcggaagaggtggcagccctcgcgaaagaagttatggaaggcgtgtggcccttagcggtgcctcttgaagtcgaagttggtattggcgaggattggctggctgccaaaggataatga

SEQ ID NO: 2286 - protein, 841 aa, synthetic construct
  REGION 1..841: note = Variant of DNA polymerase I from Thermus sp. strain 2.9
MHHHHHHGGSGVLPVFEPKGRVLLVDGHHLAYRNFFALKGLTTSSGEPVQGVYGFAKSLLKALKEDGDVVIVVFDAKAPSFRHEAYEAYKAGRAPTPEDFPRQLALMKELVDLLGLERLEVPGFEADDVLATLAKKAEREGYEVQILTADRDLFQLLSPRISVLHPEGHRITPEWLWEKYGLRPEQWVDFRALAGDPSDNIPGVKGIGEKTALKLLKEWGSLENLLKNLDQVKPESVREKILNHLEDLKLSRELSRVRTDLPLEVDFRRRREPDWEGLKAFLERLEFGSLLHEFGLLESPLPAEEAPWPPPQGAFLGYRLSRPEPMWAELAALAASAQGRVYRAEDPHGALRGLFEVRGLLAKDLAVVALREGLDLPPTDDPMLLAYLLDPSNTTPEGVARRYGGEWTEDAAKRALLAERLHANLLGRLQGEERLLWLYEEVEKPLSRVLAHMEATGVKLDVAYLEALSLEVAAEMRRLEEEVFRLAGHSFRLNSRDQLERVLFDELGLPPIGKTEKTGKRSTSAAVLEALREVHPIVDKILQYRELAKLKGTYIDRLPALVHPKTGRLHTRFNQTATATGRLSSSDPNLQNIPVRTPLGQKIRRAFVAEEGWRLVALDYSQIELRVLAHLSGDENLIRVFQEGKDIHTQTASWMFGLSAEAIDPLMRRAAKTINFGVLYGMSAFRLSQELGIPYEEAAAFIQKYFQSYPKVKAWIEKTLEEGRTRGYVETLFGRRRYVPDLNARVKSVREAAERMAFNMPVQGTAADLMKLAMVRLFPQLREVGARMLLQVHDELLLEAPKERAEEVAALAKEVMEGVWPLAVPLEVEVGIGEDWLAAKG

SEQ ID NO: 2287 - DNA, 2529 bp, synthetic construct
  misc_feature 1..2529: note = Variant of DNA polymerase I from Thermus sp. strain 2.9
  source 1..2529: mol_type = other DNA
atgcaccatcatcatcatcatggcggtagcggcgtgttaccggtgttcgagcctaaaggtcgcgtgcttctggttgatggccatcatctcgcgtatcgtaacttctttgccctgaaaggattaaccaccagccgtggcgagccggtacagggtgtctacggctttgcaaagtcgctcctgaaagctctgaaagaagacggtgatgtggtgattgttgtctttgatgcgaaagcgccaagttttcgccacgaagcgtacgaagcttacaaagccgggcgtgctccaacgccggaagactttcctcgccaattggcgcttatgaaggaattagtggatttgcttggcctcgaacgcttggaagttcccggtttcgaggcagacgacgtattagcgactctcgcaaagaaagccgaacgtgagggctatgaagtccagatcttgacagcagatcgcgatcttttccagcttttatctccgcgcatctcggtgttacacccggaagggcatcgtatcaccccggaatggctctgggagaaatatggtttgcgtcccgaacaatgggtggattttcgcgccttagcaggcgatccgagcgacaatattccgggagttaaaggtatcggcgagaagacggcgctcaagctccttaaagaatgggggtcgttggagaacttgcttaagaatttagatcaggtcaaaccagagtcagtgcgtgagaagattcttgcacacctcgaagacctcaaattaagccgcgaattgtcccgtgtacgcaccgatttgccgctcgaagttgatttccgtcgccgccgcgaacctgactgggagggtcttaaagcgtttttagagcgtcttgaatttggttcgctcttgcatgaattcggccttttagaaagcccgttagttgccgaagaagcaccttggccaccgcccgaaggcgcgtttttaggttaccgtttgagtcgcccggaaccgatgtgggccgaattattggctcttgcagcgtctgcccagggacgtgtgtatcgcgcggaagaccctcatggtgcgctccgcggcctcttcgaagtccgtggactccttgccaaagacttagctgttgttgcattgcgcgaaggtcttgatttacctccgactgatgatccaatgcttcttgcgtacctcttggacccgtcaaacacgacgcccgaaggcgtagcccgtcgttacggcggcgagtggaccgaagatgcagcgaaacgcgcgttattggccgaacgtttgcacgccaatttattaggacgtttgcaaggcgaggaacgtctcctctggctttacgaagaagtggagaaaccattgagtcgcgtgctcgcgcatatggaagctaccggtgtcaaattagacgtggcgtatttggaggctctcagccttgaagttgctgccgaaatgcgccgcttggaggaagaagtattccgtttagcaggccattcctttcgccttgtatctcgcgatcagttagaacgtgtgttgttcgatgaacttggtctccctcctatcggcaagacagagaagaccggtaaacgtagcacttcacgtgcggttttagaagctcttcgcgaagtccatcccattgtggacaagatcttgcagtaccgcgaactcgcgaaattgaaaggcacctatattgaccctcttccggcattagtccacccgaaaacgggacgcctccatacccgcttcaaccaaacagccacggcgaccggtcgtttgtcctcctctgatccaaaccttcagaatattccagtacgtaccccattgggccagaagatccgccgcgcgtttgtagctgaggagggttggcgtttagtggccctcgattatagccaaattgaattacgtgtccttgcccatctttctggcgatgagaacctcatccgcgtgtttcaggaaggcaaagacattcacactcaaacggcaagctggatgtttggattatcagctgaagcgatcgatcctttgatgcgtcgtgcagcgaagaccatcaatttcggtgttctctacggtatgagtgcctttcgtttgtcgcaggaattaggcattccctatgaagaagctgcggcgttcattcagaaatactttcaaagctatcccaaagttaaagcatggatcgagaagactctcgaggaaggccgcacacgtggttacgtagagaccttatttggacgtcgccgctatgttcccgatttaaacgctcgcgtgaaatctgtccgtgaagccgccgaacgcatggcgttcaacatgcctgtacagggcacggcagctgacctcatgaaacttgcaatggtgcgcctttttccacaattgcgtgaagttggtgcccgcatgctcttgcaggtccacgatgaactcttgttagaagcgccaaaagagcgtgcggaagaggtggcagccctcgcgaaagaggttatggaaggcgtgtggcccttagcggtgcctcttgaagtcgaagttggtattggcgaggattggctggctgccaaaggataatga

SEQ ID NO: 2288 - protein, 841 aa, synthetic construct
  REGION 1..841: note = Variant of DNA polymerase I from Thermus sp. strain 2.9
MHHHHHHGGSGVLPVFEPKGRVLLVDGHHLAYRNFFALKGLTTSRGEPVQGVYGFAKSLLKALKEDGDVVIVVFDAKAPSFRHEAYEAYKAGRAPTPEDFPRQLALMKELVDLLGLERLEVPGFEADDVLATLAKKAEREGYEVQILTADRDLFQLLSPRISVLHPEGHRITPEWLWEKYGLRPEQWVDFRALAGDPSDNIPGVKGIGEKTALKLLKEWGSLENLLKNLDQVKPESVREKILAHLEDLKLSRELSRVRTDLPLEVDFRRRREPDWEGLKAFLERLEFGSLLHEFGLLESPLVAEEAPWPPPEGAFLGYRLSRPEPMWAELLALAASAQGRVYRAEDPHGALRGLFEVRGLLAKDLAVVALREGLDLPPTDDPMLLAYLLDPSNTTPEGVARRYGGEWTEDAAKRALLAERLHANLLGRLQGEERLLWLYEEVEKPLSRVLAHMEATGVKLDVAYLEALSLEVAAEMRRLEEEVFRLAGHSFRLVSRDQLERVLFDELGLPPIGKTEKTGKRSTSRAVLEALREVHPIVDKILQYRELAKLKGTYIDPLPALVHPKTGRLHTRFNQTATATGRLSSSDPNLQNIPVRTPLGQKIRRAFVAEEGWRLVALDYSQIELRVLAHLSGDENLIRVFQEGKDIHTQTASWMFGLSAEAIDPLMRRAAKTINFGVLYGMSAFRLSQELGIPYEEAAAFIQKYFQSYPKVKAWIEKTLEEGRTRGYVETLFGRRRYVPDLNARVKSVREAAERMAFNMPVQGTAADLMKLAMVRLFPQLREVGARMLLQVHDELLLEAPKERAEEVAALAKEVMEGVWPLAVPLEVEVGIGEDWLAAKG

SEQ ID NO: 2289 - DNA, 2529 bp, synthetic construct
  misc_feature 1..2529: note = Variant of DNA polymerase I from Thermus sp. strain 2.9
  source 1..2529: mol_type = other DNA
atgcaccatcatcatcatcatggcggtagcggcgtgttaccggtgttcgagcctaaaggtcgcgtgcttctggttgatggccatcatctcgcgtatcgtaacttctttgccctgaaaggattaaccaccagccgcggcgagccggtacagggtgtctacggctttgcaaagtcgctcctgaaagctctgaaagaagacggtgatgtggtgattgttgtctttgatgcgaaagcgccaagttttcgccacgaagcgtacgaagcttacaaagccgggcgtgctccaacgccggaagactttcctcgccaattggcgcttatgaaggaattagtggatttgcttggcctcgaacgcttggaagttcccggtttcgaggcagacgacgtattagcgactctcgcaaagaaagccgaacgtgagggctatgaagtccagatcttgacagcagatcgcgatcttttccagcttttatctccgcgcatctcggtgttacacccggaagggcatcgtatcaccccggaatggctctgggagaaatatggtttgcgtcccgaacaatgggtggattttcgcgccttagcaggcgatccgagcgacaatattccgggagttaaaggtatcggcgagaagacggcgctcaagctccttaaagaatgggggtcgttggagaacttgcttaagaatttagatcaggtcaaaccagagtcagtgcgtgagaagattcttgcacacctcgaagacctcaaattaagccgcgaattgtcccgtgtacgcaccgatttgccgctcgaagttgatttccgtcgccgccgcgaacctgactgggagggtcttaaagcgtttttagagcgtcttgaatttggttcgctcttgcatgaattcggccttttagaaagcccgttaccagccgaagaagcaccttggccaccgcccgaaggcgcgtttttaggttaccgtttgagtcgcccggaaccgatgtgggccgaattattggctcttgcagcgtctgcccagggaacggtgtatcgcgcggaagaccctcatggtgcgctccgcggcctcttcgaagtccgtggactccttgccaaagacttagctgttgttgcattgcgcgaaggtcttgatttacctccgactgatgatccaatgcttcttgcgtacctcttggacccgtcaaacacgacgcccgaaggcgtagcccgtcgttacggcggcgagtggaccgaagatgcagcgaaacgcgcgttattggccgaacgtttgcacgccaatttattaggacgtttgcaaggcgaggaacgtctcctctggctttacgaagaagtggagaaaccattgagtcgcgtgctcgcgcatatggaagctaccggtgtcaaattagacgtggcgtatttggaggctctcagccttgaagttgctgccgaaatgcgccgcttggaggaagaagtattccgtttagcaggccgctcctttcgccttaattctcgcgatcagttagaacgtgtgttgttcgatgaacttggtctccctcctatcggcaagacagagaagaccggtaaacgtagcacttcagcggcggttttagaagctcttcgcgaagtccatcccattgtggacaagatcttgcagtaccgcgaactcgcgaaattgaaaggcacctatattgaccctcttccggcattagtccacccgaaaacgggacgcctccatacccgcttcaaccaaacagccacggcgaccggtcgtttgtcctcctctgatccaaaccttcagaatattccagtacgtaccccattgggccagaagatccgccgcgcgtttgtagctgaggagggttggcgtttagtggccctcgattatagccaaattgaattacgtgtccttgcccatctttctggcgatgagaacctcatccgcgtgtttcaggaaggcaaagacattcacactcaaacggcaagctggatgtttggattatcagctgaagcgatcgatcctttgatgcgtcgtgcagcgaagaccatcaatttcggtgttctctacggtatgagtgcctttcgtttgtcgcaggaattaggcattccctatgaagaagctcaggcgttcattcagaaatactttcaaagctatcccaaagttaaagcatggatcgagaagactctcgaagaaggccgcacacgtggttacgtagagaccttatttggacgtcgccgctatgttcccgatttaaacgctcgcgtgaaatctgtccgtgaagccgccgaacgcatggcgttcaacatgcctgtacagggcacggcagctgacctcatgaaacttgcaatggtgcgcctttttccacaattgcgtgaagttggtgcccgcatgctcttgcaggtccacgatgaactcttgttagaagcgccaaaagagcgtgcggaagaggtggcagccctcgcgaaagaggttatggaaggcgtgtggcccttagcggtgcctcttgaagtcgaagttggtattggcgaggattggctggctgccaaaggataatga

SEQ ID NO: 2290 - protein, 841 aa, synthetic construct
  REGION 1..841: note = Variant of DNA polymerase I from Thermus sp. strain 2.9
MHHHHHHGGSGVLPVFEPKGRVLLVDGHHLAYRNFFALKGLTTSRGEPVQGVYGFAKSLLKALKEDGDVVIVVFDAKAPSFRHEAYEAYKAGRAPTPEDFPRQLALMKELVDLLGLERLEVPGFEADDVLATLAKKAEREGYEVQILTADRDLFQLLSPRISVLHPEGHRITPEWLWEKYGLRPEQWVDFRALAGDPSDNIPGVKGIGEKTALKLLKEWGSLENLLKNLDQVKPESVREKILAHLEDLKLSRELSRVRTDLPLEVDFRRRREPDWEGLKAFLERLEFGSLLHEFGLLESPLPAEEAPWPPPEGAFLGYRLSRPEPMWAELLALAASAQGTVYRAEDPHGALRGLFEVRGLLAKDLAVVALREGLDLPPTDDPMLLAYLLDPSNTTPEGVARRYGGEWTEDAAKRALLAERLHANLLGRLQGEERLLWLYEEVEKPLSRVLAHMEATGVKLDVAYLEALSLEVAAEMRRLEEEVFRLAGRSFRLNSRDQLERVLFDELGLPPIGKTEKTGKRSTSAAVLEALREVHPIVDKILQYRELAKLKGTYIDPLPALVHPKTGRLHTRFNQTATATGRLSSSDPNLQNIPVRTPLGQKIRRAFVAEEGWRLVALDYSQIELRVLAHLSGDENLIRVFQEGKDIHTQTASWMFGLSAEAIDPLMRRAAKTINFGVLYGMSAFRLSQELGIPYEEAQAFIQKYFQSYPKVKAWIEKTLEEGRTRGYVETLFGRRRYVPDLNARVKSVREAAERMAFNMPVQGTAADLMKLAMVRLFPQLREVGARMLLQVHDELLLEAPKERAEEVAALAKEVMEGVWPLAVPLEVEVGIGEDWLAAKG

SEQ ID NO: 2291 - DNA, 2529 bp, synthetic construct
  misc_feature 1..2529: note = Variant of DNA polymerase I from Thermus sp. strain 2.9
  source 1..2529: mol_type = other DNA
atgcaccatcatcatcatcatggcggtagcggcgtgttaccggtgttcgagcctaaaggtcgcgtgcttctggttgatggccatcatctcgcgtatcgtaacttctttgccctgaaaggattaaccaccagcagcggcgagccggtacagggtgtctacggctttgcaaagtcgctcctgaaagctctgaaagaagacggtgatgtggtgattgttgtctttgatgcgaaagcgccaagttttcgccacgaagcgtacgaagcttacaaagccgggcgtgctccaacgccggaagactttcctcgccaattggcgcttatgaaggaattagtggatttgcttggcctcgaacgcttggaagttcccggtttcgaggcagacgacgtattagcgactctcgcaaagaaagccgaacgtgagggctatgaagtccagatcttgacagcagatcgcgatcttttccagcttttatctccgcgcatctcggtgttacacccggaagggcatcgtatcaccccggaatggctctgggagaaatatggtttgcgtcccgaacaatgggtggattttcgcgccttagcaggcgatccgagcgacaatattccgggagttaaaggtatcggcgagaagacggcgctcaagctccttaaagaatgggggtcgttggagaacttgcttaagaatttagatcaggtcaaaccagagtcagtgcgtgagaagattcttgcacacctcgaagacctcaaattaagccgcgaattgtcccgtgtacgcaccgatttgccgctcgaagttgatttccgtcgccgccgcgaacctgactgggagggtcttaaagcgtttttagagcgtcttgaatttggttcgctcttgcatgaattcggccttttagaaagcccgttaccagccgaagaagcaccttggccaccgcccgaaggcgcgtttttaggttaccgtttgagtcgcccggaaccgatgtgggccgaattattggctcttgcagcgtctgcccagggacgtgtgtatcgcgcggaagaccctcatggtgcgctccgcggcctcttcgaagtccgtggactccttgccaaagacttagctgttgttgcattgcgcgaaggtcttgatttacctccgactgatgatccaatgcttcttgcgtacctcttggacccgtcaaacacgacgcccgaaggcgtagcccgtcgttacggcggcgagtggaccgaagatgcagcgaaacgcgcgttattggccgaacgtttgcacgccaatttattaggacgtttgcaaaccgaggaacgtctcctctggctttacgaagaagtggagaaaccattgagtcgcgtgctcgcgcatatggaagctaccggtgtcaaattagacgtggcgtatttggaggctctcagccttgaagttgctgccgaaatgcgccgcttggaggaagaagtattccgtttagcaggccattcctttcgccttaattctcgcgatcagttagaacgtgtgttgttcgatgaacttggtctccctcctatcggcaagacagagaagaccggtaaacgtagcacttcagcggcggttttagaagctcttcgcgaagtccatcccattgtggacaagatcttgcagtaccgcgaactcgcgaaattgaaaggcacctatattgaccctcttccggcattagtccacccgaaaacgggacgcctccatacccgcttcaaccaaacagccacggcgaccggtcgtttgtcctcctctgatccaaaccttcagaatattccagtacgtaccccattgggccagaagatccgccgcgcgtttgtagctgaggagggttggcgtttagtggccctcgattatagccaaattgaattacgtgtccttgcccatctttctggcgatgagaacctcatccgcgtgtttcaggaaggcaaagacattcacactcaaacggcaagctggatgtttggattatcagctgaagcgatcgatcctttgatgcgtcgtgcagcgaagaccatcaatttcggtgttctctacggtatgagtgcctttcgtttgtcgcaggaattaggcattccctatgaagaagctgcggcgttcattcagaaatactttcaaagctatcccaaagttaaagcatggatcgagaagactctcgaagaaggccgcacacgtggttacgtagagaccttatttggacgtcgccgctatgttcccgatttaaacgctcgcgtgaaatctgtccgtgaagccgccgaacgcatggcgttcaacatgcctgtacagggcacggcagctgacctcatgaaacttgcaatggtgcgcctttttccacaattgcgtgaagttggtgcccgcatgctcttgcaggtccacgatgaactcttgttagaagcgccaaaagagcgtgcggaagaggtggcagccctcgcgaaagaggttatggaaggcgtgtggcccttagcggtgcctcttgaagtcgaagttggtattggcgaggattggctggctgccaaaggataatga

SEQ ID NO: 2292 - protein, 841 aa, synthetic construct
  REGION 1..841: note = Variant of DNA polymerase I from Thermus sp. strain 2.9
MHHHHHHGGSGVLPVFEPKGRVLLVDGHHLAYRNFFALKGLTTSSGEPVQGVYGFAKSLLKALKEDGDVVIVVFDAKAPSFRHEAYEAYKAGRAPTPEDFPRQLALMKELVDLLGLERLEVPGFEADDVLATLAKKAEREGYEVQILTADRDLFQLLSPRISVLHPEGHRITPEWLWEKYGLRPEQWVDFRALAGDPSDNIPGVKGIGEKTALKLLKEWGSLENLLKNLDQVKPESVREKILAHLEDLKLSRELSRVRTDLPLEVDFRRRREPDWEGLKAFLERLEFGSLLHEFGLLESPLPAEEAPWPPPEGAFLGYRLSRPEPMWAELLALAASAQGRVYRAEDPHGALRGLFEVRGLLAKDLAVVALREGLDLPPTDDPMLLAYLLDPSNTTPEGVARRYGGEWTEDAAKRALLAERLHANLLGRLQTEERLLWLYEEVEKPLSRVLAHMEATGVKLDVAYLEALSLEVAAEMRRLEEEVFRLAGHSFRLNSRDQLERVLFDELGLPPIGKTEKTGKRSTSAAVLEALREVHPIVDKILQYRELAKLKGTYIDPLPALVHPKTGRLHTRFNQTATATGRLSSSDPNLQNIPVRTPLGQKIRRAFVAEEGWRLVALDYSQIELRVLAHLSGDENLIRVFQEGKDIHTQTASWMFGLSAEAIDPLMRRAAKTINFGVLYGMSAFRLSQELGIPYEEAAAFIQKYFQSYPKVKAWIEKTLEEGRTRGYVETLFGRRRYVPDLNARVKSVREAAERMAFNMPVQGTAADLMKLAMVRLFPQLREVGARMLLQVHDELLLEAPKERAEEVAALAKEVMEGVWPLAVPLEVEVGIGEDWLAAKG

SEQ ID NO: 2293 - DNA, 2529 bp, synthetic construct
  misc_feature 1..2529: note = Variant of DNA polymerase I from Thermus sp. strain 2.9
  source 1..2529: mol_type = other DNA
atgcaccatcatcatcatcatggcggtagcggcgtgttaccggtgttcgagcctaaaggtcgcgtgcttctggttgatggccatcatctcgcgtatcgtaacttctttgccctgaaaggattaaccaccagccgtggcgagccggtacagggtgtctacggctttgcaaagtcgctcctgaaagctctgaaagaagacggtgatgtggtgattgttgtctttgatgcgaaagcgccaagttttcgccacgaagcgtacgaagcttacaaagccgggcgtgctccaacgccggaagactttcctcgccaattggcgcttatgaaggaattagtggatttgcttggcctcgaacgcttggaagttcccggtttcgaggcagacgacgtattagcgactctcgcaaagaaagccgaacgtgagggctatgaagtccagatcttgacagcagatcgcgatcttttccagcttttatctccgcgcatctcggtgttacacccggaagggcatcgtatcaccccggaatggctctgggagaaatatggtttgcgtcccgaacaatgggtggattttcgcgccttagcaggcgatccgagcgacaatattccgggagttaaaggtatcggcgagaagacggcgctcaagctccttaaagaatgggggtcgttggagaacttgcttaagaatttagatcaggtcaaaccagagtcagtgcgtgagaagattcttgcacacctcgaagacctcaaattaagccgcgaattgtcccgtgtacgcaccgatttgccgctcgaagttgatttccgtcgccgccgcgaacctgactgggagggtcttaaagcgtttttagagcgtcttgaatttggttcgctcttgcatgaattcggccttttagaaagcccgttaccagccgaagaagcaccttggccaccgccccagggcgcgtttttaggttaccgtttgagtcgcccggaaccgatgtgggccgaattattggctcttgcagcgtctgcccagggaaccgtgtatcgcgcggaagaccctcatggtgcgctccgcggcctcttcgaagtccgtggactccttgccaaagacttagctgttgttgcattgcgcgaaggtcttgatttacctccgactgatgatccaatgcttcttgcgtacctcttggacccgtcaaacacgacgcccgaaggcgtagcccgtcgttacggcggcgagtggaccgaagatgcagcgaaacgcgcgttattggccgaacgtttgcacgccaatttattaggacgtttgcaaggcgaggaacgtctcctctggctttacgaagaagtggagaaaccattgagtcgcgtgctcgcgcatatggaagctaccggtgtcaaattagacgtggcgtatttggaggctctcagccttgaagttgctgccgaaatgcgccgcttggaggaagaagtattccgtttagcaggccattcctttcgccttgtatctcgcgatcagttagaacgtgtgttgttcgatgaacttggtctccctcctatcggcaagacagagaagaccggtaaacgtagcacttcagcggcggttttagaagctcttcgcgaagtccatcccattgtggacaagatcttgcagtaccgcgaactcgcgaaattgaaaggcacctatattgaccctcttccggcattagtccacccgaaaacgggacgcctccatacccgcttcaaccaaacagccacggcgaccggtcgtttgtcctcctctgatccaaaccttcagaatattccagtacgtaccccattgggccagaagatccgccgcgcgtttgtagctgaggagggttggcgtttagtggccctcgattatagccaaattgaattacgtgtccttgcccatctttctggcgatgagaacctcatccgcgtgtttcaggaaggcaaagacattcacactcaaacggcaagctggatgtttggattaagcgctgaagcgatcgatcctttgatgcgtcgtgcagcgaagaccatcaatttcggtgttctctacggtatgagtgcctttcgtttgtcgcaggaattaggcattccctatgaagaagctgcggcgttcattcagaaatactttcaaagctatcccaaagttaaagcatggatcgagaagactctcgaggaaggccgcacacgtggttacgtagagaccttatttggacgtcgccgctatgttcccgatttaaacgctcgcgtgaaatctgtccgtgaagccgccgaacgcatggcgttcaacatgcctgtacagggcacggcagctgacctcatgaaacttgcaatggtgcgcctttttccacaattgcgtgaagttggtgcccgcatgctcttgcaggtccacgatgaactcttgttagaagcgccaaaagagcgtgcggaagaggtggcagccctcgcgaaagaggttatggaaggcgtgtggcccttagcggtgcctcttgaagtcgaagttggtattggcgaggattggctggctgccaaaggataatga

SEQ ID NO: 2294 - protein, 841 aa, synthetic construct
  REGION 1..841: note = Variant of DNA polymerase I from Thermus sp. strain 2.9
MHHHHHHGGSGVLPVFEPKGRVLLVDGHHLAYRNFFALKGLTTSRGEPVQGVYGFAKSLLKALKEDGDVVIVVFDAKAPSFRHEAYEAYKAGRAPTPEDFPRQLALMKELVDLLGLERLEVPGFEADDVLATLAKKAEREGYEVQILTADRDLFQLLSPRISVLHPEGHRITPEWLWEKYGLRPEQWVDFRALAGDPSDNIPGVKGIGEKTALKLLKEWGSLENLLKNLDQVKPESVREKILAHLEDLKLSRELSRVRTDLPLEVDFRRRREPDWEGLKAFLERLEFGSLLHEFGLLESPLPAEEAPWPPPQGAFLGYRLSRPEPMWAELLALAASAQGTVYRAEDPHGALRGLFEVRGLLAKDLAVVALREGLDLPPTDDPMLLAYLLDPSNTTPEGVARRYGGEWTEDAAKRALLAERLHANLLGRLQGEERLLWLYEEVEKPLSRVLAHMEATGVKLDVAYLEALSLEVAAEMRRLEEEVFRLAGHSFRLVSRDQLERVLFDELGLPPIGKTEKTGKRSTSAAVLEALREVHPIVDKILQYRELAKLKGTYIDPLPALVHPKTGRLHTRFNQTATATGRLSSSDPNLQNIPVRTPLGQKIRRAFVAEEGWRLVALDYSQIELRVLAHLSGDENLIRVFQEGKDIHTQTASWMFGLSAEAIDPLMRRAAKTINFGVLYGMSAFRLSQELGIPYEEAAAFIQKYFQSYPKVKAWIEKTLEEGRTRGYVETLFGRRRYVPDLNARVKSVREAAERMAFNMPVQGTAADLMKLAMVRLFPQLREVGARMLLQVHDELLLEAPKERAEEVAALAKEVMEGVWPLAVPLEVEVGIGEDWLAAKG

SEQ ID NO: 2295 - DNA, 2529 bp, synthetic construct
  misc_feature 1..2529: note = Variant of DNA polymerase I from Thermus sp. strain 2.9
  source 1..2529: mol_type = other DNA
atgcaccatcatcatcatcatggcggtagcggcgtgttaccggtgttcgagcctaaaggtcgcgtgcttctggttgatggccatcatctcgcgtatcgtaacttctttgccctgaaaggattaaccaccagccgtggcgagccggtacagggtgtctacggctttgcaaagtcgctcctgaaagctctgaaagaagacggtgatgtggtgattgttgtctttgatgcgaaagcgccaagttttcgccacgaagcgtacgaagcttacaaagccgggcgtgctccaacgccggaagactttcctcgccaattggcgcttatgaaggaattagtggatttgcttggcctcgaacgcttggaagttcccggtttcgaggcagacgacgtattagcgactctcgcaaagaaagccgaacgtgagggctatgaagtccagatcttgacagcagatcgcgatcttttccagcttttatctccgcgcatctcggtgttacacccggaagggcatcgtatcaccccggaatggctctgggagaaatatggtttgcgtcccgaacaatgggtggattttcgcgccttagcaggcgatccgagcgacaatattccgggagttaaaggtatcggcgagaagacggcgctcaagctccttaaagaatgggggtcgttggagaacttgcttaagaatttagatcaggtcaaaccagagtcagtgcgtgagaagattcttgcacacctcgaagacctcaaattaagccgcgaattgtcccgtgtacgcaccgatttgccgctcgaagttgatttccgtcgccgccgcgaacctgactgggagggtcttaaagcgtttttagagcgtcttgaatttggttcgctcttgcatgaattcggccttttagaaagcccgttaccagccgaagaagcaccttggccaccgcccgaaggcgcgtttttaggttaccgtttgagtcgcccggaaccgatgtgggccgaattattggctcttgcagcgtctgcccagggacgtgtgtatcgcgcggaagaccctcatggtgcgctccgcggcctcttcgaagtccgtggactccttgccaaagacttagctgttgttgcattgcgcgaaggtcttgatttacctccgactgatgatccaatgcttcttgcgtacctcttggacccgtcaaacacgacgcccgaaggcgtagcccgtcgttacggcggcgagtggaccgaagatgcagcgaaacgcgcgttattggccgaacgtttgcacgccaatttattaggacgtttgcaaggcgaggaacgtctcctctggctttacgaagaagtggagaaaccattgagtcgcgtgctcgcgcatatggaagctaccggtgtcaaattagacgtggcgtatttggaggctctcagccttgaagttgctgccgaaatgcgccgcttggaggaagaagtattccgtttagcaggccattcctttcgccttaattctcgcgatcagttagaacgtgtgttgttcgatgaacttggtctcccacctatcggcaagacagagaagaccggtaaacgtagcacttcagcggcggttttagaagctcttcgcgaagtccatcccattatggacaagatcttgcagtaccgcgaactcgcgaaattgaaaggcacctatattgaccctcttccggcattagtccacccgaaaacgggacgcctccatacccgcttcaaccaaacagccacggcgaccggtcgtttgtcctcctctgatccaaaccttcagaatattccagtacgtaccccattgggccagaagatccgccgcgcgtttgtagctgaggagggttggcgtttagtggccctcgattatagccaaattgaattacgtgtccttgcccatctttctggcgatgagaacctcatccgcgtgtttcaggaaggcaaagacattcacactcaaacggcaagctggatgtttggattatcagctgaagcgatcgatcctttgatgcgtcgtgcagcgaagaccatcaatttcggtgttctctacggtatgagtgcctttcgtttgtcgcaggaattaggcattccctatgaagaagctgcggcgttcattcagaaatactttcaaagctatcccaaagttaaagcatggatcgagaagactctcgaagaaggccgcacacgtggttacgtagagaccttatttggacgtcgccgctatgttcccgatttaaacgctcgcgtgaaaagtgtccgtgaagccgccgaacgcatggcgttcaacatgcctgtacagggcacggcagctgacctcatgaaacttgcaatggtgcgcctttttccacaattgcgtgaagttggtgcccgcatgctcttgcaggtccacgatgaactcttgttagaagcgccaaaagagcgtgcggaagaggtggcagccctcgcgaaagaagttatggaaggcgtgtggcccttagcggtgcctcttgaagtcgaagttggtattggcgaggattggctggctgccaaaggataatga

SEQ ID NO: 2296 - protein, 841 aa, synthetic construct
  REGION 1..841: note = Variant of DNA polymerase I from Thermus sp. strain 2.9
MHHHHHHGGSGVLPVFEPKGRVLLVDGHHLAYRNFFALKGLTTSRGEPVQGVYGFAKSLLKALKEDGDVVIVVFDAKAPSFRHEAYEAYKAGRAPTPEDFPRQLALMKELVDLLGLERLEVPGFEADDVLATLAKKAEREGYEVQILTADRDLFQLLSPRISVLHPEGHRITPEWLWEKYGLRPEQWVDFRALAGDPSDNIPGVKGIGEKTALKLLKEWGSLENLLKNLDQVKPESVREKILAHLEDLKLSRELSRVRTDLPLEVDFRRRREPDWEGLKAFLERLEFGSLLHEFGLLESPLPAEEAPWPPPEGAFLGYRLSRPEPMWAELLALAASAQGRVYRAEDPHGALRGLFEVRGLLAKDLAVVALREGLDLPPTDDPMLLAYLLDPSNTTPEGVARRYGGEWTEDAAKRALLAERLHANLLGRLQGEERLLWLYEEVEKPLSRVLAHMEATGVKLDVAYLEALSLEVAAEMRRLEEEVFRLAGHSFRLNSRDQLERVLFDELGLPPIGKTEKTGKRSTSAAVLEALREVHPIMDKILQYRELAKLKGTYIDPLPALVHPKTGRLHTRFNQTATATGRLSSSDPNLQNIPVRTPLGQKIRRAFVAEEGWRLVALDYSQIELRVLAHLSGDENLIRVFQEGKDIHTQTASWMFGLSAEAIDPLMRRAAKTINFGVLYGMSAFRLSQELGIPYEEAAAFIQKYFQSYPKVKAWIEKTLEEGRTRGYVETLFGRRRYVPDLNARVKSVREAAERMAFNMPVQGTAADLMKLAMVRLFPQLREVGARMLLQVHDELLLEAPKERAEEVAALAKEVMEGVWPLAVPLEVEVGIGEDWLAAKG

SEQ ID NO: 2297 - DNA, 2529 bp, synthetic construct
  misc_feature 1..2529: note = Variant of DNA polymerase I from Thermus sp. strain 2.9
  source 1..2529: mol_type = other DNA
atgcaccatcatcatcatcatggcggtagcggcgtgttaccggtgttcgagcctaaaggtcgcgtgcttctggttgatggccatcatctcgcgtatcgtaacttctttgccctgaaaggattaaccaccagcagcggcgagccggtacagggtgtctacggctttgcaaagtcgctcctgaaagctctgaaagaagacggtgatgtggtgattgttgtctttgatgcgaaagcgccaagttttcgccacgaagcgtacgaagcttacaaagccgggcgtgctccaacgccggaagactttcctcgccaattggcgcttatgaaggaattagtggatttgcttggcctcgaacgcttggaagttcccggtttcgaggcagacgacgtattagcgactctcgcaaagaaagccgaacgtgagggctatgaagtccagatcttgacagcagatcgcgatcttttccagcttttatctccgcgcatctcggtgttacacccggaagggcatcgtatcaccccggaatggctctgggagaaatatggtttgcgtcccgaacaatgggtggattttcgcgccttagcaggcgatccgagcgacaatattccgggagttaaaggtatcggcgagaagacggcgctcaagctccttaaagaatggggggacttggagaacttgcttaagaatttagatcaggtcaaaccagagtcagtgcgtgagaagattcttaatcacctcgaagacctcaaattaagccgcgaattgtcccgtgtacgcaccgatttgccgctcgaagttgatttccgtcgccgccgcgaacctgactgggagggtcttaaagcgtttttagagcgtcttgaatttggttcgctcttgcatgaattcggccttttagaaagcccgttaccagccgaagaagcaccttggccaccgcccgaaggcgcgtttttaggttaccgtttgagtcgcccggaaccgatgtgggccgaattattggctcttgcagcgtctgcccagggaacggtgtatcgcgcggaagaccctcatggtgcgctccgcggcctcttcgaagtccgtggactccttgccaaagacttagctgttgttgcattgcgcgaaggtcttgatttacctccgactgatgatccaatgcttcttgcgtacctcttggacccgtcaaacacgacgcccgaaggcgtagcccgtcgttacggcggcgagtggaccgaagatgcagcgaaacgcgcgttattggccgaacgtttgcacgagaatttattaggacgtttgcaaggcgaggaacgtctcctctggctttacgaagaagtggagaaaccattgagtcgcgtgctcgcgcatatggaagctaccggtgtcaaattagacgtggcgtatttggaggctctcagccttgaagttgctgccgaaatgcgccgcttggaggaagaagtattccgtttagcaggccattcctttcgccttaattctcgcgatcagttagaacgtgtgttgttcgatgaacttggtctccctcctatcggcaagacagagaagaccggtaaacgtagcacttcagcggcggttttagaagctcttcgcgaagtccatcccattgtggacaagatcttgcagtaccgcgaactcgcgaaattgaaaggcacctatattgaccctcttccggcattagtccacccgaaaacgggacgcctccatacccgcttcaaccaaacagccacggcgaccggtcgtttgtcctcctctgatccaaaccttcagaatattccagtacgtaccccattgggccagaagatccgccgcgcgtttgtagctgaggagggttggcgtttagtggccctcgattatagccaaattgaattacgtgtccttgcccatctttctggcgatgagaacctcatccgcgtgtttcaggaaggcaaagacattcacactcaaacggcaagctggatgtttggattatcagctgaagcgatcgatcctttgatgcgtcgtgcagcgaagaccatcaatttcggtgttctctacggtatgagtgcctttcgtttgtcgcaggaattaggcattccctatgaagaagctgcggcgttcattcagaaatactttcaaagctatcccaaagttaaagcatggatcgagaagactctcgaagaaggccgcacacgtggttacgtagagaccttatttggacgtcgccgctatgttcccgatttaaacgctcgcgtgaaatctgtccgtgaagccgccgaacgcatggcgttcaacatgcctgtacagggcacggcagctgacctcatgaaacttgcaatggtgcgcctttttccacaattgcgtgaagttggtgcccgcatgctcttgcaggtccacgatgaactcttgttagaagcgccaaaagagcgtgcggaagaggtggcagccctcgcgaaagaagttatggaaggcgtgtggcccttagcggtgcctcttgaagtcgaagttggtattggcgaggattggctggctgccaaaggataatga

SEQ ID NO: 2298 - protein, 841 aa, synthetic construct
  REGION 1..841: note = Variant of DNA polymerase I from Thermus sp. strain 2.9
MHHHHHHGGSGVLPVFEPKGRVLLVDGHHLAYRNFFALKGLTTSSGEPVQGVYGFAKSLLKALKEDGDVVIVVFDAKAPSFRHEAYEAYKAGRAPTPEDFPRQLALMKELVDLLGLERLEVPGFEADDVLATLAKKAEREGYEVQILTADRDLFQLLSPRISVLHPEGHRITPEWLWEKYGLRPEQWVDFRALAGDPSDNIPGVKGIGEKTALKLLKEWGDLENLLKNLDQVKPESVREKILNHLEDLKLSRELSRVRTDLPLEVDFRRRREPDWEGLKAFLERLEFGSLLHEFGLLESPLPAEEAPWPPPEGAFLGYRLSRPEPMWAELLALAASAQGTVYRAEDPHGALRGLFEVRGLLAKDLAVVALREGLDLPPTDDPMLLAYLLDPSNTTPEGVARRYGGEWTEDAAKRALLAERLHENLLGRLQGEERLLWLYEEVEKPLSRVLAHMEATGVKLDVAYLEALSLEVAAEMRRLEEEVFRLAGHSFRLNSRDQLERVLFDELGLPPIGKTEKTGKRSTSAAVLEALREVHPIVDKILQYRELAKLKGTYIDPLPALVHPKTGRLHTRFNQTATATGRLSSSDPNLQNIPVRTPLGQKIRRAFVAEEGWRLVALDYSQIELRVLAHLSGDENLIRVFQEGKDIHTQTASWMFGLSAEAIDPLMRRAAKTINFGVLYGMSAFRLSQELGIPYEEAAAFIQKYFQSYPKVKAWIEKTLEEGRTRGYVETLFGRRRYVPDLNARVKSVREAAERMAFNMPVQGTAADLMKLAMVRLFPQLREVGARMLLQVHDELLLEAPKERAEEVAALAKEVMEGVWPLAVPLEVEVGIGEDWLAAKG

SEQ ID NO: 2299 - DNA, 2529 bp, synthetic construct
  misc_feature 1..2529: note = Variant of DNA polymerase I from Thermus sp. strain 2.9
  source 1..2529: mol_type = other DNA
atgcaccatcatcatcatcatggcggtagcggcgtgttaccggtgttcgagcctaaaggtcgcgtgcttctggttgatggccatcatctcgcgtatcgtaacttctttgccctgaaaggattaaccaccagccgcggcgagccggtacagggtgtctacggctttgcaaagtcgctcctgaaagctctgaaagaagacggtgatgtggtgattgttgtctttgatgcgaaagcgccaagttttcgccacgaagcgtacgaagcttacaaagccgggcgtgctccaacgccggaagactttcctcgccaattggcgcttatgaaggaattagtggatttgcttggcctcgaacgcttggaagttcccggtttcgaggcagacgacgtattagcgactctcgcaaagaaagccgaacgtgagggctatgaagtccagatcttgacagcagatcgcgatcttttccagcttttatctccgcgcatctcggtgttacacccggaagggcatcgtatcaccccggaatggctctgggagaaatatggtttgcgtcccgaacaatgggtggattttcgcgccttagcaggcgatccgagcgacaatattccgggagttaaaggtatcggcgagaagacggcgctcaagctccttaaagaatgggggtcgttggagaacttgcttaagaatttagatcaggtcaaaccagagtcagtgcgtgagaagattcttgctcacctcgaagacctcaaattaagccgcgaattgtcccgtgtacgcaccgatttgccgctcgaagttgatttccagcgccgccgcgaacctgactgggagggtcttaaagcgtttttagagcgtcttgaatttggttcgctcttgcatgaattcggccttttagaaagcccgttaccagccgaagaagcaccttggccaccgccccagggcgcgtttttaggttaccgtttgagtcgcccggaaccgatgtgggccgaattagccgctcttgcagcgtctgcccagggacgcgtgtatcgcgcggaagaccctcatggtgcgctccgcggcctcttcgaagtccgtggactccttgccaaagacttagctgttgttgcattgcgcgaaggtcttgatttacctccgactgatgatccaatgcttcttgcgtacctcttggacccgtcaaacacgacgcccgaaggcgtagcccgtcgttacggcggcgagtggaccgaagatgcagcgaaacgcgcgttattggccgaacgtttgcacgagaatttattaggacgtttgcaaggggaggaacgtctcctctggctttacgaagaagtggagaaaccattgagtcgcgtgctcgggcatatggaagctaccggtgtcaaattagacgtggcgtatttggaggctctcagccttgaagttgctgccgaaatgcgccgcttggaggaagaagtattccgtttagcaggccactcctttcgccttaattctcgcgatcagttagaacgtgtgttgttcgatgaacttggtctccctcctatcggcaagacagagaagaccggtaaacgtagcacttcagcggcggttttagaagctcttcgcgaagtccatcccattgtggacaagatcttgcagtaccgcgaactcgcgaaattgaaaggcacctatattgaccgtcttccggcattagtccacccgaaaacgggacgcctccatacccgcttcaaccaaacagccacggcgaccggtcgtttgtcctcctctgatccaaaccttcagaatattccagtacgtaccccattgggccagaagatccgcaaggcgtttgtagctgaggagggttggcgtttagtggccctcgattatagccaaattgaattacgtgtccttgcccatctttctggcgatgagaacctcatccgcgtgtttcaggaaggcaaagacattcacactcaaacggcaagctggatgtttggattatcagctgaagcgatcgatcctttgatgcgtcgtgcagcgaagaccatcaatttcggtgttctctacggtatgagtgcctttcgtttgtcgcaggaattaggcattccctatgaagaagctgcggcgttcattcagaaatactttcaaagctatcccaaagttaaagcatggatcgagaagactctcgaagaaggccgcacacgtggttacgtagagaccttatttggacgtcgccgctatgttcccgatttaaacgctcgcgtgaaatctgtccgtgaagccgccgaacgcatggcgttcaacatgcctgtacagggcacggcagctgacctcatgaaacttgcaatggtgcgcctttttccacaattgcgtgaagttggtgcccgcatgctcttgcaggtccacgatgaactcttgttagaagcgccaaaagagcgtgcggaagaggtggcagccctcgcgaaagaggttatggaaggcgtgtggcccttagcggtgcctcttgaagtcgaagttggtattggcgaggattggctggctgccaaaggataatga

SEQ ID NO: 2300 - protein, 841 aa, synthetic construct
  REGION 1..841: note = Variant of DNA polymerase I from Thermus sp. strain 2.9
MHHHHHHGGSGVLPVFEPKGRVLLVDGHHLAYRNFFALKGLTTSRGEPVQGVYGFAKSLLKALKEDGDVVIVVFDAKAPSFRHEAYEAYKAGRAPTPEDFPRQLALMKELVDLLGLERLEVPGFEADDVLATLAKKAEREGYEVQILTADRDLFQLLSPRISVLHPEGHRITPEWLWEKYGLRPEQWVDFRALAGDPSDNIPGVKGIGEKTALKLLKEWGSLENLLKNLDQVKPESVREKILAHLEDLKLSRELSRVRTDLPLEVDFQRRREPDWEGLKAFLERLEFGSLLHEFGLLESPLPAEEAPWPPPQGAFLGYRLSRPEPMWAELAALAASAQGRVYRAEDPHGALRGLFEVRGLLAKDLAVVALREGLDLPPTDDPMLLAYLLDPSNTTPEGVARRYGGEWTEDAAKRALLAERLHENLLGRLQGEERLLWLYEEVEKPLSRVLGHMEATGVKLDVAYLEALSLEVAAEMRRLEEEVFRLAGHSFRLNSRDQLERVLFDELGLPPIGKTEKTGKRSTSAAVLEALREVHPIVDKILQYRELAKLKGTYIDRLPALVHPKTGRLHTRFNQTATATGRLSSSDPNLQNIPVRTPLGQKIRKAFVAEEGWRLVALDYSQIELRVLAHLSGDENLIRVFQEGKDIHTQTASWMFGLSAEAIDPLMRRAAKTINFGVLYGMSAFRLSQELGIPYEEAAAFIQKYFQSYPKVKAWIEKTLEEGRTRGYVETLFGRRRYVPDLNARVKSVREAAERMAFNMPVQGTAADLMKLAMVRLFPQLREVGARMLLQVHDELLLEAPKERAEEVAALAKEVMEGVWPLAVPLEVEVGIGEDWLAAKG

SEQ ID NO: 2301 - DNA, 2529 bp, synthetic construct
  misc_feature 1..2529: note = Variant of DNA polymerase I from Thermus sp. strain 2.9
  source 1..2529: mol_type = other DNA
atgcaccatcatcatcatcatggcggtagcggcgtgttaccggtgttcgagcctaaaggtcgcgtgcttctggttgatggccatcatctcgcgtatcgtaacttctttgccctgaaaggattaaccaccagccgtggcgagccggtacagggtgtctacggctttgcaaagtcgctcctgaaagctctgaaagaagacggtgatgtggtgattgttgtctttgatgcgaaagcgccaagtttccgccacgaagcgtacgaagcttacaaagccgggcgtgctccaacgccggaagactttcctcgccaattggcgcttatgaaggaattagtggatttgcttggcctcgaacgcttggaagttcccggtttcgaggcagacgacgtattagcgactctcgcaaagaaagccgaacgtgagggctatgaagtccagatcttgacagcagatcgcgatcttttccagcttttatctccgcgcatctcggtgttacacccggaagggcatcgtatcaccccggaatggctctgggagaaatatggtttgcgtcccgaacaatgggtggattttcgcgccttagcaggcgatccgagcgacaatattccgggagttaaaggtatcggcgagaagacggcgctgaagctccttaaagaatgggggtcgttggagaacttgcttgagaatttagatcaggtcaaaccagagtcagtgcgtgagaagattcttgcacacctcgaagacctcaaattaagccgcgaattgtcccgtgtacgcaccgatttgccgctcgaagttgatttccgtcgccgccgcgaacctgactgggagggtcttaaagcgtttttagagcgtcttgaatttggttcgctcttgcatgaattcggccttttagaaagcccgttaccagccgaagaagcaccttggccaccgcccgaaggcgcgtttttaggttaccgtttgagtcgcccggaaccgatgtgggccgaattattggctcttgcagcgtctgcccagggacgtgtgtatcgcgcggaagaccctcatggtgcgctccgcggcctcttcgaagtccgtggactccttgccaaagacttagctgttgttgcattgcgcgaaggtcttgatttacctccgactgatgatccaatgcttcttgcgtacctcttggacccgtcaaacacgacgcccgaaggcgtagcccgtcgttacggcggcgagtggaccgaagatgcagcgaaacgcgcgttattggccgaacgtttgcacgccaatttattaggacgtttgcaaggcgaggaacgtctcctctggctttacgaagaagtggataaaccattgagtcgcgtgctcgcgcatatggaagctaccggtgtcaaattagacgtggcgtatttggaggctctcagccttgaagttgctgccgaaatgcgccgcttggaggaagaagtattccgtttagcaggccattcctttcgccttaattctcgcgatcagttagaacgtgtgttgttcgatgaacttggtctccctcctatcggcaagacagagaagaccggtaaacgtagcacttcagcggcggttttagaagctcttcgcgaagtccatcccattgtggacaagatcttgcagtaccgcgaactcgcgaaattgaaaggcacctatattgaccctcttccggcattagtccacccgaaaacgggacgcctccatacccgcttcaaccaaacagccacggcgaccggtcgtttgtcctcctctgatccaaaccttcagagcattccagtacgtaccccattgggccagaagatccgccgcgcgtttgtagctgaggagggttggcgtttagtggtgctcgattatagccaaattgaattacgtgtccttgcccatctttctggcgatgagaacctcatccgcgtgtttcaggaaggcaaagacattcacactcaaacggcaagctggatgtttggattatcagctgaagcgatcgatcctttgatgcgtcgtgcagcgaagaccatcaatttcggtgttctctacggtatgagtgcctttcgtttgtcgcaggaattaggcattccctatgaagaagctgcggcgttcattcagaaatactttcaaagctatcccaaagttaaagcatggatcgagaagactctcgaagaaggccgcacacgtggttacgtagagaccttatttggacgtcgccgctatgttcccgatttaaacgctcgcgtgaaatctgtccgtgaagccgccgaacgcatggcgttcaacatgcctgtacagggcacggcagctgacctcatgaaacttgcaatggtgcgcctttttccacaattgcgtgaagttggtgcccgcatgctcttgcaggtccacgatgaactcttgttagaagcgccaaaagagcgtgcggaagaggtggcagccctcgcgaaagaggttatggaaggcgtgtggcccttagcggtgcctcttgaagtcgaagttggtattggcgaggattggctggctgccaaaggataatga

SEQ ID NO: 2302 - protein, 841 aa, synthetic construct
  REGION 1..841: note = Variant of DNA polymerase I from Thermus sp. strain 2.9
MHHHHHHGGSGVLPVFEPKGRVLLVDGHHLAYRNFFALKGLTTSRGEPVQGVYGFAKSLLKALKEDGDVVIVVFDAKAPSFRHEAYEAYKAGRAPTPEDFPRQLALMKELVDLLGLERLEVPGFEADDVLATLAKKAEREGYEVQILTADRDLFQLLSPRISVLHPEGHRITPEWLWEKYGLRPEQWVDFRALAGDPSDNIPGVKGIGEKTALKLLKEWGSLENLLENLDQVKPESVREKILAHLEDLKLSRELSRVRTDLPLEVDFRRRREPDWEGLKAFLERLEFGSLLHEFGLLESPLPAEEAPWPPPEGAFLGYRLSRPEPMWAELLALAASAQGRVYRAEDPHGALRGLFEVRGLLAKDLAVVALREGLDLPPTDDPMLLAYLLDPSNTTPEGVARRYGGEWTEDAAKRALLAERLHANLLGRLQGEERLLWLYEEVDKPLSRVLAHMEATGVKLDVAYLEALSLEVAAEMRRLEEEVFRLAGHSFRLNSRDQLERVLFDELGLPPIGKTEKTGKRSTSAAVLEALREVHPIVDKILQYRELAKLKGTYIDPLPALVHPKTGRLHTRFNQTATATGRLSSSDPNLQSIPVRTPLGQKIRRAFVAEEGWRLVVLDYSQIELRVLAHLSGDENLIRVFQEGKDIHTQTASWMFGLSAEAIDPLMRRAAKTINFGVLYGMSAFRLSQELGIPYEEAAAFIQKYFQSYPKVKAWIEKTLEEGRTRGYVETLFGRRRYVPDLNARVKSVREAAERMAFNMPVQGTAADLMKLAMVRLFPQLREVGARMLLQVHDELLLEAPKERAEEVAALAKEVMEGVWPLAVPLEVEVGIGEDWLAAKG

SEQ ID NO: 2303 - DNA, 2529 bp, synthetic construct
  misc_feature 1..2529: note = Variant of DNA polymerase I from Thermus sp. strain 2.9
  source 1..2529: mol_type = other DNA
atgcaccatcatcatcatcatggcggtagcggcgtgttaccggtgttcgagcctaaaggtcgcgtgcttctggttgatggccatcatctcgcgtatcgtaacttctttgccctgaaaggattaaccaccagccgtggcgagccggtacagggtgtctacggctttgcaaagtcgctcctgaaagctctgaaagaagacggtgatgtggtgattgttgtctttgatgcgaaagcgccaagttttcgccacgaagcgtacgaagcttacaaagccgggcgtgctccaacgccggaagactttcctcgccaattggcgcttatgaaggaattagtggatttgcttggcctcgaacgcttggaagttcccggtttcgaggcagacgacgtattagcgactctcgcaaagaaagccgaacgtgagggctatgaagtccagatcttgacagcagatcgcgatcttttccagcttttatctccgcgcatctcggtgttacacccggaagggcatcgtatcaccccggaatggctctgggagaaatatggtttgcgtcccgaacaatgggtggattttcgcgccttagcaggcgatccgagcgacaatattccgggagttaaaggtatcggcgagaagacggcgctcaagctccttaaagaatgggggtcgttggagaacttgcttaagaatttagatcaggtcaaaccagagtcagtgcgtgagaagattcttgcacacctcgaagacctcaaattaagccgcgaattgtcccgtgtacgcaccgatttgccgctcgaagttgatttccgtcgccgccgcgaacctgactgggagggtcttaaagcgtttttagagcgtcttgaatttggttcgctcttgcatgaattcggccttttagaaagcccgttaccagccgaagaagcaccttggccaccgcccgaaggcgcgtttttaggttaccgtttgagtcgcccggaaccgatgtgggccactttattggctcttgcagcgtctgcccagggacgtgtgtatcgcgcggaagaccctcatggtgcgctccgcggcctcttcgaagtccgtggactccttgccaaagacttagctgttgttgcattgcgcgaaggtcttgatttacctccgactgatgatccaatgcttcttgcgtacctcttggacccgtcaaacacgacgcccgaaggcgtagcccgtcgttacggcggcgagtggaccgaagatgcagcgaaacgcgcgttattggccgaacgtttgcacgccaatttattaggacgtttgcaaggcgaggaacgtctcctctggctttacgaagaagtggagaaaccattgagtcgcgtgctcgcgcatatggaagctaccggtgtcaaattagacgtggcgtatttggaggctctcagccttgaagttgctgccgaaatgcgccgcttggaggaagaagtattccgtttagcaggccattcctttcgccttaattctcgcgatcagttagaacgtgtgttgttcgatgaacttggtctccctcctatcggcaagacagagaagaccggtaaacgtagcacttcagcggcggttttagaagctcttcgcgaagtccatcccattgtggacaagatcttgcagtaccgcgaactcgcgaaattgaaaggcacctatattgaccctcttccggcattagtccacccgaaaacgggacgcctccatacccgcttcaaccaaacagccacggcgaccggtcgtttgtcctcctctgatccaaaccttcagaatattccagtacgtaccccattgggccagaagatccgccgcgcgtttgtagctgaggagggttggcgtttagtggccctcgattatagccaaattgaattacgtgtccttgcccatctttctggcgatgagaacctcatccgcgtgtttcaggaaggcaaagacattcacactcaaacggcaagctggatgtttggattatcagctgaagcgatcgatcctttgatgcgtcgtgcagcgaagaccatcaatttcggtgttctctacggtatgagtgcctttcgtttgtcgcaggaattaggcattccctatgaagaagctgcggcgttcattcagaaatactttcaaagctatcccaaagttaaagcatggatcgagaagactctcgaagaaggccgcacacgtggttacgtagagaccttatttggacgtcgccgctatgttcccgatttaaacgctcgcgtgaaatctgtccgtgaagccgccgaacgcatggcgttcaacatgcctgtacagggcacggcagctgacctcatgaaacttgcaatggtgcgcctttttccacaattgcgtgaagttggtgcccgcatgctcttgcaggtccacgatgaactcttgttagaagcgccaaaagagcgtgcggaagaggtggcagccctcgcgaaagaggttatggaaggcgtgtggcccttagcggtgcctcttgaagtcgaagttggtattggcgaggattggctggctgccaaaggataatga

SEQ ID NO: 2304 - protein, 841 aa, synthetic construct
  REGION 1..841: note = Variant of DNA polymerase I from Thermus sp. strain 2.9
MHHHHHHGGSGVLPVFEPKGRVLLVDGHHLAYRNFFALKGLTTSRGEPVQGVYGFAKSLLKALKEDGDVVIVVFDAKAPSFRHEAYEAYKAGRAPTPEDFPRQLALMKELVDLLGLERLEVPGFEADDVLATLAKKAEREGYEVQILTADRDLFQLLSPRISVLHPEGHRITPEWLWEKYGLRPEQWVDFRALAGDPSDNIPGVKGIGEKTALKLLKEWGSLENLLKNLDQVKPESVREKILAHLEDLKLSRELSRVRTDLPLEVDFRRRREPDWEGLKAFLERLEFGSLLHEFGLLESPLPAEEAPWPPPEGAFLGYRLSRPEPMWATLLALAASAQGRVYRAEDPHGALRGLFEVRGLLAKDLAVVALREGLDLPPTDDPMLLAYLLDPSNTTPEGVARRYGGEWTEDAAKRALLAERLHANLLGRLQGEERLLWLYEEVEKPLSRVLAHMEATGVKLDVAYLEALSLEVAAEMRRLEEEVFRLAGHSFRLNSRDQLERVLFDELGLPPIGKTEKTGKRSTSAAVLEALREVHPIVDKILQYRELAKLKGTYIDPLPALVHPKTGRLHTRFNQTATATGRLSSSDPNLQNIPVRTPLGQKIRRAFVAEEGWRLVALDYSQIELRVLAHLSGDENLIRVFQEGKDIHTQTASWMFGLSAEAIDPLMRRAAKTINFGVLYGMSAFRLSQELGIPYEEAAAFIQKYFQSYPKVKAWIEKTLEEGRTRGYVETLFGRRRYVPDLNARVKSVREAAERMAFNMPVQGTAADLMKLAMVRLFPQLREVGARMLLQVHDELLLEAPKERAEEVAALAKEVMEGVWPLAVPLEVEVGIGEDWLAAKG

SEQ ID NO: 2305 - DNA, 2529 bp, synthetic construct
  misc_feature 1..2529: note = Variant of DNA polymerase I from Thermus sp. strain 2.9
  source 1..2529: mol_type = other DNA
atgcaccatcatcatcatcatggcggtagcggcgtgttaccggtgttcgagcctaaaggtcgcgtgcttctggttgatggccatcatctcgcgtatcgtaacttctttgccctgaaaggattaaccaccagccgtggcgagccggtacagggtgtctacggctttgcaaagtcgctcctgaaagctctgaaatctgacggtgatgtggtgattgttgtctttgatgcgaaagcgccaagttttcgccacgaagcgtacgaagcttacaaagccgggcgtgctccaacgccggaagactttcctcgccaattggcgcttatgaaggaattagtggatttgcttggcctcgaacgcttggaagttcccggtttcgaggcagacgacgtattagcgactctcgcaaagaaagccgaacgtgagggctatgaagtccagatcttgacagcagatcgcgatcttttccagcttttatctccgcgcatctcggtgttacacccggaagggcatcgtatcaccccggaatggctctgggagaaatatggtttgcgtcccgaacaatgggtggattttcgcgccttagcaggcgatccgagcgacaatattccgggagttaaaggtatcggcgagaagacggcgctcaagctccttaaagaatgggggtcgttggagaacttgcttaagaatttagatcaggtcaaaccagagtcagtgcgtgagaagattcttgcacacctcgaagacctcaaattaagccgcgaattgtcccgtgtacgcaccgatttgccgctcgaagttgatttccgtcgccgccgcgaacctgactgggagggtcttaaagcgtttttagagcgtcttgaatttggttcgctcttgcatgaattcggccttttagaaagcccgttaccagccgaagaagcaccttggccaccgcccgaaggcgcgtttttaggttaccgtttgagtcgcccggaaccgatgtgggccgaattattggctcttgcagcgtctgcccagggacgtgtgtatcgcgcggaagaccctcatggtgcgctccgcggcctcttcgaagtccgtggactccttgccaaagacttagctgttgttgcattgcgcgaaggtcttgatttacctccgactgatgatccaatgcttcttgcgtacctcttggacccgtcaaacacgacgcccgaaggcgtagcccgtcgttacggcggcgagtggaccgaagatgcagcgaaacgcgcgttattggccgaacgtttgcacgccaatttattaggacgtttgcaaggcgaggaacgtctcctctggctttacgaagaagtggagaaaccattgagtcgcgtgctcgcgcatatggaagctaccggtgtcaaattagacgtggcgtatttggaggctctcagccttgaagttgctgccgaaatgcgccgcttggaggaagaagtattccgtttagcaggccattcctttcgccttaattctcgcgatcagttagaacgtgtgttgttcgatgaacttggtctccctcctatcggcaagacagagaagaccggtaaacgtagcacttcagcggcggttttagaagctcttcgcgaagtccatcccattgtggacaagatcttgcagtaccgcgaactcgcgaaattgaaaggcacctatattgaccctcttccggcattagtccacccgaaaacgggacgcctccatacccgcttcaaccaaacagccacggcgaccggtcgtttgtcctcctctgatccaaaccttcagaatattccagtacgtaccccattgggccagaagatccgccgcgcgtttgtagctgaggagggttggcgtttagtggccctcgattatagccaaattgaattacgtgtccttgcccatctttctggcgatgagaacctcatccgcgtgtttcaggaaggcaaagacattcacactcaaacggcaagctggatgtttggattatcagctgaagcgatcgatcctttgatgcgtcgtgcagcgaagaccatcaatttcggtgttctctacggtatgagtgcctttcgtttgtcgcaggaattaggcattccctatgaagaagctgcggcgttcattcagaaatactttcaaagctatcccaaagttaaagcatggatcgagaagactctcgaagaaggccgcacacgtggttacgtagagaccttatttggacgtcgccgctatgttcccgatttaaacgctcgcgtgaaatctgtccgtgaagccgccgaacgcatggcgttcaacatgcctgtacagggcacggcagctgacctcatgaaacttgcaatggtgcgcctttttccacaattgcgtgaagttggtgcccgcatgctcttgcaggtccacgatgaactcttgttagaagcgccaaaagagcgtgcggaagaggtggcagccctcgcgaaagaggttatggaaggcgtgtggcccttagcggtgcctcttgaagtcgaagttggtattggcgaggattggctggctgccaaaggataatga

SEQ ID NO: 2306 - protein, 841 aa, synthetic construct
  REGION 1..841: note = Variant of DNA polymerase I from Thermus sp. strain 2.9
MHHHHHHGGSGVLPVFEPKGRVLLVDGHHLAYRNFFALKGLTTSRGEPVQGVYGFAKSLLKALKSDGDVVIVVFDAKAPSFRHEAYEAYKAGRAPTPEDFPRQLALMKELVDLLGLERLEVPGFEADDVLATLAKKAEREGYEVQILTADRDLFQLLSPRISVLHPEGHRITPEWLWEKYGLRPEQWVDFRALAGDPSDNIPGVKGIGEKTALKLLKEWGSLENLLKNLDQVKPESVREKILAHLEDLKLSRELSRVRTDLPLEVDFRRRREPDWEGLKAFLERLEFGSLLHEFGLLESPLPAEEAPWPPPEGAFLGYRLSRPEPMWAELLALAASAQGRVYRAEDPHGALRGLFEVRGLLAKDLAVVALREGLDLPPTDDPMLLAYLLDPSNTTPEGVARRYGGEWTEDAAKRALLAERLHANLLGRLQGEERLLWLYEEVEKPLSRVLAHMEATGVKLDVAYLEALSLEVAAEMRRLEEEVFRLAGHSFRLNSRDQLERVLFDELGLPPIGKTEKTGKRSTSAAVLEALREVHPIVDKILQYRELAKLKGTYIDPLPALVHPKTGRLHTRFNQTATATGRLSSSDPNLQNIPVRTPLGQKIRRAFVAEEGWRLVALDYSQIELRVLAHLSGDENLIRVFQEGKDIHTQTASWMFGLSAEAIDPLMRRAAKTINFGVLYGMSAFRLSQELGIPYEEAAAFIQKYFQSYPKVKAWIEKTLEEGRTRGYVETLFGRRRYVPDLNARVKSVREAAERMAFNMPVQGTAADLMKLAMVRLFPQLREVGARMLLQVHDELLLEAPKERAEEVAALAKEVMEGVWPLAVPLEVEVGIGEDWLAAKG

SEQ ID NO: 2307 - DNA, 2529 bp, synthetic construct
  misc_feature 1..2529: note = Variant of DNA polymerase I from Thermus sp. strain 2.9
  source 1..2529: mol_type = other DNA
atgcaccatcatcatcatcatggcggtagcggcgtgttaccggtgttcgagcctaaaggtcgcgtgcttctggttgatggccatcatctcgcgtatcgtaacttctttgccctgaaaggattaaccaccagccgtggcgagccggtacagggtgtctacggctttgcaaagtcgctcctgaaagctctgaaagaagacggtgatgtggtgattgttgtctttgatgcgaaagcgccaagttttcgccacgaagcgtacgaagcttacaaagccgggcgtgctccaacgccggaagactttcctcgccaattggcgcttatgaaggaattagtggatttgcttggcctcgaacgcttggaagttcccggtttcgaggcagacgacgtattagcgactctcgcaaagaaagccgaacgtgagggctatgaagtccagatcttgacagcagatcgcgatcttttccagcttttatctccgcgcatctcggtgttacacccggaagggcatcgtatcaccccggaatggctctgggagaaatatggtttgcgtcccgaacaatgggtggattttcgcgccttagcaggcgatccgagcgacaatattccgggagttaaaggtatcggcgagaagacggcgctcaagctccttaaagaatgggggtcgttggagaacttgcttaagaatttagatcaggtcaaaccagagtcagtgcgtgagaagattcttgctcacctcgaagacctcaaattaagccgcgaattgtcccgtgtacgcaccgatttgccgctcgaagttgatttccagcgccgccgcgaacctgactgggagggtcttaaagcgtttttagagcgtcttgaatttggttcgctcttgcatgaattcggccttttagaaagcccgttaccagccgaagaagcaccttggccaccgcccgaaggcgcgtttttaggttaccgtttgagtcgcccggaaccgatgtgggccgaattattggctcttgcagcgtctgcccagggacgtgtgtatcgcgcggaagaccctcatggtgcgctccgcggcctcttcgaagtccgtggactccttgccaaagacttagctgttgttgcattgcgcgaaggtcttgatttacctccgactgatgatccaatgcttcttgcgtacctcttggacccgtcaaacacgacgcccgaaggcgtagcccgtcgttacggcggcgagtggaccgaagatgcagcgaaacgcgcgttattggccgaacgtttgcacgagaatttattaggacgtttgcaaggcgaggaacgtctcctctggctttacgaagaagtggagaaaccattgagtcgcgtgctcgcgcatatggaagctaccggtgtcaaattagacgtggcgtatttggaggctctcagccttgaagttgctgccgaaatgcgccgcttggaggaagaagtattccgtttagcaggccattcctttcgccttaattctcgcgatcagttagaacgtgtgttgttcgatgaacttggtctccctcctatcggcaagacagagaagaccggtaaacgtagcacttcagcggcggttttagaagctcttcgcgaagtccatcccattgtggacaagatcttgcagtaccgcgaactcgcgaaattgaaaggcacctatattgaccctcttccggcattagtccacccgaaaacgggacgcctccatacccgcttcaaccaaacagccacggcgaccggtcgtttgtcctcctctgatccaaaccttcagaatattccagtacgtaccccattgggccagaagatccgccgcgcgtttgtagctgaggagggttggcgtttagtggccctcgattatagccaaattgaattacgtgtccttgcccatctttctggcgatgagaacctcatccgcgtgtttcaggaaggcaaagacattcacactcaaacggcaagctggatgtttggattaagtgctgaagcgatcgatcctttgatgcgtcgtgcagcgaagaccatcaatttcggtgttctctacggtatgagtgcctttcgtttgtcgcaggaattaggcattccctatgaagaagctgcggcgttcattcagaaatactttcaaagctatcccaaagttaaagcatggatcgagaagactctcgaagaaggccgcacacgtggttacgtagagaccttatttggacgtcgccgctatgttcccgatttaaacgctcgcgtgaaatctgtccgtgaagccgccgaacgcatggcgttcaacatgcctgtacagggcacggcagctgacctcatgaaacttgcaatggtgcgcctttttccacaattgcgtgaagttggtgcccgcatgctcttgcaggtccacgatgaactcttgttagaagcgccaaaagagcgtgcggaagaggtggcagccctcgcgaaaacggttatggaaggcgtgtggcccttagcggtgcctcttgaagtcgaagttggtattggcgaggattggctggctgccaaaggataatga

SEQ ID NO: 2308 - protein, 841 aa, synthetic construct
  REGION 1..841: note = Variant of DNA polymerase I from Thermus sp. strain 2.9
MHHHHHHGGSGVLPVFEPKGRVLLVDGHHLAYRNFFALKGLTTSRGEPVQGVYGFAKSLLKALKEDGDVVIVVFDAKAPSFRHEAYEAYKAGRAPTPEDFPRQLALMKELVDLLGLERLEVPGFEADDVLATLAKKAEREGYEVQILTADRDLFQLLSPRISVLHPEGHRITPEWLWEKYGLRPEQWVDFRALAGDPSDNIPGVKGIGEKTALKLLKEWGSLENLLKNLDQVKPESVREKILAHLEDLKLSRELSRVRTDLPLEVDFQRRREPDWEGLKAFLERLEFGSLLHEFGLLESPLPAEEAPWPPPEGAFLGYRLSRPEPMWAELLALAASAQGRVYRAEDPHGALRGLFEVRGLLAKDLAVVALREGLDLPPTDDPMLLAYLLDPSNTTPEGVARRYGGEWTEDAAKRALLAERLHENLLGRLQGEERLLWLYEEVEKPLSRVLAHMEATGVKLDVAYLEALSLEVAAEMRRLEEEVFRLAGHSFRLNSRDQLERVLFDELGLPPIGKTEKTGKRSTSAAVLEALREVHPIVDKILQYRELAKLKGTYIDPLPALVHPKTGRLHTRFNQTATATGRLSSSDPNLQNIPVRTPLGQKIRRAFVAEEGWRLVALDYSQIELRVLAHLSGDENLIRVFQEGKDIHTQTASWMFGLSAEAIDPLMRRAAKTINFGVLYGMSAFRLSQELGIPYEEAAAFIQKYFQSYPKVKAWIEKTLEEGRTRGYVETLFGRRRYVPDLNARVKSVREAAERMAFNMPVQGTAADLMKLAMVRLFPQLREVGARMLLQVHDELLLEAPKERAEEVAALAKTVMEGVWPLAVPLEVEVGIGEDWLAAKG

SEQ ID NO: 2309 - DNA, 2529 bp, synthetic construct
  misc_feature 1..2529: note = Variant of DNA polymerase I from Thermus sp. strain 2.9
  source 1..2529: mol_type = other DNA
atgcaccatcatcatcatcatggcggtagcggcgtgttaccggtgttcgagcctaaaggtcgcgtgcttctggttgatggccatcatctcgcgtatcgtaacttctttgccctgaaaggattaaccaccagcagcggcgagccggtacagggtgtctacggctttgcaaagtcgctcctgaaagctctgaaagaagacggtgatgtggtgattgttgtctttgatgcgaaagcgccaagttttcgccacgaagcgtacgaagcttacaaagccgggcgtgctccaacgccggaagactttcctcgccaattggcgcttatgaaggaattagtggatttgcttggcctcgaacgcttggaagttcccggtttcgaggcagacgacgtattagcgactctcgcaaagaaagccgaacgtgagggctatgaagtccagatcttgacagcagatcgcgatcttttccagcttttatctccgcgcatctcggtgttacacccggaagggcatcgtatcaccccggaatggctctgggagaaatatggtttgcgtcccgaacaatgggtggattttcgcgccttagcaggcgatccgagcgacaatattccgggagttaaaggtatcggcgagaagacggcgctcaagctccttaaagaatgggggtcgttggagaacttgcttaagaatttagatcaggtcaaaccagagtcagtgcgtgagaagattcttgctcacctcgaagacctcaaattaagccgcgaattgtcccgtgtacgcaccgatttgccgctcgaagttgatttccgtcgccgccgcgaacctgactgggagggtcttaaagcgtttttagagcgtcttgaatttggttcgctcttgcatgaattcggccttttagaaagcccgttaccagccgaagaagcaccttggccaccgcccgagggcgcgtttttaggttaccgtttgagtcgcccggaaccgatgtgggccgaattactggctcttgcagcgtctgcccagggacgtgtgtatcgcgcggaagaccctcatggtgcgctccgcggcctcttcgaagtccgtggactccttgccaaagacttagctgttgttgcattgcgcgaaggtcttgatttacctccgactgatgatccaatgcttcttgcgtacctcttggacccgtcaaacacgacgcccgaaggcgtagcccgtcgttacggcggcgagtggaccgaagatgcagcgaaacgcgcgttattggccgaacgtttgcacgccaatttattaggacgtttgcaaggcgaggaacgtctcctctggctttacgaagaagtggagaaaccattgagtcgcgtgctcgcgcatatggaagctaccggtgtcaaattagacgtggcgtatttggaggctctcagccttgaagttgctgcccacatgcgccgcttggaggaagaagtattccgtttagcaggccattcctttcgccttaattctcgcgatcagttagaacgtgtgttgttcgatgaacttggtctccctcctatcggcaagacagagaagaccggtaaacgtagcacttcagcggcggttttagaagctcttcgcgaagtccatcccattgtggacaagatcttgcagtaccgcgaactcgcgaaattgaaaggcacctatattgaccgtcttccggcattagtccacccgaaaacgggacgcctccatacccgcttcaaccaaacagccacggcgaccggtcgtttgtcctcctctgatccaaaccttcagaatattccagtacgtaccccattgggccagaagatccgccgtgcgtttgtagctgaggagggttggcgtttagtggccctcgattatagccaaattgaattacgtgtccttgcccatctttctggcgatgagaacctcatccgcgtgtttcaggaaggcaaagacattcacactcaaacggcaagctggatgtttggattatcagctgaagcgatcgatcctttgatgcgtcgtgcagcgaagaccatcaatttcggtgttctctacggtatgagtgcctttcgtttgtcgcaggaattaggcattccctatgaagaagctgcggcgttcattcagaaatactttcaaagctatcccaaagttaaagcatggatcgagaagactctcgaagaaggccgcacacgtggttacgtagagaccttatttggacgtcgccgctatgttcccgatttaaacgctcgcgtgaaaggcaagcgtgaagccgccgaacgcatggcgttcaacatgcctgtacagggcacggcagctgacctcatgaaacttgcaatggtgcgcctttttccacaattgcgtgaagttggtgcccgcatgctcttgcaggtccacgatgaactcttgttagaagcgccaaaagagcgtgcggaagaggtggcagccctcgcgaaagaagttatggaaggcgtgtggcccttagcggtgcctcttgaagtcgaagttggtattggcgaggattggctggctgccaaaggataatga

SEQ ID NO: 2310 - protein, 841 aa, synthetic construct
  REGION 1..841: note = Variant of DNA polymerase I from Thermus sp. strain 2.9
MHHHHHHGGSGVLPVFEPKGRVLLVDGHHLAYRNFFALKGLTTSSGEPVQGVYGFAKSLLKALKEDGDVVIVVFDAKAPSFRHEAYEAYKAGRAPTPEDFPRQLALMKELVDLLGLERLEVPGFEADDVLATLAKKAEREGYEVQILTADRDLFQLLSPRISVLHPEGHRITPEWLWEKYGLRPEQWVDFRALAGDPSDNIPGVKGIGEKTALKLLKEWGSLENLLKNLDQVKPESVREKILAHLEDLKLSRELSRVRTDLPLEVDFRRRREPDWEGLKAFLERLEFGSLLHEFGLLESPLPAEEAPWPPPEGAFLGYRLSRPEPMWAELLALAASAQGRVYRAEDPHGALRGLFEVRGLLAKDLAVVALREGLDLPPTDDPMLLAYLLDPSNTTPEGVARRYGGEWTEDAAKRALLAERLHANLLGRLQGEERLLWLYEEVEKPLSRVLAHMEATGVKLDVAYLEALSLEVAAHMRRLEEEVFRLAGHSFRLNSRDQLERVLFDELGLPPIGKTEKTGKRSTSAAVLEALREVHPIVDKILQYRELAKLKGTYIDRLPALVHPKTGRLHTRFNQTATATGRLSSSDPNLQNIPVRTPLGQKIRRAFVAEEGWRLVALDYSQIELRVLAHLSGDENLIRVFQEGKDIHTQTASWMFGLSAEAIDPLMRRAAKTINFGVLYGMSAFRLSQELGIPYEEAAAFIQKYFQSYPKVKAWIEKTLEEGRTRGYVETLFGRRRYVPDLNARVKGKREAAERMAFNMPVQGTAADLMKLAMVRLFPQLREVGARMLLQVHDELLLEAPKERAEEVAALAKEVMEGVWPLAVPLEVEVGIGEDWLAAKG

SEQ ID NO: 2311 - DNA, 2529 bp, synthetic construct
  misc_feature 1..2529: note = Variant of DNA polymerase I from Thermus sp. strain 2.9
  source 1..2529: mol_type = other DNA
atgcaccatcatcatcatcatggcggtagcggcgtgttaccggtgttcgagcctaaaggtcgcgtgcttctggttgatggccatcatctcgcgtatcgtaacttctttgccctgaaaggattaaccaccagccgtggcgagccggtacagggtgtctacggctttgcaaagtcgctcctgaaagctctgaaagaagacggtgatgtggtgattgttgtctttgatgcgaaagcgccaagttttcgccacgaagcgtacgaagcttacaaagccgggcgtgctccaacgccggaagactttcctcgccaattggcgcttatgaaggaattagtggatttgcttggcctcgaacgcttggaagttcccggtttcgaggcagacgacgtattagcgactctcgcaaagaaagccgaacgtgagggctatgaagtccagatcttgacagcagatcgcgatcttttccagcttttatctccgcgcatctcggtgttacacccggaagggcatcgtatcaccccggaatggctctgggagaaatatggtttgcgtcccgaacaatgggtggattttcgcgccttagcaggcgatccgagcgacaatattccgggagttaaaggtatcggcgagaagacggcgctcaagctccttaaagaatgggggtcgttggagaacttgcttaagaatttagatcaggtcaaaccagagtcagtgcgtgagaagattcttgcacacctcgaagacctcaaattaagccgcgaattgtcccgtgtacgcaccgatttgccgctcgaagttgatttccgtcgccgccgcgaacctgactgggagggtcttaaagcgtttttagagcgtcttgaatttggttcgctcttgcatgaattcggccttttagaaagcccgttaccagccgaagaagcaccttggccaccgcccgaaggcgcgtttttaggttaccgtttgagtcgcccggaaccgatgtgggccgaattattggctcttgcagcgtctgcccagggacgtgtgtatcgcgcggaagaccctcatggtgcgctccgcggcctcttcgaagtccgtggactccttgccaaagacttagctgttgttgcattgcgcgaaggtcttgatttacctccgactgatgatccaatgcttcttgcgtacctcttggacccgtcaaacacgacgcccgaaggcgtagcccgtcgttacggcggcgagtggaccgaagatgcagcgaaacgcgcgttattggccgaacgtttgcacgccaatttattaggacgtttgcaaggcgaggaacgtctcctctggctttacgaagaagtggagaaaccattgagtcgcgtgctcgcgcatatggaagctaccggtgtcaaattagacgtggcgtatttggaggctctcagccttgaagttgctgccgaaatgcgccgcttggaggaagaagtattccgtttagcaggccattcctttcgccttaattctcgcgatcagttagaacgtgtgttgttcgatgaacttggtctcgatcctatcggcaagacagagaagaccggtaaacgtagcacttcagcggcggttttagaagctcttcgcgaagtccatcccattgtggacaagatcttgcagtaccgcgaactcgcgaaattgaaaggcacctatattgaccctcttccggcattagtccacccgaaaacgggacgcctccatacccgcttcaaccaaacagccacggcgaccggtcgtttgtcctcctctgatccaaaccttcagaatattccagtacgtaccccattgggccagaagatccgccgcgcgtttgtagctgaggagggttggcgtttagtggccctcgattatagccaaattgaattacgtgtccttgcccatctttctggcgatgagaacctcatccgcgtgtttcaggaaggcaaagacattcacactcaaacggcaagctggatgtttggattatcagctgaagcgatcgatcctttgatgcgtcgtgcagcgaagaccatcaatttcggtgttctctacggtatgagtgcctttcgtttgtcgcaggaattaggcattccctatgaagaagctgcggcgttcattcagaaatactttcaaagctatcccaaagttaaagcatggatcgagaagactctcgaagaaggccgcacacgtggttacgtagagaccttatttggacgtcgccgctatgttcccgatttaaacgctcgcgtgaaatctgtccgtgaagccgccgaacgcatggcgttcaacatgcctgtacagggcacggcagctgacctcatgaaacttgcaatggtgcgcctttttccacaattgcgtgaagttggtgcccgcatgctcttgcaggtccacgatgaactcttgttagaagcgccaaaagagcgtgcggaagaggtggcagccctcgcgaaagaggttatggaaggcgtgtggcccttagcggtgcctcttgaagtcgaagttggtattggcgaggattggctggctgccaaaggataatga

SEQ ID NO: 2312 - protein, 841 aa, synthetic construct
  REGION 1..841: note = Variant of DNA polymerase I from Thermus sp. strain 2.9
MHHHHHHGGSGVLPVFEPKGRVLLVDGHHLAYRNFFALKGLTTSRGEPVQGVYGFAKSLLKALKEDGDVVIVVFDAKAPSFRHEAYEAYKAGRAPTPEDFPRQLALMKELVDLLGLERLEVPGFEADDVLATLAKKAEREGYEVQILTADRDLFQLLSPRISVLHPEGHRITPEWLWEKYGLRPEQWVDFRALAGDPSDNIPGVKGIGEKTALKLLKEWGSLENLLKNLDQVKPESVREKILAHLEDLKLSRELSRVRTDLPLEVDFRRRREPDWEGLKAFLERLEFGSLLHEFGLLESPLPAEEAPWPPPEGAFLGYRLSRPEPMWAELLALAASAQGRVYRAEDPHGALRGLFEVRGLLAKDLAVVALREGLDLPPTDDPMLLAYLLDPSNTTPEGVARRYGGEWTEDAAKRALLAERLHANLLGRLQGEERLLWLYEEVEKPLSRVLAHMEATGVKLDVAYLEALSLEVAAEMRRLEEEVFRLAGHSFRLNSRDQLERVLFDELGLDPIGKTEKTGKRSTSAAVLEALREVHPIVDKILQYRELAKLKGTYIDPLPALVHPKTGRLHTRFNQTATATGRLSSSDPNLQNIPVRTPLGQKIRRAFVAEEGWRLVALDYSQIELRVLAHLSGDENLIRVFQEGKDIHTQTASWMFGLSAEAIDPLMRRAAKTINFGVLYGMSAFRLSQELGIPYEEAAAFIQKYFQSYPKVKAWIEKTLEEGRTRGYVETLFGRRRYVPDLNARVKSVREAAERMAFNMPVQGTAADLMKLAMVRLFPQLREVGARMLLQVHDELLLEAPKERAEEVAALAKEVMEGVWPLAVPLEVEVGIGEDWLAAKG

SEQ ID NO: 2313 - DNA, 2529 bp, synthetic construct
  misc_feature 1..2529: note = Variant of DNA polymerase I from Thermus sp. strain 2.9
  source 1..2529: mol_type = other DNA
atgcaccatcatcatcatcatggcggtagcggcgtgttaccggtgttcgagcctaaaggtcgcgtgcttctggttgatggccatcatctcgcgtatcgtaacttctttgccctgaaaggattaaccaccagccgtggcgagccggtacagggtgtctacggctttgcaaagtcgctcctgaaagctctgaaagaagacggtgatgtggtgattgttgtctttgatgcgaaagcgccaagttttcgccacgaagcgtacgaagcttacaaagccgggcgtgctccaacgccggaagactttcctcgccaattggcgcttatgaaggaattagtggatttgcttggcctcgaacgcttggaagttcccggtttcgaggcagacgacgtattagcgactctcgcaaagaaagccgaacgtgagggctatgaagtccagatcttgacagcagatcgcgatcttttccagcttttatctccgcgcatctcggtgttacacccggaagggcatcgtatcaccccggaatggctctgggagaaatatggtttgcgtcccgaacaatgggtggattttcgcgccttagcaggcgatccgagcgacaatattccgggagttaaaggtatcggcgagaagacggcgctcaagctccttaaagaatgggggtcgttggagaacttgcttaagaatttagatcaggtcaaaccagagtcagtgcgtgagaagattcttgcacacctcgaagacctcaaattaagccgcgaattgtcccgtgtacgcaccgatttgccgctcgaagttgatttccgtcgccgccgcgaacctgactgggagggtcttaaagcgtttttagagcgtcttgaatttggttcgctcttgcatgaattcggccttttagaaagcccgttaccagccgaagaagcaccttggccaccgcccgaaggcgcgtttttaggttaccgtttgagtcgcccggaaccgatgtgggccgaattattggctcttgcagcgtctgcccagggacgtgtgtatcgcgcggaagaccctcatggtgcgctccgcggcctcttcgaagtccgtggactccttgccaaagacttagctgttgttgcattgcgcgaaggtcttgatttacctccgactgatgatccaatgcttcttgcgtacctcttggacccgtcaaacacgacgcccgaaggcgtagcccgtcgttacggcggctggtggaccgaagatgcagcgaaacgcgcgttattggccgaacgtttgcacgccaatttattaggacgtttgcaaggcgaggaacgtctcctctggctttacgaagaagtggagaaaccattgagtcgcgtgctcgcgcatatggaagctaccggtgtcaaattagacgtggcgtatttggaggctctcagccttgaagttgctgccgaaatgcgccgcttggaggaagaagtattccgtttagcaggccattcctttcgccttaattctcgcgatcagttagaacgtgtgttgttcgatgaacttggtctccctcctatcggcaagacagagaagaccggtaaacgtagcacttcagcggcggttttagaagctcttcgcgaagtccatcccattgtggacaagatcttgcagtaccgcgaactcgcgaaattgaaaggcacctatattgaccctcttccggcattagtccacccgaaaacgggacgcctccatacccgcttcaaccaaacagccacggcgaccggtcgtttgtcctcctctgatccaaaccttcagaatattccagtacgtaccccattgggccagaagatccgccgcgcgtttgtagctgaggagggttggcgtttagtggccctcgattatagccaaattgaattacgtgtccttgcccatctttctggcgatgagaacctcatccgcgtgtttcaggaaggcaaagacattcacactcaaacggcaagctggatgtttggattatcagctgaagcgatcgatcctttgatgcgtcgtgcagcgaagaccatcaatttcggtgttctctacggtatgagtgcctttcgtttgtcgcaggaattaggcattccctatgaagaagctgcggcgttcattcagaaatactttcaaagctatcccaaagttaaagcatggatcgagaagactctcgaagaaggccgcacacgtggttacgtagagaccttatttggacgtcgccgctatgttcccgatttaaacgctcgcgtgaaatctgtccgtgaagccgccgaacgcatggcgttcaacatgcctgtacagggcacggcagctgacctcatgaaacttgcaatggtgcgcctttttccacaattgcgtgaagttggtgcccgcatgctcttgcaggtccacgatgaactcttgttagaagcgccaaaagagcgtgcggaagaggtggcagccctcgcgaaagaggttatggaaggcgtgtggcccttagcggtgcctcttgaagtcgaagttggtattggcgaggattggctggctgccaaaggataatga

SEQ ID NO: 2314 - protein, 841 aa, synthetic construct
  REGION 1..841: note = Variant of DNA polymerase I from Thermus sp. strain 2.9
MHHHHHHGGSGVLPVFEPKGRVLLVDGHHLAYRNFFALKGLTTSRGEPVQGVYGFAKSLLKALKEDGDVVIVVFDAKAPSFRHEAYEAYKAGRAPTPEDFPRQLALMKELVDLLGLERLEVPGFEADDVLATLAKKAEREGYEVQILTADRDLFQLLSPRISVLHPEGHRITPEWLWEKYGLRPEQWVDFRALAGDPSDNIPGVKGIGEKTALKLLKEWGSLENLLKNLDQVKPESVREKILAHLEDLKLSRELSRVRTDLPLEVDFRRRREPDWEGLKAFLERLEFGSLLHEFGLLESPLPAEEAPWPPPEGAFLGYRLSRPEPMWAELLALAASAQGRVYRAEDPHGALRGLFEVRGLLAKDLAVVALREGLDLPPTDDPMLLAYLLDPSNTTPEGVARRYGGWWTEDAAKRALLAERLHANLLGRLQGEERLLWLYEEVEKPLSRVLAHMEATGVKLDVAYLEALSLEVAAEMRRLEEEVFRLAGHSFRLNSRDQLERVLFDELGLPPIGKTEKTGKRSTSAAVLEALREVHPIVDKILQYRELAKLKGTYIDPLPALVHPKTGRLHTRFNQTATATGRLSSSDPNLQNIPVRTPLGQKIRRAFVAEEGWRLVALDYSQIELRVLAHLSGDENLIRVFQEGKDIHTQTASWMFGLSAEAIDPLMRRAAKTINFGVLYGMSAFRLSQELGIPYEEAAAFIQKYFQSYPKVKAWIEKTLEEGRTRGYVETLFGRRRYVPDLNARVKSVREAAERMAFNMPVQGTAADLMKLAMVRLFPQLREVGARMLLQVHDELLLEAPKERAEEVAALAKEVMEGVWPLAVPLEVEVGIGEDWLAAKG

SEQ ID NO: 2315 - DNA, 2529 bp, synthetic construct
  misc_feature 1..2529: note = Variant of DNA polymerase I from Thermus sp. strain 2.9
  source 1..2529: mol_type = other DNA
atgcaccatcatcatcatcatggcggtagcggcgtgttaccggtgttcgagcctaaaggtcgcgtgcttctggttgatggccatcatctcgcgtatcgtaacttctttgccctgaaaggattaaccaccagccgtggcgagccggtacagggtgtctacggctttgcaaagtcgctcctgaaagctctgaaagaagacggtgatgtggtgattgttgtctttgatgcgaaagcgccaagttttcgccacgaagcgtacgaagcttacaaagccgggcgtgctccaacgccggaagactttcctcgccaattggcgcttatgaaggaattagtggatttgcttggcctcgaacgcttggaagttcccggtttcgaggcagacgacgtattagcgactctcgcaaagaaagccgaacgtgagggctatgaagtccagatcttgacagcagatcgcgatcttttccagcttttatctccgcgcatctcggtgttacacccggaagggcatcgtatcaccccggaatggctctgggagaaatatggtttgcgtcccgaacaatgggtggattttcgcgccttagcaggcgatccgagcgacaatattccgggagttaaaggtatcggcgagaagacggcgctcaagctccttaaagaatgggggtcgttggagaacttgcttaagaatttagatcaggtcaaaccagagtcagtgcgtgagaagattcttgctcacctcgaagacctcaaattaagccgcgaattgtcccgtgtacgcaccgatttgccgctcgaagttgatttccgtcgccgccgcgaacctgactgggagggtcttaaagcgtttttagagcgtcttgaatttggttcgctcttgcatgaattcggccttttagaaagcccgttaccagccgaagaagcaccttggccaccgcccgagggcgcgtttttaggttaccgtttgagtcgcccggaaccgatgtgggccgaattattggctcttgcagcgtctgcccagggacgtgtgtatcgcgcggaagaccctcatggtgcgctccgcggcctcttcgaagtccgtggactccttgccaaagacttagctgttgttgcattgcgcgaaggtcttgatttacctccgactgatgatccaatgcttcttgcgtacctcttggacccgtcaaacacgacgcccgaaggcgtagcccgtcgttacggcggcgagtggaccgaagatgcagcgaaacgcgcgttattggccgaacgtttgcacgccaatttattaggacgtttgcaaggcgaggaacgtctcctctggctttacgaagaagtggagaaaccattgagtcgcgtgctcgcgcatatggaagctaccggtgtcaaattagacgtggcgtatttggaggctctcagccttgaagttgctgccgaaatgcgccgcttggaggaagaagtattccgtttagcaggccattcctttcgccttaattctcgcgatcagttagaacgtgtgttgttcgatgaacttggtctccctcctatcggcaagacagagaagaccggtaaacgtagcacttcagcggcggttttagaagctcttcgcgaagtccatcccattgtggacaagatcttgcagtaccgcgaactcgcgaaattgaaaggcacctatattgaccctcttccggcattagtccacccgaaaacgggacgcctccatacccgcttcaaccaaacagccacggcgaccggtcgtttgtcctcctctgatccaaaccttcagaatattccagtacgtaccccattgggccagaagatccgccgcgcgtttgtagctgaggagggttggcgtttagtggccctcgattatagccaaattgaattacgtgtccttgcccatctttctggcgatgagaacctcatccgcgtgtttcaggaaggcaaagacattcacactcaaacggcaagctggatgtttggattatcagctgaagcgatcgatcctttgatgcgtcgtgcagcgaagaccatcaatttcggtgttctctacggtatgagtgcctttcgtttgtcgcaggaattaggcattccctatgaagaagctgcggcgttcattcagaaatactttcaaagctatcccaaagttaaagcatggatcgagaagactctcgaagaaggccgcacacgtggttacgtagagaccttatttggacgtcgccgctatgttcccgatttaaacgctcgcgtgaaaggcaagcgtgaagccgccgaacgcatggcgttcaacatgcctgtacagggcacggcagctgacctcatgaaacttgcaatggtgcgcctttttccacaattgcgtgaagttggtgcccgcatgctcttgcaggtccacgatgaactcttgttagaagcgccaaaagagcgtgcggaagaggtggcagccctcgcgaaagaggttatggaaggcgtgtggcccttagcggtgcctcttgaagtcgaagttggtattggcgaggattggctggctgccaaaggataatga

SEQ ID NO: 2316 - protein, 841 aa, synthetic construct
  REGION 1..841: note = Variant of DNA polymerase I from Thermus sp. strain 2.9
MHHHHHHGGSGVLPVFEPKGRVLLVDGHHLAYRNFFALKGLTTSRGEPVQGVYGFAKSLLKALKEDGDVVIVVFDAKAPSFRHEAYEAYKAGRAPTPEDFPRQLALMKELVDLLGLERLEVPGFEADDVLATLAKKAEREGYEVQILTADRDLFQLLSPRISVLHPEGHRITPEWLWEKYGLRPEQWVDFRALAGDPSDNIPGVKGIGEKTALKLLKEWGSLENLLKNLDQVKPESVREKILAHLEDLKLSRELSRVRTDLPLEVDFRRRREPDWEGLKAFLERLEFGSLLHEFGLLESPLPAEEAPWPPPEGAFLGYRLSRPEPMWAELLALAASAQGRVYRAEDPHGALRGLFEVRGLLAKDLAVVALREGLDLPPTDDPMLLAYLLDPSNTTPEGVARRYGGEWTEDAAKRALLAERLHANLLGRLQGEERLLWLYEEVEKPLSRVLAHMEATGVKLDVAYLEALSLEVAAEMRRLEEEVFRLAGHSFRLNSRDQLERVLFDELGLPPIGKTEKTGKRSTSAAVLEALREVHPIVDKILQYRELAKLKGTYIDPLPALVHPKTGRLHTRFNQTATATGRLSSSDPNLQNIPVRTPLGQKIRRAFVAEEGWRLVALDYSQIELRVLAHLSGDENLIRVFQEGKDIHTQTASWMFGLSAEAIDPLMRRAAKTINFGVLYGMSAFRLSQELGIPYEEAAAFIQKYFQSYPKVKAWIEKTLEEGRTRGYVETLFGRRRYVPDLNARVKGKREAAERMAFNMPVQGTAADLMKLAMVRLFPQLREVGARMLLQVHDELLLEAPKERAEEVAALAKEVMEGVWPLAVPLEVEVGIGEDWLAAKG

SEQ ID NO: 2317 - DNA, 2529 bp, synthetic construct
  misc_feature 1..2529: note = Variant of DNA polymerase I from Thermus sp. strain 2.9
  source 1..2529: mol_type = other DNA
atgcaccatcatcatcatcatggcggtagcggcgtgttaccggtgttcgagcctaaaggtcgcgtgcttctggttgatggccatcatctcgcgtatcgtaacttctttgccctgaaaggattaaccaccagccgtggcgagccggtacagggtgtctacggctttgcaaagtcgctcctgaaagctctgaaagaagacggtgatgtggtgattgttgtctttgatgcgaaagcgccaagttttcgccacgaagcgtacgaagcttacaaagccgggcgtgctccaacgccggaagactttcctcgccaattggcgcttatgaaggaattagtggatttgcttggcctcgaacgcttggaagttcccggtttcgaggcagacgacgtattagcgactctcgcaaagaaagccgaacgtgagggctatgaagtccagatcttgacagcagatcgcgatcttttccagcttttatctccgcgcatctcggtgttacacccggaagggcatcgtatcaccccggaatggctctgggagaaatatggtttgcgtcccgaacaatgggtggattttcgcgccttagcaggcgatccgagcgacaatattccgggagttaaaggtatcggcgagaagacggcgctcaagctccttaaagaatgggggtcgttggagaacttgcttaagaatttagatcaggtcaaaccagagtcagtgcgtgagaagattcttgcacacctcgaagacctcaaattaagccgcgaattgtcccgtgtacgcaccgatttgccgctcgaagttgatttccgtcgccgccgcgaacctgactgggagggtcttaaagcgtttttagagcgtcttgaatttggttcgctcttgcgggaattcggccttttagaaagcccgttaccagccgaagaagcaccttggccaccgcccgaaggcgcgtttttaggttaccgtttgagtcgcccggaaccgatgtgggccgaattattggctcttgcagcgtctgcccagggacgtgtgtatcgcgcggaagaccctcatggtgcgctccgcggcctcttcgaagtccgtggactccttgccaaagacttagctgttgttgcattgcgcgaaggtcttgatttacctccgactgatgatccaatgcttcttgcgtacctcttggacccgtcaaacacgacgcccgaaggcgtagcccgtcgttacggcggcgagtggaccgaagatgcagcgaaacgcgcgttattggccgaacgtttgcacgccaatttattaggacgtttgcaaggcgaggaacgtctcctctggctttacgaagaagtggagaaaccattgagtcgcgtgctcgcgcatatggaagctaccggtgtcaaattagacgtggcgtatttggaggctctcagccttgaagttgctgccgaaatgcgccgcttggaggaagaagtattccgtttagcaggccattcctttcgccttaattctcgcgatcagttagaacgtgtgttgttcgatgaacttggtctccctcctatcggcaagacagagaagaccggtaaacgtagcacttcagcggcggttttagaagctcttcgcgaagtccatcccattgtggacaagatcttgcagtaccgcgaactcgcgaaattgaaaggcacctatattgaccctcttccggcattagtccacccgaaaacgggacgcctccatacccgcttcaaccaaacagccacggcgaccggtcgtttgtcctcctctgatccaaaccttcagaatattccagtacgtaccccattgggccagaagatccgccgcgcgtttgtagctgaggagggttggcgtttagtggccctcgattatagccaaattgaattacgtgtccttgcccatctttctggcgatgagaacctcatccgcgtgtttcaggaaggcaaagacattcacactcaaacggcaagctggatgtttggattatcagctgaagcgatcgatcctttgatgcgtcgtgcagcgaagaccatcaatttcggtgttctctacggtatgagtgcctttcgtttgtcgcaggaattaggcattccctatgaagaagctgcggcgttcattcagaaatactttcaaagctatcccaaagttaaagcatggatcgagaagactctcgaagaaggccgcacacgtggttacgtagagaccttatttggacgtcgccgctatgttcccgatttaaacgctcgcgtgaaatctgtccgtgaagccgccgaacgcatggcgttcaacatgcctgtacagggcacggcagctgacctcatgaaacttgcaatggtgcgcctttttccacaattgcgtgaagttggtgcccgcatgctcttgcaggtccacgatgaactcttgttagaagcgccaaaagagcgtgcggaagaggtggcagccctcgcgaaagaggttatggaaggcgtgtggcccttagcggtgcctcttgaagtcgaagttggtattggcgaggattggctggctgccaaaggataatga

SEQ ID NO: 2318 - protein, 841 aa, synthetic construct
  REGION 1..841: note = Variant of DNA polymerase I from Thermus sp. strain 2.9
MHHHHHHGGSGVLPVFEPKGRVLLVDGHHLAYRNFFALKGLTTSRGEPVQGVYGFAKSLLKALKEDGDVVIVVFDAKAPSFRHEAYEAYKAGRAPTPEDFPRQLALMKELVDLLGLERLEVPGFEADDVLATLAKKAEREGYEVQILTADRDLFQLLSPRISVLHPEGHRITPEWLWEKYGLRPEQWVDFRALAGDPSDNIPGVKGIGEKTALKLLKEWGSLENLLKNLDQVKPESVREKILAHLEDLKLSRELSRVRTDLPLEVDFRRRREPDWEGLKAFLERLEFGSLLREFGLLESPLPAEEAPWPPPEGAFLGYRLSRPEPMWAELLALAASAQGRVYRAEDPHGALRGLFEVRGLLAKDLAVVALREGLDLPPTDDPMLLAYLLDPSNTTPEGVARRYGGEWTEDAAKRALLAERLHANLLGRLQGEERLLWLYEEVEKPLSRVLAHMEATGVKLDVAYLEALSLEVAAEMRRLEEEVFRLAGHSFRLNSRDQLERVLFDELGLPPIGKTEKTGKRSTSAAVLEALREVHPIVDKILQYRELAKLKGTYIDPLPALVHPKTGRLHTRFNQTATATGRLSSSDPNLQNIPVRTPLGQKIRRAFVAEEGWRLVALDYSQIELRVLAHLSGDENLIRVFQEGKDIHTQTASWMFGLSAEAIDPLMRRAAKTINFGVLYGMSAFRLSQELGIPYEEAAAFIQKYFQSYPKVKAWIEKTLEEGRTRGYVETLFGRRRYVPDLNARVKSVREAAERMAFNMPVQGTAADLMKLAMVRLFPQLREVGARMLLQVHDELLLEAPKERAEEVAALAKEVMEGVWPLAVPLEVEVGIGEDWLAAKG

SEQ ID NO: 2319 - DNA, 2529 bp, synthetic construct
  misc_feature 1..2529: note = Variant of DNA polymerase I from Thermus sp. strain 2.9
  source 1..2529: mol_type = other DNA
atgcaccatcatcatcatcatggcggtagcggcgtgttaccggtgttcgagcctaaaggtcgcgtgcttctggttgatggccatcatctcgcgtatcgtaacttctttgccctgaaaggattaaccaccagccgtggcgagccggtacagggtgtctacggctttgcaaagtcgctcctgaaagctctgaaagaagacggtgatgtggtgattgttgtctttgatgcgaaagcgccaagttttcgccacgaagcgtacgaagcttacaaagccgggcgtgctccaacgccggaagactttcctcgccaattggcgcttatgaaggaattagtggatttgcttggcctcgaacgcttggaagttcccggtttcgaggcagacgacgtattagcgactctcgcaaagaaagccgaacgtgagggctatgaagtccagatcttgacagcagatcgcgatcttttccagcttttatctccgcgcatctcggtgttacacccggaagggcatcgtatcaccccggaatggctctgggagaaatatggtttgcgtcccgaacaatgggtggattttcgcgccttagcaggcgatccgagcgacaatattccgggagttaaaggtatcggcgagaagacggcgctcaagctccttaaagaatgggggtcgttggagaacttgcttaagaatttagatcaggtcaaaccagagtcagtgcgtgagaagattcttgcacacctcgaagacctcaaattaagccgcgaattgtcccgtgtacgcaccgatttgccgctcgaagttgatttccagcgccgccgcgaacctgactgggagggtcttaaagcgtttttagagcgtcttgaatttggttcgctcttgcatgaattcggccttttagaaagcccgttaccagccgaagaagcaccttggccaccgccccagggcgcgtttttaggttaccgtttgagtcgcccggaaccgatgtgggccgaattagccgctcttgcagcgtctgcccagggaacggtgtatcgcgcggaagaccctcatggtgcgctccgcggcctcttcgaagtccgtggactccttgccaaagacttagctgttgttgcattgcgcgaaggtcttgatttacctccgactgatgatccaatgcttcttgcgtacctcttggacccgtcaaacacgacgcccgaaggcgtagcccgtcgttacggcggcgagtggaccgaagatgcagcgaaacgcgcgttattggccgaacgtttgcacgccaatttattaggacgtttgcaaggcgaggaacgtctcctctggctttacgaagaagtggagaaaccattgagtcgcgtgctcgcgcatatggaagctaccggtgtcaaattagacgtggcgtatttggaggctctcagccttgaagttgctgccgaaatgcgccgcttggaggaagaagtattccgtttagcaggccactcctttcgccttaattctcgcgatcagttagaacgtgtgttgttcgatgaacttggtctccctcctatcggcaagacagagaagaccggtaaacgtagcacttcagcggcggttttagaagctcttcgcgaagtccatcccattgtggacaagatcttgcagtaccgcgaactcgcgaaattgaaaggcacctatattgaccctcttccggcattagtccacccgaaaacgggacgcctccatacccgcttcaaccaaacagccacggcgaccggtcgtttgtcctcctctgatccaaaccttcagaatattccagtacgtaccccattgggccagaagatccgccgtgcgtttgtagctgaggagggttggcgtttagtggccctcgattatagccaaattgaattacgtgtccttgcccatctttctggcgatgagaacctcatccgcgtgtttcaggaaggcaaagacattcacactcaaacggcaagctggatgtttggattaagtgctgaagcgatcgatcctttgatgcgtcgtgcagcgaagaccatcaatttcggtgttctctacggtatgagtgcctttcgtttgtcgcaggaattaggcattccctatgaagaagctcaggcgttcattcagaaatactttcaaagctatcccaaagttaaagcatggatcgagaagactctcgaagaaggccgcacacgtggttacgtagagaccttatttggacgtcgccgctatgttcccgatttaaacgctcgcgtgaaatctgtccgtgaagccgccgaacgcatggcgttcaacatgcctgtacagggcacggcagctgacctcatgaaacttgcaatggtgcgcctttttccacaattgcgtgaagttggtgcccgcatgctcttgcaggtccacgatgaactcttgttagaagcgccaaaagagcgtgcggaagaggtggcagccctcgcgaaagaagttatggaaggcgtgtggcccttagcggtgcctcttgaagtcgaagttggtattggcgaggattggctggctgccaaaggataatga

SEQ ID NO: 2320 - protein, 841 aa, synthetic construct
  REGION 1..841: note = Variant of DNA polymerase I from Thermus sp. strain 2.9
MHHHHHHGGSGVLPVFEPKGRVLLVDGHHLAYRNFFALKGLTTSRGEPVQGVYGFAKSLLKALKEDGDVVIVVFDAKAPSFRHEAYEAYKAGRAPTPEDFPRQLALMKELVDLLGLERLEVPGFEADDVLATLAKKAEREGYEVQILTADRDLFQLLSPRISVLHPEGHRITPEWLWEKYGLRPEQWVDFRALAGDPSDNIPGVKGIGEKTALKLLKEWGSLENLLKNLDQVKPESVREKILAHLEDLKLSRELSRVRTDLPLEVDFQRRREPDWEGLKAFLERLEFGSLLHEFGLLESPLPAEEAPWPPPQGAFLGYRLSRPEPMWAELAALAASAQGTVYRAEDPHGALRGLFEVRGLLAKDLAVVALREGLDLPPTDDPMLLAYLLDPSNTTPEGVARRYGGEWTEDAAKRALLAERLHANLLGRLQGEERLLWLYEEVEKPLSRVLAHMEATGVKLDVAYLEALSLEVAAEMRRLEEEVFRLAGHSFRLNSRDQLERVLFDELGLPPIGKTEKTGKRSTSAAVLEALREVHPIVDKILQYRELAKLKGTYIDPLPALVHPKTGRLHTRFNQTATATGRLSSSDPNLQNIPVRTPLGQKIRRAFVAEEGWRLVALDYSQIELRVLAHLSGDENLIRVFQEGKDIHTQTASWMFGLSAEAIDPLMRRAAKTINFGVLYGMSAFRLSQELGIPYEEAQAFIQKYFQSYPKVKAWIEKTLEEGRTRGYVETLFGRRRYVPDLNARVKSVREAAERMAFNMPVQGTAADLMKLAMVRLFPQLREVGARMLLQVHDELLLEAPKERAEEVAALAKEVMEGVWPLAVPLEVEVGIGEDWLAAKG

SEQ ID NO: 2321 - DNA, 2529 bp, synthetic construct
  misc_feature 1..2529: note = Variant of DNA polymerase I from Thermus sp. strain 2.9
  source 1..2529: mol_type = other DNA
atgcaccatcatcatcatcatggcggtagcggcgtgttaccggtgttcgagcctaaaggtcgcgtgcttctggttgatggccatcatctcgcgtatcgtaacttctttgccctgaaaggattaaccaccagccgtggcgagccggtacagggtgtctacggctttgcaaagtcgctcctgaaagctctgaaagaagacggtgatgtggtgattgttgtctttgatgcgaaagcgccaagttttcgccacgaagcgtacgaagcttacaaagccgggcgtgctccaacgccggaagactttcctcgccaattggcgcttatgaaggaattagtggatttgcttggcctcgaacgcttggaagttcccggtttcgaggcagacgacgtattagcgactctcgcaaagaaagccgaacgtgagggctatgaagtccagatcttgacagcagatcgcgatcttttccagcttttatctccgcgcatctcggtgttacacccggaagggcatcgtatcaccccggaatggctctgggagaaatatggtttgcgtcccgaacaatgggtggattttcgcgccttagcaggcgatccgagcgacaatattccgggagttaaaggtatcggcgagaagacggcgctcaagctccttaaagaatgggggtcgttggagaacttgcttaagaatttagatcaggtcaaaccagagtcagtgcgtgagaagattcttgcacacctcgaagacctcaaattaagccgcgaattgtcccgtgtacgcaccgatttgccgctcgaagttgatttccgtcgccgccgcgaacctgactgggagggtcttaaagcgtttttagagcgtcttgaatttggttcgctcttgcatgaattcggccttttagaaagcccgttaccagccgaagaagcaccttggccaccgcccgaaggcgcgtttttaggttaccgtttgagtcgcccggaaccgatgtgggccgaattattggctcttgcagcgtctgcccagggacgtgtgtatcgcgcggaagaccctcatggtgcgctccgcggcctcttcgaagtccgtggactccttgccaaagacttagctgttgttgcattgcgcgaaggtcttgatttacctccgactgatgatccaatgcttcttgcgtacctcttggacccgtcaaacacgacgcccgaaggcgtagcccgtcgttacggcggcgagtggaccgaagatgcagcgaaacgcgcgttattggccgaacgtttgcacgccaatttattaggacgtttgcaaggcgaggaacgtctcctctggctttacgaagaagtggagaaaccattgagtcgcgtgctcgcgcatatggaagctaccggtgtcaaattagacgtggcgtatttggaggctctcagccttgaagttgctgccgaaatgcgccgcttggaggaagaagtattccgtttagcaggccattcctttcgccttaattctcgcgatcagttagaacgtgtgttgttcgatgaacttggtctccctcctatcggcaagacagagaagaccggtaaacgtagcacttcagcggcggttttagaagtgcttcgcgaagtccatcccattgtggacaagatcttgcagtaccgcgaactcgcgaaattgaaaggcacctatattgaccctcttccggcattagtccacccgaaaacgggacgcctccatacccgcttcaaccaaacagccacggcgaccggtcgtttgtcctcctctgatccaaaccttcagaatattccagtacgtaccccattgggccagaagatccgccgcgcgtttgtagctgaggagggttggcgtttagtggccctcgattatagccaaattgaattacgtgtccttgcccatctttctggcgatgagaacctcatccgcgtgtttcaggaaggcaaagacattcacactcaaacggcaagctggatgtttggattatcagctgaagcgatcgatcctttgatgcgtcgtgcagcgaagaccatcaatttcggtgttctctacggtatgagtgcctttcgtttgtcgcaggaattaggcattccctatgaagaagctgcggcgttcattcagaaatactttcaaagctatcccaaagttaaagcatggatcgagaagactctcgaagaaggccgcacacgtggttacgtagagaccttatttggacgtcgccgctatgttcccgatttaaacgctcgcgtgaaatctgtccgtgaagccgccgaacgcatggcgttcaacatgcctgtacagggcacggcagctgacctcatgaaacttgcaatggtgcgcctttttccacaattgcgtgaagttggtgcccgcatgctcttgcaggtccacgatgaactcttgttagaagcgccaaaagagcgtgcggaagaggtggcagccctcgcgaaagaggttatggaaggcgtgtggcccttagcggtgcctcttgaagtcgaagttggtattggcgaggattggctggctgccaaaggataatga

SEQ ID NO: 2322 - protein, 841 aa, synthetic construct
  REGION 1..841: note = Variant of DNA polymerase I from Thermus sp. strain 2.9
MHHHHHHGGSGVLPVFEPKGRVLLVDGHHLAYRNFFALKGLTTSRGEPVQGVYGFAKSLLKALKEDGDVVIVVFDAKAPSFRHEAYEAYKAGRAPTPEDFPRQLALMKELVDLLGLERLEVPGFEADDVLATLAKKAEREGYEVQILTADRDLFQLLSPRISVLHPEGHRITPEWLWEKYGLRPEQWVDFRALAGDPSDNIPGVKGIGEKTALKLLKEWGSLENLLKNLDQVKPESVREKILAHLEDLKLSRELSRVRTDLPLEVDFRRRREPDWEGLKAFLERLEFGSLLHEFGLLESPLPAEEAPWPPPEGAFLGYRLSRPEPMWAELLALAASAQGRVYRAEDPHGALRGLFEVRGLLAKDLAVVALREGLDLPPTDDPMLLAYLLDPSNTTPEGVARRYGGEWTEDAAKRALLAERLHANLLGRLQGEERLLWLYEEVEKPLSRVLAHMEATGVKLDVAYLEALSLEVAAEMRRLEEEVFRLAGHSFRLNSRDQLERVLFDELGLPPIGKTEKTGKRSTSAAVLEVLREVHPIVDKILQYRELAKLKGTYIDPLPALVHPKTGRLHTRFNQTATATGRLSSSDPNLQNIPVRTPLGQKIRRAFVAEEGWRLVALDYSQIELRVLAHLSGDENLIRVFQEGKDIHTQTASWMFGLSAEAIDPLMRRAAKTINFGVLYGMSAFRLSQELGIPYEEAAAFIQKYFQSYPKVKAWIEKTLEEGRTRGYVETLFGRRRYVPDLNARVKSVREAAERMAFNMPVQGTAADLMKLAMVRLFPQLREVGARMLLQVHDELLLEAPKERAEEVAALAKEVMEGVWPLAVPLEVEVGIGEDWLAAKG

SEQ ID NO: 2323 - DNA, 2529 bp, synthetic construct
  misc_feature 1..2529: note = Variant of DNA polymerase I from Thermus sp. strain 2.9
  source 1..2529: mol_type = other DNA
atgcaccatcatcatcatcatggcggtagcggcgtgttaccggtgttcgagcctaaaggtcgcgtgcttctggttgatggccatcatctcgcgtatcgtaacttctttgccctgaaaggattaaccaccagcagcggcgagccggtacagggtgtctacggctttgcaaagtcgctcctgaaagctctgaaagaagacggtgatgtggtgattgttgtctttgatgcgaaagcgccaagttttcgccacgaagcgtacgaagcttacaaagccgggcgtgctccaacgccggaagactttcctcgccaattggcgcttatgaaggaattagtggatttgcttggcctcgaacgcttggaagttcccggtttcgaggcagacgacgtattagcgactctcgcaaagaaagccgaacgtgagggctatgaagtccagatcttgacagcagatcgcgatcttttccagcttttatctccgcgcatctcggtgttacacccggaagggcatcgtatcaccccggaatggctctgggagaaatatggtttgcgtcccgaacaatgggtggattttcgcgccttagcaggcgatccgagcgacaatattccgggagttaaaggtatcggcgagaagacggcgctcaagctccttaaagaatgggggtcgttggagaacttgcttaagaatttagatcaggtcaaaccagagtcagtgcgtgagaagattcttgcacacctcgaagacctcaaattaagccgcgaattgtcccgtgtacgcaccgatttgccgctcgaagttgatttccgtcgccgccgcgaacctgactgggagggtcttaaagcgtttttagagcgtcttgaatttggttcgctcttgcatgaattcggccttttagaaagcccgttaccagccgaagaagcaccttggccaccgcccgaaggcgcgtttttaggttaccgtttgagtcgcccggaaccgatgtgggccgaattattggctcttgcagcgtctgcccagggacgtgtgtatcgcgcggaagaccctcatggtgcgctccgcggcctcttcgaagtccgtggactccttgccaaagacttagctgttgttgcattgcgcgaaggtcttgatttacctccgactgatgatccaatgcttcttgcgtacctcttggacccgtcaaacacgacgcccgaaggcgtagcccgtcgttacggcggcgagtggaccgaagatgcagcgaaacgcgcgttattggccgaacgtttgcacgagaatttattaggacgtttgcaaggcgaggaacgtctcctctggctttacgaagaagtggagaaaccattgagtcgcgtgctcgcgcatatggaagctaccggtgtcaaattagacgtggcgtatttggaggctctcagccttgaagttgctgccgaaatgcgccgcttggaggaagaagtattccgtttagcaggccattcctttcgccttaattctcgcgatcagttagaacgtgtgttgttcgatgaacttggtctccctcctatcggcaagacagagaagaccggtaaacgtagcacttcagcggcggttttagaagctcttcgcgaagtccatcccattgtggacaagatcttgcagtaccgcgaactcgcgaaattgaaaggcacctatattgaccctcttccggcattagtccacccgaaaacgggacgcctccatacccgcttcaaccaaacagccacggcgaccggtcgtttgtcctcctctgatccaaaccttcagaatattccagtacgtaccccattgggccagaagatccgccgtgcgtttgtagctgaggagggttggcgtttagtggccctcgattatagccaaattgaattacgtgtccttgcccatctttctggcgatgagaacctcatccgcgtgtttcaggaaggcaaagacattcacactcaaacggcaagctggatgtttggattatcagctgaagcgatcgatcctttgatgcgtcgtgcagcgaagaccatcaatttcggtgttctctacggtatgagtgcctttcgtttgtcgcaggaattaggcattccctatgaagaagctgcggcgttcattcagaaatactttcaaagctatcccaaagttaaagcatggatcgagaagactctcgaagaaggccgcacacgtggttacgtagagaccttatttggacgtcgccgctatgttcccgatttaaacgctcgcgtgaaatctgtccgtgaagccgccgaacgcatggcgttcaacatgcctgtacagggcacggcagctgacctcatgaaacttgcaatggtgcgcctttttccacaattgcgtgaagttggtgcccgcatgctcttgcaggtccacgatgaactcttgttagaagcgccaaaagagcgtgcggaagaggtggcagccctcgcgaaagaggttatggaaggcgtgtggcccttagcggtgcctcttgaagtcgaagttggtattggcgaggattggctggctgccaaaggataatga

SEQ ID NO: 2324 - protein, 841 aa, synthetic construct
  REGION 1..841: note = Variant of DNA polymerase I from Thermus sp. strain 2.9
MHHHHHHGGSGVLPVFEPKGRVLLVDGHHLAYRNFFALKGLTTSSGEPVQGVYGFAKSLLKALKEDGDVVIVVFDAKAPSFRHEAYEAYKAGRAPTPEDFPRQLALMKELVDLLGLERLEVPGFEADDVLATLAKKAEREGYEVQILTADRDLFQLLSPRISVLHPEGHRITPEWLWEKYGLRPEQWVDFRALAGDPSDNIPGVKGIGEKTALKLLKEWGSLENLLKNLDQVKPESVREKILAHLEDLKLSRELSRVRTDLPLEVDFRRRREPDWEGLKAFLERLEFGSLLHEFGLLESPLPAEEAPWPPPEGAFLGYRLSRPEPMWAELLALAASAQGRVYRAEDPHGALRGLFEVRGLLAKDLAVVALREGLDLPPTDDPMLLAYLLDPSNTTPEGVARRYGGEWTEDAAKRALLAERLHENLLGRLQGEERLLWLYEEVEKPLSRVLAHMEATGVKLDVAYLEALSLEVAAEMRRLEEEVFRLAGHSFRLNSRDQLERVLFDELGLPPIGKTEKTGKRSTSAAVLEALREVHPIVDKILQYRELAKLKGTYIDPLPALVHPKTGRLHTRFNQTATATGRLSSSDPNLQNIPVRTPLGQKIRRAFVAEEGWRLVALDYSQIELRVLAHLSGDENLIRVFQEGKDIHTQTASWMFGLSAEAIDPLMRRAAKTINFGVLYGMSAFRLSQELGIPYEEAAAFIQKYFQSYPKVKAWIEKTLEEGRTRGYVETLFGRRRYVPDLNARVKSVREAAERMAFNMPVQGTAADLMKLAMVRLFPQLREVGARMLLQVHDELLLEAPKERAEEVAALAKEVMEGVWPLAVPLEVEVGIGEDWLAAKG

SEQ ID NO: 2325 - DNA, 2529 bp, synthetic construct
  misc_feature 1..2529: note = Variant of DNA polymerase I from Thermus sp. strain 2.9
  source 1..2529: mol_type = other DNA
atgcaccatcatcatcatcatggcggtagcggcgtgttaccggtgttcgagcctaaaggtcgcgtgcttctggttgatggccatcatctcgcgtatcgtaacttctttgccctgaaaggattaaccaccagcagcggcgagccggtacagggtgtctacggctttgcaaagtcgctcctgaaagctctgaaagaagacggtgatgtggtgattgttgtctttgatgcgaaagcgccaagttttcgccacgaagcgtacgaagcttacaaagccgggcgtgctccaacgccggaagactttcctcgccaattggcgcttatgaaggaattagtggatttgcttggcctcgaacgcttggaagttcccggtttcgaggcagacgacgtattagcgactctcgcaaagaaagccgaacgtgagggctatgaagtccagatcttgacagcagatcgcgatcttttccagcttttatctccgcgcatctcggtgttacacccggaagggcatcgtatcaccccggaatggctctgggagaaatatggtttgcgtcccgaacaatgggtggattttcgcgccttagcaggcgatccgagcgacaatattccgggagttaaaggtatcggcgagaagacggcgctcaagctccttaaagaatgggggtcgttggagaacttgcttaagaatttagatcaggtcaaaccagagtcagtgcgtgagaagattcttgctcacctcgaagacctcaaattaagccgcgaattgtcccgtgtacgcaccgatttgccgctcgaagttgatttccgtcgccgccgcgaacctgactgggagggtcttaaagcgtttttagagcgtcttgaatttggttcgctcttgcatgaattcggccttttagaaagcccgttaccagccgaagaagcaccttggccaccgcccgaaggcgcgtttttaggttaccgtttgagtcgcccggaaccgatgtgggccgaattactggctcttgcagcgtctgcccagggacgtgtgtatcgcgcggaagaccctcatggtgcgctccgcggcctcttcgaagtccgtggactccttgccaaagacttagctgttgttgcattgcgcgaaggtcttgatttacctccgactgatgatccaatgcttcttgcgtacctcttggacccgtcaaacacgacgcccgaaggcgtagcccgtcgttacggcggcgagtggaccgaagatgcagcgaaacgcgcgttattggccgaacgtttgcacgccaatttattaggacgtttgcaaggcgaggaacgtctcctctggctttacgaagaagtggagaaaccattgagtcgcgtgctcgggcatatggaagctaccggtgtcaaattagacgtggcgtatttggaggctctcagccttgaagttgctgccgaaatgcgccgcttggaggaagaagtattccgtttagcaggccattcctttcgccttaattctcgcgatcagttagaacgtgtgttgttcgatgaacttggtctccctcctatcggcaagacagagaagaccggtaaacgtagcacttcagcggcggttttagaagctcttcgcgaagtccatcccattgtggacaagatcttgcagtaccgcgaactcgcgaaattgaaaggcacctatattgaccctcttccggcattagtccacccgaaaacgggacgcctccatacccgcttcaaccaaacagccacggcgaccggtcgtttgtcctcctctgatccaaaccttcagaatattccagtacgtaccccattgggccagaagatccgccgcgcgtttgtagctgaggagggttggcgtttagtggccctcgattatagccaaattgaattacgtgtccttgcccatctttctggcgatgagaacctcatccgcgtgtttcaggaaggcaaagacattcacactcaaacggcaagctggatgtttggattatcagctgaagcgatcgatcctttgatgcgtcgtgcagcgaagaccatcaatttcggtgttctctacggtatgagtgcctttcgtttgtcgcaggaattaggcattccctatgaagaagctgcggcgttcattcagaaatactttcaaagctatcccaaagttaaagcatggatcgagaagactctcgaagaaggccgcacacgtggttacgtagagaccttatttggacgtcgccgctatgttcccgatttaaacgctcgcgtgaaatctgtccgtgaagccgccgaacgcatggcgttcaacatgcctgtacagggcacggcagctgacctcatgaaacttgcaatggtgcgcctttttccacaattgcgtgaagttggtgcccgcatgctcttgcaggtccacgatgaactcttgttagaagcgccaaaagagcgtgcggaagaggtggcagccctcgcgaaagaagttatggaaggcgtgtggcccttagcggtgcctcttgaagtcgaagttggtattggcgaggattggctggctgccaaaggataatga

SEQ ID NO: 2326 - protein, 841 aa, synthetic construct
  REGION 1..841: note = Variant of DNA polymerase I from Thermus sp. strain 2.9
MHHHHHHGGSGVLPVFEPKGRVLLVDGHHLAYRNFFALKGLTTSSGEPVQGVYGFAKSLLKALKEDGDVVIVVFDAKAPSFRHEAYEAYKAGRAPTPEDFPRQLALMKELVDLLGLERLEVPGFEADDVLATLAKKAEREGYEVQILTADRDLFQLLSPRISVLHPEGHRITPEWLWEKYGLRPEQWVDFRALAGDPSDNIPGVKGIGEKTALKLLKEWGSLENLLKNLDQVKPESVREKILAHLEDLKLSRELSRVRTDLPLEVDFRRRREPDWEGLKAFLERLEFGSLLHEFGLLESPLPAEEAPWPPPEGAFLGYRLSRPEPMWAELLALAASAQGRVYRAEDPHGALRGLFEVRGLLAKDLAVVALREGLDLPPTDDPMLLAYLLDPSNTTPEGVARRYGGEWTEDAAKRALLAERLHANLLGRLQGEERLLWLYEEVEKPLSRVLGHMEATGVKLDVAYLEALSLEVAAEMRRLEEEVFRLAGHSFRLNSRDQLERVLFDELGLPPIGKTEKTGKRSTSAAVLEALREVHPIVDKILQYRELAKLKGTYIDPLPALVHPKTGRLHTRFNQTATATGRLSSSDPNLQNIPVRTPLGQKIRRAFVAEEGWRLVALDYSQIELRVLAHLSGDENLIRVFQEGKDIHTQTASWMFGLSAEAIDPLMRRAAKTINFGVLYGMSAFRLSQELGIPYEEAAAFIQKYFQSYPKVKAWIEKTLEEGRTRGYVETLFGRRRYVPDLNARVKSVREAAERMAFNMPVQGTAADLMKLAMVRLFPQLREVGARMLLQVHDELLLEAPKERAEEVAALAKEVMEGVWPLAVPLEVEVGIGEDWLAAKG

SEQ ID NO: 2327 - DNA, 2529 bp, synthetic construct
  misc_feature 1..2529: note = Variant of DNA polymerase I from Thermus sp. strain 2.9
  source 1..2529: mol_type = other DNA
atgcaccatcatcatcatcatggcggtagcggcgtgttaccggtgttcgagcctaaaggtcgcgtgcttctggttgatggccatcatctcgcgtatcgtaacttctttgccctgaaaggattagtgaccagccgtggcgagccggtacagggtgtctacggctttgcaaagtcgctcctgaaagctctgaaagaagacggtgatgtggtgattgttgtctttgatgcgaaagcgccaagttttcgccacgaagcgtacgaagcttacaaagccgggcgtgctccaacgccggaagactttcctcgccaattggcgcttatgaaggaattagtggatttgcttggcctcgaacgcttggaagttcccggtttcgaggcagacgacgtattagcgactctcgcaaagaaagccgaacgtgagggctatgaagtccagatcttgacagcagatcgcgatcttttccagcttttatctccgcgcatctcggtgttacacccggaagggcatcgtatcaccccggaatggctctgggagaaatatggtttgcgtcccgaacaatgggtggattttcgcgccttagcaggcgatccgagcgacaatattccgggagttaaaggtatcggcgagaagacggcgctcaagctccttaaagaatgggggtcgttggagaacttgcttaagaatttagatcaggtcaaaccagagtcagtgcgtgagaagattcttgcacacctcgaagacctcaaattaagccgcgaattgtcccgtgtacgcaccgatttgccgctcgaagttgatttccgtcgccgccgcgaacctgactgggagggtcttaaagcgtttttagagcgtcttgaatttggttcgctcttgcatgaattcggccttttagaaagcccgttaccagccgaagaagcaccttggccaccgcccgaaggcgcgtttttaggttaccgtttgagtcgcccggaaccgatgtgggccgaattattggctcttgcagcgtctgcccagggacgtgtgtatcgcgcggaagaccctcatggtgcgctccgcggcctcttcgaagtccgtggactccttgccaaagacttagctgttgttgcattgcgcgaaggtcttgatttacctccgactgatgatccaatgcttcttgcgtacctcttggacccgtcaaacacgacgcccgaaggcgtagcccgtcgttacggcggcgagtggaccgaagatgcagcgaaacgcgcgttattggccgaacgtttgcacgccaatttattaggacgtttgcaaggcgaggaacgtctcctctggctttacgaagaagtggagaaaccattgagtcgcgtgctcgcgcatatggaagctaccggtgtcaaattagacgtggcgtatttggaggctctcagccttgaagttgctgccgaaatgcgccgcttggaggaagaagtattccgtttagcaggccattcctttcgccttaattctcgcgatcagttagaacgtgtgttgttcgatgaacttggtctccctcctatcggcaagacagagaagaccggtaaacgtagcacttcagcggcggttttagaagctcttcgcgaagtccatcccattgtggacaagatcttgcagtaccgcgaactcgcgaaattgaaaggcacctatattgaccctcttccggcattagtccacccgaaaacgggacgcctccatacccgcttcaaccaaacagccacggcgaccggtcgtttgtcctcctctgatccaaaccttcagaatattccagtacgtaccccattgggccagaagatccgccgcgcgtttgtagctgaggagggttggcgtttagtggccctcgattatagccaaattgaattacgtgtccttgcccatctttctggcgatgagaacctcatccgcgtgtttcaggaaggcaaagacattcacactcaaacggcaagctggatgtttggattatcagctgaagcgatcgatcctttgatgcgtcgtgcagcgaagaccatcaatttcggtgttctctacggtatgagtgcctttcgtttgtcgcaggaattaggcattccctatgaagaagctgcggcgttcattcagaaatactttcaaagctatcccaaagttaaagcatggatcgagaagactctcgaagaaggccgcacacgtggttacgtagagaccttatttggacgtcgccgctatgttcccgatttaaacgctcgcgtgaaatctgtccgtgaagccgccgaacgcatggcgttcaacatgcctgtacagggcacggcagctgacctcatgaaacttgcaatggtgcgcctttttccacaattgcgtgaagttggtgcccgcatgctcttgcaggtccacgatgaactcttgttagaagcgccaaaagagcgtgcggaagaggtggcagccctcgcgaaagaggttatggaaggcgtgtggcccttagcggtgcctcttgaagtcgaagttggtattggcgaggattggctggctgccaaaggataatga

SEQ ID NO: 2328 - protein, 841 aa, synthetic construct
  REGION 1..841: note = Variant of DNA polymerase I from Thermus sp. strain 2.9
MHHHHHHGGSGVLPVFEPKGRVLLVDGHHLAYRNFFALKGLVTSRGEPVQGVYGFAKSLLKALKEDGDVVIVVFDAKAPSFRHEAYEAYKAGRAPTPEDFPRQLALMKELVDLLGLERLEVPGFEADDVLATLAKKAEREGYEVQILTADRDLFQLLSPRISVLHPEGHRITPEWLWEKYGLRPEQWVDFRALAGDPSDNIPGVKGIGEKTALKLLKEWGSLENLLKNLDQVKPESVREKILAHLEDLKLSRELSRVRTDLPLEVDFRRRREPDWEGLKAFLERLEFGSLLHEFGLLESPLPAEEAPWPPPEGAFLGYRLSRPEPMWAELLALAASAQGRVYRAEDPHGALRGLFEVRGLLAKDLAVVALREGLDLPPTDDPMLLAYLLDPSNTTPEGVARRYGGEWTEDAAKRALLAERLHANLLGRLQGEERLLWLYEEVEKPLSRVLAHMEATGVKLDVAYLEALSLEVAAEMRRLEEEVFRLAGHSFRLNSRDQLERVLFDELGLPPIGKTEKTGKRSTSAAVLEALREVHPIVDKILQYRELAKLKGTYIDPLPALVHPKTGRLHTRFNQTATATGRLSSSDPNLQNIPVRTPLGQKIRRAFVAEEGWRLVALDYSQIELRVLAHLSGDENLIRVFQEGKDIHTQTASWMFGLSAEAIDPLMRRAAKTINFGVLYGMSAFRLSQELGIPYEEAAAFIQKYFQSYPKVKAWIEKTLEEGRTRGYVETLFGRRRYVPDLNARVKSVREAAERMAFNMPVQGTAADLMKLAMVRLFPQLREVGARMLLQVHDELLLEAPKERAEEVAALAKEVMEGVWPLAVPLEVEVGIGEDWLAAKG

SEQ ID NO: 2329 - DNA, 2529 bp, synthetic construct
  misc_feature 1..2529: note = Variant of DNA polymerase I from Thermus sp. strain 2.9
  source 1..2529: mol_type = other DNA
atgcaccatcatcatcatcatggcggtagcggcgtgttaccggtgttcgagcctaaaggtcgcgtgcttctggttgatggccatcatctcgcgtatcgtaacttctttgccctgaaaggattaaccaccagccgtggcgagccggtacagggtgtctacggctttgcaaagtcgctcctgaaagctctgaaagaagacggtgatgtggtgattgttgtctttgatgcgaaagcgccaagttttcgccacgaagcgtacgaagcttacaaagccgggcgtgctccaacgccggaagactttcctcgccaattggcgcttatgaaggaattagtggatttgcttggcctcgaacgcttggaagttcccggtttcgaggcagacgacgtattagcgactctcgcaaagaaagccgaacgtgagggctatgaagtccagatcttgacagcagatcgcgatcttttccagcttttatctccgcgcatctcggtgttacacccggaagggcatcgtatcaccccggaatggctctgggagaaatatggtttgcgtcccgaacaatgggtggattttcgcgccttagcaggcgatccgagcgacaatattccgggagttaaaggtatcggcgagaagacggcgctcaagctccttaaagaatgggggtcgttggagaacttgcttaagaatttagatcaggtcaaaccagagtcagtgcgtgagaagattcttgcacacctcgaagacctcaaattaagccgcgaattgtcccgtgtacgcaccgatttgccgctcgaagttgatttccgtcgccgccgcgaacctgactgggagggtcttaaagcgtttttagagcgtcttgaatttggttcgctcttgcatgaattcggccttttagaaagcccgttagttgccgaagaagcaccttggccaccgcccgaaggcgcgtttttaggttaccgtttgagtcgcccggaaccgatgtgggccgaattattggctcttgcagcgtctgcccagggacgtgtgtatcgcgcggaagaccctcatggtgcgctccgcggcctcttcgaagtccgtggactccttgccaaagacttagctgttgttgcattgcgcgaaggtcttgatttacctccgactgatgatccaatgcttcttgcgtacctcttggacccgtcaaacacgacgcccgaaggcgtagcccgtcgttacggcggcgagtggaccgaagatgcagcgaaacgcgcgttattggccgaacgtttgcacgccaatttattaggacgtttgcaaggcgaggaacgtctcctctggctttacgaagaagtggagaaaccattgagtcgcgtgctcgcgcatatggaagctaccggtgtcaaattagacgtggcgtatttggaggctctcagccttgaagttgctgccgaaatgcgccgcttggaggaagaagtattccgtttagcaggccattcctttcgccttaattctcgcgatcagttagaacgtgtgttgttcgatgaacttggtctccctcctatcggcaagacagagaagaccggtaaacgtagcacttcagcggcggttttagaagctcttcgcgaagtccatcccattgtggacaagatcttgcagtaccgcgaactcgcgaaattgaaaggcacctatattgaccctcttccggcattagtccacccgaaaacgggacgcctccatacccgcttcaaccaaacagccacggcgaccggtcgtttgtcctcctctgatccaaaccttcagaatattccagtacgtaccccattgggccagaagatccgccgcgcgtttgtagctgaggagggttggcgtttagtggccctcgattatagccaaattgaattacgtgtccttgcccatctttctggcgatgagaacctcatccgcgtgtttcaggaaggcaaagacattcacactcaaacggcaagctggatgtttggattatcagctgaagcgatcgatcctttgatgcgtcgtgcagcgaagaccatcaatttcggtgttctctacggtatgagtgcctttcgtttgtcgcaggaattaggcattccctatgaagaagctgcggcgttcattcagaaatactttcaaagctatcccaaagttaaagcatggatcgagaagactctcgaagaaggccgcacacgtggttacgtagagaccttatttggacgtcgccgctatgttcccgatttaaacgctcgcgtgaaatctgtccgtgaagccgccgaacgcatggcgttcaacatgcctgtacagggcacggcagctgacctcatgaaacttgcaatggtgcgcctttttccacaattgcgtgaagttggtgcccgcatgctcttgcaggtccacgatgaactcttgttagaagcgccaaaagagcgtgcggaagaggtggcagccctcgcgaaagaggttatggaaggcgtgtggcccttagcggtgcctcttgaagtcgaagttggtattggcgaggattggctggctgccaaaggataatga

SEQ ID NO: 2330 - protein, 841 aa, synthetic construct
  REGION 1..841: note = Variant of DNA polymerase I from Thermus sp. strain 2.9
MHHHHHHGGSGVLPVFEPKGRVLLVDGHHLAYRNFFALKGLTTSRGEPVQGVYGFAKSLLKALKEDGDVVIVVFDAKAPSFRHEAYEAYKAGRAPTPEDFPRQLALMKELVDLLGLERLEVPGFEADDVLATLAKKAEREGYEVQILTADRDLFQLLSPRISVLHPEGHRITPEWLWEKYGLRPEQWVDFRALAGDPSDNIPGVKGIGEKTALKLLKEWGSLENLLKNLDQVKPESVREKILAHLEDLKLSRELSRVRTDLPLEVDFRRRREPDWEGLKAFLERLEFGSLLHEFGLLESPLVAEEAPWPPPEGAFLGYRLSRPEPMWAELLALAASAQGRVYRAEDPHGALRGLFEVRGLLAKDLAVVALREGLDLPPTDDPMLLAYLLDPSNTTPEGVARRYGGEWTEDAAKRALLAERLHANLLGRLQGEERLLWLYEEVEKPLSRVLAHMEATGVKLDVAYLEALSLEVAAEMRRLEEEVFRLAGHSFRLNSRDQLERVLFDELGLPPIGKTEKTGKRSTSAAVLEALREVHPIVDKILQYRELAKLKGTYIDPLPALVHPKTGRLHTRFNQTATATGRLSSSDPNLQNIPVRTPLGQKIRRAFVAEEGWRLVALDYSQIELRVLAHLSGDENLIRVFQEGKDIHTQTASWMFGLSAEAIDPLMRRAAKTINFGVLYGMSAFRLSQELGIPYEEAAAFIQKYFQSYPKVKAWIEKTLEEGRTRGYVETLFGRRRYVPDLNARVKSVREAAERMAFNMPVQGTAADLMKLAMVRLFPQLREVGARMLLQVHDELLLEAPKERAEEVAALAKEVMEGVWPLAVPLEVEVGIGEDWLAAKG

SEQ ID NO: 2331 - DNA, 2529 bp, synthetic construct
  misc_feature 1..2529: note = Variant of DNA polymerase I from Thermus sp. strain 2.9
  source 1..2529: mol_type = other DNA
atgcaccatcatcatcatcatggcggtagcggcgtgttaccggtgttcgagcctaaaggtcgcgtgcttctggttgatggccatcatctcgcgtatcgtaacttctttgccctgaaaggattaaccaccagccgcggcgagccggtacagggtgtctacggctttgcaaagtcgctcctgaaagctctgaaagaagacggtgatgtggtgattgttgtctttgatgcgaaagcgccaagttttcgccacgaagcgtacgaagcttacaaagccgggcgtgctccaacgccggaagactttcctcgccaattggcgcttatgaaggaattagtggatttgcttggcctcgaacgcttggaagttcccggtttcgaggcagacgacgtattagcgactctcgcaaagaaagccgaacgtgagggctatgaagtccagatcttgacagcagatcgcgatcttttccagcttttatctccgcgcatctcggtgttacacccggaagggcatcgtatcaccccggaatggctctgggagaaatatggtttgcgtcccgaacaatgggtggattttcgcgccttagcaggcgatccgagcgacaatattccgggagttaaaggtatcggcgagaagacggcgctcaagctccttaaagaatgggggtcgttggagaacttgcttaagaatttagatcaggtcaaaccagagtcagtgcgtgagaagattcttgcacacctcgaagacctcaaattaagccgcgaattgtcccgtgtacgcaccgatttgccgctcgaagttgatttccagcgccgccgcgaacctgactgggagggtcttaaagcgtttttagagcgtcttgaatttggttcgctcttgcatgaattcggccttttagaaagcccgttaccagccgaagaagcaccttggccaccgcccgaaggcgcgtttttaggttaccgtttgagtcgcccggaaccgatgtgggccgaattattggctcttgcagcgtctgcccagggaacggtgtatcgcgcggaagaccctcatggtgcgctccaaggcctcttcgaagtccgtggactccttgccaaagacttagctgttgttgcattgcgcgaaggtcttgatttacctccgactgatgatccaatgcttcttgcgtacctcttggacccgtcaaacacgacgcccgaaggcgtagcccgtcgttacggcggcgagtggaccgaagatgcagcgaaacgcgcgttattggccgaacgtttgcacgagaatttattaggacgtttgcaaggggaggaacgtctcctctggctttacgaagaagtggagaaaccattgagtcgcgtgctcgggcatatggaagctaccggtgtcaaattagacgtggcgtatttggaggctctcagccttgaagttgctgccgaaatgcgccgcttggaggaagaagtattccgtttagcaggccattcctttcgccttaattctcgcgatcagttagaacgtgtgttgttcgatgaacttggtctccctcctatcggcaagacagagaagaccggtaaacgtagcacttcagcggcggttttagaagctcttcgcgaagtccatcccattgtggacaagatcttgcaataccgcgaactcgcgaaattgaaaggcacctatattgaccctcttccggcattagtccacccgaaaacgggacgcctccatacccgcttcaaccaaacagccacggcgaccggtcgtttgtcctcctctgatccaaaccttcagaatattccagtacgtaccccattgggccagaagatccgccgtgcgtttgtagctgaggagggttggcgtttagtggccctcgattatagccaaattgaattacgtgtccttgcccatctttctggcgatgagaacctcatccgcgtgtttcaggaaggcaaagacattcacactcaaacggcaagctggatgtttggattatcagctgaagcgatcgatcctttgatgcgtcgtgcagcgaagaccatcaatttcggtgttctctacggtatgagtgcctttcgtttgtcgcaggaattaggcattccctatgaagaagctgcggcgttcattcagaaatactttcaaagctatcccaaagttaaagcatggatcgagaagactctcgaagaaggccgcacacgtggttacgtagagaccttatttggacgtcgccgctatgttcccgatttaaacgctcgcgtgaaatctgtccgtgaagccgccgaacgcatggcgttcaacatgcctgtacagggcacggcagctgacctcatgaaacttgcaatggtgcgcctttttccacaattgcgtgaagttggtgcccgcatgctcttgcaggtccacgatgaactcttgttagaagcgccaaaagagcgtgcggaagaggtggcagccctcgcgaaagaggttatggaaggcgtgtggcccttagcggtgcctcttgaagtcgaagttggtattggcgaggattggctggctgccaaaggataatga

SEQ ID NO: 2332 - protein, 841 aa, synthetic construct
  REGION 1..841: note = Variant of DNA polymerase I from Thermus sp. strain 2.9
MHHHHHHGGSGVLPVFEPKGRVLLVDGHHLAYRNFFALKGLTTSRGEPVQGVYGFAKSLLKALKEDGDVVIVVFDAKAPSFRHEAYEAYKAGRAPTPEDFPRQLALMKELVDLLGLERLEVPGFEADDVLATLAKKAEREGYEVQILTADRDLFQLLSPRISVLHPEGHRITPEWLWEKYGLRPEQWVDFRALAGDPSDNIPGVKGIGEKTALKLLKEWGSLENLLKNLDQVKPESVREKILAHLEDLKLSRELSRVRTDLPLEVDFQRRREPDWEGLKAFLERLEFGSLLHEFGLLESPLPAEEAPWPPPEGAFLGYRLSRPEPMWAELLALAASAQGTVYRAEDPHGALQGLFEVRGLLAKDLAVVALREGLDLPPTDDPMLLAYLLDPSNTTPEGVARRYGGEWTEDAAKRALLAERLHENLLGRLQGEERLLWLYEEVEKPLSRVLGHMEATGVKLDVAYLEALSLEVAAEMRRLEEEVFRLAGHSFRLNSRDQLERVLFDELGLPPIGKTEKTGKRSTSAAVLEALREVHPIVDKILQYRELAKLKGTYIDPLPALVHPKTGRLHTRFNQTATATGRLSSSDPNLQNIPVRTPLGQKIRRAFVAEEGWRLVALDYSQIELRVLAHLSGDENLIRVFQEGKDIHTQTASWMFGLSAEAIDPLMRRAAKTINFGVLYGMSAFRLSQELGIPYEEAAAFIQKYFQSYPKVKAWIEKTLEEGRTRGYVETLFGRRRYVPDLNARVKSVREAAERMAFNMPVQGTAADLMKLAMVRLFPQLREVGARMLLQVHDELLLEAPKERAEEVAALAKEVMEGVWPLAVPLEVEVGIGEDWLAAKG

SEQ ID NO: 2333 - DNA, 2529 bp, synthetic construct
  misc_feature 1..2529: note = Variant of DNA polymerase I from Thermus sp. strain 2.9
  source 1..2529: mol_type = other DNA
atgcaccatcatcatcatcatggcggtagcggcgtgttaccggtgttcgagcctaaaggtcgcgtgcttctggttgatggccatcatctcgcgtatcgtaacttctttgccctgaaaggattaaccaccagccgtggcgagccggtacagggtgtctacggctttgcaaagtcgctcctgaaagctctgaaagaagacggtgatgtggtgattgttgtctttgatgcgaaagcgccaagttttcgccacgaagcgtacgaagcttacaaagccgggcgtgctccaacgccggaagactttcctcgccaattggcgcttatgaaggaattagtggatttgcttggcctcgaacgcttggaagttcccggtttcgaggcagacgacgtattagcgactctcgcaaagaaagccgaacgtgagggctatgaagtccagatcttgacagcagatcgcgatcttttccagcttttatctccgcgcatctcggtgttacacccggaagggcatcgtatcaccccggaatggctctgggagaaatatggtttgcgtcccgaacaatgggtggattttcgcgccttagcaggcgatccgagcgacaatattccgggagttaaaggtatcggcgagaagacggcgctcaagctccttaaagaatgggggtcgttggagaacttgcttaagaatttagatcaggtcaggccagagtcagtgcgtgagaagattcttgcacacctcgaagacctcaaattaagccgcgaattgtcccgtgtacgcaccgatttgccgctcgaagttgatttccgtcgccgccgcgaacctgactgggagggtcttaaagcgtttttagagcgtcttgaatttggttcgctcttgcatgaattcggccttttagaaagcccgttaccagccgaagaagcaccttggccaccgcccgaaggcgcgtttttaggttaccgtttgagtcgcccggaaccgatgtgggccgaattattggctcttgcagcgtctgcccagggacgtgtgtatcgcgcggaagaccctcatggtgcgctccgcggcctcttcgaagtccgtggactccttgccaaagacttagctgttgttgcattgcgcgaaggtcttgatttacctccgactgatgatccaatgcttcttgcgtacctcttggacccgtcaaacacgacgcccgaaggcgtagcccgtcgttacggcggcgagtggaccgaagatgcagcgaaacgcgcgttattggccgaacgtttgcacgccaatttattaggacgtttgcaaggcgaggaacgtctcctctggctttacgaagaagtggagaaaccattgagtcgcgtgctcgcgcatatggaagctaccggtgtcaaattagacgtggcgtatttggaggctctcagccttgaagttgctgccgaaatgcgccgcttggaggaagaagtattccgtttagcaggccattcctttcgccttaattctcgcgatcagttagaacgtgtgttgttcgatgaacttggtctccctcctatcggcaagacagagaagaccggtaaacgtagcacttcagcggcggttttagaagctcttcgcgaagtccatcccattgtggacaagatcttgcagtaccgcgaactcgcgaaattgaaaggcacctatattgaccctcttccggcattagtccacccgaaaacgggacgcctccatacccgcttcaaccaaacagccacggcgaccggtcgtttgtcctcctctgatccaaaccttcagaatattccagtacgtaccccattgggccagaagatccgccgcgcgtttgtagctgaggagggttggcgtttagtggccctcgattatagccaaattgaattacgtgtccttgcccatctttctggcgatgagaacctcatccgcgtgtttcaggaaggcaaagacattcacactcaaacggcaagctggatgtttggattatcagctgaagcgatcgatcctttgatgcgtcgtgcagcgaagaccatcaatttcggtgttctctacggtatgagtgcctttcgtttgtcgcaggaattaggcattccctatgaagaagctgcggcgttcattcagaaatactttcaaagctatcccaaagttaaagcatggatcgagaagactctcgaagaaggccgcacacgtggttacgtagagaccttatttggacgtcgccgctatgttcccgatttaaacgctcgcgtgaaatctgtccgtgaagccgccgaacgcatggcgttcaacatgcctgtacagggcacggcagctgacctcatgaaacttgcaatggtgcgcctttttccacaattgcgtgaagttggtgcccgcatgctcttgcaggtccacgatgaactcttgttagaagcgccaaaagagcgtgcggaagaggtggcagccctcgcgaaagaggttatggaaggcgtgtggcccttagcggtgcctcttgaagtcgaagttggtattggcgaggattggctggctgccaaaggataatga

SEQ ID NO: 2334 - protein, 841 aa, synthetic construct
  REGION 1..841: note = Variant of DNA polymerase I from Thermus sp. strain 2.9
MHHHHHHGGSGVLPVFEPKGRVLLVDGHHLAYRNFFALKGLTTSRGEPVQGVYGFAKSLLKALKEDGDVVIVVFDAKAPSFRHEAYEAYKAGRAPTPEDFPRQLALMKELVDLLGLERLEVPGFEADDVLATLAKKAEREGYEVQILTADRDLFQLLSPRISVLHPEGHRITPEWLWEKYGLRPEQWVDFRALAGDPSDNIPGVKGIGEKTALKLLKEWGSLENLLKNLDQVRPESVREKILAHLEDLKLSRELSRVRTDLPLEVDFRRRREPDWEGLKAFLERLEFGSLLHEFGLLESPLPAEEAPWPPPEGAFLGYRLSRPEPMWAELLALAASAQGRVYRAEDPHGALRGLFEVRGLLAKDLAVVALREGLDLPPTDDPMLLAYLLDPSNTTPEGVARRYGGEWTEDAAKRALLAERLHANLLGRLQGEERLLWLYEEVEKPLSRVLAHMEATGVKLDVAYLEALSLEVAAEMRRLEEEVFRLAGHSFRLNSRDQLERVLFDELGLPPIGKTEKTGKRSTSAAVLEALREVHPIVDKILQYRELAKLKGTYIDPLPALVHPKTGRLHTRFNQTATATGRLSSSDPNLQNIPVRTPLGQKIRRAFVAEEGWRLVALDYSQIELRVLAHLSGDENLIRVFQEGKDIHTQTASWMFGLSAEAIDPLMRRAAKTINFGVLYGMSAFRLSQELGIPYEEAAAFIQKYFQSYPKVKAWIEKTLEEGRTRGYVETLFGRRRYVPDLNARVKSVREAAERMAFNMPVQGTAADLMKLAMVRLFPQLREVGARMLLQVHDELLLEAPKERAEEVAALAKEVMEGVWPLAVPLEVEVGIGEDWLAAKG

SEQ ID NO: 2335 - DNA, 2529 bp, synthetic construct
  misc_feature 1..2529: note = Variant of DNA polymerase I from Thermus sp. strain 2.9
  source 1..2529: mol_type = other DNA
atgcaccatcatcatcatcatggcggtagcggcgtgttaccggtgttcgagcctaaaggtcgcgtgcttctggttgatggccatcatctcgcgtatcgtaacttctttgccctgaaaggattaaccaccagccgtggcgagccggtacagggtgtctacggctttgcaaagtcgctcctgaaagctctgaaagaagacggtgatgtggtgattgttgtctttgatgcgaaagcgccaagttttcgccacgaagcgtacgaagcttacaaagccgggcgtgctccaacgccggaagactttcctcgccaattggcgcttatgaaggaattagtggatttgcttggcctcgaacgcttggaagttcccggtttcgaggcagacgacgtattagcgactctcgcaaagaaagccgaacgtgagggctatgaagtccagatcttgacagcagatcgcgatcttttccagcttttatctccgcgcatctcggtgttacacccggaagggcatcgtatcaccccggaatggctctgggagaaatatggtttgcgtcccgaacaatgggtggattttcgcgccttagcaggcgatccgagcgacaatattccgggagttaaaggtatcggcgagaagacggcgctcaagctccttaaagaatgggggtcgttggagaacttgcttaagaatttagatcaggtcaaaccagagtcagtgcgtgagaagattcttgcacacctcgaagacctcaaattaagccgcgaattgtcccgtgtacgcaccgatttgccgctcgaagttgatttccgtcgccgccgcgaacctgactgggagggtcttaaagcgtttttagagcgtcttgaatttggttcgctcttgcatgaattcggccttttagaaagcccgttaccagccgaagaagcaccttggccaccgcccgaaggcgcgtttttaggttaccgtttgagtcgcccggaaccgatgtgggccgaattattggctcttgcagcgtctgcccagggacgtgtgtatcgcgcggaagaccctcatggtgcgctccgcggcctcacggaagtccgtggactccttgccaaagacttagctgttgttgcattgcgcgaaggtcttgatttacctccgactgatgatccaatgcttcttgcgtacctcttggacccgtcaaacacgacgcccgaaggcgtagcccgtcgttacggcggcgagtggaccgaagatgcagcgaaacgcgcgttattggccgaacgtttgcacgccaatttattaggacgtttgcaaggcgaggaacgtctcctctggctttacgaagaagtggagaaaccattgagtcgcgtgctcgcgcatatggaagctaccggtgtcaaattagacgtggcgtatttggaggctctcagccttgaagttgctgccgaaatgcgccgcttggaggaagaagtattccgtttagcaggccattcctttcgccttaattctcgcgatcagttagaacgtgtgttgttcgatgaacttggtctccctcctatcggcaagacagagaagaccggtaaacgtagcacttcagcggcggttttagaagctcttcgcgaagtccatcccattgtggacaagatcttgcagtaccgcgaactcgcgaaattgaaaggcacctatattgaccctcttccggcattagtccacccgaaaacgggacgcctccatacccgcttcaaccaaacagccacggcgaccggtcgtttgtcctcctctgatccaaaccttcagaatattccagtacgtaccccattgggccagaagatccgccgcgcgtttgtagctgaggagggttggcgtttagtggccctcgattatagccaaattgaattacgtgtccttgcccatctttctggcgatgagaacctcatccgcgtgtttcaggaaggcaaagacattcacactcaaacggcaagctggatgtttggattatcagctgaagcgatcgatcctttgatgcgtcgtgcagcgaagaccatcaatttcggtgttctctacggtatgagtgcctttcgtttgtcgcaggaattaggcattccctatgaagaagctgcggcgttcattcagaaatactttcaaagctatcccaaagttaaagcatggatcgagaagactctcgaagaaggccgcacacgtggttacgtagagaccttatttggacgtcgccgctatgttcccgatttaaacgctcgcgtgaaatctgtccgtgaagccgccgaacgcatggcgttcaacatgcctgtacagggcacggcagctgacctcatgaaacttgcaatggtgcgcctttttccacaattgcgtgaagttggtgcccgcatgctcttgcaggtccacgatgaactcttgttagaagcgccaaaagagcgtgcggaagaggtggcagccctcgcgaaagaggttatggaaggcgtgtggcccttagcggtgcctcttgaagtcgaagttggtattggcgaggattggctggctgccaaaggataatga

SEQ ID NO: 2336 - protein, 841 aa, synthetic construct
  REGION 1..841: note = Variant of DNA polymerase I from Thermus sp. strain 2.9
MHHHHHHGGSGVLPVFEPKGRVLLVDGHHLAYRNFFALKGLTTSRGEPVQGVYGFAKSLLKALKEDGDVVIVVFDAKAPSFRHEAYEAYKAGRAPTPEDFPRQLALMKELVDLLGLERLEVPGFEADDVLATLAKKAEREGYEVQILTADRDLFQLLSPRISVLHPEGHRITPEWLWEKYGLRPEQWVDFRALAGDPSDNIPGVKGIGEKTALKLLKEWGSLENLLKNLDQVKPESVREKILAHLEDLKLSRELSRVRTDLPLEVDFRRRREPDWEGLKAFLERLEFGSLLHEFGLLESPLPAEEAPWPPPEGAFLGYRLSRPEPMWAELLALAASAQGRVYRAEDPHGALRGLTEVRGLLAKDLAVVALREGLDLPPTDDPMLLAYLLDPSNTTPEGVARRYGGEWTEDAAKRALLAERLHANLLGRLQGEERLLWLYEEVEKPLSRVLAHMEATGVKLDVAYLEALSLEVAAEMRRLEEEVFRLAGHSFRLNSRDQLERVLFDELGLPPIGKTEKTGKRSTSAAVLEALREVHPIVDKILQYRELAKLKGTYIDPLPALVHPKTGRLHTRFNQTATATGRLSSSDPNLQNIPVRTPLGQKIRRAFVAEEGWRLVALDYSQIELRVLAHLSGDENLIRVFQEGKDIHTQTASWMFGLSAEAIDPLMRRAAKTINFGVLYGMSAFRLSQELGIPYEEAAAFIQKYFQSYPKVKAWIEKTLEEGRTRGYVETLFGRRRYVPDLNARVKSVREAAERMAFNMPVQGTAADLMKLAMVRLFPQLREVGARMLLQVHDELLLEAPKERAEEVAALAKEVMEGVWPLAVPLEVEVGIGEDWLAAKG

SEQ ID NO: 2337 - DNA, 2529 bp, synthetic construct
  misc_feature 1..2529: note = Variant of DNA polymerase I from Thermus sp. strain 2.9
  source 1..2529: mol_type = other DNA
atgcaccatcatcatcatcatggcggtagcggcgtgttaccggtgttcgagcctaaaggtcgcgtgcttctggttgatggccatcatctcgcgtatcgtaacttctttgccctgaaaggattaaccaccagccgtggcgagccggtacagggtgtctacggctttgcaaagtcgctcctgaaagctctgaaagaagacggtgatgtggtgattgttgtctttgatgcgaaagcgccaagttttcgccacgaagcgtacgaagcttacaaagccgggcgtgctccaacgccggaagactttcctcgtcaattggcgcttatgaagcacttagtggatttgcttggcctcgaacgcttggaagttcccggtttcgaggcagacgacgtattagcgactctcgcaaagaaagccgaacgtgagggctatgaagtccagatcttgacagcagatcgcgatcttttccagcttttatctccgcgcatctcggtgttacacccggaagggcatcgtatcaccccggaatggctctgggagaaatatggtttgcgtcccgaacaatgggtggattttcgcgccttagcaggcgatccgagcgacaatattccgggagttaaaggtatcggcgagaagacggcgctcaagctccttaaagaatgggggtcgttggagaacttgcttaagaatttagatcaggtcaaaccagagtcagtgcgtgagaagattcttgcacacctcgaagacctcaaattaagccgcgaattgtcccgtgtacgcaccgatttgccgctcgaagttgatttccgtcgccgccgcgaacctgactgggagggtcttaaagcgtttttagagcgtcttgaatttggttcgctcttgcatgaattcggccttttagaaagcccgttaccggccgaagaagcaccttggccaccgcccgagggcgcgtttttaggttaccgtttgagtcgcccggaaccgatgtgggccgaattattggctcttgcagcgtctgcccagggaaccgtgtatcgcgcggaagaccctcatggtgcgctccgcggcctcttcgaagtccgtggactccttgccaaagacttagctgttgttgcattgcgcgaaggtcttgatttacctccgactgatgatccaatgcttcttgcgtacctcttggacccgtcaaacacgacgcccgaaggcgtagcccgtcgttacggcggcgagtggaccgaagatgcagcgaaacgcgcgttattggccgaacgtttgcacgccaatttattaggacgtttgcaaggcgaggaacgtctcctctggctttacgaagaagtggagaaaccattgagtcgcgtgctcgcgcatatggaagctaccggtgtcaaattagacgtggcgtatttggaggctctcagccttgaagttgctgccgaaatgcgccgcttggaggaagaagtattccgtttagcaggccgttcctttcgccttaactctcgcgatcagttagaacgtgtgttgttcgatgaacttggtctccgtcctatcggcaagacagagaagaccggtaaacgtagcacttcagcggcggttttagaagctcttcgcgaagtccatcccattgtggacaagatcttgcagtaccgcgaactcgcgaaattgaaaggcacctatattgaccctcttccggcattagtccacccgaaaacgggacgcctccatacccgcttcaaccaaacagccacggcgaccggtcgtttgtcctcctctgatccaaaccttcagaatattccagtacgtaccccattgggccagaagatccgccgcgcgtttgtagctgaggagggttggcgtttagtggccctcgattatagccaaattgaattacgtgtccttgcccatctttctggcgatgagaacctcatccgcgtgtttcaggaaggcaaagacattcacactcaaacggcaagctggatgtttggattaggcgctgaagcgatcgatcctttgatgcgtcgtgcagcgaagaccatcaatttcggtgttctctacggtatgagtgcctttcgtttgtcgcaggaattaggcattccctatgaagaagctgcggcgttcattcagaaatactttcaaagctatcccaaagttaaagcatggatcgagaagactctcgaggaaggccgcacacgtggttacgtagagaccttatttggacgtcgccgctatgttcccgatttaaacgctcgcgtgaaatctgtccgtgaagccgccgaacgcatggcgttcaacatgcctgtacagggcacggcagctgacctcatgaaacttgcaatggtgcgcctttttccacaattgcgtgaagttggtgcccgcatgctcttgcaggtccacgatgaactcttgttagaagcgccaaaagagcgtgcggaagaggtggcagccctcgcgaaagaggttatggaaggcgtgtggcccttagcggtgcctcttgaagtcgaagttggtattggcgaggattggctggctgccaaaggataatga

SEQ ID NO: 2338 - protein, 841 aa, synthetic construct
  REGION 1..841: note = Variant of DNA polymerase I from Thermus sp. strain 2.9
MHHHHHHGGSGVLPVFEPKGRVLLVDGHHLAYRNFFALKGLTTSRGEPVQGVYGFAKSLLKALKEDGDVVIVVFDAKAPSFRHEAYEAYKAGRAPTPEDFPRQLALMKHLVDLLGLERLEVPGFEADDVLATLAKKAEREGYEVQILTADRDLFQLLSPRISVLHPEGHRITPEWLWEKYGLRPEQWVDFRALAGDPSDNIPGVKGIGEKTALKLLKEWGSLENLLKNLDQVKPESVREKILAHLEDLKLSRELSRVRTDLPLEVDFRRRREPDWEGLKAFLERLEFGSLLHEFGLLESPLPAEEAPWPPPEGAFLGYRLSRPEPMWAELLALAASAQGTVYRAEDPHGALRGLFEVRGLLAKDLAVVALREGLDLPPTDDPMLLAYLLDPSNTTPEGVARRYGGEWTEDAAKRALLAERLHANLLGRLQGEERLLWLYEEVEKPLSRVLAHMEATGVKLDVAYLEALSLEVAAEMRRLEEEVFRLAGRSFRLNSRDQLERVLFDELGLRPIGKTEKTGKRSTSAAVLEALREVHPIVDKILQYRELAKLKGTYIDPLPALVHPKTGRLHTRFNQTATATGRLSSSDPNLQNIPVRTPLGQKIRRAFVAEEGWRLVALDYSQIELRVLAHLSGDENLIRVFQEGKDIHTQTASWMFGLGAEAIDPLMRRAAKTINFGVLYGMSAFRLSQELGIPYEEAAAFIQKYFQSYPKVKAWIEKTLEEGRTRGYVETLFGRRRYVPDLNARVKSVREAAERMAFNMPVQGTAADLMKLAMVRLFPQLREVGARMLLQVHDELLLEAPKERAEEVAALAKEVMEGVWPLAVPLEVEVGIGEDWLAAKG

SEQ ID NO: 2339 - DNA, 2529 bp, synthetic construct
  misc_feature 1..2529: note = Variant of DNA polymerase I from Thermus sp. strain 2.9
  source 1..2529: mol_type = other DNA
atgcaccatcatcatcatcatggcggtagcggcgtgttaccggtgttcgagcctaaaggtcgcgtgcttctggttgatggccatcatctcgcgtatcgtaacttctttgccctgaaaggattaaccaccagccgtggcgagccggtacagggtgtctacggctttgcaaagtcgctcctgaaagctctgaaagaagacggtgatgtggtgattgttgtctttgatgcgaaagcgccaagttttcgccacgaagcgtacgaagcttacaaagccgggcgtgctccaacgccggaagactttcctcgccaattggcgcttatgaaggaattagtggatttgcttggcctcgaacgcttggaagttcccggtttcgaggcagacgacgtattagcgactctcgcaaagaaagccgaacgtgagggctatgaagtccagatcttgacagcagatcgcgatcttttccagcttttatctccgcgcatctcggtgttacacccggaagggcatcgtatcaccccggaatggctctgggagaaatatggtttgcgtcccgaacaatgggtggattttcgcgccttagcaggcgatccgagcgacaatattccgggagttaaaggtatcggcgagaagacggcgctcaagctccttaaagaatgggggtcgttggagaacttgcttaagaatttagatcaggtcaaaccagagtcagtgcgtgagaagattcttgcacacctcgaagacctcaaattaagccgcgaattgtcccgtgtacgcaccgatttgccgctcgaagttgatttccgtcgccgccgcgaacctgactgggagggtcttaaagcgtttttagagcgtcttgaatttggttcgctcttgcatgaattcggccttttagaaagcccgttaccagccgaagaagcaccttggccaccgcccgaaggcgcgtttttaggttaccgtttgagtcgcccggaaccgatgtgggccgaattattggctcttgcagcgtctgcccagggacgtgtgtatcgcgcggaagaccctcatggtgcgctccgcggcctcttcgaagtccgtggactccttgccaaagacttagctgttgttgcattgcgcgaaggtcttgatttacctccgactgatgatccaatgcttcttgcgtacctcttggacccgtcaaacacgacgcccgaaggcgtagcccgtcgttacggcggcgagtggaccgaagatgcagcgaaacgcgcgttattggccgaacgtttgcacaggaatttattaggacgtttgcaaggcgaggaacgtctcctctggctttacgaagaagtggagaaaccattgagtcgcgtgctcgcgcatatggaagctaccggtgtcaaattagacgtggcgtatttggaggctctcagccttgaagttgctgccgaaatgcgccgcttggaggaagaagtattccgtttagcaggccattcctttcgccttaattctcgcgatcagttagaacgtgtgttgttcgatgaacttggtctccctcctatcggcaagacagagaagaccggtaaacgtagcacttcagcggcggttttagaagctcttcgcgaagtccatcccattgtggacaagatcttgcagtaccgcgaactcgcgaaattgaaaggcacctatattgaccctcttccggcattagtccacccgaaaacgggacgcctccatacccgcttcaaccaaacagccacggcgaccggtcgtttgtcctcctctgatccaaaccttcagaatattccagtacgtaccccattgggccagaagatccgccgcgcgtttgtagctgaggagggttggcgtttagtggccctcgattatagccaaattgaattacgtgtccttgcccatctttctggcgatgagaacctcatccgcgtgtttcaggaaggcaaagacattcacactcaaacggcaagctggatgtttggattatcagctgaagcgatcgatcctttgatgcgtcgtgcagcgaagaccatcaatttcggtgttctctacggtatgagtgcctttcgtttgtcgcaggaattaggcattccctatgaagaagctgcggcgttcattcagaaatactttcaaagctatcccaaagttaaagcatggatcgagaagactctcgaagaaggccgcacacgtggttacgtagagaccttatttggacgtcgccgctatgttcccgatttaaacgctcgcgtgaaatctgtccgtgaagccgccgaacgcatggcgttcaacatgcctgtacagggcacggcagctgacctcatgaaacttgcaatggtgcgcctttttccacaattgcgtgaagttggtgcccgcatgctcttgcaggtccacgatgaactcttgttagaagcgccaaaagagcgtgcggaagaggtggcagccctcgcgaaagaggttatggaaggcgtgtggcccttagcggtgcctcttgaagtcgaagttggtattggcgaggattggctggctgccaaaggataatga

SEQ ID NO: 2340 - protein, 841 aa, synthetic construct
  REGION 1..841: note = Variant of DNA polymerase I from Thermus sp. strain 2.9
MHHHHHHGGSGVLPVFEPKGRVLLVDGHHLAYRNFFALKGLTTSRGEPVQGVYGFAKSLLKALKEDGDVVIVVFDAKAPSFRHEAYEAYKAGRAPTPEDFPRQLALMKELVDLLGLERLEVPGFEADDVLATLAKKAEREGYEVQILTADRDLFQLLSPRISVLHPEGHRITPEWLWEKYGLRPEQWVDFRALAGDPSDNIPGVKGIGEKTALKLLKEWGSLENLLKNLDQVKPESVREKILAHLEDLKLSRELSRVRTDLPLEVDFRRRREPDWEGLKAFLERLEFGSLLHEFGLLESPLPAEEAPWPPPEGAFLGYRLSRPEPMWAELLALAASAQGRVYRAEDPHGALRGLFEVRGLLAKDLAVVALREGLDLPPTDDPMLLAYLLDPSNTTPEGVARRYGGEWTEDAAKRALLAERLHRNLLGRLQGEERLLWLYEEVEKPLSRVLAHMEATGVKLDVAYLEALSLEVAAEMRRLEEEVFRLAGHSFRLNSRDQLERVLFDELGLPPIGKTEKTGKRSTSAAVLEALREVHPIVDKILQYRELAKLKGTYIDPLPALVHPKTGRLHTRFNQTATATGRLSSSDPNLQNIPVRTPLGQKIRRAFVAEEGWRLVALDYSQIELRVLAHLSGDENLIRVFQEGKDIHTQTASWMFGLSAEAIDPLMRRAAKTINFGVLYGMSAFRLSQELGIPYEEAAAFIQKYFQSYPKVKAWIEKTLEEGRTRGYVETLFGRRRYVPDLNARVKSVREAAERMAFNMPVQGTAADLMKLAMVRLFPQLREVGARMLLQVHDELLLEAPKERAEEVAALAKEVMEGVWPLAVPLEVEVGIGEDWLAAKG

SEQ ID NO: 2341 - DNA, 2529 bp, synthetic construct
  misc_feature 1..2529: note = Variant of DNA polymerase I from Thermus sp. strain 2.9
  source 1..2529: mol_type = other DNA
atgcaccatcatcatcatcatggcggtagcggcgtgttaccggtgttcgagcctaaaggtcgcgtgcttctggttgatggccatcatctcgcgtatcgtaacttctttgccctgaaaggattaaccaccagccgtggcgagccggtacagggtgtctacggctttgcaaagtcgctcctgaaagctctgaaagaagacggtgatgtggtgattgttgtctttgatgcgaaagcgccaagttttcgccacgaagcgtacgaagcttacaaagccgggcgtgctccaacgccggaagactttcctcgccaattggcgcttatgaaggaattagtggatttgcttggcctcgaacgcttggaagttcccggtttcgaggcagacgacgtattagcgactctcgcaaagaaagccgaacgtgagggctatgaagtccagatcttgacagcagatcgcgatcttttccagcttttatctccgcgcatctcggtgttacacccggaagggcatcgtatcaccccggaatggctctgggagaaatatggtttgcgtcccgaacaatgggtggattttcgcgccttagcaggcgatccgagcgacaatattccgggagttaaaggtatcggcgagaagacggcgctcaagctccttaaagaatgggggtcgttggagaacttgcttaagaatttagatcaggtcaaaccagagtcagtgcgtgagaagattcttgcacacctcgaagacctcaaattaagccgcgaattgtcccgtgtacgcaccgatttgccgctcgaagttgatttccgtcgccgccgcgaacctgactgggagggtcttaaagcgtttttagagcgtcttgaatttggttcgctcttgcatgaattcggccttttagaaagcccgttaccagccgaagaagcaccttggccaccgcccgaaggcgcgtttttaggttaccgtttgagtcgcccggaaccgatgtgggccgaattattggctcttgcagcgtctgcccagggacgtgtgtatcgcgcggaagaccctcatggtgcgctccgcggcctcttcgaagtccgtggactccttgccaaagacttagctgttgttgcattgcgcgaaggtcttgatttacctccgactgatgatccaatgcttcttgcgtacctcttggacccgtcaaacacgacgcccgaaggcgtagcccgtcgttacggcggcgagtggaccgaagatgcagcgaaacgcgcgttattggccgaacgtttgcacgccaatttattaggacgtttgcaaggcgaggaacgtctcctctggctttacgaagaagtggagaaaccattgagtcgcgtgctcgcgcatatggaagctaccggtgtcaaattagacgtggcgtatttggaggctctcagccttgaagttgctgccgaaatgcgccgcttggaggaagaagtattccgtttagcaggccattcctttcgccttaattctcgcgatcagttagaacgtgtgttgttcgatgaacttggtctccctcctatcggcaagacagagaagaccggtaaacgtagcacttcagcggcggttttagaagctcttcgcgaagtccatcccattgtggacaagatcttgcagtaccgcgaactcgcgaaattgaaaggcacctatattgaccctcttccggcattagtccacccgaaaacgggacgcctccatacccgcttcaaccaaacagccacggcgaccggtcgtttgtcctcctctgatccaaaccttcagaatattccagtacgtaccccattgggccagaagatccgccgcgcgtttgtagctgaggagggttggcgtttagtggccctcgattatagccaaattgaattacgtgtccttgcccatctttctggcgatgagaacctcatccgcgtgtttcaggaaggcaaagacattcacactcaaacggcaagctggatgtttggattatcagtggaagcgatcgatcctttgatgcgtcgtgcagcgaagaccatcaatttcggtgttctctacggtatgagtgcctttcgtttgtcgcaggaattaggcattccctatgaagaagctgcggcgttcattcagaaatactttcaaagctatcccaaagttaaagcatggatcgagaagactctcgaagaaggccgcacacgtggttacgtagagaccttatttggacgtcgccgctatgttcccgatttaaacgctcgcgtgaaatctgtccgtgaagccgccgaacgcatggcgttcaacatgcctgtacagggcacggcagctgacctcatgaaacttgcaatggtgcgcctttttccacaattgcgtgaagttggtgcccgcatgctcttgcaggtccacgatgaactcttgttagaagcgccaaaagagcgtgcggaagaggtggcagccctcgcgaaagaggttatggaaggcgtgtggcccttagcggtgcctcttgaagtcgaagttggtattggcgaggattggctggctgccaaaggataatga

SEQ ID NO: 2342 - protein, 841 aa, synthetic construct
  REGION 1..841: note = Variant of DNA polymerase I from Thermus sp. strain 2.9
MHHHHHHGGSGVLPVFEPKGRVLLVDGHHLAYRNFFALKGLTTSRGEPVQGVYGFAKSLLKALKEDGDVVIVVFDAKAPSFRHEAYEAYKAGRAPTPEDFPRQLALMKELVDLLGLERLEVPGFEADDVLATLAKKAEREGYEVQILTADRDLFQLLSPRISVLHPEGHRITPEWLWEKYGLRPEQWVDFRALAGDPSDNIPGVKGIGEKTALKLLKEWGSLENLLKNLDQVKPESVREKILAHLEDLKLSRELSRVRTDLPLEVDFRRRREPDWEGLKAFLERLEFGSLLHEFGLLESPLPAEEAPWPPPEGAFLGYRLSRPEPMWAELLALAASAQGRVYRAEDPHGALRGLFEVRGLLAKDLAVVALREGLDLPPTDDPMLLAYLLDPSNTTPEGVARRYGGEWTEDAAKRALLAERLHANLLGRLQGEERLLWLYEEVEKPLSRVLAHMEATGVKLDVAYLEALSLEVAAEMRRLEEEVFRLAGHSFRLNSRDQLERVLFDELGLPPIGKTEKTGKRSTSAAVLEALREVHPIVDKILQYRELAKLKGTYIDPLPALVHPKTGRLHTRFNQTATATGRLSSSDPNLQNIPVRTPLGQKIRRAFVAEEGWRLVALDYSQIELRVLAHLSGDENLIRVFQEGKDIHTQTASWMFGLSVEAIDPLMRRAAKTINFGVLYGMSAFRLSQELGIPYEEAAAFIQKYFQSYPKVKAWIEKTLEEGRTRGYVETLFGRRRYVPDLNARVKSVREAAERMAFNMPVQGTAADLMKLAMVRLFPQLREVGARMLLQVHDELLLEAPKERAEEVAALAKEVMEGVWPLAVPLEVEVGIGEDWLAAKG

SEQ ID NO: 2343 - DNA, 2529 bp, synthetic construct
  misc_feature 1..2529: note = Variant of DNA polymerase I from Thermus sp. strain 2.9
  source 1..2529: mol_type = other DNA
atgcaccatcatcatcatcatggcggtagcggcgtgttaccggtgttcgagcctaaaggtcgcgtgcttctggttgatggccatcatctcgcgtatcgtaacttctttgccctgaaaggattaaccaccagccgtggcgagccggtacagggtgtctacggctttgcaaagtcgctcctgaaagctctgaaagaagacggtgatgtggtgattgttgtctttgatgcgaaagcgccaagttttcgccacgaagcgtacgaagcttacaaagccgggcgtgctccaacgccggaagactttcctcgccaattggcgcttatgaaggaattagtggatttgcttggcctcgaacgcttggaagttcccggtttcgaggcagacgacgtattagcgactctcgcaaagaaagccgaacgtgagggctatgaagtccagatcttgacagcagatcgcgatcttttccagcttttatctccgcgcatctcggtgttacacccggaagggcatcgtatcaccccggaatggctctgggagaaatatggtttgcgtcccgaacaatgggtggattttcgcgccttagcaggcgatccgagcgacaatattccgggagttaaaggtatcggcgagaagacggcgctcaagctccttaaagaatgggggtcgttggagaacttgcttaagaatttagatcaggtcaaaccagagtcagtgcgtgagaagattcttgcacacctcgaagacctcaaattaagccgcgaattgtcccgtgtacgcaccgatttgccgctcgaagttgatttccagcgccgccgcgaacctgactgggagggtcttaaagcgtttttagagcgtcttgaatttggttcgctcttgcatgaattcggccttttagaaagcccgttaccagccgaagaagcaccttggccaccgcccgaaggcgcgtttttaggttaccgtttgagtcgcccggaaccgatgtgggccgaattattggctcttgcagcgtctgcccagggacgtgtgtatcgcgcggaagaccctcatggtgcgctccgcggcctcttcgaagtccgtggactccttgccaaagacttagctgttgttgcattgcgcgaaggtcttgatttacctccgactgatgatccaatgcttcttgcgtacctcttggacccgtcaaacacgacgcccgaaggcgtagcccgtcgttacggcggcgagtggaccgaagatgcagcgaaacgcgcgttattggccgaacgtttgcacgccaatttattaggacgtttgcaaggcgaggaacgtctcctctggctttacgaagaagtggagaaaccattgagtcgcgtgctcgcgcatatggaagctaccggtgtcaaattagacgtggcgtatttggaggctctcagccttgaagttgctgccgaaatgcgccgcttggaggaagaagtattccgtttagcaggccattcctttcgccttaattctcgcgatcagttagaacgtgtgttgttcgatgaacttggtctccctcctatcggcaagacagagaagaccggtaaacgtagcacttcagcggcggttttagaagctcttcgcgaagtccatcccattgtggacaagatcttgcagtaccgcgaactcgcgaaattgaaaggcacctatattgaccctcttccggcattagtccacccgaaaacgggacgcctccatacccgcttcaaccaaacagccacggcgaccggtcgtttgtcctcctctgatccaaaccttcagaatattccagtacgtaccccattgggccagaagatccgccgcgcgtttgtagctgaggagggttggcgtttagtggccctcgattatagccaaattgaattacgtgtccttgcccatctttctggcgatgagaacctcatccgcgtgtttcaggaaggcaaagacattcacactcaaacggcaagctggatgtttggattatcagctgaagcgatcgatcctttgatgcgtcgtgcagcgaagaccatcaatttcggtgttctctacggtatgagtgcctttcgtttgtcgcaggaattaggcattccctatgaagaagctgcggcgttcattcagaaatactttcaaagctatcccaaagttaaagcatggatcgagaagactctcgaagaaggccgcacacgtggttacgtagagaccttatttggacgtcgccgctatgttcccgatttaaacgctcgcgtgaaatctgtccgtgaagccgccgaacgcatggcgttcaacatgcctgtacagggcacggcagctgacctcatgaaacttgcaatggtgcgcctttttccacaattgcgtgaagttggtgcccgcatgctcttgcaggtccacgatgaactcttgttagaagcgccaaaagagcgtgcggaagaggtggcagccctcgcgaaagaggttatggaaggcgtgtggcccttagcggtgcctcttgaagtcgaagttggtattggcgaggattggctggctgccaaaggataatga

SEQ ID NO: 2344 - protein, 841 aa, synthetic construct
  REGION 1..841: note = Variant of DNA polymerase I from Thermus sp. strain 2.9
MHHHHHHGGSGVLPVFEPKGRVLLVDGHHLAYRNFFALKGLTTSRGEPVQGVYGFAKSLLKALKEDGDVVIVVFDAKAPSFRHEAYEAYKAGRAPTPEDFPRQLALMKELVDLLGLERLEVPGFEADDVLATLAKKAEREGYEVQILTADRDLFQLLSPRISVLHPEGHRITPEWLWEKYGLRPEQWVDFRALAGDPSDNIPGVKGIGEKTALKLLKEWGSLENLLKNLDQVKPESVREKILAHLEDLKLSRELSRVRTDLPLEVDFQRRREPDWEGLKAFLERLEFGSLLHEFGLLESPLPAEEAPWPPPEGAFLGYRLSRPEPMWAELLALAASAQGRVYRAEDPHGALRGLFEVRGLLAKDLAVVALREGLDLPPTDDPMLLAYLLDPSNTTPEGVARRYGGEWTEDAAKRALLAERLHANLLGRLQGEERLLWLYEEVEKPLSRVLAHMEATGVKLDVAYLEALSLEVAAEMRRLEEEVFRLAGHSFRLNSRDQLERVLFDELGLPPIGKTEKTGKRSTSAAVLEALREVHPIVDKILQYRELAKLKGTYIDPLPALVHPKTGRLHTRFNQTATATGRLSSSDPNLQNIPVRTPLGQKIRRAFVAEEGWRLVALDYSQIELRVLAHLSGDENLIRVFQEGKDIHTQTASWMFGLSAEAIDPLMRRAAKTINFGVLYGMSAFRLSQELGIPYEEAAAFIQKYFQSYPKVKAWIEKTLEEGRTRGYVETLFGRRRYVPDLNARVKSVREAAERMAFNMPVQGTAADLMKLAMVRLFPQLREVGARMLLQVHDELLLEAPKERAEEVAALAKEVMEGVWPLAVPLEVEVGIGEDWLAAKG

SEQ ID NO: 2345 - DNA, 2529 bp, synthetic construct
  misc_feature 1..2529: note = Variant of DNA polymerase I from Thermus sp. strain 2.9
  source 1..2529: mol_type = other DNA
atgcaccatcatcatcatcatggcggtagcggcgtgttaccggtgttcgagcctaaaggtcgcgtgcttctggttgatggccatcatctcgcgtatcgtaacttctttgccctgaaaggattaaccaccagcagcggcgagccggtacagggtgtctacggctttgcaaagtcgctcctgaaagctctgaaagaagacggtgatgtggtgattgttgtctttgatgcgaaagcgccaagttttcgccacgaagcgtacgaagcttacaaagccgggcgtgctccaacgccggaagactttcctcgccaattggcgcttatgaaggaattagtggatttgcttggcctcgaacgcttggaagttcccggtttcgaggcagacgacgtattagcgactctcgcaaagaaagccgaacgtgagggctatgaagtccagatcttgacagcagatcgcgatcttttccagcttttatctccgcgcatctcggtgttacacccggaagggcatcgtatcaccccggaatggctctgggagaaatatggtttgcgtcccgaacaatgggtggattttcgcgccttagcaggcgatccgagcgacaatattccgggagttaaaggtatcggcgagaagacggcgctcaagctccttaaagaatgggggtcgttggagaacttgcttaagaatttagatcaggtcaaaccagagtcagtgcgtgagaagattcttgcacacctcgaagacctcaaattaagccgcgaattgtcccgtgtacgcaccgatttgccgctcgaagttgatttccgtcgccgccgcgaacctgactgggagggtcttaaagcgtttttagagcgtcttgaatttggttcgctcttgcatgaattcggccttttagaaagcccgttaccagccgaagaagcaccttggccaccgccccagggcgcgtttttaggttaccgtttgagtcgcccggaaccgatgtgggccgaattattggctcttgcagcgtctgcccagggaacggtgtatcgcgcggaagaccctcatggtgcgctccgcggcctcttcgaagtccgtggactccttgccaaagacttagctgttgttgcattgcgcgaaggtcttgatttacctccgactgatgatccaatgcttcttgcgtacctcttggacccgtcaaacacgacgcccgaaggcgtagcccgtcgttacggcggcgagtggaccgaagatgcagcgaaacgcgcgttattggccgaacgtttgcacgccaatttattaggacgtttgcaaggcgaggaacgtctcctctggctttacgaagaagtggagaaaccattgagtcgcgtgctcgcgcatatggaagctaccggtgtcaaattagacgtggcgtatttggaggctctcagccttgaagttgctgccgaaatgcgccgcttggaggaagaagtattccgtttagcaggccattcctttcgccttaattctcgcgatcagttagaacgtgtgttgttcgatgaacttggtctccctcctatcggcaagacagagaagaccggtaaacgtagcacttcagcggcggttttagaagctcttcgcgaagtccatcccattgtggacaagatcttgcaataccgcgaactcgcgaaattgaaaggcacctatattgaccctcttccggcattagtccacccgaaaacgggacgcctccatacccgcttcaaccaaacagccacggcgaccggtcgtttgtcctcctctgatccaaaccttcagaatattccagtacgtaccccattgggccagaagatccgcaaggcgtttgtagctgaggagggttggcgtttagtggccctcgattatagccaaattgaattacgtgtccttgcccatctttctggcgatgagaacctcatccgcgtgtttcaggaaggcaaagacattcacactcaaacggcaagctggatgtttggattatcagctgaagcgatcgatcctttgatgcgtcgtgcagcgaagaccatcaatttcggtgttctctacggtatgagtgcctttcgtttgtcgcaggaattaggcattccctatgaagaagctgcggcgttcattcagaaatactttcaaagctatcccaaagttaaagcatggatcgagaagactctcgaagaaggccgcacacgtggttacgtagagaccttatttggacgtcgccgctatgttcccgatttaaacgctcgcgtgaaatctgtccgtgaagccgccgaacgcatggcgttcaacatgcctgtacagggcacggcagctgacctcatgaaacttgcaatggtgcgcctttttccacaattgcgtgaagttggtgcccgcatgctcttgcaggtccacgatgaactcttgttagaagcgccaaaagagcgtgcggaagaggtggcagccctcgcgaaagaggttatggaaggcgtgtggcccttagcggtgcctcttgaagtcgaagttggtattggcgaggattggctggctgccaaaggataatga

SEQ ID NO: 2346 - protein, 841 aa, synthetic construct
  REGION 1..841: note = Variant of DNA polymerase I from Thermus sp. strain 2.9
MHHHHHHGGSGVLPVFEPKGRVLLVDGHHLAYRNFFALKGLTTSSGEPVQGVYGFAKSLLKALKEDGDVVIVVFDAKAPSFRHEAYEAYKAGRAPTPEDFPRQLALMKELVDLLGLERLEVPGFEADDVLATLAKKAEREGYEVQILTADRDLFQLLSPRISVLHPEGHRITPEWLWEKYGLRPEQWVDFRALAGDPSDNIPGVKGIGEKTALKLLKEWGSLENLLKNLDQVKPESVREKILAHLEDLKLSRELSRVRTDLPLEVDFRRRREPDWEGLKAFLERLEFGSLLHEFGLLESPLPAEEAPWPPPQGAFLGYRLSRPEPMWAELLALAASAQGTVYRAEDPHGALRGLFEVRGLLAKDLAVVALREGLDLPPTDDPMLLAYLLDPSNTTPEGVARRYGGEWTEDAAKRALLAERLHANLLGRLQGEERLLWLYEEVEKPLSRVLAHMEATGVKLDVAYLEALSLEVAAEMRRLEEEVFRLAGHSFRLNSRDQLERVLFDELGLPPIGKTEKTGKRSTSAAVLEALREVHPIVDKILQYRELAKLKGTYIDPLPALVHPKTGRLHTRFNQTATATGRLSSSDPNLQNIPVRTPLGQKIRKAFVAEEGWRLVALDYSQIELRVLAHLSGDENLIRVFQEGKDIHTQTASWMFGLSAEAIDPLMRRAAKTINFGVLYGMSAFRLSQELGIPYEEAAAFIQKYFQSYPKVKAWIEKTLEEGRTRGYVETLFGRRRYVPDLNARVKSVREAAERMAFNMPVQGTAADLMKLAMVRLFPQLREVGARMLLQVHDELLLEAPKERAEEVAALAKEVMEGVWPLAVPLEVEVGIGEDWLAAKG

SEQ ID NO: 2347 - DNA, 2529 bp, synthetic construct
  misc_feature 1..2529: note = Variant of DNA polymerase I from Thermus sp. strain 2.9
  source 1..2529: mol_type = other DNA
atgcaccatcatcatcatcatggcggtagcggcgtgttaccggtgttcgagcctaaaggtcgcgtgcttctggttgatggccatcatctcgcgtatcgtaacttctttgccctgaaaggattaaccaccagccgtggcgagccggtacagggtgtctacggctttgcaaagtcgctcctgaaagctctgaaagaagacggtgatgtggtgattgttgtctttgatgcgaaagcgccaagttttcgccacgaagcgtacgaagcttacaaagccgggcgtgctccaacgccggaagactttcctcgccaattggcgcttatgaaggaattagtggatttgcttggcctcgaacgcttggaagttcccggtttcgaggcagacgacgtattagcgactctcgcaaagaaagccgaacgtgagggctatgaagtccagatcttgacagcagatcgcgatcttttccagcttttatctccgcgcatctcggtgttacacccggaagggcatcgtatcaccccggaatggctctgggagaaatatggtttgcgtcccgaacaatgggtggattttcgcgccttagcaggcgatccgagcgacaatattccgggagttaaaggtatcggcgagaagacggcgctcaagctccttaaagaatgggggtcgttggagaacttgcttaagaatttagatcaggtcaaaccagagtcagtgcgtgagaagattcttgcacacctcgaagacctcaaattaagccgcgaattgtcccgtgtacgcaccgatttgccgctcgaagttgatttccgtcgccgccgcgaacctgactgggagggtcttaaagcgtttttagagcgtcttgaatttggttcgctcttgcatgaattcggccttttagaaagcccgttaccagccgaagaagcaccttggccaccgcccgaaggcgcgtttttaggttaccgtttgagtcgcccggaaccgatgtgggccgaattattggctcttgcagcgtctgcccagggacgtgtgtatcgcgcggaagaccctcatggtgcgctccgcggcctcttcgaagtccgtggactccttgccaaagacttagctgttgttgcattgcgcgaaggtcttgatttacctccgactgatgatccaatgcttcttgcgtacctcttggacccgtcaaacacgacgcccgaaggcgtagcccgtcgttacggcggcgagtggaccgaagatgcagcgaaacgcgcgttattggccgaacgtttgcacgcgaatttattaggacgtttgcaaggggaggaacgtctcctctggctttacgaagaagtggagaaaccattgagtcgcgtgctcgcgcatatggaagctaccggtgtcaaattagacgtggcgtatttggaggctctcagccttgaagttgctgccgaaatgcgccgcttggaggaagaagtattccgtttagcaggccattcctttcgccttaattctcgcgatcagttagaacgtgtgttgttcgatgaacttggtctccctcctatcggcaagacagagaagaccggtaaacgtagcacttcagcggcggttttagaagctcttcgcgaagtccatcccattgtggacaagatcttgcaataccgcgaactcgcgaaattgaaaggcacctatattgaccgtcttccggcattagtccacccgaaaacgggacgcctccatacccgcttcaaccaaacagccacggcgaccggtcgtttgtcctcctctgatccaaaccttcagaatattccagtacgtaccccattgggccagaagatccgccgtgcgtttgtagctgaggagggttggcgtttagtggccctcgattatagccaaattgaattacgtgtccttgcccatctttctggcgatgagaacctcatccgcgtgtttcaggaaggcaaagacattcacactcaaacggcaagctggatgtttggattatcagctgaagcgatcgatcctttgatgcgtcgtgcagcgaagaccatcaatttcggtgttctctacggtatgagtgcctttcgtttgtcgcaggaattaggcattccctatgaagaagctgcggcgttcattcagaaatactttcaaagctatcccaaagttaaagcatggatcgagaagactctcgaagaaggccgcacacgtggttacgtagagaccttatttggacgtcgccgctatgttcccgatttaaacgctcgcgtgaaatctgtccgtgaagccgccgaacgcatggcgttcaacatgcctgtacagggcacggcagctgacctcatgaaacttgcaatggtgcgcctttttccacaattgcgtgaagttggtgcccgcatgctcttgcaggtccacgatgaactcttgttagaagcgccaaaagagcgtgcggaagaggtggcagccctcgcgaaagaggttatggaaggcgtgtggcccttagcggtgcctcttgaagtcgaagttggtattggcgaggattggctggctgccaaaggataatga

SEQ ID NO: 2348 - protein, 841 aa, synthetic construct
  REGION 1..841: note = Variant of DNA polymerase I from Thermus sp. strain 2.9
MHHHHHHGGSGVLPVFEPKGRVLLVDGHHLAYRNFFALKGLTTSRGEPVQGVYGFAKSLLKALKEDGDVVIVVFDAKAPSFRHEAYEAYKAGRAPTPEDFPRQLALMKELVDLLGLERLEVPGFEADDVLATLAKKAEREGYEVQILTADRDLFQLLSPRISVLHPEGHRITPEWLWEKYGLRPEQWVDFRALAGDPSDNIPGVKGIGEKTALKLLKEWGSLENLLKNLDQVKPESVREKILAHLEDLKLSRELSRVRTDLPLEVDFRRRREPDWEGLKAFLERLEFGSLLHEFGLLESPLPAEEAPWPPPEGAFLGYRLSRPEPMWAELLALAASAQGRVYRAEDPHGALRGLFEVRGLLAKDLAVVALREGLDLPPTDDPMLLAYLLDPSNTTPEGVARRYGGEWTEDAAKRALLAERLHANLLGRLQGEERLLWLYEEVEKPLSRVLAHMEATGVKLDVAYLEALSLEVAAEMRRLEEEVFRLAGHSFRLNSRDQLERVLFDELGLPPIGKTEKTGKRSTSAAVLEALREVHPIVDKILQYRELAKLKGTYIDRLPALVHPKTGRLHTRFNQTATATGRLSSSDPNLQNIPVRTPLGQKIRRAFVAEEGWRLVALDYSQIELRVLAHLSGDENLIRVFQEGKDIHTQTASWMFGLSAEAIDPLMRRAAKTINFGVLYGMSAFRLSQELGIPYEEAAAFIQKYFQSYPKVKAWIEKTLEEGRTRGYVETLFGRRRYVPDLNARVKSVREAAERMAFNMPVQGTAADLMKLAMVRLFPQLREVGARMLLQVHDELLLEAPKERAEEVAALAKEVMEGVWPLAVPLEVEVGIGEDWLAAKG

SEQ ID NO: 2349 - DNA, 2529 bp, synthetic construct
  misc_feature 1..2529: note = Variant of DNA polymerase I from Thermus sp. strain 2.9
  source 1..2529: mol_type = other DNA
atgcaccatcatcatcatcatggcggtagcggcgtgttaccggtgttcgagcctaaaggtcgcgtgcttctggttgatggccatcatctcgcgtatcgtaacttctttgccctgaaaggattaaccaccagccgtggcgagccggtacagggtgtctacggctttgcaaagtcgctcctgaaagctctgaaagaagacggtgatgtggtgattgttgtctttgatgcgaaagcgccaagttttcgccacgaagcgtacgaagcttacaaagccgggcgtgctccaacgccggaagactttcctcgccaattggcgcttatgaaggaattagtggatttgcttggcctcgaacgcttggaagttcccggtttcgaggcagacgacgtattagcgactctcgcaaagaaagccgaacgtgagggctatgaagtccagatcttgacagcagatcgcgatcttttccagcttttatctccgcgcatctcggtgttacacccggaagggcatcgtatcaccccggaatggctctgggagaaatatggtttgcgtcccgaacaatgggtggattttcgcgccttagcaggcgatccgagcgacaatattccgggagttaaaggtatcggcgagcgtacggcgctcaagctccttaaagaatgggggtcgttggagaacttgcttaagaatttagatcaggtcaaaccagagtcagtgcgtgagaagattcttgcacacctcgaagacctcaaattaagccgcgaattgtcccgtgtacgcaccgatttgccgctcgaagttgatttccgtcgccgccgcgaacctgactgggagggtcttaaagcgtttttagagcgtcttgaatttggttcgctcttgcatgaattcggccttttagaaagcccgttaccagccgaagaagcaccttggccaccgcccgaaggcgcgtttttaggttaccgtttgagtcgcccggaaccgatgtgggccgaattattggctcttgcagcgtctgcccagggacgtgtgtatcgcgcggaagaccctcatggtgcgctccgcggcctcttcgaagtccgtggactccttgccaaagacttagctgttgttgcattgcgcgaaggtcttgatttacctccgactgatgatccaatgcttcttgcgtacctcttggacccgtcaaacacgacgcccgaaggcgtagcccgtcgttacggcggcgagtggaccgaagatgcagcgaaacgcgcgttattggccgaacgtttgcacgccaatttattaggacgtttgcaaggcgaggaacgtctcctctggctttacgaagaagtggagaaaccattgagtcgcgtgctcgcgcatatggaagctaccggtgtcaaattagacgtggcgtatttggaggctctcagccttgaagttgctgccgaaatgcgccgcttggaggaagaagtattccgtttagcaggccattcctttcgccttaattctcgcgatcagttagaacgtgtgttgttcgatgaacttggtctccctcctatcggcaagacagagaagaccggtaaacgtagcacttcagcggcggttttagaagctcttcgcgaagtccatcccattgtggacaagatcttgcagtaccgcgaactcgcgaaattgaaaggcacctatattgaccctcttccggcattagtccacccgaaaacgggacgcctccatacccgcttcaaccaaacagccacggcgaccggtcgtttgtcctcctctgatccaaaccttcagaatattccagtacgtaccccattgggccagaagatccgccgcgcgtttgtagctgaggagggttggcgtttagtggccctcgattatagccaaattgaattacgtgtccttgcccatctttctggcgatgagaacctcatccgcgtgtttcaggaaggcaaagacattcacactcaaacggcaagctggatgtttggattatcagctgaagcgatcgatcctttgatgcgtcgtgcagcgaagaccatcaatttcggtgttctctacggtatgagtgcctttcgtttgtcgcaggaattaggcattccctatgaagaagctgcggcgttcattcagaaatactttcaaagctatcccaaagttaaagcatggatcgagaagactctcgaagaaggccgcacacgtggttacgtagagaccttatttggacgtcgccgctatgttcccgatttaaacgctcgcgtgaaatctgtccgtgaagccgccgaacgcatggcgttcaacatgcctgtacagggcacggcagctgacctcatgaaacttgcaatggtgcgcctttttccacaattgcgtgaagttggtgcccgcatgctcttgcaggtccacgatgaactcttgttagaagcgccaaaagagcgtgcggaagaggtggcagccctcgcgaaagaggttatggaaggcgtgtggcccttagcggtgcctcttgaagtcgaagttggtattggcgaggattggctggctgccaaaggataatga

SEQ ID NO: 2350 - protein, 841 aa, synthetic construct
  REGION 1..841: note = Variant of DNA polymerase I from Thermus sp. strain 2.9
MHHHHHHGGSGVLPVFEPKGRVLLVDGHHLAYRNFFALKGLTTSRGEPVQGVYGFAKSLLKALKEDGDVVIVVFDAKAPSFRHEAYEAYKAGRAPTPEDFPRQLALMKELVDLLGLERLEVPGFEADDVLATLAKKAEREGYEVQILTADRDLFQLLSPRISVLHPEGHRITPEWLWEKYGLRPEQWVDFRALAGDPSDNIPGVKGIGERTALKLLKEWGSLENLLKNLDQVKPESVREKILAHLEDLKLSRELSRVRTDLPLEVDFRRRREPDWEGLKAFLERLEFGSLLHEFGLLESPLPAEEAPWPPPEGAFLGYRLSRPEPMWAELLALAASAQGRVYRAEDPHGALRGLFEVRGLLAKDLAVVALREGLDLPPTDDPMLLAYLLDPSNTTPEGVARRYGGEWTEDAAKRALLAERLHANLLGRLQGEERLLWLYEEVEKPLSRVLAHMEATGVKLDVAYLEALSLEVAAEMRRLEEEVFRLAGHSFRLNSRDQLERVLFDELGLPPIGKTEKTGKRSTSAAVLEALREVHPIVDKILQYRELAKLKGTYIDPLPALVHPKTGRLHTRFNQTATATGRLSSSDPNLQNIPVRTPLGQKIRRAFVAEEGWRLVALDYSQIELRVLAHLSGDENLIRVFQEGKDIHTQTASWMFGLSAEAIDPLMRRAAKTINFGVLYGMSAFRLSQELGIPYEEAAAFIQKYFQSYPKVKAWIEKTLEEGRTRGYVETLFGRRRYVPDLNARVKSVREAAERMAFNMPVQGTAADLMKLAMVRLFPQLREVGARMLLQVHDELLLEAPKERAEEVAALAKEVMEGVWPLAVPLEVEVGIGEDWLAAKG

SEQ ID NO: 2351 - DNA, 2529 bp, synthetic construct
  misc_feature 1..2529: note = Variant of DNA polymerase I from Thermus sp. strain 2.9
  source 1..2529: mol_type = other DNA
atgcaccatcatcatcatcatggcggtagcggcgtgttaccggtgttcgagcctaaaggtcgcgtgcttctggttgatggccatcatctcgcgtatcgtaacttctttgccctgaaaggattaaccaccagccgtggcgagccggtacagggtgtctacggctttgcaaagtcgctcctgaaagctctgaaagaagacggtgatgtggtgattgttgtctttgatgcgaaagcgccaagttttcgccacgaagcgtacgaagcttacaaagccgggcgtgctccaacgccggaagactttcctcgccaattggcgcttatgaaggaattagtggatttgcttggcctcgaacgcttggaagttcccggtttcgaggcagacgacgtattagcgactctcgcaaagaaagccgaacgtgagggctatgaagtccagatcttgacagcagatcgcgatcttttccagcttttatctccgcgcatctcggtgttacacccggaagggcatcgtatcaccccggaatggctctgggagaaatatggtttgcgtcccgaacaatgggtggattttcgcgccttagcaggcgatccgagcgacaatattccgggagttaaaggtatcggcgagaagacggcgctcaagctccttaaagaatgggggtcgttggagaacttgcttaagaatttagatcaggtcaaaccagagtcagtgcgtgagaagattcttgcacacctcgaagacctcaaattaagccgcgaattgtcccgtgtacgcaccgatttgccgctcgaagttgatttccgtcgccgccgcgaacctgactgggagggtcttaaagcgtttttagagcgtcttgaatttggttcgctcttgcatgaattcggccttttagaaagcccgttaccagccgaagaagcaccttggccaccgcccgaaggcgcgtttttaggttaccgtttgagtcgcccggaaccgatgtgggccgaattattggctcttgcagcgtctgcccagggacgtgtgtatcgcgcggaagaccctcatggtgcgctccgcggcctcttcgaagtccgtggactccttgccaaagacttagctgttgttgcattgcgcgaaggtcttgatttacctccgactgatgatccaatgcttcttgcgtacctcttggacccgtcaaacacgacgcccgaaggcgtagcccgtcgttacggcggcgagtggaccgaagatgcagcgaaacgcgcgttattggccgaacgtttgcacgccaatttattaggacgtttgcaaggcgaggaacgtctcctctggctttacgaagaagtggagaaaccattgagtcgcgtgctcgcgcatatggaagctaccggtgtcaaattagacgtggcgtatttggaggctctcagccttgaagttgctgccgaaatgcgccgcttggaggaagaagtattccgtttagcaggccattcctttcgcctttattctcgcgatcagttagaacgtgtgttgttcgatgaacttggtctccctcctatcggcaagacagagaagaccggtaaacgtagcacttcagcggcggttttagaagctcttcgcgaagtccatcccattgtggacaagatcttgcagtaccgcgaactcgcgaaattgaaaggcacctatattgaccctcttccggcattagtccacccgaaaacgggacgcctccatacccgcttcaaccaaacagccacggcgaccggtcgtttgtcctcctctgatccaaaccttcagaatattccagtacgtaccccattgggccagaagatccgccgcgcgtttgtagctgaggagggttggcgtttagtggccctcgattatagccaaattgaattacgtgtccttgcccatctttctggcgatgagaacctcatccgcgtgtttcaggaaggcaaagacattcacactcaaacggcaagctggatgtttggattatcagctgaagcgatcgatcctttgatgcgtcgtgcagcgaagaccatcaatttcggtgttctctacggtatgagtgcctttcgtttgtcgcaggaattaggcattccctatgaagaagctgcggcgttcattcagaaatactttcaaagctatcccaaagttaaagcatggatcgagaagactctcgaagaaggccgcacacgtggttacgtagagaccttatttggacgtcgccgctatgttcccgatttaaacgctcgcgtgaaatctgtccgtgaagccgccgaacgcatggcgttcaacatgcctgtacagggcacggcagctgacctcatgaaacttgcaatggtgcgcctttttccacaattgcgtgaagttggtgcccgcatgctcttgcaggtccacgatgaactcttgttagaagcgccaaaagagcgtgcggaagaggtggcagccctcgcgaaagaggttatggaaggcgtgtggcccttagcggtgcctcttgaagtcgaagttggtattggcgaggattggctggctgccaaaggataatga

SEQ ID NO: 2352 - protein, 841 aa, synthetic construct
  REGION 1..841: note = Variant of DNA polymerase I from Thermus sp. strain 2.9
MHHHHHHGGSGVLPVFEPKGRVLLVDGHHLAYRNFFALKGLTTSRGEPVQGVYGFAKSLLKALKEDGDVVIVVFDAKAPSFRHEAYEAYKAGRAPTPEDFPRQLALMKELVDLLGLERLEVPGFEADDVLATLAKKAEREGYEVQILTADRDLFQLLSPRISVLHPEGHRITPEWLWEKYGLRPEQWVDFRALAGDPSDNIPGVKGIGEKTALKLLKEWGSLENLLKNLDQVKPESVREKILAHLEDLKLSRELSRVRTDLPLEVDFRRRREPDWEGLKAFLERLEFGSLLHEFGLLESPLPAEEAPWPPPEGAFLGYRLSRPEPMWAELLALAASAQGRVYRAEDPHGALRGLFEVRGLLAKDLAVVALREGLDLPPTDDPMLLAYLLDPSNTTPEGVARRYGGEWTEDAAKRALLAERLHANLLGRLQGEERLLWLYEEVEKPLSRVLAHMEATGVKLDVAYLEALSLEVAAEMRRLEEEVFRLAGHSFRLYSRDQLERVLFDELGLPPIGKTEKTGKRSTSAAVLEALREVHPIVDKILQYRELAKLKGTYIDPLPALVHPKTGRLHTRFNQTATATGRLSSSDPNLQNIPVRTPLGQKIRRAFVAEEGWRLVALDYSQIELRVLAHLSGDENLIRVFQEGKDIHTQTASWMFGLSAEAIDPLMRRAAKTINFGVLYGMSAFRLSQELGIPYEEAAAFIQKYFQSYPKVKAWIEKTLEEGRTRGYVETLFGRRRYVPDLNARVKSVREAAERMAFNMPVQGTAADLMKLAMVRLFPQLREVGARMLLQVHDELLLEAPKERAEEVAALAKEVMEGVWPLAVPLEVEVGIGEDWLAAKG

SEQ ID NO: 2353 - DNA, 2529 bp, synthetic construct
  misc_feature 1..2529: note = Variant of DNA polymerase I from Thermus sp. strain 2.9
  source 1..2529: mol_type = other DNA
atgcaccatcatcatcatcatggcggtagcggcgtgttaccggtgttcgagcctaaaggtcgcgtgcttctggttgatggccatcatctcgcgtatcgtaacttctttgccctgaaaggattaaccaccagccgtggcgagccggtacagggtgtctacggctttgcaaagtcgctcctgaaagctctgaaagaagacggtgatgtggtgattgttgtctttgatgcgaaagcgccaagttttcgccacgaagcgtacgaagcttacaaagccgggcgtgctccaacgccggaagactttcctcgccaattggcgcttatgaaggaattagtggatttgcttggcctcgaacgcttggaagttcccggtttcgaggcagacgacgtattagcgactctcgcaaagaaagccgaacgtgagggctatgaagtccagatcttgacagcagatcgcgatcttttccagcttttatctccgcgcatctcggtgttacacccggaagggcatcgtatcaccccggaatggctctgggagaaatatggtttgcgtcccgaacaatgggtggattttcgcgccttagcaggcgatccgagcgacaatattccgggagttaaaggtatcggcgagaagacggcgctcaagctccttaaagaatgggggtcgttggagaacttgcttaagaatttagatcaggtcaaaccagagtcagtgcgtgagaagattcttgcacacctcgaagacctcaaattaagccgcgaattgtcccgtgtacgcaccgatttgccgctcgaagttgatttccgtcgccgccgcgaacctgactgggagggtcttaaagcgtttttagagcgtcttgaatttggttcgctcttgcatgaattcggccttttagaaagcccgttaccagccgaagaagcaccttggccaccgcccgaaggcgcgtttttaggttaccgtttgagtcgcccggaaccgatgtgggccgaattattggctcttgcagcgtctgcccagggacgtgtgtatcgcgcggaagaccctcatggtgcgctccgcggcctcttcgaagtccgtggactccttgccaaagacttagctgttgttgcattgcgcgaaggtcttgatttacctccgactgatgatccaatgcttcttgcgtacctcttggacccgtcaaacacgacgcccgaaggcgtagcccgtcgttacggcggcgagtggaccgaagatgcagcgaaacgcgcgttattggccgaacgtttgcacgccaatttattaggacgtttgcaaggcgaggaacgtctcctctggctttacgaagaagtggagaaaccattgagtcgcgtgctcgcgcatatggaagctaccggtgtcaaattagacgtggcgtatttggaggctctcagccttgaagttgctgccgaaatgcgccgcttggaggaagaagtattccgtttagcaggccattcctttcgccttaattctcgcgatcagttagaacgtgtgttgttcgatgaacttggtctccctcctatcggcaagacagagaagaccggtaaacgtagcacttcagcggcggttttagaagctcttcgcgaagtccatcccattgtggacaagatcttgcagtaccgcgaactcgcgaaattgaaaggcacctatattgaccctcttccggcattagtccacccgaaaacgggacgcctccatacccgcttcaaccaaacagccacggcgaccggtcgtttgtcctcctctgatccaaaccttcagaatattccagtacgtaccccattgggccagaagatccgccgcgcgtttgtagctgaggagggttggcgtttagtggccctcgattatagccaaattgaattacgtgtccttgcccatctttctggcgatgagaacctcatccgcgtgtttcaggaaggcaaagacattcacactcaaacggcaagctggatgtttggattatcagctgaagcgatcgatcctttgatgcgtcgtgcagcgaagaccatcaatttcggtgttctctacggtatgagtgcctttcgtttgtcgcaggaattaggcattccctatgaagaagctgcggcgttcattcagaaatactttcaaagctatcccaaagttaaagcatggatcgagaagactctcgaagaaggccgcacacgtggttacgtagagaccttatttggacgtcgccgctatgttcccgatttaaacgctcgcgtgaaatctgtccgtgaagccgccgaacgcatggcgttcaacatgcctgtacagggcacggcagctgacctcatgaaacttgcaatggtgcgcctttttccacaattgcgtgaagttggtgcccgcatgctcttgcaggtccacgatgaactcttgttagaagcgccaaaagagcgtgcggaagaggtggcagccctcgcgaaacaggttatggaaggcgtgtggcccttagcggtgcctcttgaagtcgaagttggtattggcgaggattggctggctgccaaaggataatga

SEQ ID NO: 2354 - protein, 841 aa, synthetic construct
  REGION 1..841: note = Variant of DNA polymerase I from Thermus sp. strain 2.9
MHHHHHHGGSGVLPVFEPKGRVLLVDGHHLAYRNFFALKGLTTSRGEPVQGVYGFAKSLLKALKEDGDVVIVVFDAKAPSFRHEAYEAYKAGRAPTPEDFPRQLALMKELVDLLGLERLEVPGFEADDVLATLAKKAEREGYEVQILTADRDLFQLLSPRISVLHPEGHRITPEWLWEKYGLRPEQWVDFRALAGDPSDNIPGVKGIGEKTALKLLKEWGSLENLLKNLDQVKPESVREKILAHLEDLKLSRELSRVRTDLPLEVDFRRRREPDWEGLKAFLERLEFGSLLHEFGLLESPLPAEEAPWPPPEGAFLGYRLSRPEPMWAELLALAASAQGRVYRAEDPHGALRGLFEVRGLLAKDLAVVALREGLDLPPTDDPMLLAYLLDPSNTTPEGVARRYGGEWTEDAAKRALLAERLHANLLGRLQGEERLLWLYEEVEKPLSRVLAHMEATGVKLDVAYLEALSLEVAAEMRRLEEEVFRLAGHSFRLNSRDQLERVLFDELGLPPIGKTEKTGKRSTSAAVLEALREVHPIVDKILQYRELAKLKGTYIDPLPALVHPKTGRLHTRFNQTATATGRLSSSDPNLQNIPVRTPLGQKIRRAFVAEEGWRLVALDYSQIELRVLAHLSGDENLIRVFQEGKDIHTQTASWMFGLSAEAIDPLMRRAAKTINFGVLYGMSAFRLSQELGIPYEEAAAFIQKYFQSYPKVKAWIEKTLEEGRTRGYVETLFGRRRYVPDLNARVKSVREAAERMAFNMPVQGTAADLMKLAMVRLFPQLREVGARMLLQVHDELLLEAPKERAEEVAALAKQVMEGVWPLAVPLEVEVGIGEDWLAAKG

SEQ ID NO: 2355 - DNA, 2529 bp, synthetic construct
  misc_feature 1..2529: note = Variant of DNA polymerase I from Thermus sp. strain 2.9
  source 1..2529: mol_type = other DNA
atgcaccatcatcatcatcatggcggtagcggcgtgttaccggtgttcgagcctaaaggtcgcgtgcttctggttgatggccatcatctcgcgtatcgtaacttctttgccctgaaaggattaaccaccagccgtggcgagccggtacagggtgtctacggctttgcaaagtcgctcctgaaagctctgaaagaagacggtgatgtggtgattgttgtctttgatgcgaaagcgccaagttttcgccacgaagcgtacgaagcttacaaagccgggcgtgctccaacgccggaagactttcctcgccaattggcgcttatgaaggaattagtggatttgcttggcctcgaacgcttggaagttcccggtttcgaggcagacgacgtattagcgactctcgcaaagaaagccgaacgtgagggctatgaagtccagatcttgacagcagatcgcgatcttttccagcttttatctccgcgcatctcggtgttacacccggaagggcatcgtatcaccccggaatggctctgggagaaatatggtttgcgtcccgaacaatgggtggattttcgcgccttagcaggcgatccgagcgacaatattccgggagttaaaggtatcggcgagaagacggcgctcaagctccttaaagaatgggggtcgttggagaacttgcttaagaatttagatcaggtcaaaccagagtcagtgcgtgagaagattcttgcacacctcgaagacctcaaattaagccgcgaattgtcccgtgtacgcaccgatttgccgctcgaagttgatttccgtcgccgccgcgaacctgactgggagggtcttaaagcgtttttagagcgtcttgaatttggttcgctcttgcatgaattcggccttttagaaagcccgttaccagccgaagaagcaccttggccaccgcccgaaggcgcgtttttaggttaccgtttgagtcgcccggaaccgatgtgggcctctttattggctcttgcagcgtctgcccagggacgtgtgtatcgcgcggaagaccctcatggtgcgctccgcggcctcttcgaagtccgtggactccttgccaaagacttagctgttgttgcattgcgcgaaggtcttgatttacctccgactgatgatccaatgcttcttgcgtacctcttggacccgtcaaacacgacgcccgaaggcgtagcccgtcgttacggcggcgagtggaccgaagatgcagcgaaacgcgcgttattggccgaacgtttgcacgccaatttattaggacgtttgcaaggcgaggaacgtctcctctggctttacgaagaagtggagaaaccattgagtcgcgtgctcgcgcatatggaagctaccggtgtcaaattagacgtggcgtatttggaggctctcagccttgaagttgctgccgaaatgcgccgcttggaggaagaagtattccgtttagcaggccattcctttcgccttaattctcgcgatcagttagaacgtgtgttgttcgatgaacttggtctccctcctatcggcaagacagagaagaccggtaaacgtagcacttcagcggcggttttagaagctcttcgcgaagtccatcccattgtggacaagatcttgcagtaccgcgaactcgcgaaattgaaaggcacctatattgaccctcttccggcattagtccacccgaaaacgggacgcctccatacccgcttcaaccaaacagccacggcgaccggtcgtttgtcctcctctgatccaaaccttcagaatattccagtacgtaccccattgggccagaagatccgccgcgcgtttgtagctgaggagggttggcgtttagtggccctcgattatagccaaattgaattacgtgtccttgcccatctttctggcgatgagaacctcatccgcgtgtttcaggaaggcaaagacattcacactcaaacggcaagctggatgtttggattatcggctgaagcgatcgatcctttgatgcgtcgtgcagcgaagaccatcaatttcggtgttctctacggtatgagtgcctttcgtttgtcgcaggaattaggcattccctatgaagaagctgcggcgttcattcagaaatactttcaaagctatcccaaagttaaagcatggatcgagaagactctcgaagaaggccgcacacgtggttacgtagagaccttatttggacgtcgccgctatgttcccgatttaaacgctcgcgtgaaatctgtccgtgaagccgccgaacgcatggcgttcaacatgcctgtacagggcacggcagctgacctcatgaaacttgcaatggtgcgcctttttccacaattgcgtgaagttggtgcccgcatgctcttgcaggtccacgatgaactcttgttagaagcgccaaaagagcgtgcggaagaggtggcagccctcgcgaaagaggttatggaaggcgtgtggcccttagcggtgcctcttgaagtcgaagttggtattggcgaggattggctggctgccaaaggataatga

SEQ ID NO: 2356 - protein, 841 aa, synthetic construct
  REGION 1..841: note = Variant of DNA polymerase I from Thermus sp. strain 2.9
MHHHHHHGGSGVLPVFEPKGRVLLVDGHHLAYRNFFALKGLTTSRGEPVQGVYGFAKSLLKALKEDGDVVIVVFDAKAPSFRHEAYEAYKAGRAPTPEDFPRQLALMKELVDLLGLERLEVPGFEADDVLATLAKKAEREGYEVQILTADRDLFQLLSPRISVLHPEGHRITPEWLWEKYGLRPEQWVDFRALAGDPSDNIPGVKGIGEKTALKLLKEWGSLENLLKNLDQVKPESVREKILAHLEDLKLSRELSRVRTDLPLEVDFRRRREPDWEGLKAFLERLEFGSLLHEFGLLESPLPAEEAPWPPPEGAFLGYRLSRPEPMWASLLALAASAQGRVYRAEDPHGALRGLFEVRGLLAKDLAVVALREGLDLPPTDDPMLLAYLLDPSNTTPEGVARRYGGEWTEDAAKRALLAERLHANLLGRLQGEERLLWLYEEVEKPLSRVLAHMEATGVKLDVAYLEALSLEVAAEMRRLEEEVFRLAGHSFRLNSRDQLERVLFDELGLPPIGKTEKTGKRSTSAAVLEALREVHPIVDKILQYRELAKLKGTYIDPLPALVHPKTGRLHTRFNQTATATGRLSSSDPNLQNIPVRTPLGQKIRRAFVAEEGWRLVALDYSQIELRVLAHLSGDENLIRVFQEGKDIHTQTASWMFGLSAEAIDPLMRRAAKTINFGVLYGMSAFRLSQELGIPYEEAAAFIQKYFQSYPKVKAWIEKTLEEGRTRGYVETLFGRRRYVPDLNARVKSVREAAERMAFNMPVQGTAADLMKLAMVRLFPQLREVGARMLLQVHDELLLEAPKERAEEVAALAKEVMEGVWPLAVPLEVEVGIGEDWLAAKG

SEQ ID NO: 2357 - DNA, 2529 bp, synthetic construct
  misc_feature 1..2529: note = Variant of DNA polymerase I from Thermus sp. strain 2.9
  source 1..2529: mol_type = other DNA
atgcaccatcatcatcatcatggcggtagcggcgtgttaccggtgttcgagcctaaaggtcgcgtgcttctggttgatggccatcatctcgcgtatcgtaacttctttgccctgaaaggattaaccaccagccgtggcgagccggtacagggtgtctacggctttgcaaagtcgctcctgaaagctctgaaagaagacggtgatgtggtgattgttgtctttgatgcgaaagcgccaagttttcgccacgaagcgtacgaagcttacaaagccgggcgtgctccaacgccggaagactttcctcgccaattggcgcttatgaaggaattagtggatttgcttggcctcgaacgcttggaagttcccggtttcgaggcagacgacgtattagcgactctcgcaaagaaagccgaacgtgagggctatgaagtccagatcttgacagcagatcgcgatcttttccagcttttatctccgcgcatctcggtgttacacccggaagggcatcgtatcaccccggaatggctctgggagaaatatggtttgcgtcccgaacaatgggtggattttcgcgccttagtgggcgatccgagcgacaatattccgggagttaaaggtatcggcgagaagacggcgctcaagctccttaaagaatgggggtcgttggagaacttgcttaagaatttagatcaggtcaaaccagagtcagtgcgtgagaagattcttgcacacctcgaagacctcaaattaagccgcgaattgtcccgtgtacgcaccgatttgccgctcgaagttgatttccgtcgccgccgcgaacctgactgggagggtcttaaagcgtttttagagcgtcttgaatttggttcgctcttgcatgaattcggccttttagaaagcccgttaccagccgaagaagcaccttggccaccgcccgaaggcgcgtttttaggttaccgtttgagtcgcccggaaccgatgtgggccgaattattggctcttgcagcgtctgcccagggacgtgtgtatcgcgcggaagaccctcatggtgcgctccgcggcctcttcgaagtcaacggactccttgccaaagacttagctgttgttgcattgcgcgaaggtcttgatttacctccgactgatgatccaatgcttcttgcgtacctcttggacccgtcaaacacgacgcccgaaggcgtagcccgtcgttacggcggcgagtggaccgaagatgcagcgaaacgcgcgttattggccgaacgtttgcacgccaatttattaggacgtttgcaaggcgaggaacgtctcctctggctttacgaagaagtggagaaaccattgagtcgcgtgctcgcgcatatggaagctaccggtgtcaaattagacgtggcgtatttggaggctctcagccttgaagttgctgccgaaatgcgccgcttggaggaagaagtattccgtttagcaggccattcctttcgccttaattctcgcgatcagttagaacgtgtgttgttcgatgaacttggtctccctcctatcggcaagacagagaagaccggtaaacgtagcacttcagcggcggttttagaagctcttcgcgaagtccatcccattgtggacaagatcttgcagtaccgcgaactcgcgaaattgaaaggcacctatattgaccctcttccggcattagtccacccgaaaacgggacgcctccatacccgcttcaaccaaacagccacggcgaccggtcgtttgtcctcctctgatccaaaccttcagaatattccagtacgtaccccattgggccagaagatccgccgcgcgtttgtagctgaggagggttggcgtttagtggccctcgattatagccaaattgaattacgtgtccttgcccatctttctggcgatgagaacctcatccgcgtgtttcaggaaggcaaagacattcacactcaaacggcaagctggatgtttggattatcagctgaagcgatcgatcctttgatgcgtcgtgcagcgaagaccatcaatttcggtgttctctacggtatgagtgcctttcgtttgtcgcaggaattaggcattccctatgaagaagctgcggcgttcattcagaaatactttcaaagctatcccaaagttaaagcatggatcgagaagactctcgaagaaggccgcacacgtggttacgtagagaccttatttggacgtcgccgctatgttcccgatttaaacgctcgcgtgaaatctgtccgtgaagccgccgaacgcatggcgttcaacatgcctgtacagggcacggcagctgacctcatgaaacttgcaatggtgcgcctttttccacaattgcgtgaagttggtgcccgcatgctcttgcaggtccacgatgaactcttgttagaagcgccaaaagagcgtgcggaagaggtggcagccctcgcgaaagaggttatggaaggcgtgtggcccttagcggtgcctcttgaagtcgaagttggtattggcgaggattggctggctgccaaaggataatga

SEQ ID NO: 2358 - protein, 841 aa, synthetic construct
  REGION 1..841: note = Variant of DNA polymerase I from Thermus sp. strain 2.9
MHHHHHHGGSGVLPVFEPKGRVLLVDGHHLAYRNFFALKGLTTSRGEPVQGVYGFAKSLLKALKEDGDVVIVVFDAKAPSFRHEAYEAYKAGRAPTPEDFPRQLALMKELVDLLGLERLEVPGFEADDVLATLAKKAEREGYEVQILTADRDLFQLLSPRISVLHPEGHRITPEWLWEKYGLRPEQWVDFRALVGDPSDNIPGVKGIGEKTALKLLKEWGSLENLLKNLDQVKPESVREKILAHLEDLKLSRELSRVRTDLPLEVDFRRRREPDWEGLKAFLERLEFGSLLHEFGLLESPLPAEEAPWPPPEGAFLGYRLSRPEPMWAELLALAASAQGRVYRAEDPHGALRGLFEVNGLLAKDLAVVALREGLDLPPTDDPMLLAYLLDPSNTTPEGVARRYGGEWTEDAAKRALLAERLHANLLGRLQGEERLLWLYEEVEKPLSRVLAHMEATGVKLDVAYLEALSLEVAAEMRRLEEEVFRLAGHSFRLNSRDQLERVLFDELGLPPIGKTEKTGKRSTSAAVLEALREVHPIVDKILQYRELAKLKGTYIDPLPALVHPKTGRLHTRFNQTATATGRLSSSDPNLQNIPVRTPLGQKIRRAFVAEEGWRLVALDYSQIELRVLAHLSGDENLIRVFQEGKDIHTQTASWMFGLSAEAIDPLMRRAAKTINFGVLYGMSAFRLSQELGIPYEEAAAFIQKYFQSYPKVKAWIEKTLEEGRTRGYVETLFGRRRYVPDLNARVKSVREAAERMAFNMPVQGTAADLMKLAMVRLFPQLREVGARMLLQVHDELLLEAPKERAEEVAALAKEVMEGVWPLAVPLEVEVGIGEDWLAAKG

SEQ ID NO: 2359 - DNA, 2529 bp, synthetic construct
  misc_feature 1..2529: note = Variant of DNA polymerase I from Thermus sp. strain 2.9
  source 1..2529: mol_type = other DNA
atgcaccatcatcatcatcatggcggtagcggcgtgttaccggtgttcgagcctaaaggtcgcgtgcttctggttgatggccatcatctcgcgtatcgtaacttctttgccctgaaaggattaaccaccagccgtggcgagccggtacagggtgtctacggctttgcaaagtcgctcctgaaagctctgaaagaagacggtgatgtggtgattgttgtctttgatgcgaaagcgccaagttttcgccacgaagcgtacgaagcttacaaagccgggcgtgctccaacgccggaagactttcctcgccaattggcgcttatgaaggaattagtggatttgcttggcctcgaacgcttggaagttcccggtttcgaggcagacgacgtattagcgactctcgcaaagaaagccgaacgtgagggctatgaagtccagatcttgacagcagatcgcgatcttttccagcttttatctccgcgcatctcggtgttacacccggaagggcatcgtatcaccccggaatggctctgggagaaatatggtttgcgtcccgaacaatgggtggattttcgcgccttagcaggcgatccgagcgacaatattccgggagttaaaggtatcggcgagaagacggcgctcaagctccttaaagaatgggggtcgttggagaacttgcttaagaatttagatcaggtcaaaccagagtcagtgcgtgagaagattcttgcacacctcgaagacctcaaattaagccgcgaattgtcccgtgtacgcaccgatttgccgctcgaagttgatttccgtcgccgccgcgaacctgactgggagggtcttaaagcgtttttagagcgtcttgaatttggttcgctcttgcatgaattcggccttttagaaagcccgttaccagccgaagaagcaccttggccaccgcccgaaggcgcgtttttaggttaccgtttgagtcgcccggaaccgatgtgggccgaattattggctcttgcagcgtctgcccagggacgtgtgtatcgcgcggaagaccctcatggtgcgctccgcggcctcttcgaagtccgtggactccttgccaaagacttagctgttgttgcattgcgcgaaggtcttgatttacctccgactgatgatccaatgcttcttgcgtacctcttggacccgtcaaacacgacgcccgaaggcgtagcccgtcgttacggcggcgagtggaccgaagatgcagcgaaacgcgcgttattggccgaacgtttgcacgccaatttattaggacgtttgcaaggcgaggaacgtctcctctggctttacgaagaagtggagaaaccattgagtcgcgtgctcgcgcatatggaagctaccggtgtcaaattagacgtggcgtatttggaggctctcagccttgaagttgctgccgaaatgcgccgcttggaggaagaagtattccgtttagcaggccattcctttcgccttaattctcgcgatcagttagaacgtgtgttgttcgatgaacttggtctccctcctatcggcaagacagagaagacctttaaacgtagcacttcagcggcggttttagaagctcttcgcgaagtccatcccattgtggacaagatcttgcagtaccgcgaactcgcgaaattgaaaggcacctatattgaccctcttccggcattagtccacccgaaaacgggacgcctccatacccgcttcaaccaaacagccacggcgaccggtcgtttgtcctcctctgatccaaaccttcagaatattccagtacgtaccccattgggccagaagatccgccgcgcgtttgtagctgaggagggttggcgtttagtggccctcgattatagccaaattgaattacgtgtccttgcccatctttctggcgatgagaacctcatccgcgtgtttcaggaaggcaaagacattcacactcaaacggcaagctggatgtttggattatcagctgaagcgatcgatcctttgatgcgtcgtgcagcgaagaccatcaatttcggtgttctctacggtatgagtgcctttcgtttgtcgcaggaattaggcattccctatgaagaagctgcggcgttcattcagaaatactttcaaagctatcccaaagttaaagcatggatcgagaagactctcgaagaaggccgcacacgtggttacgtagagaccttatttggacgtcgccgctatgttcccgatttaaacgctcgcgtgaaatctgtccgtgaagccgccgaacgcatggcgttcaacatgcctgtacagggcacggcagctgacctcatgaaacttgcaatggtgcgcctttttccacaattgcgtgaagttggtgcccgcatgctcttgcaggtccacgatgaactcttgttagaagcgccaaaagagcgtgcggaagaggtggcagccctcgcgaaagaggttatggaaggcgtgtggcccttagcggtgcctcttgaagtcgaagttggtattggcgaggattggctggctgccaaaggataatga

SEQ ID NO: 2360 - protein, 841 aa, synthetic construct
  REGION 1..841: note = Variant of DNA polymerase I from Thermus sp. strain 2.9
MHHHHHHGGSGVLPVFEPKGRVLLVDGHHLAYRNFFALKGLTTSRGEPVQGVYGFAKSLLKALKEDGDVVIVVFDAKAPSFRHEAYEAYKAGRAPTPEDFPRQLALMKELVDLLGLERLEVPGFEADDVLATLAKKAEREGYEVQILTADRDLFQLLSPRISVLHPEGHRITPEWLWEKYGLRPEQWVDFRALAGDPSDNIPGVKGIGEKTALKLLKEWGSLENLLKNLDQVKPESVREKILAHLEDLKLSRELSRVRTDLPLEVDFRRRREPDWEGLKAFLERLEFGSLLHEFGLLESPLPAEEAPWPPPEGAFLGYRLSRPEPMWAELLALAASAQGRVYRAEDPHGALRGLFEVRGLLAKDLAVVALREGLDLPPTDDPMLLAYLLDPSNTTPEGVARRYGGEWTEDAAKRALLAERLHANLLGRLQGEERLLWLYEEVEKPLSRVLAHMEATGVKLDVAYLEALSLEVAAEMRRLEEEVFRLAGHSFRLNSRDQLERVLFDELGLPPIGKTEKTFKRSTSAAVLEALREVHPIVDKILQYRELAKLKGTYIDPLPALVHPKTGRLHTRFNQTATATGRLSSSDPNLQNIPVRTPLGQKIRRAFVAEEGWRLVALDYSQIELRVLAHLSGDENLIRVFQEGKDIHTQTASWMFGLSAEAIDPLMRRAAKTINFGVLYGMSAFRLSQELGIPYEEAAAFIQKYFQSYPKVKAWIEKTLEEGRTRGYVETLFGRRRYVPDLNARVKSVREAAERMAFNMPVQGTAADLMKLAMVRLFPQLREVGARMLLQVHDELLLEAPKERAEEVAALAKEVMEGVWPLAVPLEVEVGIGEDWLAAKG

SEQ ID NO: 2361 - DNA, 2529 bp, synthetic construct
  misc_feature 1..2529: note = Variant of DNA polymerase I from Thermus sp. strain 2.9
  source 1..2529: mol_type = other DNA
atgcaccatcatcatcatcatggcggtagcggcgtgttaccggtgttcgagcctaaaggtcgcgtgcttctggttgatggccatcatctcgcgtatcgtaacttctttgccctgaaaggattaaccaccagccgtggcgagccggtacagggtgtctacggctttgcaaagtcgctcctgaaagctctgaaagaagacggtgatgtggtgattgttgtctttgatgcgaaagcgccaagttttcgccacgaagcgtacgaagcttacaaagccgggcgtgctccaacgccggaagactttcctcgccaattggcgcttatgaaggaattagtggatttgcttggcctcgaacgcttggaagttcccggtttcgaggcagacgacgtattagcgactctcgcaaagaaagccgaacgtgagggctatgaagtccagatcttgacagcagatcgcgatcttttccagcttttatctccgcgcatctcggtgttacacccggaagggcatcgtatcaccccggaatggctctgggagaaatatggtttgcgtcccgaacaatgggtggattttcgcgccttagcaggcgatccgagcgacaatattccgggagttaaaggtatcggcgagaagacggcgctcaagctccttaaagaatgggggtcgttggagaacttgcttaagaatttagatcaggtcaaaccagagtcagtgcgtgagaagattcttgcacacctcgaagacctcaaattaagccgcgaattgtcccgtgtacgcaccgatttgccgctcgaagttgatttccgtcgccgccgcgaacctgactgggagggtcttaaagcgtttttagagcgtcttgaatttggttcgctcttgcatgaattcggccttttagaaagcccgttaccagccgaagaagcaccttggccaccgcccgaaggcgcgtttttaggttaccgtttgagtcgcccggaaccgatgtgggccgaattattggctcttgcagcgtctgcccagggacgtgtgtatcgcgcggaagaccctcatggtgcgctccgcggcctcttcgaagtccgtggactccttgccaaagacttagctgttgttgcattgcgcgaaggtcttgatttacctccgactgatgatccaatgcttcttgcgtacctcttggacccgtcaaacacgacgcccgaaggcgtagcccgtcgttacggcggcgagtggaccgaagatgcagcgaaacgcgcgttattggccgaacgtttgcacgccaatttattaggacgtttgcaaggcgaggaacgtctcctctggctttacgaagaagtggagaaaccattgagtcgcgtgctcgcgcatatggaagctaccggtgtcaaattagacgtggcgtatttggaggctctcagccttgaagttgctgccgaaatgcgccgcttggaggaagaagtattccgtttagcaggccattcctttcgccttaattctcgcgatcagttagaacgtgtgttgttcgatgaacttggtctccctcctatcggcaagacagagaagaccggtaaacgtagcacttcagcggcggttttagaagctcttcgcgaagtccatcccattgtggacaagatcttgcagtaccgcgaactcgcgaaattgaaaggcacctatattgaccctcttccggcattagtccacccgaaaacgggacgcctccatacccgcttcaaccaaacagccacggcgaccggtcgtttgtcctcctctgatccaaaccttcagaatattccagtacgtaccccattgggccagaagatccgccgcgcgtttgtagctgaggagggttggcgtttagtggccctcgattatagccaaattgaattacgtgtccttgcccatctttctggcgatgagaacctcatccgcgtgtttcaggaaggcaaagacattcacactcaaacggcaagctggatgtttggattatcagctgaagcgatcgatcctttgatgcgtcgtgcagcgaagaccatcaatttcggtgttctctacggtatgagtgcctttcgtttgtcgcaggaattaggcattccctatgaagaagctgcggcgttcattcagaaatactttcaaagctatcccaaagttaaagcatggatcgagaagactctccgggaaggccgcacacgtggttacgtagagaccttatttggacgtcgccgctatgttcccgatttaaacgctcgcgtgaaatctgtccgtgaagccgccgaacgcatggcgttcaacatgcctgtacagggcacggcagctgacctcatgaaacttgcaatggtgcgcctttttccacaattgcgtgaagttggtgcccgcatgctcttgcaggtccacgatgaactcttgttagaagcgccaaaagagcgtgcggaagaggtggcagccctcgcgaaagaggttatggaaggcgtgtggcccttagcggtgcctcttgaagtcgaagttggtattggcgaggattggctggctgccaaaggataatga

SEQ ID NO: 2362 - protein, 841 aa, synthetic construct
  REGION 1..841: note = Variant of DNA polymerase I from Thermus sp. strain 2.9
MHHHHHHGGSGVLPVFEPKGRVLLVDGHHLAYRNFFALKGLTTSRGEPVQGVYGFAKSLLKALKEDGDVVIVVFDAKAPSFRHEAYEAYKAGRAPTPEDFPRQLALMKELVDLLGLERLEVPGFEADDVLATLAKKAEREGYEVQILTADRDLFQLLSPRISVLHPEGHRITPEWLWEKYGLRPEQWVDFRALAGDPSDNIPGVKGIGEKTALKLLKEWGSLENLLKNLDQVKPESVREKILAHLEDLKLSRELSRVRTDLPLEVDFRRRREPDWEGLKAFLERLEFGSLLHEFGLLESPLPAEEAPWPPPEGAFLGYRLSRPEPMWAELLALAASAQGRVYRAEDPHGALRGLFEVRGLLAKDLAVVALREGLDLPPTDDPMLLAYLLDPSNTTPEGVARRYGGEWTEDAAKRALLAERLHANLLGRLQGEERLLWLYEEVEKPLSRVLAHMEATGVKLDVAYLEALSLEVAAEMRRLEEEVFRLAGHSFRLNSRDQLERVLFDELGLPPIGKTEKTGKRSTSAAVLEALREVHPIVDKILQYRELAKLKGTYIDPLPALVHPKTGRLHTRFNQTATATGRLSSSDPNLQNIPVRTPLGQKIRRAFVAEEGWRLVALDYSQIELRVLAHLSGDENLIRVFQEGKDIHTQTASWMFGLSAEAIDPLMRRAAKTINFGVLYGMSAFRLSQELGIPYEEAAAFIQKYFQSYPKVKAWIEKTLREGRTRGYVETLFGRRRYVPDLNARVKSVREAAERMAFNMPVQGTAADLMKLAMVRLFPQLREVGARMLLQVHDELLLEAPKERAEEVAALAKEVMEGVWPLAVPLEVEVGIGEDWLAAKG

SEQ ID NO: 2363 - DNA, 2529 bp, synthetic construct
  misc_feature 1..2529: note = Variant of DNA polymerase I from Thermus sp. strain 2.9
  source 1..2529: mol_type = other DNA
atgcaccatcatcatcatcatggcggtagcggcgtgttaccggtgttcgagcctaaaggtcgcgtgcttctggttgatggccatcatctcgcgtatcgtaacttctttgccctgaaaggattaaccaccagccgtggcgagccggtacagggtgtctacggctttgcaaagtcgctcctgaaagctctgaaagaagacggtgatgtggtgattgttgtctttgatgcgaaagcgccaagttttcgccacgaagcgtacgaagcttacaaagccgggcgtgctccaacgccggaagactttcctcgccaattggcgcttatgaaggaattagtggatttgcttggcctcgaacgcttggaagttcccggtttcgaggcagacgacgtattagcgactctcgcaaagaaagccgaacgtgagggctatgaagtccagatcttgacagcagatcgcgatcttttccagcttttatctccgcgcatctcggtgttacacccggaagggcatcgtatcaccccggaatggctctgggagaaatatggtttgcgtcccgaacaatgggtggattttcgcgccttagcaggcgatccgagcgacaatattccgggagttaaaggtatcggcgagaagacggcgctcaagctccttaaagaatgggggtcgttggagaacttgcttaagaatttagatcaggtcaaaccagagtcagtgcgtgagaagattcttgcacacctcgaagacctcaaattaagccgcgaattgtcccgtgtacgcaccgatttgccgctcgaagttgatttccgtcgccgccgcgaacctgactgggagggtcttaaagcgtttttagagcgtcttgaatttggttcgctcttgcatgaattcggccttttagaaagcccgttaccagccgaagaagcaccttggccaccgcccgaaggcgcgtttttaggttaccgtttgagtcgcccggaaccgatgtgggccgaattattggctcttgcagcgtctgcccagggacgtgtgtatcgcgcggaagaccctcatggtgcgctccgcggcctcttcgaagtccgtggactccttgccaaagacttagctgttgttgcattgcgcgaaggtcttgatttacctccgactgatgatccaatgcttcttgcgtacctcttggacccgtcaaacacgacgcccgaaggcgtagcccgtcgttacggcggcgagtggaccgaagatgcagcgaaacgcgcgttattggccgaacgtttgcacgccaatttattaggacgtttgcaaggcgaggaacgtctcctctggctttacgaagaagtggagaaaccattgagtcgcgtgctcgcgcatatggaagctaccggtgtcaaattagacgtggcgtatttggaggctctcagccttgaagttgctgccgaaatgcgccgcttggaggaagaagtattccgtttagcaggccattcctttcgccttaattctcgcgatcagttagaacgtgtgttgttcgatgaacttggtctccctcctatcggcaagacagagaagaccggtaaacgtagcacttcagcggcggttttagaagctcttcgcgaagtccatcccattgtggacaagatcttgcagtaccgcgaactcgcgaaattgaaaggcacctatattgaccctcttccggcattagtccacccgaaaacgggacgcctccatacccgcttcaaccaaacagccacggcgaccggtcgtttgtcctcctctgatccaaaccttcagaatattccagtacgtaccccattgggccagaagatccgccgcgcgtttgtagctgaggagggttggcgtttagtggccctcgattatagccaaattgaattacgtgtccttgcccatctttctggcgatgagaacctcatccgcgtgtttcaggaaggcaaagacattcacactcaaacggcaagctggatgtttggattatcaggggaagcgatcgatcctttgatgcgtcgtgcagcgaagaccatcaatttcggtgttctctacggtatgagtgcctttcgtttgtcgcaggaattaggcattccctatgaagaagctgcggcgttcattcagaaatactttcaaagctatcccaaagttaaagcatggatcgagaagactctcgaagaaggccgcacacgtggttacgtagagaccttatttggacgtcgccgctatgttcccgatttaaacgctcgcgtgaaatctgtccgtgaagccgccgaacgcatggcgttcaacatgcctgtacagggcacggcagctgacctcatgaaacttgcaatggtgcgcctttttccacaattgcgtgaagttggtgcccgcatgctcttgcaggtccacgatgaactcttgttagaagcgccaaaagagcgtgcggaagaggtggcagccctcgcgaaagaggttatggaaggcgtgtggcccttagcggtgcctcttgaagtcgaagttggtattggcgaggattggctggctgccaaaggataatga

SEQ ID NO: 2364 - protein, 841 aa, synthetic construct
  REGION 1..841: note = Variant of DNA polymerase I from Thermus sp. strain 2.9
MHHHHHHGGSGVLPVFEPKGRVLLVDGHHLAYRNFFALKGLTTSRGEPVQGVYGFAKSLLKALKEDGDVVIVVFDAKAPSFRHEAYEAYKAGRAPTPEDFPRQLALMKELVDLLGLERLEVPGFEADDVLATLAKKAEREGYEVQILTADRDLFQLLSPRISVLHPEGHRITPEWLWEKYGLRPEQWVDFRALAGDPSDNIPGVKGIGEKTALKLLKEWGSLENLLKNLDQVKPESVREKILAHLEDLKLSRELSRVRTDLPLEVDFRRRREPDWEGLKAFLERLEFGSLLHEFGLLESPLPAEEAPWPPPEGAFLGYRLSRPEPMWAELLALAASAQGRVYRAEDPHGALRGLFEVRGLLAKDLAVVALREGLDLPPTDDPMLLAYLLDPSNTTPEGVARRYGGEWTEDAAKRALLAERLHANLLGRLQGEERLLWLYEEVEKPLSRVLAHMEATGVKLDVAYLEALSLEVAAEMRRLEEEVFRLAGHSFRLNSRDQLERVLFDELGLPPIGKTEKTGKRSTSAAVLEALREVHPIVDKILQYRELAKLKGTYIDPLPALVHPKTGRLHTRFNQTATATGRLSSSDPNLQNIPVRTPLGQKIRRAFVAEEGWRLVALDYSQIELRVLAHLSGDENLIRVFQEGKDIHTQTASWMFGLSGEAIDPLMRRAAKTINFGVLYGMSAFRLSQELGIPYEEAAAFIQKYFQSYPKVKAWIEKTLEEGRTRGYVETLFGRRRYVPDLNARVKSVREAAERMAFNMPVQGTAADLMKLAMVRLFPQLREVGARMLLQVHDELLLEAPKERAEEVAALAKEVMEGVWPLAVPLEVEVGIGEDWLAAKG

SEQ ID NO: 2365 - DNA, 2529 bp, synthetic construct
  misc_feature 1..2529: note = Variant of DNA polymerase I from Thermus sp. strain 2.9
  source 1..2529: mol_type = other DNA
atgcaccatcatcatcatcatggcggtagcggcgtgttaccggtgttcgagcctaaaggtcgcgtgcttctggttgatggccatcatctcgcgtatcgtaacttctttgccctgaaaggattaaccaccagccgtggcgagccggtacagggtgtctacggctttgcaaagtcgctcctgaaagctctgaaagaagacggtgatgtggtgattgttgtctttgatgcgaaagcgccaagttttcgccacgaagcgtacgaagcttacaaagccgggcgtgctccaacgccggaagactttcctcgccaattggcgcttatgaaggaattagtggatttgcttggcctcgaacgcttggaagttcccggtttcgaggcagacgacgtattagcgactctcgcaaagaaagccgaacgtgagggctatgaagtccagatcttgacagcagatcgcgatcttttccagcttttatctccgcgcatctcggtgttacacccggaagggcatcgtatcaccccggaatggctctgggagaaatatggtttgcgtcccgaacaatgggtggattttcgcgccttagcaggcgatccgagcgacaatattccgggagttaaaggtatcggcgagaagacggcgctcaagctccttaaagaatgggggtcgttggagaacttgcttaagaatttagatcaggtcaaaccagagtcagtgcgtgagaagattcttgcacacctcgaagacctcaaattaagccgcgaattgtcccgtgtacgcaccgatttgccgctcgaagttgatttccgtcgccgccgcgaacctgactgggagggtcttaaagcgtttttagagcgtcttgaatttggttcgctcttgcatgaattcggccttttagaaagcacgttaccagccgaagaagcaccttggccaccgcccgaaggcgcgtttttaggttaccgtttgagtcgcccggaaccgatgtgggccgaattattggctcttgcagcgtctgcccagggacgtgtgtatcgcgcggaagaccctcatggtgcgctccgcggcctcttcgaagtccgtggactccttgccaaagacttagctgttgttgcattgcgcgaaggtcttgatttacctccgactgatgatccaatgcttcttgcgtacctcttggacccgtcaaacacgacgcccgaaggcgtagcccgtcgttacggcggcgagtggaccgaagatgcagcgaaacgcgcgttattggccgaacgtttgcacgccaatttattaggacgtttgcaaggcgaggaacgtctcctctggctttacgaagaagtggagaaaccattgagtcgcgtgctcgcgcatatggaagctaccggtgtcaaattagacgtggcgtatttggaggctctcagccttgaagttgctgccgaaatgcgccgcttggaggaagaagtattccgtttagcaggccattcctttcgccttaattctcgcgatcagttagaacgtgtgttgttcgatgaacttggtctccctcctatcggcaagacagagaagaccggtaaacgtagcacttcagcggcggttttagaagctcttcgcgaagtccatcccattgtggacaagatcttgcagtaccgcgaactcgcgaaattgaaaggcacctatattgaccctcttccggcattagtccacccgaaaacgggacgcctccatacccgcttcaaccaaacagccacggcgaccggtcgtttgtcctcctctgatccaaaccttcagaatattccagtacgtaccccattgggccagaagatccgccgcgcgtttgtagctgaggagggttggcgtttagtggccctcgattatagccaaattgaattacgtgtccttgcccatctttctggcgatgagaacctcatccgcgtgtttcaggaaggcaaagacattcacactcaaacggcaagctggatgtttggattatcagctgaagcgatcgatcctttgatgcgtcgtgcagcgaagaccatcaatttcggtgttctctacggtatgagtgcctttcgtttgtcgcaggaattaggcattccctatgaagaagctgcggcgttcattcagaaatactttcaaagctatcccaaagttaaagcatggatcgagaagactctcgaagaaggccgcacacgtggttacgtagagaccttatttggacgtcgccgctatgttcccgatttaaacgctcgcgtgaaatctgtccgtgaagccgccgaacgcatggcgttcaacatgcctgtacagggcacggcagctgacctcatgaaacttgcaatggtgcgcctttttccacaattgcgtgaagttggtgcccgcatgctcttgcaggtccacgatgaactcttgttagaagcgccaaaagagcgtgcggaagaggtggcagccctcgcgaaagaggttatggaaggcgtgtggcccttagcggtgcctcttgaagtcgaagttggtattggcgaggattggctggctgccaaaggataatga

SEQ ID NO: 2366 - protein, 841 aa, synthetic construct
  REGION 1..841: note = Variant of DNA polymerase I from Thermus sp. strain 2.9
MHHHHHHGGSGVLPVFEPKGRVLLVDGHHLAYRNFFALKGLTTSRGEPVQGVYGFAKSLLKALKEDGDVVIVVFDAKAPSFRHEAYEAYKAGRAPTPEDFPRQLALMKELVDLLGLERLEVPGFEADDVLATLAKKAEREGYEVQILTADRDLFQLLSPRISVLHPEGHRITPEWLWEKYGLRPEQWVDFRALAGDPSDNIPGVKGIGEKTALKLLKEWGSLENLLKNLDQVKPESVREKILAHLEDLKLSRELSRVRTDLPLEVDFRRRREPDWEGLKAFLERLEFGSLLHEFGLLESTLPAEEAPWPPPEGAFLGYRLSRPEPMWAELLALAASAQGRVYRAEDPHGALRGLFEVRGLLAKDLAVVALREGLDLPPTDDPMLLAYLLDPSNTTPEGVARRYGGEWTEDAAKRALLAERLHANLLGRLQGEERLLWLYEEVEKPLSRVLAHMEATGVKLDVAYLEALSLEVAAEMRRLEEEVFRLAGHSFRLNSRDQLERVLFDELGLPPIGKTEKTGKRSTSAAVLEALREVHPIVDKILQYRELAKLKGTYIDPLPALVHPKTGRLHTRFNQTATATGRLSSSDPNLQNIPVRTPLGQKIRRAFVAEEGWRLVALDYSQIELRVLAHLSGDENLIRVFQEGKDIHTQTASWMFGLSAEAIDPLMRRAAKTINFGVLYGMSAFRLSQELGIPYEEAAAFIQKYFQSYPKVKAWIEKTLEEGRTRGYVETLFGRRRYVPDLNARVKSVREAAERMAFNMPVQGTAADLMKLAMVRLFPQLREVGARMLLQVHDELLLEAPKERAEEVAALAKEVMEGVWPLAVPLEVEVGIGEDWLAAKG

SEQ ID NO: 2367 - DNA, 2529 bp, synthetic construct
  misc_feature 1..2529: note = Variant of DNA polymerase I from Thermus sp. strain 2.9
  source 1..2529: mol_type = other DNA
atgcaccatcatcatcatcatggcggtagcggcgtgttaccggtgttcgagcctaaaggtcgcgtgcttctggttgatggccatcatctcgcgtatcgtaacttctttgccctgaaaggattaaccaccagccgtggcgagccggtacagggtgtctacggctttgcaaagtcgctcctgaaagctctgaaagaagacggtgatgtggtgattgttgtctttgatgcgaaagcgccaagttttcgccacgaagcgtacgaagcttacaaagccgggcgtgctccaacgccggaagactttcctcgccaattggcgcttatgaaggaattagtggatttgcttggcctcgaacgcttggaagttcccggtttcgaggcagacgacgtattagcgactctcgcaaagaaagccgaacgtgagggctatgaagtccagatcttgacagcagatcgcgatcttttccagcttttatctccgcgcatctcggtgttacacccggaagggcatcgtatcaccccggaatggctctgggagaaatatggtttgcgtcccgaacaatgggtggattttcgcgccttagcaggcgatccgagcgacaatattccgggagttaaaggtatcggcgagaagacggcgctcaagctccttaaagaatgggggtcgttggagaacttgcttgaaaatttagatcaggtcaaaccagagtcagtgcgtgagaagattcttgcacacctcgaagacctcaaattaagccgcgaattgtcccgtgtacgcaccgatttgccgctcgaagttgatttccgtcgccgccgcgaacctgactgggagggtcttaaagcgtttttagagcgtcttgaatttggttcgctcttgcatgaattcggccttttagaaagcccgttaccagccgaagaagcaccttggccaccgcccgaaggcgcgtttttaggttaccgtttgagtcgcccggaaccgatgtgggccgaattattggctcttgcagcgtctgcccagggacgtgtgtatcgcgcggaagaccctcatggtgcgctccgcggcctcttcgaagtccgtggactccttgccaaagacttagctgttgttgcattgcgcgaaggtcttgatttacctccgactgatgatccaatgcttcttgcgtacctcttggacccgtcaaacacgacgcccgaaggcgtagcccgtcgttacggcggcgagtggaccgaagatgcagcgaaacgcgcgttattggccgaacgtttgcacgccaatttattaggacgtttgcaaggcgaggaacgtctcctctggctttacgaagaagtggagaaaccattgagtcgcgtgctcgcgcatatggaagctaccggtgtcaaattagacgtggcgtatttggaggctctcagccttgaagttgctgccgaaatgcgccgcttggaggaagaagtattccgtttagcaggccattcctttcgccttaattctcgcgatcagttagaacgtgtgttgttcgatgaacttggtctccctcctatcggcaagacagagaagaccggtaaacgtagcacttcagcggcggttttagaagctcttcgcgaagtccatcccattgtggacaagatcttgcagtaccgcgaactcgcgaaattgaaaggcacctatattgaccctcttccggcattagtccacccgaaaacgggacgcctccatacccgcttcaaccaaacagccacggcgaccggtcgtttgtcctcctctgatccaaaccttcagaatattccagtacgtaccccattgggccagaagatccgccgcgcgtttgtagctgaggagggttggcgtttagtggccctcgattatagccaaattgaattacgtgtccttgcccatctttctggcgatgagaacctcatccgcgtgtttcaggaaggcaaagacattcacactcaaacggcaagctggatgtttggattatcagctgaagcgatcgatcctttgatgcgtcgtgcagcgaagaccatcaatttcggtgttctctacggtatgagtgcctttcgtttgtcgcaggaattaggcattccctatgaagaagctgcggcgttcattcagaaatactttcaaagctatcccaaagttaaagcatggatcgagaagactctcgaagaaggccgcacacgtggttacgtagagaccttatttggacgtcgccgctatgttcccgatttaaacgctcgcgtgaaatctgtccgtgaagccgccgaacgcatggcgttcaacatgcctgtacagggcacggcagctgacctcatgaaacttgcaatggtgcgcctttttccacaattgcgtgaagttggtgcccgcatgctcttgcaggtccacgatgaactcttgttagaagcgccaaaagagcgtgcggaagaggtggcagccctcgcgaaagaggttatggaaggcgtgtggcccttagcggtgcctcttgaagtcgaagttggtattggcgaggattggctggctgccaaaggataatga

SEQ ID NO: 2368 - protein, 841 aa, synthetic construct
  REGION 1..841: note = Variant of DNA polymerase I from Thermus sp. strain 2.9
MHHHHHHGGSGVLPVFEPKGRVLLVDGHHLAYRNFFALKGLTTSRGEPVQGVYGFAKSLLKALKEDGDVVIVVFDAKAPSFRHEAYEAYKAGRAPTPEDFPRQLALMKELVDLLGLERLEVPGFEADDVLATLAKKAEREGYEVQILTADRDLFQLLSPRISVLHPEGHRITPEWLWEKYGLRPEQWVDFRALAGDPSDNIPGVKGIGEKTALKLLKEWGSLENLLENLDQVKPESVREKILAHLEDLKLSRELSRVRTDLPLEVDFRRRREPDWEGLKAFLERLEFGSLLHEFGLLESPLPAEEAPWPPPEGAFLGYRLSRPEPMWAELLALAASAQGRVYRAEDPHGALRGLFEVRGLLAKDLAVVALREGLDLPPTDDPMLLAYLLDPSNTTPEGVARRYGGEWTEDAAKRALLAERLHANLLGRLQGEERLLWLYEEVEKPLSRVLAHMEATGVKLDVAYLEALSLEVAAEMRRLEEEVFRLAGHSFRLNSRDQLERVLFDELGLPPIGKTEKTGKRSTSAAVLEALREVHPIVDKILQYRELAKLKGTYIDPLPALVHPKTGRLHTRFNQTATATGRLSSSDPNLQNIPVRTPLGQKIRRAFVAEEGWRLVALDYSQIELRVLAHLSGDENLIRVFQEGKDIHTQTASWMFGLSAEAIDPLMRRAAKTINFGVLYGMSAFRLSQELGIPYEEAAAFIQKYFQSYPKVKAWIEKTLEEGRTRGYVETLFGRRRYVPDLNARVKSVREAAERMAFNMPVQGTAADLMKLAMVRLFPQLREVGARMLLQVHDELLLEAPKERAEEVAALAKEVMEGVWPLAVPLEVEVGIGEDWLAAKG

SEQ ID NO: 2369 - DNA, 2529 bp, synthetic construct
  misc_feature 1..2529: note = Variant of DNA polymerase I from Thermus sp. strain 2.9
  source 1..2529: mol_type = other DNA
atgcaccatcatcatcatcatggcggtagcggcgtgttaccggtgttcgagcctaaaggtcgcgtgcttctggttgatggccatcatctcgcgtatcgtaacttctttgccctgaaaggattaaccaccagccgtggcgagccggtacagggtgtctacggctttgcaaagtcgctcctgaaagctctgaaagaagacggtgatgtggtgattgttgtctttgatgcgaaagcgccaagttttcgccacgaagcgtacgaagcttacaaagccgggcgtgctccaacgccggaagactttcctcgccaattggcgcttatgaaggaattagtggatttgcttggcctcgaacgcttggaagttcccggtttcgaggcagacgacgtattagcgactctcgcaaagaaagccgaacgtgagggctatgaagtccagatcttgacagcagatcgcgatcttttccagcttttatctccgcgcatctcggtgttacacccggaagggcatcgtatcaccccggaatggctctgggagaaatatggtttgcgtcccgaacaatgggtggattttcgcgccttagcaggcgatccgagcgacaatattccgggagttaaaggtatcggcgagaagacggcgctcaagctccttaaagaatgggggtcgttggagaacttgcttaagaatttagatcaggtcaaaccagagtcagtgcgtgagaagattcttgcacacctcgaagacctcaaattaagccgcgaattgtcccgtgtacgcaccgatttgccgctcgaagttgatttccgtcgccgccgcgaacctgactgggagggtcttaaagcgtttttagagcgtcttgaatttggttcgctcttgcatgaattcggccttttagaaagcccgttagttgccgaagaagcaccttggccaccgcccgagggcgcgtttttaggttaccgtttgagtcgcccggaaccgatgtgggccgaattattggctcttgcagcgtctgcccagggacgtgtgtatcgcgcggaagaccctcatggtgcgctccgcggcctcttcgaagtccgtggactccttgccaaagacttagctgttgttgcattgcgcgaaggtcttgatttacctccgactgatgatccaatgcttcttgcgtacctcttggacccgtcaaacacgacgcccgaaggcgtagcccgtcgttacggcggcgagtggaccgaagatgcagcgaaacgcgcgttattggccgaacgtttgcacgccaatttattaggacgtttgcaaggcgaggaacgtctcctctggctttacgaagaagtggagaaaccattgagtcgcgtgctcgcgcatatggaagctaccggtgtcaaattagacgtggcgtatttggaggctctcagccttgaagttgctgccgaaatgcgccgcttggaggaagaagtattccgtttagcaggccattcctttcgccttgtatctcgcgatcagttagaacgtgtgttgttcgatgaacttggtctccctcctatcggcaagacagagaagaccggtaaacgtagcacttcagctgcggttttagaagctcttcgcgaagtccatcccattgtggacaagatcttggtgtaccgcgaactcgcgaaattgaaaggcacctatattgaccctcttccggcattagtccacccgaaaacgggacgcctccatacccgcttcaaccaaacagccacggcgaccggtcgtttgtcctcctctgatccaaaccttcagaatattccagtacgtaccccattgggccagaagatccgccgcgcgtttgtagctgaggagggttggcgtttagtggccctcgattatagccaaattgaattacgtgtccttgcccatctttctggcgatgagaacctcatccgcgtgtttcaggaaggcaaagacattcacactcaaacggcaagctggatgtttggattaggcgctgaagcgatcgatcctttgatgcgtcgtgcagcgaagaccatcaatttcggtgttctctacggtatgagtgcctttcgtttgtcgcaggaattaggcattccctatgaagaagctgcggcgttcattcagaaatactttcaaagctatcccaaagttaaagcatggatcgagaagactctcgaggaaggccgcacacgtggttacgtagagaccttatttggacgtcgccgctatgttcccgatttaaacgctcgcgtgaaaagcgtccgtgaagccgccgaacgcatggcgttcaacatgcctgtacagggcacggcagctgacctcatgaaacttgcaatggtgcgcctttttccacaattgcgtgaagttggtgcccgcatgctcttgcaggtccacgatgaactcttgttagaagcgccaaaagagcgtgcggaagaggtggcagccctcgcgaaaaccgttatggaaggcgtgtggcccttagcggtgcctcttgaagtcgaagttggtattggcgaggattggctggctgccaaaggataatga

SEQ ID NO: 2370 - protein, 841 aa, synthetic construct
  REGION 1..841: note = Variant of DNA polymerase I from Thermus sp. strain 2.9
MHHHHHHGGSGVLPVFEPKGRVLLVDGHHLAYRNFFALKGLTTSRGEPVQGVYGFAKSLLKALKEDGDVVIVVFDAKAPSFRHEAYEAYKAGRAPTPEDFPRQLALMKELVDLLGLERLEVPGFEADDVLATLAKKAEREGYEVQILTADRDLFQLLSPRISVLHPEGHRITPEWLWEKYGLRPEQWVDFRALAGDPSDNIPGVKGIGEKTALKLLKEWGSLENLLKNLDQVKPESVREKILAHLEDLKLSRELSRVRTDLPLEVDFRRRREPDWEGLKAFLERLEFGSLLHEFGLLESPLVAEEAPWPPPEGAFLGYRLSRPEPMWAELLALAASAQGRVYRAEDPHGALRGLFEVRGLLAKDLAVVALREGLDLPPTDDPMLLAYLLDPSNTTPEGVARRYGGEWTEDAAKRALLAERLHANLLGRLQGEERLLWLYEEVEKPLSRVLAHMEATGVKLDVAYLEALSLEVAAEMRRLEEEVFRLAGHSFRLVSRDQLERVLFDELGLPPIGKTEKTGKRSTSAAVLEALREVHPIVDKILVYRELAKLKGTYIDPLPALVHPKTGRLHTRFNQTATATGRLSSSDPNLQNIPVRTPLGQKIRRAFVAEEGWRLVALDYSQIELRVLAHLSGDENLIRVFQEGKDIHTQTASWMFGLGAEAIDPLMRRAAKTINFGVLYGMSAFRLSQELGIPYEEAAAFIQKYFQSYPKVKAWIEKTLEEGRTRGYVETLFGRRRYVPDLNARVKSVREAAERMAFNMPVQGTAADLMKLAMVRLFPQLREVGARMLLQVHDELLLEAPKERAEEVAALAKTVMEGVWPLAVPLEVEVGIGEDWLAAKG

SEQ ID NO: 2371 - DNA, 2529 bp, synthetic construct
  misc_feature 1..2529: note = Variant of DNA polymerase I from Thermus sp. strain 2.9
  source 1..2529: mol_type = other DNA
atgcaccatcatcatcatcatggcggtagcggcgtgttaccggtgttcgagcctaaaggtcgcgtgcttctggttgatggccatcatctcgcgtatcgtaacttctttgccctgaaaggattaaccaccagccgtggcgagccggtacagggtgtctacggctttgcaaagtcgctcctgaaagctctgaaagaagacggtgatgtggtgattgttgtctttgatgcgaaagcgccaagttttcgccacgaagcgtacgaagcttacaaagccgggcgtgctccaacgccggaagactttcctcgccaattggcgcttatgaaggaattagtggatttgcttggcctcgaacgcttggaagttcccggtttcgaggcagacgacgtattagcgactctcgcaaagaaagccgaacgtgagggctatgaagtccagatcttgacagcagatcgcgatcttttccagcttttatctccgcgcatctcggtgttacacccggaagggcatcgtatcaccccggaatggctctgggagaaatatggtttgcgtcccgaacaatgggtggattttcgcgccttagcaggcgatccgagcgacaatattccgggagttaaaggtatcggcgagaagacggcgctcaagctccttaaagaatgggggtcgttggagaacttgcttaagaatttagatcaggtcaaaccagagtcagtgcgtgagaagattcttgcacacctcgaagacctcaaattaagccgcgaattgtcccgtgtacgcaccgatttgccgctcgaagttgatttccgtcgccgccgcgaacctgactgggagggtcttaaagcgtttttagagcgtcttgaatttggttcgctcttgcatgaattcggccttttagaaagcccgttaccagccgaagaagcaccttggccaccgcccgaaggcgcgtttttaggttaccgtttgagtcgcccggaaccgatgtgggccgaattattggctcttgcagcgtctgcccagggacgtgtgtatcgcgcggaagaccctcatggtgcgctccagggcctcttcgaagtccgtggactccttgccaaagacttagctgttgttgcattgcgcgaaggtcttgatttacctccgactgatgatccaatgcttcttgcgtacctcttggacccgtcaaacacgacgcccgaaggcgtagcccgtcgttacggcggcgagtggaccgaagatgcagcgaaacgcgcgttattggccgaacgtttgcacgccaatttattaggacgtttgcaaggcgaggaacgtctcctctggctttacgaagaagtggagaaaccattgagtcgcgtgctcgcgcatatggaagctaccggtgtcaaattagacgtggcgtatttggaggctctcagccttgaagttgctgccgaaatgcgccgcttggaggaagaagtattccgtttagcaggccattcctttcgccttaattctcgcgatcagttagaacgtgtgttgttcgatgaacttggtctccctcctatcggcaagacagagaagaccggtaaacgtagcacttcagcggcggttttagaagctcttcgcgaagtccatcccattgtggacaagatcttgcagtaccgcgaactcgcgaaattgaaaggcacctatattgaccctcttccggcattagtccacccgaaaacgggacgcctccatacccgcttcaaccaaacagccacggcgaccggtcgtttgtcctcctctgatccaaaccttcagaatattccagtacgtaccccattgggccagaagatccgccgcgcgtttgtagctgaggagggttggcgtttagtggccctcgattatagccaaattgaattacgtgtccttgcccatctttctggcgatgagaacctcatccgcgtgtttcaggaaggcaaagacattcacactcaaacggcaagctggatgtttggattatcagctgaagcgatcgatcctttgatgcgtcgtgcagcgaagaccatcaatttcggtgttctctacggtatgagtgcctttcgtttgtcgcaggaattaggcattccctatgaagaagctgcggcgttcattcagaaatactttcaaagctatcccaaagttaaagcatggatcgagaagactctcgaagaaggccgcacacgtggttacgtagagaccttatttggacgtcgccgctatgttcccgatttaaacgctcgcgtgaaatctgtccgtgaagccgccgaacgcatggcgttcaacatgcctgtacagggcacggcagctgacctcatgaaacttgcaatggtgcgcctttttccacaattgcgtgaagttggtgcccgcatgctcttgcaggtccacgatgaactcttgttagaagcgccaaaagagcgtgcggaagaggtggcagccctcgcgaaagaggttatggaaggcgtgtggcccttagcggtgcctcttgaagtcgaagttggtattggcgaggattggctggctgccaaaggataatga

SEQ ID NO: 2372 - protein, 841 aa, synthetic construct
  REGION 1..841: note = Variant of DNA polymerase I from Thermus sp. strain 2.9
MHHHHHHGGSGVLPVFEPKGRVLLVDGHHLAYRNFFALKGLTTSRGEPVQGVYGFAKSLLKALKEDGDVVIVVFDAKAPSFRHEAYEAYKAGRAPTPEDFPRQLALMKELVDLLGLERLEVPGFEADDVLATLAKKAEREGYEVQILTADRDLFQLLSPRISVLHPEGHRITPEWLWEKYGLRPEQWVDFRALAGDPSDNIPGVKGIGEKTALKLLKEWGSLENLLKNLDQVKPESVREKILAHLEDLKLSRELSRVRTDLPLEVDFRRRREPDWEGLKAFLERLEFGSLLHEFGLLESPLPAEEAPWPPPEGAFLGYRLSRPEPMWAELLALAASAQGRVYRAEDPHGALQGLFEVRGLLAKDLAVVALREGLDLPPTDDPMLLAYLLDPSNTTPEGVARRYGGEWTEDAAKRALLAERLHANLLGRLQGEERLLWLYEEVEKPLSRVLAHMEATGVKLDVAYLEALSLEVAAEMRRLEEEVFRLAGHSFRLNSRDQLERVLFDELGLPPIGKTEKTGKRSTSAAVLEALREVHPIVDKILQYRELAKLKGTYIDPLPALVHPKTGRLHTRFNQTATATGRLSSSDPNLQNIPVRTPLGQKIRRAFVAEEGWRLVALDYSQIELRVLAHLSGDENLIRVFQEGKDIHTQTASWMFGLSAEAIDPLMRRAAKTINFGVLYGMSAFRLSQELGIPYEEAAAFIQKYFQSYPKVKAWIEKTLEEGRTRGYVETLFGRRRYVPDLNARVKSVREAAERMAFNMPVQGTAADLMKLAMVRLFPQLREVGARMLLQVHDELLLEAPKERAEEVAALAKEVMEGVWPLAVPLEVEVGIGEDWLAAKG

SEQ ID NO: 2373 - DNA, 2529 bp, synthetic construct
  misc_feature 1..2529: note = Variant of DNA polymerase I from Thermus sp. strain 2.9
  source 1..2529: mol_type = other DNA
atgcaccatcatcatcatcatggcggtagcggcgtgttaccggtgttcgagcctaaaggtcgcgtgcttctggttgatggccatcatctcgcgtatcgtaacttctttgccctgaaaggattaaccaccagccgtggcgagccggtacagggtgtctacggctttgcaaagtcgctcctgaaagctctgaaagaagacggtgatgtggtgattgttgtctttgatgcgaaagcgccaagttttcgccacgaagcgtacgaagcttacaaagccgggcgtgctccaacgccggaagactttcctcgccaattggcgcttatgaaggaattagtggatttgcttggcctcgaacgcttggaagttcccggtttcgaggcagacgacgtattagcgactctcgcaaagaaagccgaacgtgagggctatgaagtccagatcttgacagcagatcgcgatcttttccagcttttatctccgcgcatctcggtgttacacccggaagggcatcgtatcaccccggaatggctctgggagaaatatggtttgcgtcccgaacaatgggtggattttcgcgccttagcaggcgatccgagcgacaatattccgggagttaaaggtatcggcgagaagacggcgctcaagctccttaaagaatgggggtcgttggagaacttgcttaagaatttagatcaggtcaaaccagagtcagtgcgtgagaagattcttgcacacctcgaagacctcaaattaagccgcgaattgtcccgtgtacgcaccgatttgccgctcgaagttgatttccgtcgccgccgcgaacctgactgggagggtcttaaagcgtttttagagcgtcttgaatttggttcgctcttgcatgaattcggccttttagaaagcccgttaccagccgaagaagcaccttggccaccgcccgaaggcgcgtttttaggttaccgtttgagtcgcccggaaccgatgtgggccgaattattggctcttgcagcgtctgcccagggacgtgtgtatcgcgcggaagaccctcatggtgcgctccgcggcctcttcgaagtccgtggactccttgccaaagacttagctgttgttgcattgcgcgaaggtcttgatttacctccgactgatgatccaatgcttcttgcgtacctcttggacccgtcaaacacgacgcccgaaggcgtagcccgtcgttacggcggcgagtggaccgaagatgcagcgaaacgcgcgttattggccgaacgtttgcacgccaatttattaggacgtttgcaaggcgaggaacgtctcctctggctttacgaagaagtggagaaaccattgagtcgcgtgctcgcgcatatggaagctaccggtgtcaaattagacgtggcgtatttggaggctctcagccttgaagttgctgccgaaatgcgccgcttggaggaagaagtattccgtttagcaggccattcctttcgccttaattctcgcgatcagttagaacgtgtgttgttcgatgaacttggtctccctcctatcggcaagacagagaagaccggtaaacgtagcacttcagcggcggttttagaagctcttcgcgaagtccatcccattgtggacaagatcttgcagtaccgcgaactcgcgaaattgaaaggcacctatattgaccctcttccggcattagtccacccgaaaacgggacgcctccatacccgcttcaaccaaacagccacggcgaccggtcgtttgtcctcctctgatccaaaccttcagaatattccagtacgtaccccattgggccagaagatccgccgcgcgtttgtagctgaggagggttggcgtttagtggccctcgattatagccaaattgaattacgtgtccttgcccatctttctggcgatgagaacctcatccgcgtgtttcaggaaggcaaagacattcacactcaaacggcaagctggatgtttggattatgtgctgaagcgatcgatcctttgatgcgtcgtgcagcgaagaccatcaatttcggtgttctctacggtatgagtgcctttcgtttgtcgcaggaattaggcattccctatgaagaagctgcggcgttcattcagaaatactttcaaagctatcccaaagttaaagcatggatcgagaagactctcgaagaaggccgcacacgtggttacgtagagaccttatttggacgtcgccgctatgttcccgatttaaacgctcgcgtgaaatctgtccgtgaagccgccgaacgcatggcgttcaacatgcctgtacagggcacggcagctgacctcatgaaacttgcaatggtgcgcctttttccacaattgcgtgaagttggtgcccgcatgctcttgcaggtccacgatgaactcttgttagaagcgccaaaagagcgtgcggaagaggtggcagccctcgcgaaagaggttatggaaggcgtgtggcccttagcggtgcctcttgaagtcgaagttggtattggcgaggattggctggctgccaaaggataatga

SEQ ID NO: 2374 - protein, 841 aa, synthetic construct
  REGION 1..841: note = Variant of DNA polymerase I from Thermus sp. strain 2.9
MHHHHHHGGSGVLPVFEPKGRVLLVDGHHLAYRNFFALKGLTTSRGEPVQGVYGFAKSLLKALKEDGDVVIVVFDAKAPSFRHEAYEAYKAGRAPTPEDFPRQLALMKELVDLLGLERLEVPGFEADDVLATLAKKAEREGYEVQILTADRDLFQLLSPRISVLHPEGHRITPEWLWEKYGLRPEQWVDFRALAGDPSDNIPGVKGIGEKTALKLLKEWGSLENLLKNLDQVKPESVREKILAHLEDLKLSRELSRVRTDLPLEVDFRRRREPDWEGLKAFLERLEFGSLLHEFGLLESPLPAEEAPWPPPEGAFLGYRLSRPEPMWAELLALAASAQGRVYRAEDPHGALRGLFEVRGLLAKDLAVVALREGLDLPPTDDPMLLAYLLDPSNTTPEGVARRYGGEWTEDAAKRALLAERLHANLLGRLQGEERLLWLYEEVEKPLSRVLAHMEATGVKLDVAYLEALSLEVAAEMRRLEEEVFRLAGHSFRLNSRDQLERVLFDELGLPPIGKTEKTGKRSTSAAVLEALREVHPIVDKILQYRELAKLKGTYIDPLPALVHPKTGRLHTRFNQTATATGRLSSSDPNLQNIPVRTPLGQKIRRAFVAEEGWRLVALDYSQIELRVLAHLSGDENLIRVFQEGKDIHTQTASWMFGLCAEAIDPLMRRAAKTINFGVLYGMSAFRLSQELGIPYEEAAAFIQKYFQSYPKVKAWIEKTLEEGRTRGYVETLFGRRRYVPDLNARVKSVREAAERMAFNMPVQGTAADLMKLAMVRLFPQLREVGARMLLQVHDELLLEAPKERAEEVAALAKEVMEGVWPLAVPLEVEVGIGEDWLAAKG

SEQ ID NO: 2375 - DNA, 2529 bp, synthetic construct
  misc_feature 1..2529: note = Variant of DNA polymerase I from Thermus sp. strain 2.9
  source 1..2529: mol_type = other DNA
atgcaccatcatcatcatcatggcggtagcggcgtgttaccggtgttcgagcctaaaggtcgcgtgcttctggttgatggccatcatctcgcgtatcgtaacttctttgccctgaaaggattaaccaccagccgtggcgagccggtacagggtgtctacggctttgcaaagtcgctcctgaaagctctgaaagaagacggtgatgtggtgattgttgtctttgatgcgaaagcgccaagttttcgccacgaagcgtacgaagcttacaaagccgggcgtgctccaacgccggaagactttcctcgccaattggcgcttatgaaggaattagtggatttgcttggcctcgaacgcttggaagttcccggtttcgaggcagacgacgtattagcgactctcgcaaagaaagccgaacgtgagggctatgaagtccagatcttgacagcagatcgcgatcttttccagcttttatctccgcgcatctcggtgttacacccggaagggcatcgtatcaccccggaatggctctgggagaaatatggtttgcgtcccgaacaatgggtggattttcgcgccttagcaggcgatccgagcgacaatattccgggagttaaaggtatcggcgagaagacggcgctcaagctccttaaagaatgggggtcgttggagaacttgcttaagaatttagatcaggtcaaaccagagtcagtgcgtgagaagattcttgcacacctcgaagacctcaaattaagccgcgaattgtcccgtgtacgcaccgatttgccgctcgaagttgatttccgtcgccgccgcgaacctgactgggagggtcttaaagcgtttttagagcgtcttgaatttggttcgctcttgcatgaattcggccttttagaaagcccgttaccagccgaagaagcaccttggccaccgcccgaaggcgcgtttttaggttaccgtttgagtcgcccggaaccgatgtgggccgaattattggctcttgcagcgtctgcccagggacgtgtgtatcgcgcggaagaccctcatggtgcgctccgcggcctcttcgaagtccgtggactccttgccaaagacttagctgttgttgcattgcgcgaaggtcttgatttacctccgactgatgatccaatgcttcttgcgtacctcttggacccgtcaaacacgacgcccgaaggcgtagcccgtcgttacggcggcgagtggaccgaagatgcagcgaaacgcgcgttattggccgaacgtttgcacgccaatttattaggacgtttgcaaggcgaggaacgtctcctctggctttacgaagaagtggagaaaccattgagtcgcgtgctcgcgcatatggaagctaccggtgtcaaattagacgtggcgtatttggaggctctcagccttgaagttgctgccgaaatgcgccgcttggaggaagaagtattccgtttagcaggccattcctttcgccttaattctcgcgatcagttagaacgtgtgttgttcgatgaacttggtctccctcctatcggcaagacagagaagaccggtaaacgtagcacttcagcggcggttttagaagctcttcgcgaagtccatcccattgtggacaagatcttgcagtaccgcgaactcgcgaaattgaaaggcacctatattgaccctcttccggcattagtccacccgaaaacgggacgcctccatacccgcttcaaccaaacagccacggcgaccggtcgtttgtcctcctctgatccaaaccttcagaatattccagtacgtaccccattgggccagaagatccgccgcgcgtttgtagctgaggagggttggcgtttagtggccctcgattatagccaaattgaattacgtgtccttgcccatctttctggcgatgagaacctcatccgcgtgtttcaggaaggcaaagacattcacactcaaacggcaagctggatgtttggattatcagctgaagcgatcgatcctttgatgcgtcgtgcagcgaagaccatcaatttcggtgttctctacggtatgagtgcctttcgtttgtcgcaggaattaggcattccctatgaagaagctgcggcgttcattcagaaatactttcaaagctatcccaaagttaaagcatggatcgagaagactctcgaagaaggccgcacacgtggttacgtagagaccttatttggacgtcgccgctatgttcccgatttaaacgctcgcgtgaaatctgtccgtgaagccgccgaacgcttggcgttcaacatgcctgtacagggcacggcagctgacctcatgaaacttgcaatggtgcgcctttttccacaattgcgtgaagttggtgcccgcatgctcttgcaggtccacgatgaactcttgttagaagcgccaaaagagcgtgcggaagaggtggcagccctcgcgaaagaggttatggaaggcgtgtggcccttagcggtgcctcttgaagtcgaagttggtattggcgaggattggctggctgccaaaggataatga

SEQ ID NO: 2376 - protein, 841 aa, synthetic construct
  REGION 1..841: note = Variant of DNA polymerase I from Thermus sp. strain 2.9
MHHHHHHGGSGVLPVFEPKGRVLLVDGHHLAYRNFFALKGLTTSRGEPVQGVYGFAKSLLKALKEDGDVVIVVFDAKAPSFRHEAYEAYKAGRAPTPEDFPRQLALMKELVDLLGLERLEVPGFEADDVLATLAKKAEREGYEVQILTADRDLFQLLSPRISVLHPEGHRITPEWLWEKYGLRPEQWVDFRALAGDPSDNIPGVKGIGEKTALKLLKEWGSLENLLKNLDQVKPESVREKILAHLEDLKLSRELSRVRTDLPLEVDFRRRREPDWEGLKAFLERLEFGSLLHEFGLLESPLPAEEAPWPPPEGAFLGYRLSRPEPMWAELLALAASAQGRVYRAEDPHGALRGLFEVRGLLAKDLAVVALREGLDLPPTDDPMLLAYLLDPSNTTPEGVARRYGGEWTEDAAKRALLAERLHANLLGRLQGEERLLWLYEEVEKPLSRVLAHMEATGVKLDVAYLEALSLEVAAEMRRLEEEVFRLAGHSFRLNSRDQLERVLFDELGLPPIGKTEKTGKRSTSAAVLEALREVHPIVDKILQYRELAKLKGTYIDPLPALVHPKTGRLHTRFNQTATATGRLSSSDPNLQNIPVRTPLGQKIRRAFVAEEGWRLVALDYSQIELRVLAHLSGDENLIRVFQEGKDIHTQTASWMFGLSAEAIDPLMRRAAKTINFGVLYGMSAFRLSQELGIPYEEAAAFIQKYFQSYPKVKAWIEKTLEEGRTRGYVETLFGRRRYVPDLNARVKSVREAAERLAFNMPVQGTAADLMKLAMVRLFPQLREVGARMLLQVHDELLLEAPKERAEEVAALAKEVMEGVWPLAVPLEVEVGIGEDWLAAKG

SEQ ID NO: 2377 - DNA, 2529 bp, synthetic construct
  misc_feature 1..2529: note = Variant of DNA polymerase I from Thermus sp. strain 2.9
  source 1..2529: mol_type = other DNA
atgcaccatcatcatcatcatggcggtagcggcgtgttaccggtgttcgagcctaaaggtcgcgtgcttctggttgatggccatcatctcgcgtatcgtaacttctttgccctgaaaggattaaccaccagccgtggcgagccggtacagggtgtctacggctttgcaaagtcgctcctgaaagctctgaaagaagacggtgatgtggtgattgttgtctttgatgcgaaagcgccaagttttcgccacgaagcgtacgaagcttacaaagccgggcgtgctccaacgccggaagactttcctcgccaattggcgcttatgaaggaattagtggatttgcttggcctcgaacgcttggaagttcccggtttcgaggcagacgacgtattagcgactctcgcaaagaaagccgaacgtgagggctatgaagtccagatcttgacagcagatcgcgatcttttccagcttttatctccgcgcatctcggtgttacacccggaagggcatcgtatcaccccggaatggctctgggagaaatatggtttgcgtcccgaacaatgggtggattttcgcgccttagcaggcgatccgagcgacaatattccgggagttaaaggtatcggcgagaagacggcgctcaagctccttaaagaatgggggtcgttggagaacttgcttaagaatttagatcaggtcaaaccagagtcagtgcgtgagaagattcttgcacacctcgaagacctcaaattaagccgcgaattgtcccgtgtacgcaccgatttgccgctcgaagttgatttccgtcgccgccgcgaacctgactgggagggtcttaaagcgtttttagagcgtcttgaatttggttcgctcttgcatgaattcggccttttagggagcccgttaccagccgaagaagcaccttggccaccgcccgaaggcgcgtttttaggttaccgtttgagtcgcccggaaccgatgtgggccgaattattggctcttgcagcgtctgcccagggacgtgtgtatcgcgcggaagaccctcatggtgcgctccgcggcctcttcgaagtccgtggactccttgccaaagacttagctgttgttgcattgcgcgaaggtcttgatttacctccgactgatgatccaatgcttcttgcgtacctcttggacccgtcaaacacgacgcccgaaggcgtagcccgtcgttacggcggcgagtggaccgaagatgcagcgaaacgcgcgttattggccgaacgtttgcacgccaatttattaggacgtttgcaaggcgaggaacgtctcctctggctttacgaagaagtggagaaaccattgagtcgcgtgctcgcgcatatggaagctaccggtgtcaaattagacgtggcgtatttggaggctctcagccttgaagttgctgccgaaatgcgccgcttggaggaagaagtattccgtttagcaggccattcctttcgccttaattctcgcgatcagttagaacgtgtgttgttcgatgaacttggtctccctcctatcggcaagacagagaagaccggtaaacgtagcacttcagcggcggttttagaagctcttcgcgaagtccatcccattgtggacaagatcttgcagtaccgcgaactcgcgaaattgaaaggcacctatattgaccctcttccggcattagtccacccgaaaacgggacgcctccatacccgcttcaaccaaacagccacggcgaccggtcgtttgtcctcctctgatccaaaccttcagaatattccagtacgtaccccattgggccagaagatccgccgcgcgtttgtagctgaggagggttggcgtttagtggccctcgattatagccaaattgaattacgtgtccttgcccatctttctggcgatgagaacctcatccgcgtgtttcaggaaggcaaagacattcacactcaaacggcaagctggatgtttggattatcagctgaagcgatcgatcctttgatgcgtcgtgcagcgaagaccatcaatttcggtgttctctacggtatgagtgcctttcgtttgtcgcaggaattaggcattccctatgaagaagctgcggcgttcattcagaaatactttcaaagctatcccaaagttaaagcatggatcgagaagactctcgaagaaggccgcacacgtggttacgtagagaccttatttggacgtcgccgctatgttcccgatttaaacgctcgcgtgaaatctgtccgtgaagccgccgaacgcatggcgttcaacatgcctgtacagggcacggcagctgacctcatgaaacttgcaatggtgcgcctttttccacaattgcgtgaagttggtgcccgcatgctcttgcaggtccacgatgaactcttgttagaagcgccaaaagagcgtgcggaagaggtggcagccctcgcgaaagaggttatggaaggcgtgtggcccttagcggtgcctcttgaagtcgaagttggtattggcgaggattggctggctgccaaaggataatga

SEQ ID NO: 2378 - protein, 841 aa, synthetic construct
  REGION 1..841: note = Variant of DNA polymerase I from Thermus sp. strain 2.9
MHHHHHHGGSGVLPVFEPKGRVLLVDGHHLAYRNFFALKGLTTSRGEPVQGVYGFAKSLLKALKEDGDVVIVVFDAKAPSFRHEAYEAYKAGRAPTPEDFPRQLALMKELVDLLGLERLEVPGFEADDVLATLAKKAEREGYEVQILTADRDLFQLLSPRISVLHPEGHRITPEWLWEKYGLRPEQWVDFRALAGDPSDNIPGVKGIGEKTALKLLKEWGSLENLLKNLDQVKPESVREKILAHLEDLKLSRELSRVRTDLPLEVDFRRRREPDWEGLKAFLERLEFGSLLHEFGLLGSPLPAEEAPWPPPEGAFLGYRLSRPEPMWAELLALAASAQGRVYRAEDPHGALRGLFEVRGLLAKDLAVVALREGLDLPPTDDPMLLAYLLDPSNTTPEGVARRYGGEWTEDAAKRALLAERLHANLLGRLQGEERLLWLYEEVEKPLSRVLAHMEATGVKLDVAYLEALSLEVAAEMRRLEEEVFRLAGHSFRLNSRDQLERVLFDELGLPPIGKTEKTGKRSTSAAVLEALREVHPIVDKILQYRELAKLKGTYIDPLPALVHPKTGRLHTRFNQTATATGRLSSSDPNLQNIPVRTPLGQKIRRAFVAEEGWRLVALDYSQIELRVLAHLSGDENLIRVFQEGKDIHTQTASWMFGLSAEAIDPLMRRAAKTINFGVLYGMSAFRLSQELGIPYEEAAAFIQKYFQSYPKVKAWIEKTLEEGRTRGYVETLFGRRRYVPDLNARVKSVREAAERMAFNMPVQGTAADLMKLAMVRLFPQLREVGARMLLQVHDELLLEAPKERAEEVAALAKEVMEGVWPLAVPLEVEVGIGEDWLAAKG

SEQ ID NO: 2379 - DNA, 2529 bp, synthetic construct
  misc_feature 1..2529: note = Variant of DNA polymerase I from Thermus sp. strain 2.9
  source 1..2529: mol_type = other DNA
atgcaccatcatcatcatcatggcggtagcggcgtgttaccggtgttcgagcctaaaggtcgcgtgcttctggttgatggccatcatctcgcgtatcgtaacttctttgccctgaaaggattaaccaccagccgtggcgagccggtacagggtgtctacggctttgcaaagtcgctcctgaaagctctgaaagaagacggtgatgtggtgattgttgtctttgatgcgaaagcgccaagttttcgccacgaagcgtacgaagcttacaaagccgggcgtgctccaacgccggaagactttcctcgccaattggcgcttatgaaggaattagtggatttgcttggcctcgaacgcttggaagttcccggtttcgaggcagacgacgtattagcgactctcgcaaagaaagccgaacgtgagggctatgaagtccagatcttgacagcagatcgcgatcttttccagcttttatctccgcgcatctcggtgttacacccggaagggcatcgtatcaccccggaatggctctgggagaaatatggtttgcgtcccgaacaatgggtggattttcgcgccttagcaggcgatccgagcgacaatattccgggagttaaaggtatcggcgagaagacggcgctcaagctccttaaagaatgggggtcgttggagaacttgcttaagaatttagatcaggtcaaaccagagtcagtgcgtgagaagattcttgcacacctcgaagacctcaaattaagccgcgaattgtcccgtgtacgcaccgatttgccgctcgaagttgatttccgtcgccgccgcgaacctgactgggagggtcttaaagcgtttttagagcgtcttgaatttggttcgctcttgcatgaattcggccttttagaaagcccgttaccagccgaagaagcaccttggccaccgcccgaaggcgcgtttttaggttaccgtttgagtcgcccggaaccgatgtgggccgaattattggctcttgcagcgtctgcccagggacgtgtgtatcgcgcggaagaccctcatggtgcgctccgcggcctcttcgaagtccgtggactccttgccaaagacttagctgttgttgcattgcgcgaaggtcttgatttacctccgactgatgatccaatgcttcttgcgtacctcttggacccgtcaaacacgacgcccgaaggcgtagcccgtcgttacggcggcgagtggaccgaagatgcagcgaaacgcgcgttattggccgaacgtttgcacgccaatttattaggacgtttgcaaggcgaggaacgtctcctctggctttacgaagaagtggagaaaccattgagtcgcgtgctcgcgcatatggaagctaccggtgtcaaattagacgtggcgtatttggaggctctcagccttgaagttgctgccgaaatgcgccgcttggaggaagaagtattccgtttagcaggccattcctttcgccttaattctcgcgatcagttagaacgtgtgttgttcgatgaacttggtctccctcctatcggcaagacagagaagaccggtaaacgtagcacttcagcggcggttttagaagctcttcgcgaagtccatcccattgtggacaagatcttgcagtaccgcgaactcgcgaaattgaaaggcacctatattgactctcttccggcattagtccacccgaaaacgggacgcctccatacccgcttcaaccaaacagccacggcgaccggtcgtttgtcctcctctgatccaaaccttcagaatattccagtacgtaccccattgggccagaagatccgccgcgcgtttgtagctgaggagggttggcgtttagtggccctcgattatagccaaattgaattacgtgtccttgcccatctttctggcgatgagaacctcatccgcgtgtttcaggaaggcaaagacattcacactcaaacggcaagctggatgtttggattatcagctgaagcgatcgatcctttgatgcgtcgtgcagcgaagaccatcaatttcggtgttctctacggtatgagtgcctttcgtttgtcgcaggaattaggcattccctatgaagaagctgcggcgttcattcagaaatactttcaaagctatcccaaagttaaagcatggatcgagaagactctcgaagaaggccgcacacgtggttacgtagagaccttatttggacgtcgccgctatgttcccgatttaaacgctcgcgtgaaatctgtccgtgaagccgccgaacgcatggcgttcaacatgcctgtacagggcacggcagctgacctcatgaaacttgcaatggtgcgcctttttccacaattgcgtgaagttggtgcccgcatgctcttgcaggtccacgatgaactcttgttagaagcgccaaaagagcgtgcggaagaggtggcagccctcgcgaaagaggttatggaaggcgtgtggcccttagcggtgcctcttgaagtcgaagttggtattggcgaggattggctggctgccaaaggataatga

SEQ ID NO: 2380 - protein, 841 aa, synthetic construct
  REGION 1..841: note = Variant of DNA polymerase I from Thermus sp. strain 2.9
MHHHHHHGGSGVLPVFEPKGRVLLVDGHHLAYRNFFALKGLTTSRGEPVQGVYGFAKSLLKALKEDGDVVIVVFDAKAPSFRHEAYEAYKAGRAPTPEDFPRQLALMKELVDLLGLERLEVPGFEADDVLATLAKKAEREGYEVQILTADRDLFQLLSPRISVLHPEGHRITPEWLWEKYGLRPEQWVDFRALAGDPSDNIPGVKGIGEKTALKLLKEWGSLENLLKNLDQVKPESVREKILAHLEDLKLSRELSRVRTDLPLEVDFRRRREPDWEGLKAFLERLEFGSLLHEFGLLESPLPAEEAPWPPPEGAFLGYRLSRPEPMWAELLALAASAQGRVYRAEDPHGALRGLFEVRGLLAKDLAVVALREGLDLPPTDDPMLLAYLLDPSNTTPEGVARRYGGEWTEDAAKRALLAERLHANLLGRLQGEERLLWLYEEVEKPLSRVLAHMEATGVKLDVAYLEALSLEVAAEMRRLEEEVFRLAGHSFRLNSRDQLERVLFDELGLPPIGKTEKTGKRSTSAAVLEALREVHPIVDKILQYRELAKLKGTYIDSLPALVHPKTGRLHTRFNQTATATGRLSSSDPNLQNIPVRTPLGQKIRRAFVAEEGWRLVALDYSQIELRVLAHLSGDENLIRVFQEGKDIHTQTASWMFGLSAEAIDPLMRRAAKTINFGVLYGMSAFRLSQELGIPYEEAAAFIQKYFQSYPKVKAWIEKTLEEGRTRGYVETLFGRRRYVPDLNARVKSVREAAERMAFNMPVQGTAADLMKLAMVRLFPQLREVGARMLLQVHDELLLEAPKERAEEVAALAKEVMEGVWPLAVPLEVEVGIGEDWLAAKG

SEQ ID NO: 2381 - DNA, 2529 bp, synthetic construct
  misc_feature 1..2529: note = Variant of DNA polymerase I from Thermus sp. strain 2.9
  source 1..2529: mol_type = other DNA
atgcaccatcatcatcatcatggcggtagcggcgtgttaccggtgttcgagcctaaaggtcgcgtgcttctggttgatggccatcatctcgcgtatcgtaacttctttgccctgaaaggattaaccaccagccgtggcgagccggtacagggtgtctacggctttgcaaagtcgctcctgaaagctctgaaagaagacggtgatgtggtgattgttgtctttgatgcgaaagcgccaagttttcgccacgaagcgtacgaagcttacaaagccgggcgtgctccaacgccggaagactttcctcgccaattggcgcttatgaaggaattagtggatttgcttggcctcgaacgcttggaagttcccggtttcgaggcagacgacgtattagcgactctcgcaaagaaagccgaacgtgagggctatgaagtccagatcttgacagcagatcgcgatcttttccagcttttatctccgcgcatctcggtgttacacccggaagggcatcgtatcaccccggaatggctctgggagaaatatggtttgcgtcccgaacaatgggtggattttcgcgccttagcaggcgatccgagcgacaatattccgggagttaaaggtatcggcgagaagacggcgctcaagctccttaaagaatgggggtcgttggagaacttgcttaagaatttagatcaggtcaaaccagagtcagtgcgtgagaagattcttgcacacctcgaagacctcaaattaagccgcgaattgtcccgtgtacgcaccgatttgccgctcgaagttgatttccgtcgtcgccgcgaacctgactgggagggtcttaaagcgtttttagagcgtcttgaatttggttcgctcttgcatgaattcggccttttagaaagcccgggtccagccgaagaagcaccttggccaccgcccgagggcgcgtttttaggttaccgtttgagtcgcccggaaccgatgtgggccgaattattggctcttgcagcgtctgcccagggacgtgtgtatcgcgcggaagaccctcatggtgccctccgcggcctcttcgaagtccgtggactccttgccaaagacttagctgttgttgcattgcgcgaaggtcttgatttacctccgactgatgatccaatgcttcttgcgtacctcttggacccgtcaaacacgacgcccgaaggcgtagcccgtcgttacggcggcgagtggaccgaagatgcagcgaaacgcgcgttattggccgaacgtttgcacgccaatttattaggacgtttgcaaggcgaggaacgtctcctctggctttacgaagaagtggagaaaccattgagtcgcgtgctcgcgcatatggaagctaccggtgtcaaattagacgtggcgtatttggaggctctcagccttgaagttgctgccgaaatgcgccgcttggaggaagaagtattccgtttagcaggccattcctttcgccttaattctcgcgatcagttagaacgtgtgttgttcgatgaacttggtctccctcctatcggcaagacagagaagaccggtaaacgtagcacttcagcggcggttttagaagctcttcgcgaagtccatcccattatggacaagatcttgcagtaccgcgcactcgcgaaattgaaaggcacctatattgaccctcttccggcattagtccacccgaaaacgggacgcctccatacccgcttcaaccaaacagccacggcgaccggtcgtttgtcctcctctgatccaaaccttcagaatattccagtacgtaccccattgggccagaagatccgccgcgcgtttgtagctgaggagggttggcgtttagtggccctcgattatcgccaaattgaattacgtgtccttgcccatctttctggcgatgagaacctcatccgcgtgtttcaggaaggcaaagacattcacactcaaacggcaagctggatgtttggattatcagctgaagcgatcgatcctttgatgcgtcgtgcagcgaagaccatcaatttcggtgttctctacggtatgagtgcctttcgtttgtcgcaggaattaggcattccctatgaagaagctgcggcgttcattcagaaatactttcaaagctatcccaaagttaaagcatggatcgagaagactctcgaggaaggccgcacacgtggttacgtagagaccttatttggacgtcgccgctatgttcccgatttaaacgctcgcgtgaaaagtgtccgtgaagccgccgaacgcatggcgttcaacatgcctgtacagggcacggcagctgacctcatgaaacttgcaatggtgcgcctttttccacaattgcgtgaagttggtgcccgcatgctcttgcaggtccacgatgaactcttgttagaagcgccaaaagagcgtgcggaagaggtggcagccctcgcgaaaacggttatggaaggcgtgtggcccttagcggtgcctcttgaagtcgaagttggtattggcgaggattggctggctgccaaaggataatga

SEQ ID NO: 2382 - protein, 841 aa, synthetic construct
  REGION 1..841: note = Variant of DNA polymerase I from Thermus sp. strain 2.9
MHHHHHHGGSGVLPVFEPKGRVLLVDGHHLAYRNFFALKGLTTSRGEPVQGVYGFAKSLLKALKEDGDVVIVVFDAKAPSFRHEAYEAYKAGRAPTPEDFPRQLALMKELVDLLGLERLEVPGFEADDVLATLAKKAEREGYEVQILTADRDLFQLLSPRISVLHPEGHRITPEWLWEKYGLRPEQWVDFRALAGDPSDNIPGVKGIGEKTALKLLKEWGSLENLLKNLDQVKPESVREKILAHLEDLKLSRELSRVRTDLPLEVDFRRRREPDWEGLKAFLERLEFGSLLHEFGLLESPGPAEEAPWPPPEGAFLGYRLSRPEPMWAELLALAASAQGRVYRAEDPHGALRGLFEVRGLLAKDLAVVALREGLDLPPTDDPMLLAYLLDPSNTTPEGVARRYGGEWTEDAAKRALLAERLHANLLGRLQGEERLLWLYEEVEKPLSRVLAHMEATGVKLDVAYLEALSLEVAAEMRRLEEEVFRLAGHSFRLNSRDQLERVLFDELGLPPIGKTEKTGKRSTSAAVLEALREVHPIMDKILQYRALAKLKGTYIDPLPALVHPKTGRLHTRFNQTATATGRLSSSDPNLQNIPVRTPLGQKIRRAFVAEEGWRLVALDYRQIELRVLAHLSGDENLIRVFQEGKDIHTQTASWMFGLSAEAIDPLMRRAAKTINFGVLYGMSAFRLSQELGIPYEEAAAFIQKYFQSYPKVKAWIEKTLEEGRTRGYVETLFGRRRYVPDLNARVKSVREAAERMAFNMPVQGTAADLMKLAMVRLFPQLREVGARMLLQVHDELLLEAPKERAEEVAALAKTVMEGVWPLAVPLEVEVGIGEDWLAAKG

SEQ ID NO: 2383 - DNA, 2529 bp, synthetic construct
  misc_feature 1..2529: note = Variant of DNA polymerase I from Thermus sp. strain 2.9
  source 1..2529: mol_type = other DNA
atgcaccatcatcatcatcatggcggtagcggcgtgttaccggtgttcgagcctaaaggtcgcgtgcttctggttgatggccatcatctcgcgtatcgtaacttctttgccctgaaaggattaaccaccagccgtggcgagccggtacagggtgtctacggctttgcaaagtcgctcctgaaagctctggaagaggacggtgatgtggtgattgttgtctttgatgcgaaagcgccaagttttcgccacgaagcgtacgaagcttacaaagccgggcgtgctccaacgccggaagactttcctcgccaattggcgcttatgaaggaattagtggatttgcttggcctcgaacgcttggaagttcccggtttcgaggcagacgacgtattagcgactctcgcaaagaaagccgaacgtgagggctatgaagtccagatcttgacagcagatcgcgatcttttccagcttttatctccgcgcatctcggtgttacacccggaagggcatcgtatcaccccggaatggctctgggagaaatatggtttgcgtcccgaacaatgggtggattttcgcgccttagcaggcgatccgagcgacaatattccgggagttaaaggtatcggcgagaagacggcgctcaagctccttaaagaatgggggtcgttggagaacttgcttaagaatttagatcaggtcaaaccagagtcagtgcgtgagaagattcttgcacacctcgaagacctcaaattaagccgcgaattgtcccgtgtacgcaccgatttgccgctcgaagttgatttccgtcgccgccgcgaacctgactgggagggtcttaaagcgtttttagagcgtcttgaatttggttcgctcttgcatcatttcggccttttagaaagcccgttaccagccgaagaagcaccttggccaccgcccgaaggcgcgtttttaggttaccgtttgagtcgcccggaaccgatgtgggccgaattattggctcttgcagcgtctgcccagggacgtgtgtatcgcgcggaagaccctcatggtgcgctccgcggcctcttcgaagtccgtggactccttgccaaagacttagctgttgttgcattgcgcgaaggtcttgatttacctccgactgatgatccaatgcttcttgcgtacctcttggacccgtcaaacacgacgcccgaaggcgtagcccgtcgttacggcggcgagtggaccgaagatgcagcgaaacgcgcgttattggccgaacgtttgcacgccaatttattaggacgtttgcaaggcgaggaacgtctcctctggctttacgaagaagtggagaaaccattgagtcgcgtgctcgcgcatatggaagctaccggtgtcaaattagacgtggcgtatttggaggctctcagccttgaagttgctgccgaaatgcgccgcttggaggaagaagtattccgtttagcaggccattcctttcgccttaattctcgcgatcagttagaacgtgtgttgttcgatgaacttggtctccctcctatcggcaagacagagaagaccggtaaacgtagcacttcagcggcggttttagaagctcttcgcgaagtccatcccattgtggacaagatcttgcagtaccgcgaactcgcgaaattgaaaggcacctatattgaccctcttccggcattagtccacccgaaaacgggacgcctccatacccgcttcaaccaaacagccacggcgaccggtcgtttgtcctcctctgatccaaaccttcagaatattccagtacgtaccccattgggccagaagatccgccgcgcgtttgtagctgaggagggttggcgtttagtggccctcgattatagccaaattgaattacgtgtccttgcccatctttctggcgatgagaacctcatccgcgtgtttcaggaaggcaaagacattcacactcaaacggcaagctggatgtttggattatcagctgaagcgatcgatcctttgatgcgtcgtgcagcgaagaccatcaatttcggtgttctctacggtatgagtgcctttcgtttgtcgcaggaattaggcattccctatgaagaagctgcggcgttcattcagaaatactttcaaagctatcccaaagttaaagcatggatcgagaagactctcgaagaaggccgcacacgtggttacgtagagaccttatttggacgtcgccgctatgttcccgatttaaacgctcgcgtgaaatctgtccgtgaagccgccgaacgcatggcgttcaacatgcctgtacagggcacggcagctgacctcatgaaacttgcaatggtgcgcctttttccacaattgcgtgaagttggtgcccgcatgctcttgcaggtccacgatgaactcttgttagaagcgccaaaagagcgtgcggaagaggtggcagccctcgcgaaagaggttatggaaggcgtgtggcccttagcggtgcctcttgaagtcgaagttggtattggcgaggattggctggctgccaaaggataatga

SEQ ID NO: 2384 - protein, 841 aa, synthetic construct
  REGION 1..841: note = Variant of DNA polymerase I from Thermus sp. strain 2.9
MHHHHHHGGSGVLPVFEPKGRVLLVDGHHLAYRNFFALKGLTTSRGEPVQGVYGFAKSLLKALEEDGDVVIVVFDAKAPSFRHEAYEAYKAGRAPTPEDFPRQLALMKELVDLLGLERLEVPGFEADDVLATLAKKAEREGYEVQILTADRDLFQLLSPRISVLHPEGHRITPEWLWEKYGLRPEQWVDFRALAGDPSDNIPGVKGIGEKTALKLLKEWGSLENLLKNLDQVKPESVREKILAHLEDLKLSRELSRVRTDLPLEVDFRRRREPDWEGLKAFLERLEFGSLLHHFGLLESPLPAEEAPWPPPEGAFLGYRLSRPEPMWAELLALAASAQGRVYRAEDPHGALRGLFEVRGLLAKDLAVVALREGLDLPPTDDPMLLAYLLDPSNTTPEGVARRYGGEWTEDAAKRALLAERLHANLLGRLQGEERLLWLYEEVEKPLSRVLAHMEATGVKLDVAYLEALSLEVAAEMRRLEEEVFRLAGHSFRLNSRDQLERVLFDELGLPPIGKTEKTGKRSTSAAVLEALREVHPIVDKILQYRELAKLKGTYIDPLPALVHPKTGRLHTRFNQTATATGRLSSSDPNLQNIPVRTPLGQKIRRAFVAEEGWRLVALDYSQIELRVLAHLSGDENLIRVFQEGKDIHTQTASWMFGLSAEAIDPLMRRAAKTINFGVLYGMSAFRLSQELGIPYEEAAAFIQKYFQSYPKVKAWIEKTLEEGRTRGYVETLFGRRRYVPDLNARVKSVREAAERMAFNMPVQGTAADLMKLAMVRLFPQLREVGARMLLQVHDELLLEAPKERAEEVAALAKEVMEGVWPLAVPLEVEVGIGEDWLAAKG

SEQ ID NO: 2385 - DNA, 2529 bp, synthetic construct
  misc_feature 1..2529: note = Variant of DNA polymerase I from Thermus sp. strain 2.9
  source 1..2529: mol_type = other DNA
atgcaccatcatcatcatcatggcggtagcggcgtgttaccggtgttcgagcctaaaggtcgcgtgcttctggttgatggccatcatctcgcgtatcgtaacttctttgccctgaaaggattaaccaccagccgtggcgagccggtacagggtgtctacggctttgcaaagtcgctcctgaaagctctgaaagaagacggtgatgtggtgattgttgtctttgatgcgaaagcgccaagttttcgccacgaagcgtacgaagcttacaaagccgggcgtgctccaacgccggaagactttcctcgccaattggcgcttatgaaggaattagtggatttgcttggcctcgaacgcttggaagttcccggtttcgaggcagacgacgtattagcgactctcgcaaagaaagccgaacgtgagggctatgaagtccagatcttgacagcagatcgcgatcttttccagcttttatctccgcgcatctcggtgttacacccggaagggcatcgtatcaccccggaatggctctgggagaaatatggtttgcgtcccgaacaatgggtggattttcgcgccttagcaggcgatccgagcgacaatattccgggagttaaaggtatcggcgagaagacggcgctcaagctccttaaagaatgggggtcgttggagaacttgcttaagaatttagatcaggtcaaaccagagtcagtgcgtgagaagattcttgcacacctcgaagacctcaaattaagccgcgaattgtcccgtgtacgcaccgatttgccgctcgaagttgatttccgtcgccgccgcgaacctgactgggagggtcttaaagcgtttttagagcgtcttgaatttggttcgctcttgcatgaattcggccttttagaaagcccgttaccagccgaagaagcaccttggccaccgcccgaaggcgcgtttttaggttaccgtttgagtcgcccggaaccgatgtgggccgaattattggctcttgcagcgtctgcccagggacgtgtgtatcgcgcggaagaccctcatggtgcgctccgcggcctcttcgaagtccgtggactccttgccaaagacttagctgttgttgcattgcgcgaaggtcttgatttacctccgactgatgatccaatgcttcttgcgtacctcttggacccgtcaaacacgacgcccgttggcgtagcccgtcgttacggcggcgagtggaccgaagatgcagcgaaacgcgcgttattggccgaacgtttgcacgccaatttattaggacgtttgcaaggcgaggaacgtctcctctggctttacgaagaagtggagaaaccattgagtcgcgtgctcgcgcatatggaagctaccggtgtcaaattagacgtggcgtatttggaggctctcagccttgaagttgctgccgaaatgcgccgcttggaggaagaagtattccgtttagcaggccattcctttcgccttaattctcgcgatcagttagaacgtgtgttgttcgatgaacttggtctccctcctatcggcaagacagagaagaccggtaaacgtagcacttcagcggcggttttagaagctcttcgcgaagtccatcccattgtggacaagatcttgcagtaccgcgaactcgcgaaattgaaaggcacctatattgaccctcttccggcattagtccacccgaaaacgggacgcctccatacccgcttcaaccaaacagccacggcgaccggtcgtttgtcctcctctgatccaaaccttcagaatattccagtacgtaccccattgggccagaagatccgccgcgcgtttgtagctgaggagggttggcgtttagtggccctcgattatagccaaattgaattacgtgtccttgcccatctttctggcgatgagaacctcatccgcgtgtttcaggaaggcaaagacattcacactcaaacggcaagctggatgtttggattatcagctgaagcgatcgatcctttgatgcgtcgtgcagcgaagaccatcaatttcggtgttctctacggtatgagtgcctttcgtttgtcgcaggaattaggcattccctatgaagaagctgcggcgttcattcagaaatactttcaaagctatcccaaagttaaagcatggatcgagaagactctcgaagaaggccgcacacgtggttacgtagagaccttatttggacgtcgccgctatgttcccgatttaaacgctcgcgtgaaatctgtccgtgaagccgccgaacgcatggcgttcaacatgcctgtacagggcacggcagctgacctcatgaaacttgcaatggtgcgcctttttccacaattgcgtgaagttggtgcccgcatgctcttgcaggtccacgatgaactcttgttagaagcgccaaaagagcgtgcggaagaggtggcagccctcgcgaaagaggttatggaaggcgtgtggcccttagcggtgcctcttgaagtcgaagttggtattggcgaggattggctggctgccaaaggataatga

SEQ ID NO: 2386 - protein, 841 aa, synthetic construct
  REGION 1..841: note = Variant of DNA polymerase I from Thermus sp. strain 2.9
MHHHHHHGGSGVLPVFEPKGRVLLVDGHHLAYRNFFALKGLTTSRGEPVQGVYGFAKSLLKALKEDGDVVIVVFDAKAPSFRHEAYEAYKAGRAPTPEDFPRQLALMKELVDLLGLERLEVPGFEADDVLATLAKKAEREGYEVQILTADRDLFQLLSPRISVLHPEGHRITPEWLWEKYGLRPEQWVDFRALAGDPSDNIPGVKGIGEKTALKLLKEWGSLENLLKNLDQVKPESVREKILAHLEDLKLSRELSRVRTDLPLEVDFRRRREPDWEGLKAFLERLEFGSLLHEFGLLESPLPAEEAPWPPPEGAFLGYRLSRPEPMWAELLALAASAQGRVYRAEDPHGALRGLFEVRGLLAKDLAVVALREGLDLPPTDDPMLLAYLLDPSNTTPVGVARRYGGEWTEDAAKRALLAERLHANLLGRLQGEERLLWLYEEVEKPLSRVLAHMEATGVKLDVAYLEALSLEVAAEMRRLEEEVFRLAGHSFRLNSRDQLERVLFDELGLPPIGKTEKTGKRSTSAAVLEALREVHPIVDKILQYRELAKLKGTYIDPLPALVHPKTGRLHTRFNQTATATGRLSSSDPNLQNIPVRTPLGQKIRRAFVAEEGWRLVALDYSQIELRVLAHLSGDENLIRVFQEGKDIHTQTASWMFGLSAEAIDPLMRRAAKTINFGVLYGMSAFRLSQELGIPYEEAAAFIQKYFQSYPKVKAWIEKTLEEGRTRGYVETLFGRRRYVPDLNARVKSVREAAERMAFNMPVQGTAADLMKLAMVRLFPQLREVGARMLLQVHDELLLEAPKERAEEVAALAKEVMEGVWPLAVPLEVEVGIGEDWLAAKG

SEQ ID NO: 2387 - DNA, 2529 bp, synthetic construct
  misc_feature 1..2529: note = Variant of DNA polymerase I from Thermus sp. strain 2.9
  source 1..2529: mol_type = other DNA
atgcaccatcatcatcatcatggcggtagcggcgtgttaccggtgttcgagcctaaaggtcgcgtgcttctggttgatggccatcatctcgcgtatcgtaacttctttgccctgaaaggattaaccaccagccgtggcgagccggtacagggtgtctacggctttgcaaagtcgctcctgaaagctctgaaagaagacggtgatgtggtgattgttgtctttgatgcgaaagcgccaagttttcgccacgaagcgtacgaagcttacaaagccgggcgtgctccaacgccggaagactttcctcgccaattggcgcttatgaaggaattagtggatttgcttggcctcgaacgcttggaagttcccggtttcgaggcagacgacgtattagcgactctcgcaaagaaagccgaacgtgagggctatgaagtccagatcttgacagcagatcgcgatcttttccagcttttatctccgcgcatctcggtgttacacccggaagggcatcgtatcaccccggaatggctctgggagaaatatggtttgcgtcccgaacaatgggtggattttcgcgccttagcaggcgatccgagcgacaatattccgggagttaaaggtatcggcgagaagacggcgctcaagctccttaaagaatgggggtcgttggagaacttgcttaagaatttagatcaggtcaaaccagagtcagtgcgtgagaagattcttgcacacctcgaagacctcaaattaagccgcgaattgtcccgtgtacgcaccgatttgccgctcgaagttgatttccgtcttcgccgcgaacctgactgggagggtcttaaagcgtttttagagcgtcttgaatttggttcgctcttgcatgaattcggccttttagaaagcccgttaccagccgaagaagcaccttggccaccgcccgaaggcgcgtttttaggttaccgtttgagtcgcccggaaccgatgtgggccgaattattggctcttgcagcgtctgcccagggacgtgtgtatcgcgcggaagaccctcatggtgcgctccgcggcctcttcgaagtccgtggactccttgccaaagacttagctgttgttgcattgcgcgaaggtcttgatttacctccgactgatgatccaatgcttcttgcgtacctcttggacccgtcaaacacgacgcccgaaggcgtagcccgtcgttacggcggcgagtggaccgaagatgcagcgaaacgcgcgttattggccgaacgtttgcacgccaatttattaggacgtttgcaaggcgaggaacgtctcctctggctttacgaagaagtggagaaaccattgagtcgcgtgctcgcgcatatggaagctaccggtgtcaaattagacgtggcgtatttggaggctctcagccttgaagttgctgccgaaatgcgccgcttggaggaagaagtattccgtttagcaggccattcctttcgccttaattctcgcgatcagttagaacgtgtgttgttcgatgaacttggtctccctcctatcggcaagacagagaagaccggtaaacgtagcacttcagcggcggttttagaagctcttcgcgaagtccatcccattgtggacaagatcttgcagtaccgcgaactcgcgaaattgaaaggcacctatattgaccctcttccggcattagtccacccgaaaacgggacgcctccatacccgcttcaaccaaacagccacggcgaccggtcgtttgtcctcctctgatccaaaccttcagaatattccagtacgtaccccattgggccagaagatccgccgcgcgtttgtagctgaggagggttggcgtttagtggccctcgattatagccaaattgaattacgtgtccttgcccatctttctggcgatgagaacctcatccgcgtgtttcaggaaggcaaagacattcacactcaaacggcaagctggatgtttggattatcagctgaagcgatcgatcctttgatgcgtcgtgcagcgaagaccatcaatttcggtgttctctacggtatgagtgcctttcgtttgtcgcaggaattaggcattccctatgaagaagctgcggcgttcattcagaaatactttcaaagctatcccaaagttaaagcatggatcgagaagactctcgaagaaggccgcacacgtggttacgtagagaccttatttggacgtcgccgctatgttcccgatttaaacgctcgcgtgaaatctgtccgtgaagccgccgaacgcatggcgttcaacatgcctgtacagggcacggcagctgacctcatgaaacttgcaatggtgcgcctttttccacaattgcgtgaagttggtgcccgcatgctcttgcaggtccacgatgaactcttgttagaagcgccaaaagagcgtgcggaagaggtggcagccctcgcgaaagaggttatggaaggcgtgtggcccttagcggtgcctcttgaagtcgaagttggtattggcgaggattggctggctgccaaaggataatga

SEQ ID NO: 2388 - protein, 841 aa, synthetic construct
  REGION 1..841: note = Variant of DNA polymerase I from Thermus sp. strain 2.9
MHHHHHHGGSGVLPVFEPKGRVLLVDGHHLAYRNFFALKGLTTSRGEPVQGVYGFAKSLLKALKEDGDVVIVVFDAKAPSFRHEAYEAYKAGRAPTPEDFPRQLALMKELVDLLGLERLEVPGFEADDVLATLAKKAEREGYEVQILTADRDLFQLLSPRISVLHPEGHRITPEWLWEKYGLRPEQWVDFRALAGDPSDNIPGVKGIGEKTALKLLKEWGSLENLLKNLDQVKPESVREKILAHLEDLKLSRELSRVRTDLPLEVDFRLRREPDWEGLKAFLERLEFGSLLHEFGLLESPLPAEEAPWPPPEGAFLGYRLSRPEPMWAELLALAASAQGRVYRAEDPHGALRGLFEVRGLLAKDLAVVALREGLDLPPTDDPMLLAYLLDPSNTTPEGVARRYGGEWTEDAAKRALLAERLHANLLGRLQGEERLLWLYEEVEKPLSRVLAHMEATGVKLDVAYLEALSLEVAAEMRRLEEEVFRLAGHSFRLNSRDQLERVLFDELGLPPIGKTEKTGKRSTSAAVLEALREVHPIVDKILQYRELAKLKGTYIDPLPALVHPKTGRLHTRFNQTATATGRLSSSDPNLQNIPVRTPLGQKIRRAFVAEEGWRLVALDYSQIELRVLAHLSGDENLIRVFQEGKDIHTQTASWMFGLSAEAIDPLMRRAAKTINFGVLYGMSAFRLSQELGIPYEEAAAFIQKYFQSYPKVKAWIEKTLEEGRTRGYVETLFGRRRYVPDLNARVKSVREAAERMAFNMPVQGTAADLMKLAMVRLFPQLREVGARMLLQVHDELLLEAPKERAEEVAALAKEVMEGVWPLAVPLEVEVGIGEDWLAAKG

SEQ ID NO: 2389 - DNA, 2529 bp, synthetic construct
  misc_feature 1..2529: note = Variant of DNA polymerase I from Thermus sp. strain 2.9
  source 1..2529: mol_type = other DNA
atgcaccatcatcatcatcatggcggtagcggcgtgttaccggtgttcgagcctaaaggtcgcgtgcttctggttgatggccatcatctcgcgtatcgtaacttctttgccctgaaaggattaaccaccagccgtggcgagccggtacagggtgtctacggctttgcaaagtcgctcctgaaagctctgaaagaagacggtgatgtggtgattgttgtctttgatgcgaaagcgccaagttttcgccacgaagcgtacgaagcttacaaagccgggcgtgctccaacgccggaagactttcctcgtcaattggcgcttatgaaggaattagtggatttgcttggcctcgaacgcttggaagttcccggtttcgaggcagacgacgtattagcgactctcgcaaagaaagccgaacgtgagggctatgaagtccagatcttgacagcagatcgcgatcttttccagcttttatctccgcgcatctcggtgttacacccggaagggcatcgtatcaccccggaatggctctgggagaaatatggtttgcgtcccgaacaatgggtggattttcgcgccttagcaggcgatccgagcgacaatattccgggagttaaaggtatcggcgagaagacggcgctcaagctccttaaagaatgggggtcgttggagaacttgcttaagaatttagatcaggtcaaaccagagtcagtgcgtgagaagattcttgcacacctcgaagacctcaaattaagccgcgaattgtcccgtgtacgcaccgatttgccgctcgaagttgatttccgtcgccgccgcgaacctgactgggagggtcttaaagcgtttttagagcgtcttgaatttggttcgctcttgcatgaattcggccttttagaaagcccgttaccggccgaagaagcaccttggccaccgcccgaaggcgcgtttttaggttaccgtttgagtcgcccggaaccgatgtgggccgaattattggctcttgcagcgtctgcccagggacgtgtgtatcgcgcggaagaccctcatggtgcgctccgcggcctcttcgaagtccgtggactccttgccaaagacttagctgttgttgcattgcgcgaaggtcttgatttacctccgactgatgatccaatgcttcttgcgtacctcttggacccgtcaaacacgacgcccgaaggcgtagcccgtcgttacggcggcgagtggaccgaagatgcagcgaaacgcgcgttattggccgaacgtttgcacgccaatttattaggacgtttgcaaggcgaggaacgtctcctctggctttacgaagaagtggagaaaccattgagtcgcgtgctcgcgcatatggaagctaccggtgtcaaattagacgtggcgtatttggaggctctcagccttgaagttgctgccgaaatgcgccgcttggaggaagaagtattccgtttagcaggccattcctttcgccttaattctcgcgatcagttagaacgtgtgttgttcgatgaacttggtctccgtcctatcggcaagacagagaagaccggtaaacgtagcacttcagcggcggttttagaagctcttcgcgaagtccatcccattgtggacaagatcttgcagtaccgcgaactcgcgaaattgaaaggcacctatattgaccctcttccggcattagtccacccgaaaacgggacgcctccatacccgcttcaaccaaacagccacggcgaccggtcgtttgtcctcctctgatccaaaccttcagaatattccagtacgtaccccattgggccagaagatccgccgcgcgtttgtagctgaggagggttggcgtttagtggccctcgattatagccaaattgaattacgtgtccttgcccatctttctggcgatgagaacctcatccgcgtgtttcaggaaggcaaagacattcacactcaaacggcaagctggatgtttggattatcagctgaagcgatcgatcctttgatgcgtcgtgcagcgaagaccatcaatttcggtgttctctacggtatgagtgcctttcgtttgtcgcaggaattaggcattccctatgaagaagctgcggcgttcattcagaaatactttcaaagctatcccaaagttaaagcatggatcgagaagactctcgaggaaggccgcacacgtggttacgtagagaccttatttggacgtcgccgctatgttcccgatttaaacgctcgcgtgaaaggcgtccgtgaagccgccgaacgcatggcgttcaacatgcctgtacagggcacggcagctgacctcatgaaacttgcaatggtgcgcctttttccacaattgcgtgaagttggtgcccgcatgctcttgcaggtccacgatgaactcttgttagaagcgccaaaagagcgtgcggaagaggtggcagccctcgcgaaagaggttatggaaggcgtgtggcccttagcggtgcctcttgaagtcgaagttggtattggcgaggattggctggctgccaaaggataatga

SEQ ID NO: 2390 - protein, 841 aa, synthetic construct
  REGION 1..841: note = Variant of DNA polymerase I from Thermus sp. strain 2.9
MHHHHHHGGSGVLPVFEPKGRVLLVDGHHLAYRNFFALKGLTTSRGEPVQGVYGFAKSLLKALKEDGDVVIVVFDAKAPSFRHEAYEAYKAGRAPTPEDFPRQLALMKELVDLLGLERLEVPGFEADDVLATLAKKAEREGYEVQILTADRDLFQLLSPRISVLHPEGHRITPEWLWEKYGLRPEQWVDFRALAGDPSDNIPGVKGIGEKTALKLLKEWGSLENLLKNLDQVKPESVREKILAHLEDLKLSRELSRVRTDLPLEVDFRRRREPDWEGLKAFLERLEFGSLLHEFGLLESPLPAEEAPWPPPEGAFLGYRLSRPEPMWAELLALAASAQGRVYRAEDPHGALRGLFEVRGLLAKDLAVVALREGLDLPPTDDPMLLAYLLDPSNTTPEGVARRYGGEWTEDAAKRALLAERLHANLLGRLQGEERLLWLYEEVEKPLSRVLAHMEATGVKLDVAYLEALSLEVAAEMRRLEEEVFRLAGHSFRLNSRDQLERVLFDELGLRPIGKTEKTGKRSTSAAVLEALREVHPIVDKILQYRELAKLKGTYIDPLPALVHPKTGRLHTRFNQTATATGRLSSSDPNLQNIPVRTPLGQKIRRAFVAEEGWRLVALDYSQIELRVLAHLSGDENLIRVFQEGKDIHTQTASWMFGLSAEAIDPLMRRAAKTINFGVLYGMSAFRLSQELGIPYEEAAAFIQKYFQSYPKVKAWIEKTLEEGRTRGYVETLFGRRRYVPDLNARVKGVREAAERMAFNMPVQGTAADLMKLAMVRLFPQLREVGARMLLQVHDELLLEAPKERAEEVAALAKEVMEGVWPLAVPLEVEVGIGEDWLAAKG

SEQ ID NO: 2391 - DNA, 2529 bp, synthetic construct
  misc_feature 1..2529: note = Variant of DNA polymerase I from Thermus sp. strain 2.9
  source 1..2529: mol_type = other DNA
atgcaccatcatcatcatcatggcggtagcggcgtgttaccggtgttcgagcctaaaggtcgcgtgcttctggttgatggccatcatctcgcgtatcgtaacttctttgccctgaaaggattaaccaccagccgtggcgagccggtacagggtgtctacggctttgcaaagtcgctcctgaaagctctgaaagaagacggtgatgtggtgattgttgtctttgatgcgaaagcgccaagttttcgccacgaagcgtacgaagcttacaaagccgggcgtgctccaacgccggaagactttcctcgccaattggcgcttatgaaggaattagtggatttgcttggcctcgaacgcttggaagttcccggtttcgaggcagacgacgtattagcgactctcgcaaagaaagccgaacgtgagggctatgaagtccagatcttgacagcagatcgcgatcttttccagcttttatctccgcgcatctcggtgttacacccggaagggcatcgtatcaccccggaatggctctgggagaaatatggtttgcgtcccgaacaatgggtggattttcgcgccttagcaggcgatccgagcgacaatattccgggagttaaaggtatcggcgagaagacggcgctcaagctccttaaagaatgggggtcgttggagaacttgcttaagaatttagatcaggtcaaaccagagtcagtgcgtgagaagattcttgcacacctcgaagacctcaaattaagccgcgaattgtcccgtgtacgcaccgatttgccgctcgaagttgatttccgtcgccgccgcgaacctgactgggagggtcttaaagcgtttttagagcgtcttgaatttggttcgctcttgcatgaattcggccttttagaaagcccgttaccagccgaagaagcaccttggccaccgcccgaaggcgcgtttttaggttaccgtttgagtcgcccggaaccgatgtgggccgaattattggctcttgcagcgtctgcccagggacgtgtgtatcgcgcggaagaccctcatggtgcgctccgcggcctcttcgaagtccgtggactccttgccaaagacttagctgttgttgcattgcgcgaaggtcttgatttacctccgactgatgatccaatgcttcttgcgtacctcttggacccgtcaaacacgacgcccgaaggcgtagcccgtcgttacggcggcgagtggaccgaagatgcagcgaaacgcgcgttattggccgaacgtttgcacgccaatttattaggacgtttgcaaggcgaggaacgtctcctctggctttacgaagaagtggagaaaccattgagtcgcgtgctcgcgcatatggaagctaccggtgtcaaattagacgtggcgtatttggaggctctcagccttgaagttgctgccgaaatgcgccgcttggaggaagaagtattccgtttagcaggccattcctttgctcttaattctcgcgatcagttagaacgtgtgttgttcgatgaacttggtctccctcctatcggcaagacagagaagaccggtaaacgtagcacttcagcggcggttttagaagctcttcgcgaagtccatcccattgtggacaagatcttgcagtaccgcgaactcgcgaaattgaaaggcacctatattgaccctcttccggcattagtccacccgaaaacgggacgcctccatacccgcttcaaccaaacagccacggcgaccggtcgtttgtcctcctctgatccaaaccttcagaatattccagtacgtaccccattgggccagaagatccgccgcgcgtttgtagctgaggagggttggcgtttagtggccctcgattatagccaaattgaattacgtgtccttgcccatctttctggcgatgagaacctcatccgcgtgtttcaggaaggcaaagacattcacactcaaacggcaagctggatgtttggattatcagctgaagcgatcgatcctttgatgcgtcgtgcagcgaagaccatcaatttcggtgttctctacggtatgagtgcctttcgtttgtcgcaggaattaggcattccctatgaagaagctgcggcgttcattcagaaatactttcaaagctatcccaaagttaaagcatggatcgagaagactctcgaagaaggccgcacacgtggttacgtagagaccttatttggacgtcgccgctatgttcccgatttaaacgctcgcgtgaaatctgtccgtgaagccgccgaacgcatggcgttcaacatgcctgtacagggcacggcagctgacctcatgaaacttgcaatggtgcgcctttttccacaattgcgtgaagttggtgcccgcatgctcttgcaggtccacgatgaactcttgttagaagcgccaaaagagcgtgcggaagaggtggcagccctcgcgaaagaggttatggaaggcgtgtggcccttagcggtgcctcttgaagtcgaagttggtattggcgaggattggctggctgccaaaggataatga

SEQ ID NO: 2392 - protein, 841 aa, synthetic construct
  REGION 1..841: note = Variant of DNA polymerase I from Thermus sp. strain 2.9
MHHHHHHGGSGVLPVFEPKGRVLLVDGHHLAYRNFFALKGLTTSRGEPVQGVYGFAKSLLKALKEDGDVVIVVFDAKAPSFRHEAYEAYKAGRAPTPEDFPRQLALMKELVDLLGLERLEVPGFEADDVLATLAKKAEREGYEVQILTADRDLFQLLSPRISVLHPEGHRITPEWLWEKYGLRPEQWVDFRALAGDPSDNIPGVKGIGEKTALKLLKEWGSLENLLKNLDQVKPESVREKILAHLEDLKLSRELSRVRTDLPLEVDFRRRREPDWEGLKAFLERLEFGSLLHEFGLLESPLPAEEAPWPPPEGAFLGYRLSRPEPMWAELLALAASAQGRVYRAEDPHGALRGLFEVRGLLAKDLAVVALREGLDLPPTDDPMLLAYLLDPSNTTPEGVARRYGGEWTEDAAKRALLAERLHANLLGRLQGEERLLWLYEEVEKPLSRVLAHMEATGVKLDVAYLEALSLEVAAEMRRLEEEVFRLAGHSFALNSRDQLERVLFDELGLPPIGKTEKTGKRSTSAAVLEALREVHPIVDKILQYRELAKLKGTYIDPLPALVHPKTGRLHTRFNQTATATGRLSSSDPNLQNIPVRTPLGQKIRRAFVAEEGWRLVALDYSQIELRVLAHLSGDENLIRVFQEGKDIHTQTASWMFGLSAEAIDPLMRRAAKTINFGVLYGMSAFRLSQELGIPYEEAAAFIQKYFQSYPKVKAWIEKTLEEGRTRGYVETLFGRRRYVPDLNARVKSVREAAERMAFNMPVQGTAADLMKLAMVRLFPQLREVGARMLLQVHDELLLEAPKERAEEVAALAKEVMEGVWPLAVPLEVEVGIGEDWLAAKG

SEQ ID NO: 2393 - DNA, 2529 bp, synthetic construct
  misc_feature 1..2529: note = Variant of DNA polymerase I from Thermus sp. strain 2.9
  source 1..2529: mol_type = other DNA
atgcaccatcatcatcatcatggcggtagcggcgtgttaccggtgttcgagcctaaaggtcgcgtgcttctggttgatggccatcatctcgcgtatcgtaacttctttgccctgaaaggattaaccaccagcagcggcgagccggtacagggtgtctacggctttgcaaagtcgctcctgaaagctctgaaagaggacggtgatgtggtgattgttgtctttgatgcgaaagcgccaagttttcgccacgaagcgtacgaagcttacaaagccgggcgtgctccaacgccggaagactttcctcgccaattggcgcttatgaaggaattagtggatttgcttggcctcgaacgcttggaagttcccggtttcgaggcagacgacgtattagcgactctcgcaaagaaagccgaacgtgagggctatgaagtccagatcttgacagcagatcgcgatcttttccagcttttatctccgcgcatctcggtgttacacccggaagggcatcgtatcaccccggaatggctctgggagaaatatggtttgcgtcccgaacaatgggtggattttcgcgccttagcaggcgatccgagcgacaatattccgggagttaaaggtatcggcgagaagacggcgctcaagctccttaaagaatgggggtcgttggagaacttgcttaagaatttagatcaggtcaaaccagagtcagtgcgtgagaagattcttaatcacctcgaagacctcaaattaagccgcgaattgtcccgtgtacgcaccgatttgccgctcgaagttgatttccgtcgccgccgcgaacctgactgggagggtcttaaagcgtttttagagcgtcttgaatttggttcgctcttgcatgaattcggccttttagaaagcccgttaccagccgaagaagcaccttggccaccgccccagggcgcgtttttaggttaccgtttgagtcgcccggaaccgatgtgggccgaattagccgctcttgcagcgtctgcccagggacgtgtgtatcgcgcggaagaccctcatggtgcgctccgcggcctcttcgaagtccgtggactccttgccaaagacttagctgttgttgcattgcgcgaaggtcttgatttacctccgactgatgatccaatgcttcttgcgtacctcttggacccgtcaaacacgacgcccgaaggcgtagcccgtcgttacggcggcgagtggaccgaagatgcagcgaaacgcgcgttattggccgaacgtttgcacgcgaatttattaggacgtttgcaaggcgaggaacgtctcctctggctttacgaagaagtggagaaaccattgagtcgcgtgctcgggcatatggaagctaccggtgtcaaattagacgtggcgtatttggaggctctcagccttgaagttgctgccgaaatgcgccgcttggaggaagaagtattccgtttagcaggccactcctttcgccttaattctcgcgatcagttagaacgtgtgttgttcgatgaacttggtctccctcctatcggcaagacagagaagaccggtaaacgtagcacttcagcggcggttttagaagctcttcgcgaagtccatcccattgtggacaagatcttgcagtaccgcgaactcgcgaaattgaaaggcacctatattgaccctcttccggcattagtccacccgaaaacgggacgcctccatacccgcttcaaccaaacagccacggcgaccggtcgtttgtcctcctctgatccaaaccttcagaatattccagtacgtaccccattgggccagaagatccgccgcgcgtttgtagctgaggagggttggcgtttagtggccctcgattatagccaaattgaattacgtgtccttgcccatctttctggcgatgagaacctcatccgcgtgtttcaggaaggcaaagacattcacactcaaacggcaagctggatgtttggattaagtgctgaagcgatcgatcctttgatgcgtcgtgcagcgaagaccatcaatttcggtgttctctacggtatgagtgcctttcgtttgtcgcaggaattaggcattccctatgaagaagctgcggcgttcattcagaaatactttcaaagctatcccaaagttaaagcatggatcgagaagactctcgaagaaggccgcacacgtggttacgtagagaccttatttggacgtcgccgctatgttcccgatttaaacgctcgcgtgaaatctgtccgtgaagccgccgaacgcatggcgttcaacatgcctgtacagggcacggcagctgacctcatgaaacttgcaatggtgcgcctttttccacaattgcgtgaagttggtgcccgcatgctcttgcaggtccacgatgaactcttgttagaagcgccaaaagagcgtgcggaagaggtggcagccctcgcgaaagaagttatggaaggcgtgtggcccttagcggtgcctcttgaagtcgaagttggtattggcgaggattggctggctgccaaaggataatga

SEQ ID NO: 2394 - protein, 841 aa, synthetic construct
  REGION 1..841: note = Variant of DNA polymerase I from Thermus sp. strain 2.9
MHHHHHHGGSGVLPVFEPKGRVLLVDGHHLAYRNFFALKGLTTSSGEPVQGVYGFAKSLLKALKEDGDVVIVVFDAKAPSFRHEAYEAYKAGRAPTPEDFPRQLALMKELVDLLGLERLEVPGFEADDVLATLAKKAEREGYEVQILTADRDLFQLLSPRISVLHPEGHRITPEWLWEKYGLRPEQWVDFRALAGDPSDNIPGVKGIGEKTALKLLKEWGSLENLLKNLDQVKPESVREKILNHLEDLKLSRELSRVRTDLPLEVDFRRRREPDWEGLKAFLERLEFGSLLHEFGLLESPLPAEEAPWPPPQGAFLGYRLSRPEPMWAELAALAASAQGRVYRAEDPHGALRGLFEVRGLLAKDLAVVALREGLDLPPTDDPMLLAYLLDPSNTTPEGVARRYGGEWTEDAAKRALLAERLHANLLGRLQGEERLLWLYEEVEKPLSRVLGHMEATGVKLDVAYLEALSLEVAAEMRRLEEEVFRLAGHSFRLNSRDQLERVLFDELGLPPIGKTEKTGKRSTSAAVLEALREVHPIVDKILQYRELAKLKGTYIDPLPALVHPKTGRLHTRFNQTATATGRLSSSDPNLQNIPVRTPLGQKIRRAFVAEEGWRLVALDYSQIELRVLAHLSGDENLIRVFQEGKDIHTQTASWMFGLSAEAIDPLMRRAAKTINFGVLYGMSAFRLSQELGIPYEEAAAFIQKYFQSYPKVKAWIEKTLEEGRTRGYVETLFGRRRYVPDLNARVKSVREAAERMAFNMPVQGTAADLMKLAMVRLFPQLREVGARMLLQVHDELLLEAPKERAEEVAALAKEVMEGVWPLAVPLEVEVGIGEDWLAAKG

SEQ ID NO: 2395 - DNA, 2529 bp, synthetic construct
  misc_feature 1..2529: note = Variant of DNA polymerase I from Thermus sp. strain 2.9
  source 1..2529: mol_type = other DNA
atgcaccatcatcatcatcatggcggtagcggcgtgttaccggtgttcgagcctaaaggtcgcgtgcttctggttgatggccatcatctcgcgtatcgtaacttctttgccctgaaaggattaaccaccagccgtggcgagccggtacagggtgtctacggctttgcaaagtcgctcctgaaagctctgaaagaagacggtgatgtggtgattgttgtctttgatgcgaaagcgccaagttttcgccacgaagcgtacgaagcttacaaagccgggcgtgctccaacgccggaagactttcctcgccaattggcgcttatgaaggaattagtggatttgcttggcctcgaacgcttggaagttcccggtttcgaggcagacgacgtattagcgactctcgcaaagaaagccgaacgtgagggctatgaagtccagatcttgacagcagatcgcgatcttttccagcttttatctccgcgcatctcggtgttacacccggaagggcatcgtatcaccccggaatggctctgggagaaatatggtttgcgtcccgaacaatgggtggattttcgcgccttagcaggcgatccgagcgacaatattccgggagttaaaggtatcggcgagaagacggcgctcaagctccttaaagaatgggggtgtttggagaacttgcttaagaatttagatcaggtcaaaccagagtcagtgcgtgagaagattcttgcacacctcgaagacctcaaattaagccgcgaattgtcccgtgtacgcaccgatttgccgctcgaagttgatttccgtcgccgccgcgaacctgactgggagggtcttaaagcgtttttagagcgtcttgaatttggttcgctcttgcatgaattcggccttttagaaagcccgttaccagccgaagaagcaccttggccaccgcccgaaggcgcgtttttaggttaccgtttgagtcgcccggaaccgatgtgggccgaattattggctcttgcagcgtctgcccagggacgtgtgtatcgcgcggaagaccctcatggtgcgctccgcggcctcttcgaagtccgtggactccttgccaaagacttagctgttgttgcattgcgcgaaggtcttgatttacctccgactgatgatccaatgcttcttgcgtacctcttggacccgtcaaacacgacgcccgaaggcgtagcccgtcgttacggcggcgagtggaccgaagatgcagcgaaacgcgcgttattggccgaacgtttgcacgccaatttattaggacgtttgcaaggcgaggaacgtctcctctggctttacgaagaagtggagaaaccattgagtcgcgtgctcgcgcatatggaagctaccggtgtcaaattagacgtggcgtatttggaggctctcagccttgaagttgctgccgaaatgcgccgcttggaggaagaagtattccgtttagcaggccattcctttcgccttaattctcgcgatcagttagaacgtgtgttgttcgatgaacttggtctccctcctatcggcaagacagagaagaccggtaaacgtagcacttcagcggcggttttagaagctcttcgcgaagtccatcccattgtggacaagatcttgcagtaccgcgaactcgcgaaattgaaaggcacctatattgaccctcttccggcattagtccacccgaaaacgggacgcctccatacccgcttcaaccaaacagccacggcgaccggtcgtttgtcctcctctgatccaaaccttcagaatattccagtacgtaccccattgggccagaagatccgccgcgcgtttgtagctgaggagggttggcgtttagtggccctcgattatagccaaattgaattacgtgtccttgcccatctttctggcgatgagaacctcatccgcgtgtttcaggaaggcaaagacattcacactcaaacggcaagctggatgtttggattatcagctgaagcgatcgatcctttgatgcgtcgtgcagcgaagaccatcaatttcggtgttctctacggtatgagtgcctttcgtttgtcgcaggaattaggcattccctatgaagaagctgcggcgttcattcagaaatactttcaaagctatcccaaagttaaagcatggatcgagaagactctcgaagaaggccgcacacgtggttacgtagagaccttatttggacgtcgccgctatgttcccgatttaaacgctcgcgtgaaatctgtccgtgaagccgccgaacgcatggcgttcaacatgcctgtacagggcacggcagctgacctcatgaaacttgcaatggtgcgcctttttccacaattgcgtgaagttggtgcccgcatgctcttgcaggtccacgatgaactcttgttagaagcgccaaaagagcgtgcggaagaggtggcagccctcgcgaaagaggttatggaaggcgtgtggcccttagcggtgcctcttgaagtcgaagttggtattggcgaggattggctggctgccaaaggataatga

SEQ ID NO: 2396 - protein, 841 aa, synthetic construct
  REGION 1..841: note = Variant of DNA polymerase I from Thermus sp. strain 2.9
MHHHHHHGGSGVLPVFEPKGRVLLVDGHHLAYRNFFALKGLTTSRGEPVQGVYGFAKSLLKALKEDGDVVIVVFDAKAPSFRHEAYEAYKAGRAPTPEDFPRQLALMKELVDLLGLERLEVPGFEADDVLATLAKKAEREGYEVQILTADRDLFQLLSPRISVLHPEGHRITPEWLWEKYGLRPEQWVDFRALAGDPSDNIPGVKGIGEKTALKLLKEWGCLENLLKNLDQVKPESVREKILAHLEDLKLSRELSRVRTDLPLEVDFRRRREPDWEGLKAFLERLEFGSLLHEFGLLESPLPAEEAPWPPPEGAFLGYRLSRPEPMWAELLALAASAQGRVYRAEDPHGALRGLFEVRGLLAKDLAVVALREGLDLPPTDDPMLLAYLLDPSNTTPEGVARRYGGEWTEDAAKRALLAERLHANLLGRLQGEERLLWLYEEVEKPLSRVLAHMEATGVKLDVAYLEALSLEVAAEMRRLEEEVFRLAGHSFRLNSRDQLERVLFDELGLPPIGKTEKTGKRSTSAAVLEALREVHPIVDKILQYRELAKLKGTYIDPLPALVHPKTGRLHTRFNQTATATGRLSSSDPNLQNIPVRTPLGQKIRRAFVAEEGWRLVALDYSQIELRVLAHLSGDENLIRVFQEGKDIHTQTASWMFGLSAEAIDPLMRRAAKTINFGVLYGMSAFRLSQELGIPYEEAAAFIQKYFQSYPKVKAWIEKTLEEGRTRGYVETLFGRRRYVPDLNARVKSVREAAERMAFNMPVQGTAADLMKLAMVRLFPQLREVGARMLLQVHDELLLEAPKERAEEVAALAKEVMEGVWPLAVPLEVEVGIGEDWLAAKG

SEQ ID NO: 2397 - DNA, 2529 bp, synthetic construct
  misc_feature 1..2529: note = Variant of DNA polymerase I from Thermus sp. strain 2.9
  source 1..2529: mol_type = other DNA
atgcaccatcatcatcatcatggcggtagcggcgtgttaccggtgttcgagcctaaaggtcgcgtgcttctggttgatggccatcatctcgcgtatcgtaacttctttgccctgaaaggattaaccaccagccgtggcgagccggtacagggtgtctacggctttgcaaagtcgctcctgaaagctctgaaagaagacggtgatgtggtgattgttgtctttgatgcgaaagcgccaagttttcgccacgaagcgtacgaagcttacaaagccgggcgtgctccaacgccggaagactttcctcgccaattggcgcttatgaaggaattagtggatttgcttggcctcgaacgcttggaagttcccggtttcgaggcagacgacgtattagcgactctcgcaaagaaagccgaacgtgagggctatgaagtccagatcttgacagcagatcgcgatcttttccagcttttatctccgcgcatctcggtgttacacccggaagggcatcgtatcaccccggaatggctctgggagaaatatggtttgcgtcccgaacaatgggtggattttcgcgccttagcaggcgatccgagcgacaatattccgggagttaaaggtatcggcgagaagacggcgctcaagctccttaaagaatgggggtcgttggagaacttgcttaagaatttagatcaggtcaaaccagagtcagtgcgtgagaagattcttgcacacctcgaagacctcaaattaagccgcgaattgtcccgtgtacgcaccgatttgccgctcgaagttgatttcggtcgccgccgcgaacctgactgggagggtcttaaagcgtttttagagcgtcttgaatttggttcgctcttgcatgaattcggccttttagaaagcccgttaccagccgaagaagcaccttggccaccgcccgaaggcgcgtttttaggttaccgtttgagtcgcccggaaccgatgtgggccgaattattggctcttgcagcgtctgcccagggacgtgtgtatcgcgcggaagaccctcatggtgcgctccgcggcctcttcgaagtccgtggactccttgccaaagacttagctgttgttgcattgcgcgaaggtcttgatttacctccgactgatgatccaatgcttcttgcgtacctcttggacccgtcaaacacgacgcccgaaggcgtagcccgtcgttacggcggcgagtggaccgaagatgcagcgaaacgcgcgttattggccgaacgtttgcacgagaatttattaggacgtttgcaaggcgaggaacgtctcctctggctttacgaagaagtggagaaaccattgagtcgcgtgctcgcgcatatggaagctaccggtgtcaaattagacgtggcgtatttggaggctctcagccttgaagttgctgccgaaatgcgccgcttggaggaagaagtattccgtttagcaggccattcctttcgccttaattctcgcgatcagttagaacgtgtgttgttcgatgaacttggtctccctcctatcggcaagacagagaagaccggtaaacgtagcacttcagcggcggttttagaagctcttcgcgaagtccatcccattgtggacaagatcttgcagtaccgcgaactcgcgaaattgaaaggcacctatattgaccctcttccggcattagtccacccgaaaacgggacgcctccatacccgcttcaaccaaacagccacggcgaccggtcgtttgtcctcctctgatccaaaccttcagaatattccagtacgtaccccattgggccagaagatccgccgcgcgtttgtagctgaggagggttggcgtttagtggccctcgattatagccaaattgaattacgtgtccttgcccatctttctggcgatgagaacctcatccgcgtgtttcaggaaggcaaagacattcacactcaaacggcaagctggatgtttggattatcagctgaagcgatcgatcctttgatgcgtcgtgcagcgaagaccatcaatttcggtgttctctacggtatgagtgcctttcgtttgtcgcaggaattaggcattccctatgaagaagctgcggcgttcattcagaaatactttcaaagctatcccaaagttaaagcatggatcgagaagactctcgaagaaggccgcacacgtggttacgtagagaccttatttggacgtcgccgctatgttcccgatttaaacgctcgcgtgaaatctgtccgtgaagccgccgaacgcatggcgttcaacatgcctgtacagggcacggcagctgacctcatgaaacttgcaatggtgcgcctttttccacaattgcgtgaagttggtgcccgcatgctcttgcaggtccacgatgaactcttgttagaagcgccaaaagagcgtgcggaagaggtggcagccctcgcgaaaacggttatggaaggcgtgtggcccttagcggtgcctcttgaagtcgaagttggtattggcgaggattggctggctgccaaaggataatga

SEQ ID NO: 2398 - protein, 841 aa, synthetic construct
  REGION 1..841: note = Variant of DNA polymerase I from Thermus sp. strain 2.9
MHHHHHHGGSGVLPVFEPKGRVLLVDGHHLAYRNFFALKGLTTSRGEPVQGVYGFAKSLLKALKEDGDVVIVVFDAKAPSFRHEAYEAYKAGRAPTPEDFPRQLALMKELVDLLGLERLEVPGFEADDVLATLAKKAEREGYEVQILTADRDLFQLLSPRISVLHPEGHRITPEWLWEKYGLRPEQWVDFRALAGDPSDNIPGVKGIGEKTALKLLKEWGSLENLLKNLDQVKPESVREKILAHLEDLKLSRELSRVRTDLPLEVDFGRRREPDWEGLKAFLERLEFGSLLHEFGLLESPLPAEEAPWPPPEGAFLGYRLSRPEPMWAELLALAASAQGRVYRAEDPHGALRGLFEVRGLLAKDLAVVALREGLDLPPTDDPMLLAYLLDPSNTTPEGVARRYGGEWTEDAAKRALLAERLHENLLGRLQGEERLLWLYEEVEKPLSRVLAHMEATGVKLDVAYLEALSLEVAAEMRRLEEEVFRLAGHSFRLNSRDQLERVLFDELGLPPIGKTEKTGKRSTSAAVLEALREVHPIVDKILQYRELAKLKGTYIDPLPALVHPKTGRLHTRFNQTATATGRLSSSDPNLQNIPVRTPLGQKIRRAFVAEEGWRLVALDYSQIELRVLAHLSGDENLIRVFQEGKDIHTQTASWMFGLSAEAIDPLMRRAAKTINFGVLYGMSAFRLSQELGIPYEEAAAFIQKYFQSYPKVKAWIEKTLEEGRTRGYVETLFGRRRYVPDLNARVKSVREAAERMAFNMPVQGTAADLMKLAMVRLFPQLREVGARMLLQVHDELLLEAPKERAEEVAALAKTVMEGVWPLAVPLEVEVGIGEDWLAAKG

SEQ ID NO: 2399 - DNA, 2529 bp, synthetic construct
  misc_feature 1..2529: note = Variant of DNA polymerase I from Thermus sp. strain 2.9
  source 1..2529: mol_type = other DNA
atgcaccatcatcatcatcatggcggtagcggcgtgttaccggtgttcgagcctaaaggtcgcgtgcttctggttgatggccatcatctcgcgtatcgtaacttctttgccctgaaaggattaaccaccagccgtggcgagccggtacagggtgtctacggctttgcaaagtcgctcctgaaagctctgaaagaagacggtgatgtggtgattgttgtctttgatgcgaaagcgccaagttttcgccacgaagcgtacgaagcttacaaagccgggcgtgctccaacgccggaagactttcctcgccaattggcgcttatgaaggaattagtggatttgcttggcctcgaacgcttggaagttcccggtttcgaggcagacgacgtattagcgactctcgcaaagaaagccgaacgtgagggctatgaagtccagatcttgacagcagatcgcgatcttttccagcttttatctccgcgcatctcggtgttacacccggaagggcatcgtatcaccccggaatggctctgggagaaatatggtttgcgtcccgaacaatgggtggattttcgcgccttagcaggcgatccgagcgacaatattccgggagttaaaggtatcggcgagaagacggcgctcaagctccttaaagaatgggggtcgttggagaacttgcttaagaatttagatcaggtcaaaccagagtcagtgcgtgagaagattcttgcacacctcgaagacctcaaattaagccgcgaattgtcccgtgtacgcaccgatttgccgctcgaagttgatttccgtcgccgccgcgaacctgactgggagggtcttaaagcgtttttagagcgtcttgaatttggttcgctcttgcatgaattcggccttttagaaagcccgttaccagccgaagaagcaccttggccaccgcccgaaggcgcgtttttaggttaccgtttgagtcgcccggaaccgatgtgggccgaattattggctcttgcagcgtctgcccagggacgtgtgtatcgcgcggaagaccctcatggtgcgctccgcggcctcttcgaagtccgtggactccttgccaaagacttagctgttgttgcattgcgcgaaggtcttgatttacctccgactgatgatccaatgcttcttgcgtacctcttggacccgtcaaacacgacgcccgaaggcgtagcccgtcgttacggcggcgagtggaccgaagatgcagcgaaacgcgcgttattggccgaacgtttgcacgccaatttattaggacgtttgcaaggcgaggaacgtctcctctggctttacgaagaagtggagaaaccattgagtcgcgtgctcgcgcatatggaagctaccggtgtcaaattagacgtggcgtatttggaggctctcagccttgaagttgctgccgaaatgcgccgcttggaggaagaagtattccgtttagcaggccattcctttcgccttaattctcgcgatcagttagaacgtgtgttgttcgatgaacttggtctccctcctatcggcaagacagagaagaccgttaaacgtagcacttcagcggcggttttagaagctcttcgcgaagtccatcccattgtggacaagatcttgcagtaccgcgaactcgcgaaattgaaaggcacctatattgaccctcttccggcattagtccacccgaaaacgggacgcctccatacccgcttcaaccaaacagccacggcgaccggtcgtttgtcctcctctgatccaaaccttcagaatattccagtacgtaccccattgggccagaagatccgccgcgcgtttgtagctgaggagggttggcgtttagtggccctcgattatagccaaattgaattacgtgtccttgcccatctttctggcgatgagaacctcatccgcgtgtttcaggaaggcaaagacattcacactcaaacggcaagctggatgtttggattatcagctgaagcgatcgatcctttgatgcgtcgtgcagcgaagaccatcaatttcggtgttctctacggtatgagtgcctttcgtttgtcgcaggaattaggcattccctatgaagaagctgcggcgttcattcagaaatactttcaaagctatcccaaagttaaagcatggatcgagaagactctcgaagaaggccgcacacgtggttacgtagagaccttatttggacgtcgccgctatgttcccgatttaaacgctcgcgtgaaatctgtccgtgaagccgccgaacgcatggcgttcaacatgcctgtacagggcacggcagctgacctcatgaaacttgcaatggtgcgcctttttccacaattgcgtgaagttggtgcccgcatgctcttgcaggtccacgatgaactcttgttagaagcgccaaaagagcgtgcggaagaggtggcagccctcgcgaaagaggttatggaaggcgtgtggcccttagcggtgcctcttgaagtcgaagttggtattggcgaggattggctggctgccaaaggataatga

SEQ ID NO: 2400 - protein, 841 aa, synthetic construct
  REGION 1..841: note = Variant of DNA polymerase I from Thermus sp. strain 2.9
MHHHHHHGGSGVLPVFEPKGRVLLVDGHHLAYRNFFALKGLTTSRGEPVQGVYGFAKSLLKALKEDGDVVIVVFDAKAPSFRHEAYEAYKAGRAPTPEDFPRQLALMKELVDLLGLERLEVPGFEADDVLATLAKKAEREGYEVQILTADRDLFQLLSPRISVLHPEGHRITPEWLWEKYGLRPEQWVDFRALAGDPSDNIPGVKGIGEKTALKLLKEWGSLENLLKNLDQVKPESVREKILAHLEDLKLSRELSRVRTDLPLEVDFRRRREPDWEGLKAFLERLEFGSLLHEFGLLESPLPAEEAPWPPPEGAFLGYRLSRPEPMWAELLALAASAQGRVYRAEDPHGALRGLFEVRGLLAKDLAVVALREGLDLPPTDDPMLLAYLLDPSNTTPEGVARRYGGEWTEDAAKRALLAERLHANLLGRLQGEERLLWLYEEVEKPLSRVLAHMEATGVKLDVAYLEALSLEVAAEMRRLEEEVFRLAGHSFRLNSRDQLERVLFDELGLPPIGKTEKTVKRSTSAAVLEALREVHPIVDKILQYRELAKLKGTYIDPLPALVHPKTGRLHTRFNQTATATGRLSSSDPNLQNIPVRTPLGQKIRRAFVAEEGWRLVALDYSQIELRVLAHLSGDENLIRVFQEGKDIHTQTASWMFGLSAEAIDPLMRRAAKTINFGVLYGMSAFRLSQELGIPYEEAAAFIQKYFQSYPKVKAWIEKTLEEGRTRGYVETLFGRRRYVPDLNARVKSVREAAERMAFNMPVQGTAADLMKLAMVRLFPQLREVGARMLLQVHDELLLEAPKERAEEVAALAKEVMEGVWPLAVPLEVEVGIGEDWLAAKG

SEQ ID NO: 2401 - DNA, 2529 bp, synthetic construct
  misc_feature 1..2529: note = Variant of DNA polymerase I from Thermus sp. strain 2.9
  source 1..2529: mol_type = other DNA
atgcaccatcatcatcatcatggcggtagcggcgtgttaccggtgttcgagcctaaaggtcgcgtgcttctggttgatggccatcatctcgcgtatcgtaacttctttgccctgaaaggattaaccaccagccgtggcgagccggtacagggtgtctacggctttgcaaagtcgctcctgaaagctctgaaagaagacggtgatgtggtgattgttgtctttgatgcgaaagcgccaagttttcgccacgaagcgtacgaagcttacaaagccgggcgtgctccaacgccggaagactttcctcgccaattggcgcttatgaaggaattagtggatttgcttggcctcgaacgcttggaagttcccggtttcgaggcagacgacgtattagcgactctcgcaaagaaagccgaacgtgagggctatgaagtccagatcttgacagcagatcgcgatcttttccagcttttatctccgcgcatctcggtgttacacccggaagggcatcgtatcaccccggaatggctctgggagaaatatggtttgcgtcccgaacaatgggtggattttcgcgccttagcaggcgatccgagcgacaatattccgggagttaaaggtatcggcgagaagacggcgctcaagctccttaaagaatgggggtcgttggagaacttgcttaagaatttagatcaggtcaaaccagagtcagtgcgtgagaagattcttgcacacctcgaagacctcaaattaagccgcgaattgtcccgtgtacgcaccgatttgccgctcgaagttgatttccgtcgccgccgcgaacctgactgggagggtcttaaagcgtttttagagcgtcttgaatttggttcgctcttgcatgaattcggccttttagaaagcccgttaccagccgaagaagcaccttggccaccgcccgaaggcgcgtttttaggttaccgtttgagtcgcccggaaccgatgtgggccgaattattggctcttgcagcgtctgcccagggacgtgtgtatcgcgcggaagaccctcatggtgcgctccgcggcctcttcgaagtccgtggactccttgccaaagacttagctgttgttgcattgcgcgaaggtcttgatttacctccgactgatgatccaatgcttcttgcgtacctcttggacccgtcaaacacgacgcccgaaggcgtagcccgtcgttacggcggcgagtggaccgaagatgcagcgaaacgcgcgttattggccgaacgtttgcacgccaatttattaggacgtttgcaaacggaggaacgtctcctctggctttacgaagaagtggagaaaccattgagtcgcgtgctcgcgcatatggaagctaccggtgtcaaattagacgtggcgtatttggaggctctcagccttgaagttgctgccgaaatgcgccgcttggaggaagaagtattccgtttagcaggccattcctttcgccttaattctcgcgatcagttagaacgtgtgttgttcgatgaacttggtctccctcctatcggcaagacagagaagaccggtaaacgtagcacttcagcggcggttttagaagctcttcgcgaagtccatcccattgtggacaagatcttgcagtaccgcgaactcgcgaaattgaaaggcacctatattgaccctcttccggcattagtccacccgaaaacgggacgcctccatacccgcttcaaccaaacagccacggcgaccggtcgtttgtcctcctctgatccaaaccttcagaatattccagtacgtaccccattgggccagaagatccgccgcgcgtttgtagctgaggagggttggcgtttagtggccctcgattatagccaaattgaattacgtgtccttgcccatctttctggcgatgagaacctcatccgcgtgtttcaggaaggcaaagacattcacactcaaacggcaagctggatgtttggattatcagctgaagcgatcgatcctttgatgcgtcgtgcagcgaagaccatcaatttcggtgttctctacggtatgagtgcctttcgtttgtcgcaggaattaggcattccctatgaagaagctgcggcgttcattcagaaatactttcaaagctatcccaaagttaaagcatggatcgagaagactctcgaagaaggccgcacacgtggttacgtagagaccttatttggacgtcgccgctatgttcccgatttaaacgctcgcgtgaaatctgtccgtgaagccgccgaacgcatggcgttcaacatgcctgtacagggcacggcagctgacctcatgaaacttgcaatggtgcgcctttttccacaattgcgtgaagttggtgcccgcatgctcttgcaggtccacgatgaactcttgttagaagcgccaaaagagcgtgcggaagaggtggcagccctcgcgaaagaggttatggaaggcgtgtggcccttagcggtgcctcttgaagtcgaagttggtattggcgaggattggctggctgccaaaggataatga

SEQ ID NO: 2402 - protein, 841 aa, synthetic construct
  REGION 1..841: note = Variant of DNA polymerase I from Thermus sp. strain 2.9
MHHHHHHGGSGVLPVFEPKGRVLLVDGHHLAYRNFFALKGLTTSRGEPVQGVYGFAKSLLKALKEDGDVVIVVFDAKAPSFRHEAYEAYKAGRAPTPEDFPRQLALMKELVDLLGLERLEVPGFEADDVLATLAKKAEREGYEVQILTADRDLFQLLSPRISVLHPEGHRITPEWLWEKYGLRPEQWVDFRALAGDPSDNIPGVKGIGEKTALKLLKEWGSLENLLKNLDQVKPESVREKILAHLEDLKLSRELSRVRTDLPLEVDFRRRREPDWEGLKAFLERLEFGSLLHEFGLLESPLPAEEAPWPPPEGAFLGYRLSRPEPMWAELLALAASAQGRVYRAEDPHGALRGLFEVRGLLAKDLAVVALREGLDLPPTDDPMLLAYLLDPSNTTPEGVARRYGGEWTEDAAKRALLAERLHANLLGRLQTEERLLWLYEEVEKPLSRVLAHMEATGVKLDVAYLEALSLEVAAEMRRLEEEVFRLAGHSFRLNSRDQLERVLFDELGLPPIGKTEKTGKRSTSAAVLEALREVHPIVDKILQYRELAKLKGTYIDPLPALVHPKTGRLHTRFNQTATATGRLSSSDPNLQNIPVRTPLGQKIRRAFVAEEGWRLVALDYSQIELRVLAHLSGDENLIRVFQEGKDIHTQTASWMFGLSAEAIDPLMRRAAKTINFGVLYGMSAFRLSQELGIPYEEAAAFIQKYFQSYPKVKAWIEKTLEEGRTRGYVETLFGRRRYVPDLNARVKSVREAAERMAFNMPVQGTAADLMKLAMVRLFPQLREVGARMLLQVHDELLLEAPKERAEEVAALAKEVMEGVWPLAVPLEVEVGIGEDWLAAKG

SEQ ID NO: 2403 - DNA, 2529 bp, synthetic construct
  misc_feature 1..2529: note = Variant of DNA polymerase I from Thermus sp. strain 2.9
  source 1..2529: mol_type = other DNA
atgcaccatcatcatcatcatggcggtagcggcgtgttaccggtgttcgagcctaaaggtcgcgtgcttctggttgatggccatcatctcgcgtatcgtaacttctttgccctgaaaggattaaccaccagccgtggcgagccggtacagggtgtctacggctttgcaaagtcgctcctgaaagctctgaaagaagacggtgatgtggtgattgttgtctttgatgcgaaagcgccaagttttcgccacgaagcgtacgaagcttacaaagccgggcgtgctccaacgccggaagactttcctcgccaattggcgcttatgaaggaattagtggatttgcttggcctcgaacgcttggaagttcccggtttcgaggcagacgacgtattagcgactctcgcaaagaaagccgaacgtgagggctatgaagtccagatcttgacagcagatcgcgatcttttccagcttttatctccgcgcatctcggtgttacacccggaagggcatcgtatcaccccggaatggctctgggagaaatatggtttgcgtcccgaacaatgggtggattttcgcgccttagcaggcgatccgagcgacaatattccgggagttaaaggtatcggcgagaagacggcgctcaagctccttaaagaatgggggtcgttggagaacttgcttaagaatttagatcaggtcaaaccagagtcagtgcgtgagaagattcttgcacacctcgaagacctcaaattaagccgcgaattgtcccgtgtacgcaccgatttgccgctcgaagttgatttccgtcgccgccgcgaacctgactgggagggtcttaaagcgtttttagagcgtcttgaatttggttcgctcttgcatgaattcggccttttagaaagcccgttaccagccgaagaagcaccttggccaccgccccagggcgcgtttttaggttaccgtttgagtcgcccggaaccgatgtgggccgaattattggctcttgcagcgtctgcccagggacgtgtgtatcgcgcggaagaccctcatggtgcgctccgcggcctcttcgaagtccgtggactccttgccaaagacttagctgttgttgcattgcgcgaaggtcttgatttacctccgactgatgatccaatgcttcttgcgtacctcttggacccgtcaaacacgacgcccgaaggcgtagcccgtcgttacggcggcgagtggaccgaagatgcagcgaaacgcgcgttattggccgaacgtttgcacgccaatttattaggacgtttgcaaggcgaggaacgtctcctctggctttacgaagaagtggagaaaccattgagtcgcgtgctcgcgcatatggaagctaccggtgtcaaattagacgtggcgtatttggaggctctcagccttgaagttgctgccgaaatgcgccgcttggaggaagaagtattccgtttagcaggccattcctttcgccttaattctcgcgatcagttagaacgtgtgttgttcgatgaacttggtctccctcctatcggcaagacagagaagaccggtaaacgtagcacttcagcggcggttttagaagctcttcgcgaagtccatcccattgtggacaagatcttgcagtaccgcgaactcgcgaaattgaaaggcacctatattgaccctcttccggcattagtccacccgaaaacgggacgcctccatacccgcttcaaccaaacagccacggcgaccggtcgtttgtcctcctctgatccaaaccttcagaatattccagtacgtaccccattgggccagaagatccgccgcgcgtttgtagctgaggagggttggcgtttagtggccctcgattatagccaaattgaattacgtgtccttgcccatctttctggcgatgagaacctcatccgcgtgtttcaggaaggcaaagacattcacactcaaacggcaagctggatgtttggattatcagctgaagcgatcgatcctttgatgcgtcgtgcagcgaagaccatcaatttcggtgttctctacggtatgagtgcctttcgtttgtcgcaggaattaggcattccctatgaagaagctgcggcgttcattcagaaatactttcaaagctatcccaaagttaaagcatggatcgagaagactctcgaagaaggccgcacacgtggttacgtagagaccttatttggacgtcgccgctatgttcccgatttaaacgctcgcgtgaaatctgtccgtgaagccgccgaacgcatggcgttcaacatgcctgtacagggcacggcagctgacctcatgaaacttgcaatggtgcgcctttttccacaattgcgtgaagttggtgcccgcatgctcttgcaggtccacgatgaactcttgttagaagcgccaaaagagcgtgcggaagaggtggcagccctcgcgaaagaggttatggaaggcgtgtggcccttagcggtgcctcttgaagtcgaagttggtattggcgaggattggctggctgccaaaggataatga

SEQ ID NO: 2404 - protein, 841 aa, synthetic construct
  REGION 1..841: note = Variant of DNA polymerase I from Thermus sp. strain 2.9
MHHHHHHGGSGVLPVFEPKGRVLLVDGHHLAYRNFFALKGLTTSRGEPVQGVYGFAKSLLKALKEDGDVVIVVFDAKAPSFRHEAYEAYKAGRAPTPEDFPRQLALMKELVDLLGLERLEVPGFEADDVLATLAKKAEREGYEVQILTADRDLFQLLSPRISVLHPEGHRITPEWLWEKYGLRPEQWVDFRALAGDPSDNIPGVKGIGEKTALKLLKEWGSLENLLKNLDQVKPESVREKILAHLEDLKLSRELSRVRTDLPLEVDFRRRREPDWEGLKAFLERLEFGSLLHEFGLLESPLPAEEAPWPPPQGAFLGYRLSRPEPMWAELLALAASAQGRVYRAEDPHGALRGLFEVRGLLAKDLAVVALREGLDLPPTDDPMLLAYLLDPSNTTPEGVARRYGGEWTEDAAKRALLAERLHANLLGRLQGEERLLWLYEEVEKPLSRVLAHMEATGVKLDVAYLEALSLEVAAEMRRLEEEVFRLAGHSFRLNSRDQLERVLFDELGLPPIGKTEKTGKRSTSAAVLEALREVHPIVDKILQYRELAKLKGTYIDPLPALVHPKTGRLHTRFNQTATATGRLSSSDPNLQNIPVRTPLGQKIRRAFVAEEGWRLVALDYSQIELRVLAHLSGDENLIRVFQEGKDIHTQTASWMFGLSAEAIDPLMRRAAKTINFGVLYGMSAFRLSQELGIPYEEAAAFIQKYFQSYPKVKAWIEKTLEEGRTRGYVETLFGRRRYVPDLNARVKSVREAAERMAFNMPVQGTAADLMKLAMVRLFPQLREVGARMLLQVHDELLLEAPKERAEEVAALAKEVMEGVWPLAVPLEVEVGIGEDWLAAKG

SEQ ID NO: 2405 - DNA, 2529 bp, synthetic construct
  misc_feature 1..2529: note = Variant of DNA polymerase I from Thermus sp. strain 2.9
  source 1..2529: mol_type = other DNA
atgcaccatcatcatcatcatggcggtagcggcgtgttaccggtgttcgagcctaaaggtcgcgtgcttctggttgatggccatcatctcgcgtatcgtaacttctttgccctgaaaggattaaccaccagccgtggcgagccggtacagggtgtctacggctttgcaaagtcgctcctgaaagctctgaaagaagacggtgatgtggtgattgttgtctttgatgcgaaagcgccaagttttcgccacgaagcgtacgaagcttacaaagccgggcgtgctccaacgccggaagactttcctcgccaattggcgcttatgaaggaattagtggatttgcttggcctcgaacgcttggaagttcccggtttcgaggcagacgacgtattagcgactctcgcaaagaaagccgaacgtgagggctatgaagtccagatcttgacagcagatcgcgatcttttccagcttttatctccgcgcatctcggtgttacacccggaagggcatcgtatcaccccggaatggctctgggagaaatatggtttgcgtcccgaacaatgggtggattttcgcgccttagcaggcgatccgagcgacaatattccgggagttaaaggtatcggcgagaagacggcgctcaagctccttaaagaatgggggtcgttggagaacttgcttaagaatttagatcaggtcaaaccagagtcagtgcgtgagaagattcttgcacacctcgaagacctcaaattaagccgcgaattgtcccgtgtacgcaccgatttgccgctcgaagttgatttccgtcgccgccgcgaacctgactgggagggtcttaaagcgtttttagagcgtcttgaatttggttcgctcttgggggaattcggccttttagaaagcccgttaccagccgaagaagcaccttggccaccgcccgaaggcgcgtttttaggttaccgtttgagtcgcccggaaccgatgtgggccgaattattggctcttgcagcgtctgcccagggacgtgtgtatcgcgcggaagaccctcatggtgcgctccgcggcctcttcgaagtccgtggactccttgccaaagacttagctgttgttgcattgcgcgaaggtcttgatttacctccgactgatgatccaatgcttcttgcgtacctcttggacccgtcaaacacgacgcccgaaggcgtagcccgtcgttacggcggcgagtggaccgaagatgcagcgaaacgcgcgttattggccgaacgtttgcacgccaatttattaggacgtttgcaaggcgaggaacgtctcctctggctttacgaagaagtggagaaaccattgagtcgcgtgctcgcgcatatggaagctaccggtgtcaaattagacgtggcgtatttggaggctctcagccttgaagttgctgccgaaatgcgccgcttggaggaagaagtattccgtttagcaggccattcctttcgccttaattctcgcgatcagttagaacgtgtgttgttcgatgaacttggtctccctcctatcggcaagacagagaagaccggtaaacgtagcacttcagcggcggttttagaagctcttcgcgaagtccatcccattgtggacaagatcttgcagtaccgcgaactcgcgaaattgaaaggcacctatattgaccctcttccggcattagtccacccgaaaacgggacgcctccatacccgcttcaaccaaacagccacggcgaccggtcgtttgtcctcctctgatccaaaccttcagaatattccagtacgtaccccattgggccagaagatccgccgcgcgtttgtagctgaggagggttggcgtttagtggccctcgattatagccaaattgaattacgtgtccttgcccatctttctggcgatgagaacctcatccgcgtgtttcaggaaggcaaagacattcacactcaaacggcaagctggatgtttggattatcagctgaagcgatcgatcctttgatgcgtcgtgcagcgaagaccatcaatttcggtgttctctacggtatgagtgcctttcgtttgtcgcaggaattaggcattccctatgaagaagctgcggcgttcattcagaaatactttcaaagctatcccaaagttaaagcatggatcgagaagactctcgaagaaggccgcacacgtggttacgtagagaccttatttggacgtcgccgctatgttcccgatttaaacgctcgcgtgaaatctgtccgtgaagccgccgaacgcatggcgttcaacatgcctgtacagggcacggcagctgacctcatgaaacttgcaatggtgcgcctttttccacaattgcgtgaagttggtgcccgcatgctcttgcaggtccacgatgaactcttgttagaagcgccaaaagagcgtgcggaagaggtggcagccctcgcgaaagaggttatggaaggcgtgtggcccttagcggtgcctcttgaagtcgaagttggtattggcgaggattggctggctgccaaaggataatga

SEQ ID NO: 2406 - protein, 841 aa, synthetic construct
  REGION 1..841: note = Variant of DNA polymerase I from Thermus sp. strain 2.9
MHHHHHHGGSGVLPVFEPKGRVLLVDGHHLAYRNFFALKGLTTSRGEPVQGVYGFAKSLLKALKEDGDVVIVVFDAKAPSFRHEAYEAYKAGRAPTPEDFPRQLALMKELVDLLGLERLEVPGFEADDVLATLAKKAEREGYEVQILTADRDLFQLLSPRISVLHPEGHRITPEWLWEKYGLRPEQWVDFRALAGDPSDNIPGVKGIGEKTALKLLKEWGSLENLLKNLDQVKPESVREKILAHLEDLKLSRELSRVRTDLPLEVDFRRRREPDWEGLKAFLERLEFGSLLGEFGLLESPLPAEEAPWPPPEGAFLGYRLSRPEPMWAELLALAASAQGRVYRAEDPHGALRGLFEVRGLLAKDLAVVALREGLDLPPTDDPMLLAYLLDPSNTTPEGVARRYGGEWTEDAAKRALLAERLHANLLGRLQGEERLLWLYEEVEKPLSRVLAHMEATGVKLDVAYLEALSLEVAAEMRRLEEEVFRLAGHSFRLNSRDQLERVLFDELGLPPIGKTEKTGKRSTSAAVLEALREVHPIVDKILQYRELAKLKGTYIDPLPALVHPKTGRLHTRFNQTATATGRLSSSDPNLQNIPVRTPLGQKIRRAFVAEEGWRLVALDYSQIELRVLAHLSGDENLIRVFQEGKDIHTQTASWMFGLSAEAIDPLMRRAAKTINFGVLYGMSAFRLSQELGIPYEEAAAFIQKYFQSYPKVKAWIEKTLEEGRTRGYVETLFGRRRYVPDLNARVKSVREAAERMAFNMPVQGTAADLMKLAMVRLFPQLREVGARMLLQVHDELLLEAPKERAEEVAALAKEVMEGVWPLAVPLEVEVGIGEDWLAAKG

SEQ ID NO: 2407 - DNA, 2529 bp, synthetic construct
  misc_feature 1..2529: note = Variant of DNA polymerase I from Thermus sp. strain 2.9
  source 1..2529: mol_type = other DNA
atgcaccatcatcatcatcatggcggtagcggcgtgttaccggtgttcgagcctaaaggtcgcgtgcttctggttgatggccatcatctcgcgtatcgtaacttctttgccctgaaaggattaaccaccagccgtggcgagccggtacagggtgtctacggctttgcaaagtcgctcctgaaagctctgaaagaagacggtgatgtggtgattgttgtctttgatgcgaaagcgccaagttttcgccacgaagcgtacgaagcttacaaagccgggcgtgctccaacgccggaagactttcctcgccaattggcgcttatgaaggaattagtggatttgcttggcctcgaacgcttggaagttcccggtttcgaggcagacgacgtattagcgactctcgcaaagaaagccgaacgtgagggctatgaagtccagatcttgacagcagatcgcgatcttttccagcttttatctccgcgcatctcggtgttacacccggaagggcatcgtatcaccccggaatggctctgggagaaatatggtttgcgtcccgaacaatgggtggattttcgcgccttagcaggcgatccgagcgacaatattccgggagttaaaggtatcggcgagaagacggcgctcaagctccttaaagaatgggggtcgttggagaacttgcttaagaatttagatcaggtcaaaccagagtcagtgcgtgagaagattcttgcacacctcgaagacctcaaattaagccgcgaattgtcccgtgtacgcaccgatttgccgctcgaagttgatttccgtcgccgccgcgaacctgactgggagggtcttaaagcgtttttagaggagcttgaatttggttcgctcttgcatgaattcggccttttagaaagcccgttaccagccgaagaagcaccttggccaccgcccgaaggcgcgtttttaggttaccgtttgagtcgcccggaaccgatgtgggccgaattattggctcttgcagcgtctgcccagggacgtgtgtatcgcgcggaagaccctcatggtgcgctccgcggcctcttcgaagtccgtggactccttgccaaagacttagctgttgttgcattgcgcgaaggtcttgatttacctccgactgatgatccaatgcttcttgcgtacctcttggacccgtcaaacacgacgcccgaaggcgtagcccgtcgttacggcggcgagtggaccgaagatgcagcgaaacgcgcgttattggccgaacgtttgcacgccaatttattaggacgtttgcaaggcgaggaacgtctcctctggctttacgaagaagtggagaaaccattgagtcgcgtgctcgcgcatatggaagctaccggtgtcaaattagacgtggcgtatttggaggctctcagccttgaagttgctgccgaaatgcgccgcttggaggaagaagtattccgtttagcaggccattcctttcgccttaattctcgcgatcagttagaacgtgtgttgttcgatgaacttggtctccctcctatcggcaagacagagaagaccggtaaacgtagcacttcagcggcggttttagaagctcttcgcgaagtccatcccattgtggacaagatcttgcagtaccgcgaactcgcgaaattgaaaggcacctatattgaccctcttccggcattagtccacccgaaaacgggacgcctccatacccgcttcaaccaaacagccacggcgaccggtcgtttgtcctcctctgatccaaaccttcagaatattccagtacgtaccccattgggccagaagatccgccgcgcgtttgtagctgaggagggttggcgtttagtggccctcgattatagccaaattgaattacgtgtccttgcccatctttctggcgatgagaacctcatccgcgtgtttcaggaaggcaaagacattcacactcaaacggcaagctggatgtttggattatcagctgaagcgatcgatcctttgatgcgtcgtgcagcgaagaccatcaatttcggtgttctctacggtatgagtgcctttcgtttgtcgcaggaattaggcattccctatgaagaagctgcggcgttcattcagaaatactttcaaagctatcccaaagttaaagcatggatcgagaagactctcgaagaaggccgcacacgtggttacgtagagaccttatttggacgtcgccgctatgttcccgatttaaacgctcgcgtgaaatctgtccgtgaagccgccgaacgcatggcgttcaacatgcctgtacagggcacggcagctgacctcatgaaacttgcaatggtgcgcctttttccacaattgcgtgaagttggtgcccgcatgctcttgcaggtccacgatgaactcttgttagaagcgccaaaagagcgtgcggaagaggtggcagccctcgcgaaagaggttatggaaggcgtgtggcccttagcggtgcctcttgaagtcgaagttggtattggcgaggattggctggctgccaaaggataatga

SEQ ID NO: 2408 - protein, 841 aa, synthetic construct
  REGION 1..841: note = Variant of DNA polymerase I from Thermus sp. strain 2.9
MHHHHHHGGSGVLPVFEPKGRVLLVDGHHLAYRNFFALKGLTTSRGEPVQGVYGFAKSLLKALKEDGDVVIVVFDAKAPSFRHEAYEAYKAGRAPTPEDFPRQLALMKELVDLLGLERLEVPGFEADDVLATLAKKAEREGYEVQILTADRDLFQLLSPRISVLHPEGHRITPEWLWEKYGLRPEQWVDFRALAGDPSDNIPGVKGIGEKTALKLLKEWGSLENLLKNLDQVKPESVREKILAHLEDLKLSRELSRVRTDLPLEVDFRRRREPDWEGLKAFLEELEFGSLLHEFGLLESPLPAEEAPWPPPEGAFLGYRLSRPEPMWAELLALAASAQGRVYRAEDPHGALRGLFEVRGLLAKDLAVVALREGLDLPPTDDPMLLAYLLDPSNTTPEGVARRYGGEWTEDAAKRALLAERLHANLLGRLQGEERLLWLYEEVEKPLSRVLAHMEATGVKLDVAYLEALSLEVAAEMRRLEEEVFRLAGHSFRLNSRDQLERVLFDELGLPPIGKTEKTGKRSTSAAVLEALREVHPIVDKILQYRELAKLKGTYIDPLPALVHPKTGRLHTRFNQTATATGRLSSSDPNLQNIPVRTPLGQKIRRAFVAEEGWRLVALDYSQIELRVLAHLSGDENLIRVFQEGKDIHTQTASWMFGLSAEAIDPLMRRAAKTINFGVLYGMSAFRLSQELGIPYEEAAAFIQKYFQSYPKVKAWIEKTLEEGRTRGYVETLFGRRRYVPDLNARVKSVREAAERMAFNMPVQGTAADLMKLAMVRLFPQLREVGARMLLQVHDELLLEAPKERAEEVAALAKEVMEGVWPLAVPLEVEVGIGEDWLAAKG

SEQ ID NO: 2409 - DNA, 2529 bp, synthetic construct
  misc_feature 1..2529: note = Variant of DNA polymerase I from Thermus sp. strain 2.9
  source 1..2529: mol_type = other DNA
atgcaccatcatcatcatcatggcggtagcggcgtgttaccggtgttcgagcctaaaggtcgcgtgcttctggttgatggccatcatctcgcgtatcgtaacttctttgccctgaaaggattaaccaccagccgtggcgagccggtacagggtgtctacggctttgcaaagtcgctcctgaaagctctgaaagaagacggtgatgtggtgattgttgtctttgatgcgaaagcgccaagttttcgccacgaagcgtacgaagcttacaaagccgggcgtgctccaacgccggaagactttcctcgccaattggcgcttatgaaggaattagtggatttgcttggcctcgaacgcttggaagttcccggtttcgaggcagacgacgtattagcgactctcgcaaagaaagccgaacgtgagggctatgaagtccagatcttgacagcagatcgcgatcttttccagcttttatctccgcgcatctcggtgttacacccggaagggcatcgtatcaccccggaatggctctgggagaaatatggtttgcgtcccgaacaatgggtggattttcgcgccttagcaggcgatccgagcgacaatattccgggagttaaaggtatcggcgagaagacggcgctcaagctccttaaagaatgggggtcgttggagaacttgcttaagaatttagatcaggtcaaaccagagtcagtgcgtgagaagattcttgcacacctcgaagacctcaaattaagccgcgaattgtcccgtgtacgcaccgatttgccgctcgaagttgatttccgtcgccgccgcgaacctgactgggagggtcttaaagcgtttttagagcgtcttgaatttggttcgctcttgcatgaattcggccttttagaaagcccgttaccagccgaagaagcaccttggccaccgcccgaaggcgcgtttttaggttaccgtttgagtcgcccggaaccgatgtgggccgaattattggctcttgcagcgtctgcccagggacgtgtgtatcgcgcggaagaccctcatggtgcgctccgcggcctcttcgaagtccgtggactccttgccaaagacttagctgttgttgcattgcgcgaaggtcttgatttacctccgactgatgatccaatgcttcttgcgtacctcttggacccgtcaaacacgacgcccgaaggcgtagcccgtcgttacggcggcgagtggaccgaagatgcagcgaaacgcgcgttattggccgaacgtttgcacgccaatttattaggacgtttgcaaggcgaggaacgtctcctctggctttacgaagaagtggagaaaccattgagtcgcgtgctcgcgcatatggaagctaccggtgtcaaattagacgtggcgtatttggaggctctcagccttgaagttgctgccgaaatgcgccgcttggaggaagaagtattccgtttagcaggccattcctttcgccttaattctcgcgatcagttagaacgtgtgttgttcgatgaacttggtctccctcctatcggcaagacagagaagaccggtaaacgtagcacttcagcggcggttttagaagctcttcgcgaagtccatcccattgtggacaagatcttgcagtaccgcgaactcgcgaaattgaaaggcacctatattgaccctcttccggcattagtccacccgaaaacgggacgcctccatacccgcttcaaccaaacagccacggcgaccggtcgtttgtcctcctctgatccaaaccttcagaatattccagtacgtaccccattgggccagaagatccgccgcgcgtttgtagctgaggagggttggcgtttagtggccctcgattatagccaaattgaattacgtgtccttgcccatctttctggcgatgagaacctcatccgcgtgtttcaggaaggcaaagacattcacactcaaacggcaagctggatgtttggattatcagctgaagcgatcgatcctttgatgcgtcgtgcagcgaagaccatcaatttcggtgttctctacggtatgagtgccgtgcgtttgtcgcaggaattaggcattccctatgaagaagctgcggcgttcattcagaaatactttcaaagctatcccaaagttaaagcatggatcgagaagactctcgaagaaggccgcacacgtggttacgtagagaccttatttggacgtcgccgctatgttcccgatttaaacgctcgcgtgaaatctgtccgtgaagccgccgaacgcatggcgttcaacatgcctgtacagggcacggcagctgacctcatgaaacttgcaatggtgcgcctttttccacaattgcgtgaagttggtgcccgcatgctcttgcaggtccacgatgaactcttgttagaagcgccaaaagagcgtgcggaagaggtggcagccctcgcgaaagaggttatggaaggcgtgtggcccttagcggtgcctcttgaagtcgaagttggtattggcgaggattggctggctgccaaaggataatga

SEQ ID NO: 2410 - protein, 841 aa, synthetic construct
  REGION 1..841: note = Variant of DNA polymerase I from Thermus sp. strain 2.9
MHHHHHHGGSGVLPVFEPKGRVLLVDGHHLAYRNFFALKGLTTSRGEPVQGVYGFAKSLLKALKEDGDVVIVVFDAKAPSFRHEAYEAYKAGRAPTPEDFPRQLALMKELVDLLGLERLEVPGFEADDVLATLAKKAEREGYEVQILTADRDLFQLLSPRISVLHPEGHRITPEWLWEKYGLRPEQWVDFRALAGDPSDNIPGVKGIGEKTALKLLKEWGSLENLLKNLDQVKPESVREKILAHLEDLKLSRELSRVRTDLPLEVDFRRRREPDWEGLKAFLERLEFGSLLHEFGLLESPLPAEEAPWPPPEGAFLGYRLSRPEPMWAELLALAASAQGRVYRAEDPHGALRGLFEVRGLLAKDLAVVALREGLDLPPTDDPMLLAYLLDPSNTTPEGVARRYGGEWTEDAAKRALLAERLHANLLGRLQGEERLLWLYEEVEKPLSRVLAHMEATGVKLDVAYLEALSLEVAAEMRRLEEEVFRLAGHSFRLNSRDQLERVLFDELGLPPIGKTEKTGKRSTSAAVLEALREVHPIVDKILQYRELAKLKGTYIDPLPALVHPKTGRLHTRFNQTATATGRLSSSDPNLQNIPVRTPLGQKIRRAFVAEEGWRLVALDYSQIELRVLAHLSGDENLIRVFQEGKDIHTQTASWMFGLSAEAIDPLMRRAAKTINFGVLYGMSAVRLSQELGIPYEEAAAFIQKYFQSYPKVKAWIEKTLEEGRTRGYVETLFGRRRYVPDLNARVKSVREAAERMAFNMPVQGTAADLMKLAMVRLFPQLREVGARMLLQVHDELLLEAPKERAEEVAALAKEVMEGVWPLAVPLEVEVGIGEDWLAAKG

SEQ ID NO: 2411 - DNA, 2529 bp, synthetic construct
  misc_feature 1..2529: note = Variant of DNA polymerase I from Thermus sp. strain 2.9
  source 1..2529: mol_type = other DNA
atgcaccatcatcatcatcatggcggtagcggcgtgttaccggtgttcgagcctaaaggtcgcgtgcttctggttgatggccatcatctcgcgtatcgtaacttctttgccctgaaaggattaaccaccagcctgggcgagccggtacagggtgtctacggctttgcaaagtcgctcctgaaagctctgaaagaagacggtgatgtggtgattgttgtctttgatgcgaaagcgccaagttttcgccacgaagcgtacgaagcttacaaagccgggcgtgctccaacgccggaagactttcctcgccaattggcgcttatgaaggaattagtggatttgcttggcctcgaacgcttggaagttcccggtttcgaggcagacgacgtattagcgactctcgcaaagaaagccgaacgtgagggctatgaagtccagatcttgacagcagatcgcgatcttttccagcttttatctccgcgcatctcggtgttacacccggaagggcatcgtatcaccccggaatggctctgggagaaatatggtttgcgtcccgaacaatgggtggattttcgcgccttagcaggcgatccgagcgacaatattccgggagttaaaggtatcggcgagaagacggcgctcaagctccttaaagaatgggggtcgttggagaacttgcttaagaatttagatcaggtcaaaccagagtcagtgcgtgagaagattcttgcacacctcgaagacctcaaattaagccgcgaattgtcccgtgtacgcaccgatttgccgctcgaagttgatttccgtcgccgccgcgaacctgactgggagggtcttaaagcgtttttagagcgtcttgaatttggttcgctcttgcatgaattcggccttttagaaagcccgttaccagccgaagaagcaccttggccaccgcccgaaggcgcgtttttaggttaccgtttgagtcgcccggaaccgatgtgggccgaattattggctcttgcagcgtctgcccagggacgtgtgtatcgcgcggaagaccctcatggtgcgctccgcggcctcttcgaagtccgtggactccttgccaaagacttagctgttgttgcattgcgcgaaggtcttgatttacctccgactgatgatccaatgcttcttgcgtacctcttggacccgtcaaacacgacgcccgaaggcgtagcccgtcgttacggcggcgagtggaccgaagatgcagcgaaacgcgcgttattggccgaacgtttgcacgccaatttattaggacgtttgcaaggcgaggaacgtctcctctggctttacgaagaagtggagaaaccattgagtcgcgtgctcgcgcatatggaagctaccggtgtcaaattagacgtggcgtatttggaggctctcagccttgaagttgctgccgaaatgcgccgcttggaggaagaagtattccgtttagcaggccattcctttcgccttaattctcgcgatcagttagaacgtgtgttgttcgatgaacttggtctccctcctatcggcaagacagagaagaccggtaaacgtagcacttcagcggcggttttagaagctcttcgcgaagtccatcccattgtggacaagatcttgcagtaccgcgaactcgcgaaattgaaaggcacctatattgaccctcttccggcattagtccacccgaaaacgggacgcctccatacccgcttcaaccaaacagccacggcgaccggtcgtttgtcctcctctgatccaaaccttcagaatattccagtacgtaccccattgggccagaagatccgccgcgcgtttgtagctgaggagggttggcgtttagtggccctcgattatagccaaattgaattacgtgtccttgcccatctttctggcgatgagaacctcatccgcgtgtttcaggaaggcaaagacattcacactcaaacggcaagctggatgtttggattatcagctgaagcgatcgatcctttgatgcgtcgtgcagcgaagaccatcaatttcggtgttctctacggtatgagtgcctttcgtttgtcgcaggaattaggcattccctatgaagaagctgcggcgttcattcagaaatactttcaaagctatcccaaagttaaagcatggatcgagaagactctcgaagaaggccgcacacgtggttacgtagagaccttatttggacgtcgccgctatgttcccgatttaaacgctcgcgtgaaatctgtccgtgaagccgccgaacgcatggcgttcaacatgcctgtacagggcacggcagctgacctcatgaaacttgcaatggtgcgcctttttccacaattgcgtgaagttggtgcccgcatgctcttgcaggtccacgatgaactcttgttagaagcgccaaaagagcgtgcggaagaggtggcagccctcgcgaaagaggttatggaaggcgtgtggcccttagcggtgcctcttgaagtcgaagttggtattggcgaggattggctggctgccaaaggataatga

SEQ ID NO: 2412 - protein, 841 aa, synthetic construct
  REGION 1..841: note = Variant of DNA polymerase I from Thermus sp. strain 2.9
MHHHHHHGGSGVLPVFEPKGRVLLVDGHHLAYRNFFALKGLTTSLGEPVQGVYGFAKSLLKALKEDGDVVIVVFDAKAPSFRHEAYEAYKAGRAPTPEDFPRQLALMKELVDLLGLERLEVPGFEADDVLATLAKKAEREGYEVQILTADRDLFQLLSPRISVLHPEGHRITPEWLWEKYGLRPEQWVDFRALAGDPSDNIPGVKGIGEKTALKLLKEWGSLENLLKNLDQVKPESVREKILAHLEDLKLSRELSRVRTDLPLEVDFRRRREPDWEGLKAFLERLEFGSLLHEFGLLESPLPAEEAPWPPPEGAFLGYRLSRPEPMWAELLALAASAQGRVYRAEDPHGALRGLFEVRGLLAKDLAVVALREGLDLPPTDDPMLLAYLLDPSNTTPEGVARRYGGEWTEDAAKRALLAERLHANLLGRLQGEERLLWLYEEVEKPLSRVLAHMEATGVKLDVAYLEALSLEVAAEMRRLEEEVFRLAGHSFRLNSRDQLERVLFDELGLPPIGKTEKTGKRSTSAAVLEALREVHPIVDKILQYRELAKLKGTYIDPLPALVHPKTGRLHTRFNQTATATGRLSSSDPNLQNIPVRTPLGQKIRRAFVAEEGWRLVALDYSQIELRVLAHLSGDENLIRVFQEGKDIHTQTASWMFGLSAEAIDPLMRRAAKTINFGVLYGMSAFRLSQELGIPYEEAAAFIQKYFQSYPKVKAWIEKTLEEGRTRGYVETLFGRRRYVPDLNARVKSVREAAERMAFNMPVQGTAADLMKLAMVRLFPQLREVGARMLLQVHDELLLEAPKERAEEVAALAKEVMEGVWPLAVPLEVEVGIGEDWLAAKG

SEQ ID NO: 2413 - DNA, 2529 bp, synthetic construct
  misc_feature 1..2529: note = Variant of DNA polymerase I from Thermus sp. strain 2.9
  source 1..2529: mol_type = other DNA
atgcaccatcatcatcatcatggcggtagcggcgtgttaccggtgttcgagcctaaaggtcgcgtgcttctggttgatggccatcatctcgcgtatcgtaacttctttgccctgaaaggattaaccaccagccgtggcgagccggtacagggtgtctacggctttgcaaagtcgctcctgaaagctctgaaagaagacggtgatgtggtgattgttgtctttgatgcgaaagcgccaagttttcgccacgaagcgtacgaagcttacaaagccgggcgtgctccaacgccggaagactttcctcgccaattggcgcttatgaaggaattagtggatttgcttggcctcgaacgcttggaagttcccggtttcgaggcagacgacgtattagcgactctcgcaaagaaagccgaacgtgagggctatgaagtccagatcttgacagcagatcgcgatcttttccagcttttatctccgcgcatctcggtgttacacccggaagggcatcgtatcaccccggaatggctctgggagaaatatggtttgcgtcccgaacaatgggtggattttcgcgccttagcaggcgatccgagcgacaatattccgggagttaaaggtatcggcgagaagacggcgctcaagctccttaaagaatgggggtcgttggagaacttgcttaagaatttagatcaggtcaaaccagagtcagtgcgtgagaagattcttgcacacctcgaagacctcaaattaagccgcgaattgtcccgtgtacgcaccgatttgccgctcgaagttgatttccgtcgccgccgcgaacctgactgggagggtcttaaagcgtttttagagcgtcttgaatttggttcgctcttgcatgaattcggccttttagaaagcccgttaccagccgaagaagcaccttggccaccgcccgaaggcgcgtttttaggttaccgtttgagtcgcccggaaccgatgtgggccgaattattggctcttgcagcgtctgcccagggacgtgtgtatcgcgcggaagaccctcatggtgcgctccgcggcctcttcgaagtccgtggactccttgccaaagacttagctgttgttgcattgcgcgaaggtcttgatttacctccgactgatgatccaatgcttcttgcgtacctcttggacccgtcaaacacgacgcccgaaggcgtagcccgtcgttacggcggcgagtggaccgaagatgcagcgaaacgcgcgttattggccgaacgtttgcacgccaatttattaggacgtttgcaaggcgaggaacgtctcctctggctttacgaagaagtggagaaaccattgagtcgcgtgctcgcgcatatggaagctaccggtgtcaaattagacgtggcgtatttggaggctctcagccttgaagttgctgccgaaatgcgccgcttggaggaagaagtattccgtttagcatcgcattcctttcgccttaattctcgcgatcagttagaacgtgtgttgttcgatgaacttggtctccctcctatcggcaagacagagaagaccggtaaacgtagcacttcagcggcggttttagaagctcttcgcgaagtccatcccattgtggacaagatcttgcagtaccgcgaactcgcgaaattgaaaggcacctatattgaccctcttccggcattagtccacccgaaaacgggacgcctccatacccgcttcaaccaaacagccacggcgaccggtcgtttgtcctcctctgatccaaaccttcagaatattccagtacgtaccccattgggccagaagatccgccgcgcgtttgtagctgaggagggttggcgtttagtggccctcgattatagccaaattgaattacgtgtccttgcccatctttctggcgatgagaacctcatccgcgtgtttcaggaaggcaaagacattcacactcaaacggcaagctggatgtttggattatcagctgaagcgatcgatcctttgatgcgtcgtgcagcgaagaccatcaatttcggtgttctctacggtatgagtgcctttcgtttgtcgcaggaattaggcattccctatgaagaagctgcggcgttcattcagaaatactttcaaagctatcccaaagttaaagcatggatcgagaagactctcgaagaaggccgcacacgtggttacgtagagaccttatttggacgtcgccgctatgttcccgatttaaacgctcgcgtgaaatctgtccgtgaagccgccgaacgcatggcgttcaacatgcctgtacagggcacggcagctgacctcatgaaacttgcaatggtgcgcctttttccacaattgcgtgaagttggtgcccgcatgctcttgcaggtccacgatgaactcttgttagaagcgccaaaagagcgtgcggaagaggtggcagccctcgcgaaagaggttatggaaggcgtgtggcccttagcggtgcctcttgaagtcgaagttggtattggcgaggattggctggctgccaaaggataatga

SEQ ID NO: 2414 - protein, 841 aa, synthetic construct
  REGION 1..841: note = Variant of DNA polymerase I from Thermus sp. strain 2.9
MHHHHHHGGSGVLPVFEPKGRVLLVDGHHLAYRNFFALKGLTTSRGEPVQGVYGFAKSLLKALKEDGDVVIVVFDAKAPSFRHEAYEAYKAGRAPTPEDFPRQLALMKELVDLLGLERLEVPGFEADDVLATLAKKAEREGYEVQILTADRDLFQLLSPRISVLHPEGHRITPEWLWEKYGLRPEQWVDFRALAGDPSDNIPGVKGIGEKTALKLLKEWGSLENLLKNLDQVKPESVREKILAHLEDLKLSRELSRVRTDLPLEVDFRRRREPDWEGLKAFLERLEFGSLLHEFGLLESPLPAEEAPWPPPEGAFLGYRLSRPEPMWAELLALAASAQGRVYRAEDPHGALRGLFEVRGLLAKDLAVVALREGLDLPPTDDPMLLAYLLDPSNTTPEGVARRYGGEWTEDAAKRALLAERLHANLLGRLQGEERLLWLYEEVEKPLSRVLAHMEATGVKLDVAYLEALSLEVAAEMRRLEEEVFRLASHSFRLNSRDQLERVLFDELGLPPIGKTEKTGKRSTSAAVLEALREVHPIVDKILQYRELAKLKGTYIDPLPALVHPKTGRLHTRFNQTATATGRLSSSDPNLQNIPVRTPLGQKIRRAFVAEEGWRLVALDYSQIELRVLAHLSGDENLIRVFQEGKDIHTQTASWMFGLSAEAIDPLMRRAAKTINFGVLYGMSAFRLSQELGIPYEEAAAFIQKYFQSYPKVKAWIEKTLEEGRTRGYVETLFGRRRYVPDLNARVKSVREAAERMAFNMPVQGTAADLMKLAMVRLFPQLREVGARMLLQVHDELLLEAPKERAEEVAALAKEVMEGVWPLAVPLEVEVGIGEDWLAAKG

SEQ ID NO: 2415 - DNA, 2529 bp, synthetic construct
  misc_feature 1..2529: note = Variant of DNA polymerase I from Thermus sp. strain 2.9
  source 1..2529: mol_type = other DNA
atgcaccatcatcatcatcatggcggtagcggcgtgttaccggtgttcgagcctaaaggtcgcgtgcttctggttgatggccatcatctcgcgtatcgtaacttctttgccctgaaaggattaaccaccagccgtggcgagccggtacagggtgtctacggctttgcaaagtcgctcctgaaagctctgaaagaagacggtgatgtggtgattgttgtctttgatgcgaaagcgccaagttttcgccacgaagcgtacgaagcttacaaagccgggcgtgctccaacgccggaagactttcctcgccaattggcgcttatgaaggaattagtggatttgcttggcctcgaacgcttggaagttcccggtttcgaggcagacgacgtattagcgactctcgcaaagaaagccgaacgtgagggctatgaagtccagatcttgacagcagatcgcgatcttttccagcttttatctccgcgcatctcggtgttacacccggaagggcatcgtatcaccccggaatggctctgggagaaatatggtttgcgtcccgaacaatgggtggattttcgcgccttagcaggcgatccgagcgacaatattccgggagttaaaggtatcggcgagaagacggcgctcaagctccttaaagaatgggggtcgttggagaacttgcttaagaatttagatcaggtcaaaccagagtcagtgcgtgagaagattcttgcacacctcgaagacctcaaattaagccgcgaattgtcccgtgtacgcaccgatttgccgctcgaagttgatttccgtcgccgccgcgaacctgactgggagggtcttaaagcgtttttagagcgtcttgaatttggttcgctcttgcatgaattcggccttttagaaagcccgttaccagccgaagaagcaccttggccaccgcccgaaggcgcgtttttaggttaccgtttgagtcgcccggaaccgatgtgggccgaattattggctcttgcagcgtctgcccagggacgtgtgtatcgcgcggaagaccctcatggtgcgctccgcggcctcttcgaagtccgtggactccttgccaaagacttagctgttgttgcattgcgcgaaggtcttgatttacctccgactgatgatccaatgcttcttgcgtacctcttggacccgtcaaacacgacgcccgaaggcgtagcccgtcgttacggcggcgagtggaccgaagatgcagcgaaacgcgcgttattggccgaacgtttgcacgccaatttattaggacgtttgcaaggcgaggaacgtctcctctggctttacgaagaagtggagaaaccattgagtcgcgtgctcgcgcatatggaagctaccggtgtcaaattagacgtggcgtatttggaggctctcagccttgaagttgctgccgaaatgcgccgcttggaggaagaagtattccgtttagcaggccattcctttcgccttaattctcgcgatcagttagaacgtgtgttgttcgatgaacttggtctccctcctatcggcaagacagagaagaccggtaaacgtagcacttcagcggcggttttagaagctcttcgcgaagtccatcccattgtggacaagatcttgcagtaccgcgaactcgcgaaattgaaaggcacctatattgaccctcttccggcattagtccacccgaaaacgggacgcctccatacccgcttcaaccaaacagccacggcgaccggtcgtttgtcctcctctgatccaaaccttcagaatattccagtacgtaccccattgggccagaagatccgccgcgcgtttgtagctgaggagggttggcgtttagtggccctcgattatagccaaattgaattacgtgtccttgcccatctttctggcgatgagaacctcatccgcgtgtttcaggaaggcaaagacattcacactcaaacggcaagctggatgtttggattatcagctgaagcgatcgatcctttgatgcgtcgtgcagcgaagaccatcaatttcggtgttctctacggtatgagtgccgggcgtttgtcgcaggaattaggcattccctatgaagaagctgcggcgttcattcagaaatactttcaaagctatcccaaagttaaagcatggatcgagaagactctcgaagaaggccgcacacgtggttacgtagagaccttatttggacgtcgccgctatgttcccgatttaaacgctcgcgtgaaatctgtccgtgaagccgccgaacgcatggcgttcaacatgcctgtacagggcacggcagctgacctcatgaaacttgcaatggtgcgcctttttccacaattgcgtgaagttggtgcccgcatgctcttgcaggtccacgatgaactcttgttagaagcgccaaaagagcgtgcggaagaggtggcagccctcgcgaaagaggttatggaaggcgtgtggcccttagcggtgcctcttgaagtcgaagttggtattggcgaggattggctggctgccaaaggataatga

SEQ ID NO: 2416 - protein, 841 aa, synthetic construct
  REGION 1..841: note = Variant of DNA polymerase I from Thermus sp. strain 2.9
MHHHHHHGGSGVLPVFEPKGRVLLVDGHHLAYRNFFALKGLTTSRGEPVQGVYGFAKSLLKALKEDGDVVIVVFDAKAPSFRHEAYEAYKAGRAPTPEDFPRQLALMKELVDLLGLERLEVPGFEADDVLATLAKKAEREGYEVQILTADRDLFQLLSPRISVLHPEGHRITPEWLWEKYGLRPEQWVDFRALAGDPSDNIPGVKGIGEKTALKLLKEWGSLENLLKNLDQVKPESVREKILAHLEDLKLSRELSRVRTDLPLEVDFRRRREPDWEGLKAFLERLEFGSLLHEFGLLESPLPAEEAPWPPPEGAFLGYRLSRPEPMWAELLALAASAQGRVYRAEDPHGALRGLFEVRGLLAKDLAVVALREGLDLPPTDDPMLLAYLLDPSNTTPEGVARRYGGEWTEDAAKRALLAERLHANLLGRLQGEERLLWLYEEVEKPLSRVLAHMEATGVKLDVAYLEALSLEVAAEMRRLEEEVFRLAGHSFRLNSRDQLERVLFDELGLPPIGKTEKTGKRSTSAAVLEALREVHPIVDKILQYRELAKLKGTYIDPLPALVHPKTGRLHTRFNQTATATGRLSSSDPNLQNIPVRTPLGQKIRRAFVAEEGWRLVALDYSQIELRVLAHLSGDENLIRVFQEGKDIHTQTASWMFGLSAEAIDPLMRRAAKTINFGVLYGMSAGRLSQELGIPYEEAAAFIQKYFQSYPKVKAWIEKTLEEGRTRGYVETLFGRRRYVPDLNARVKSVREAAERMAFNMPVQGTAADLMKLAMVRLFPQLREVGARMLLQVHDELLLEAPKERAEEVAALAKEVMEGVWPLAVPLEVEVGIGEDWLAAKG

SEQ ID NO: 2417 - DNA, 2529 bp, synthetic construct
  misc_feature 1..2529: note = Variant of DNA polymerase I from Thermus sp. strain 2.9
  source 1..2529: mol_type = other DNA
atgcaccatcatcatcatcatggcggtagcggcgtgttaccggtgttcgagcctaaaggtcgcgtgcttctggttgatggccatcatctcgcgtatcgtaacttctttgccctgaaaggattaaccaccagccgtggcgagccggtacagggtgtctacggctttgcaaagtcgctcctgaaagctctgaaagaagacggtgatgtggtgattgttgtctttgatgcgaaagcgccaagttttcgccacgaagcgtacgaagcttacaaagccgggcgtgctccaacgccggaagactttcctcgccaattggcgcttatgaaggaattagtggatttgcttggcctcgaacgcttggaagttcccggtttcgaggcagacgacgtattagcgactctcgcaaagaaagccgaacgtgagggctatgaagtccagatcttgacagcagatcgcgatcttttccagcttttatctccgcgcatctcggtgttacacccggaagggcatcgtatcaccccggaatggctctgggagaaatatggtttgcgtcccgaacaatgggtggattttcgcgccttagcaggcgatccgagcgacaatattccgggagttaaaggtatcggcgagaagacggcgctcaagctccttaaagaatgggggtcgttggagaacttgcttaagaatttagatcaggtcaaaccagagtcagtgcgtgagaagattcttgcacacctcgaagacctcaaattaagccgcgaattgtcccgtgtacgcaccgatttgccgctcgaagttgatttccgtcgccgccgcgaacctgactgggagggtcttaaagcgtttttagagcgtcttgaatttggttcgctcttgcatgaattcggccttttagaaagcccgttaccagccgaagaagcaccttggccaccgcccgaaggcgcgtttttaggttaccgtttgagtcgcccggaaccgatgtgggccgaattattggctcttgcagcgtctgcccagggacgtgtgtatcgcgcggaagaccctcatggtgcgctccgcggcctcttcgaagtccgtggactccttgccaaagacttagctgttgttgcattgcgcgaaggtcttgatttacctccgactgatgatccaatgcttcttgcgtacctcttggacccgtcaaacacgacgcccgaaggcgtagcccgtcgttacggcggcgagtggaccgaagatgcagcgaaacgcgcgttattggccgaacgtttgcacgccaatttattaggacgtttgcaaggcgaggaacgtctcctctggctttacgaagaagtggagaaaccattgagtcgcgtgctcggtcatatggaagctaccggtgtcaaattagacgtggcgtatttggaggctctcagccttgaagttgctgccgaaatgcgccgcttggaggaagaagtattccgtttagcaggccattcctttcgccttaattctcgcgatcagttagaacgtgtgttgttcgatgaacttggtctccctcctatcggcaagacagagaagaccggtaaacgtagcacttcagcggcggttttagaagctcttcgcgaagtccatcccattgtggacaagatcttgcagtaccgcgaactcgcgaaattgaaaggcacctatattgaccctcttccggcattagtccacccgaaaacgggacgcctccatacccgcttcaaccaaacagccacggcgaccggtcgtttgtcctcctctgatccaaaccttcagaatattccagtacgtaccccattgggccagaagatccgccgcgcgtttgtagctgaggagggttggcgtttagtggccctcgattatagccaaattgaattacgtgtccttgcccatctttctggcgatgagaacctcatccgcgtgtttcaggaaggcaaagacattcacactcaaacggcaagctggatgtttggattatcagctgaagcgatcgatcctttgatgcgtcgtgcagcgaagaccatcaatttcggtgttctctacggtatgagtgcctttcgtttgtcgcaggaattaggcattccctatgaagaagctgcggcgttcattcagaaatactttcaaagctatcccaaagttaaagcatggatcgagaagactctcgaagaaggccgcacacgtggttacgtagagaccttatttggacgtcgccgctatgttcccgatttaaacgctcgcgtgaaatctgtccgtgaagccgccgaacgcatggcgttcaacatgcctgtacagggcacggcagctgacctcatgaaacttgcaatggtgcgcctttttccacaattgcgtgaagttggtgcccgcatgctcttgcaggtccacgatgaactcttgttagaagcgccaaaagagcgtgcggaagaggtggcagccctcgcgaaagaggttatggaaggcgtgtggcccttagcggtgcctcttgaagtcgaagttggtattggcgaggattggctggctgccaaaggataatga

SEQ ID NO: 2418 - protein, 841 aa, synthetic construct
  REGION 1..841: note = Variant of DNA polymerase I from Thermus sp. strain 2.9
MHHHHHHGGSGVLPVFEPKGRVLLVDGHHLAYRNFFALKGLTTSRGEPVQGVYGFAKSLLKALKEDGDVVIVVFDAKAPSFRHEAYEAYKAGRAPTPEDFPRQLALMKELVDLLGLERLEVPGFEADDVLATLAKKAEREGYEVQILTADRDLFQLLSPRISVLHPEGHRITPEWLWEKYGLRPEQWVDFRALAGDPSDNIPGVKGIGEKTALKLLKEWGSLENLLKNLDQVKPESVREKILAHLEDLKLSRELSRVRTDLPLEVDFRRRREPDWEGLKAFLERLEFGSLLHEFGLLESPLPAEEAPWPPPEGAFLGYRLSRPEPMWAELLALAASAQGRVYRAEDPHGALRGLFEVRGLLAKDLAVVALREGLDLPPTDDPMLLAYLLDPSNTTPEGVARRYGGEWTEDAAKRALLAERLHANLLGRLQGEERLLWLYEEVEKPLSRVLGHMEATGVKLDVAYLEALSLEVAAEMRRLEEEVFRLAGHSFRLNSRDQLERVLFDELGLPPIGKTEKTGKRSTSAAVLEALREVHPIVDKILQYRELAKLKGTYIDPLPALVHPKTGRLHTRFNQTATATGRLSSSDPNLQNIPVRTPLGQKIRRAFVAEEGWRLVALDYSQIELRVLAHLSGDENLIRVFQEGKDIHTQTASWMFGLSAEAIDPLMRRAAKTINFGVLYGMSAFRLSQELGIPYEEAAAFIQKYFQSYPKVKAWIEKTLEEGRTRGYVETLFGRRRYVPDLNARVKSVREAAERMAFNMPVQGTAADLMKLAMVRLFPQLREVGARMLLQVHDELLLEAPKERAEEVAALAKEVMEGVWPLAVPLEVEVGIGEDWLAAKG

SEQ ID NO: 2419 - DNA, 2529 bp, synthetic construct
  misc_feature 1..2529: note = Variant of DNA polymerase I from Thermus sp. strain 2.9
  source 1..2529: mol_type = other DNA
atgcaccatcatcatcatcatggcggtagcggcgtgttaccggtgttcgagcctaaaggtcgcgtgcttctggttgatggccatcatctcgcgtatcgtaacttctttgccctgaaaggattaaccaccagccgtggcgagccggtacagggtgtctacggctttgcaaagtcgctcctgaaagctctgaaagaagacggtgatgtggtgattgttgtctttgatgcgaaagcgccaagttttcgccacgaagcgtacgaagcttacaaagccgggcgtgctccaacgccggaagactttcctcgccaattggcgcttatgaaggaattagtggatttgcttggcctcgaacgcttggaagttcccggtttcgaggcagacgacgtattagcgactctcgcaaagaaagccgaacgtgagggctatgaagtccagatcttgacagcagatcgcgatcttttccagcttttatctccgcgcatctcggtgttacacccggaagggcatcgtatcaccccggaatggctctgggagaaatatggtttgcgtcccgaacaatgggtggattttcgcgccttagcaggcgatccgagcgacaatattccgggagttaaaggtatcggcgagaagacggcgctcaagctccttaaagaatgggggtcgttggagaacttgcttaagaatttagatcaggtcaaaccagagtcagtgcgtgagaagattcttgcacacctcgaagacctcaaattaagccgcgaattgtcccgtgtacgcaccgatttgccgctcgaagttgatttccgtattcgccgcgaacctgactgggagggtcttaaagcgtttttagagcgtcttgaatttggttcgctcttgcatgaattcggccttttagaaagcccgttaccagccgaagaagcaccttggccaccgcccgaaggcgcgtttttaggttaccgtttgagtcgcccggaaccgatgtgggccgaattattggctcttgcagcgtctgcccagggacgtgtgtatcgcgcggaagaccctcatggtgcgctccgcggcctcttcgaagtccgtggactccttgccaaagacttagctgttgttgcattgcgcgaaggtcttgatttacctccgactgatgatccaatgcttcttgcgtacctcttggacccgtcaaacacgacgcccgaaggcgtagcccgtcgttacggcggcgagtggaccgaagatgcagcgaaacgcgcgttattggccgaacgtttgcacgccaatttattaggacgtttgcaaggcgaggaacgtctcctctggctttacgaagaagtggagaaaccattgagtcgcgtgctcgcgcatatggaagctaccggtgtcaaattagacgtggcgtatttggaggctctcagccttgaagttgctgccgaaatgcgccgcttggaggaagaagtattccgtttagcaggccattcctttcgccttaattctcgcgatcagttagaacgtgtgttgttcgatgaacttggtctccctcctatcggcaagacagagaagaccggtaaacgtagcacttcagcggcggttttagaagctcttcgcgaagtccatcccattgtggacaagatcttgcagtaccgcgaactcgcgaaattgaaaggcacctatattgaccctcttccggcattagtccacccgaaaacgggacgcctccatacccgcttcaaccaaacagccacggcgaccggtcgtttgtcctcctctgatccaaaccttcagaatattccagtacgtaccccattgggccagaagatccgccgcgcgtttgtagctgaggagggttggcgtttagtggccctcgattatagccaaattgaattacgtgtccttgcccatctttctggcgatgagaacctcatccgcgtgtttcaggaaggcaaagacattcacactcaaacggcaagctggatgtttggattatcagctgaagcgatcgatcctttgatgcgtcgtgcagcgaagaccatcaatttcggtgttctctacggtatgagtgcctttcgtttgtcgcaggaattaggcattccctatgaagaagctgcggcgttcattcagaaatactttcaaagctatcccaaagttaaagcatggatcgagaagactctcgaagaaggccgcacacgtggttacgtagagaccttatttggacgtcgccgctatgttcccgatttaaacgctcgcgtgaaatctgtccgtgaagccgccgaacgcatggcgttcaacatgcctgtacagggcacggcagctgacctcatgaaacttgcaatggtgcgcctttttccacaattgcgtgaagttggtgcccgcatgctcttgcaggtccacgatgaactcttgttagaagcgccaaaagagcgtgcggaagaggtggcagccctcgcgaaagaggttatggaaggcgtgtggcccttagcggtgcctcttgaagtcgaagttggtattggcgaggattggctggctgccaaaggataatga

SEQ ID NO: 2420 - protein, 841 aa, synthetic construct
  REGION 1..841: note = Variant of DNA polymerase I from Thermus sp. strain 2.9
MHHHHHHGGSGVLPVFEPKGRVLLVDGHHLAYRNFFALKGLTTSRGEPVQGVYGFAKSLLKALKEDGDVVIVVFDAKAPSFRHEAYEAYKAGRAPTPEDFPRQLALMKELVDLLGLERLEVPGFEADDVLATLAKKAEREGYEVQILTADRDLFQLLSPRISVLHPEGHRITPEWLWEKYGLRPEQWVDFRALAGDPSDNIPGVKGIGEKTALKLLKEWGSLENLLKNLDQVKPESVREKILAHLEDLKLSRELSRVRTDLPLEVDFRIRREPDWEGLKAFLERLEFGSLLHEFGLLESPLPAEEAPWPPPEGAFLGYRLSRPEPMWAELLALAASAQGRVYRAEDPHGALRGLFEVRGLLAKDLAVVALREGLDLPPTDDPMLLAYLLDPSNTTPEGVARRYGGEWTEDAAKRALLAERLHANLLGRLQGEERLLWLYEEVEKPLSRVLAHMEATGVKLDVAYLEALSLEVAAEMRRLEEEVFRLAGHSFRLNSRDQLERVLFDELGLPPIGKTEKTGKRSTSAAVLEALREVHPIVDKILQYRELAKLKGTYIDPLPALVHPKTGRLHTRFNQTATATGRLSSSDPNLQNIPVRTPLGQKIRRAFVAEEGWRLVALDYSQIELRVLAHLSGDENLIRVFQEGKDIHTQTASWMFGLSAEAIDPLMRRAAKTINFGVLYGMSAFRLSQELGIPYEEAAAFIQKYFQSYPKVKAWIEKTLEEGRTRGYVETLFGRRRYVPDLNARVKSVREAAERMAFNMPVQGTAADLMKLAMVRLFPQLREVGARMLLQVHDELLLEAPKERAEEVAALAKEVMEGVWPLAVPLEVEVGIGEDWLAAKG

SEQ ID NO: 2421 - DNA, 2529 bp, synthetic construct
  misc_feature 1..2529: note = Variant of DNA polymerase I from Thermus sp. strain 2.9
  source 1..2529: mol_type = other DNA
atgcaccatcatcatcatcatggcggtagcggcgtgttaccggtgttcgagcctaaaggtcgcgtgcttctggttgatggccatcatctcgcgtatcgtaacttctttgccctgaaaggattaaccaccagccgtggcgagccggtacagggtgtctacggctttgcaaagtcgctcctgaaagctctgaaagaagacggtgatgtggtgattgttgtctttgatgcgaaagcgccaagttttcgccacgaagcgtacgaagcttacaaagccgggcgtgctccaacgccggaagactttcctcgccaattggcgcttatgaaggaattagttgatttgcttggcctcgaacgcttggaagttcccggtttcgaggcagacgacgtattagcgactctcgcaaagaaagccgaacgtgagggctatgaagtccagatcttgacagcagatcgcgatcttttccagcttttatctccgcgcatctcggtgttacacccggaagggcatcgtatcaccccggaatggctctgggagaaatatggtttgcgtcccgaacaatgggtggattttcgcgccttagcaggcgatccgagcgacaatattccgggagttaaaggtatcggcgagaagacggcgctcaagctccttaaagaatgggggtcgttggagaacttgcttaagaatttagatcaggtcaaaccagagtcagtgcgtgagaagattcttgcacacctcgaagacctcaaattaagccgcgaattgtcccgtgtacgcaccgatttgccgctcgaagttgatttccgtcgccgccgcgaacctgactgggagggtcttaaagcgtttttagagcgtcttgaatttggttcgctcttgcatgaattcggccttttagaaagcccgttaccagccgaagaagcaccttggccaccgcccgaaggcgcgtttttaggttaccgtttgagtcgcccggaaccgatgtgggccgaattattggctcttgcagcgtctgcccagggacgtgtgtatcgcgcggaagaccctcatggtgcgctccgcggcctcttcgaagtccgtggactccttgccaaagacttagctgttgttgcattgcgcgaaggtcttgatttacctccgactgatgatccaatgcttcttgcgtacctcttggacccgtcaaacacgacgcccgaaggcgtagcccgtcgttacggcggcgagtggaccgaagatgcagcgaaacgcgcgttattggccgaacgtttgcacgccaatttattaggacgtttgcaaggcgaggaacgtctcctctggctttacgaagaagtggagaaaccattgagtcgcgtgctcgcgcatatggaagctaccggtgtcaaattagacgtggcgtatttggaggctctcagccttgaagttgctgccgaaatgcgccgcttggaggaagaagtattccgtttagcaggccattcctttcgccttaattctcgcgatcagttagaacgtgtgttgttcgatgaacttggtctccctcctatcggcaagacagagaagaccggtaaacgtagcacttcagcggcggttttagaaggtcttcgcgaagtccatcccattgtggacaagatcttgcagtaccgcgaactcgcgaaattgaaaggcacctatattgaccctcttccggcattagtccacccgaaaacgggacgcctccatacccgcttcaaccaaacagccacggcgaccggtcgtttgtcctcctctgatccaaaccttcagaatattccagtacgtaccccattgggccagaagatccgccgcgcgtttgtagctgaggagggttggcgtttagtggccctcgattatagccaaattgaattacgtgtccttgcccatctttctggcgatgagaacctcatccgcgtgtttcaggaaggcaaagacattcacactcaaacggcaagctggatgtttggattatcagctgaagcgatcgatcctttgatgcgtcgtgcagcgaagaccatcaatttcggtgttctctacggtatgagtgcctttcgtttgtcgcaggaattaggcattccctatgaagaagctgcggcgttcattcagaaatactttcaaagctatcccaaagttaaagcatggatcgagaagactctcgaagaaggccgcacacgtggttacgtagagaccttatttggacgtcgccgctatgttcccgatttaaacgctcgcgtgaaatctgtccgtgaagccgccgaacgcatggcgttcaacatgcctgtacagggcacggcagctgacctcatgaaacttgcaatggtgcgcctttttccacaattgcgtgaagttggtgcccgcatgctcttgcaggtccacgatgaactcttgttagaagcgccaaaagagcgtgcggaagaggtggcagccctcgcgaaagaggttatggaaggcgtgtggcccttagcggtgcctcttgaagtcgaagttggtattggcgaggattggctggctgccaaaggataatga

SEQ ID NO: 2422 - protein, 841 aa, synthetic construct
  REGION 1..841: note = Variant of DNA polymerase I from Thermus sp. strain 2.9
MHHHHHHGGSGVLPVFEPKGRVLLVDGHHLAYRNFFALKGLTTSRGEPVQGVYGFAKSLLKALKEDGDVVIVVFDAKAPSFRHEAYEAYKAGRAPTPEDFPRQLALMKELVDLLGLERLEVPGFEADDVLATLAKKAEREGYEVQILTADRDLFQLLSPRISVLHPEGHRITPEWLWEKYGLRPEQWVDFRALAGDPSDNIPGVKGIGEKTALKLLKEWGSLENLLKNLDQVKPESVREKILAHLEDLKLSRELSRVRTDLPLEVDFRRRREPDWEGLKAFLERLEFGSLLHEFGLLESPLPAEEAPWPPPEGAFLGYRLSRPEPMWAELLALAASAQGRVYRAEDPHGALRGLFEVRGLLAKDLAVVALREGLDLPPTDDPMLLAYLLDPSNTTPEGVARRYGGEWTEDAAKRALLAERLHANLLGRLQGEERLLWLYEEVEKPLSRVLAHMEATGVKLDVAYLEALSLEVAAEMRRLEEEVFRLAGHSFRLNSRDQLERVLFDELGLPPIGKTEKTGKRSTSAAVLEGLREVHPIVDKILQYRELAKLKGTYIDPLPALVHPKTGRLHTRFNQTATATGRLSSSDPNLQNIPVRTPLGQKIRRAFVAEEGWRLVALDYSQIELRVLAHLSGDENLIRVFQEGKDIHTQTASWMFGLSAEAIDPLMRRAAKTINFGVLYGMSAFRLSQELGIPYEEAAAFIQKYFQSYPKVKAWIEKTLEEGRTRGYVETLFGRRRYVPDLNARVKSVREAAERMAFNMPVQGTAADLMKLAMVRLFPQLREVGARMLLQVHDELLLEAPKERAEEVAALAKEVMEGVWPLAVPLEVEVGIGEDWLAAKG

SEQ ID NO: 2423 - DNA, 2529 bp, synthetic construct
  misc_feature 1..2529: note = Variant of DNA polymerase I from Thermus sp. strain 2.9
  source 1..2529: mol_type = other DNA
atgcaccatcatcatcatcatggcggtagcggcgtgttaccggtgttcgagcctaaaggtcgcgtgcttctggttgatggccatcatctcgcgtatcgtaacttctttgccctgaaaggattaaccaccagccgtggcgagccggtacagggtgtctacggctttgcaaagtcgctcctgaaagctctgaaagaagacggtgatgtggtgattgttgtctttgatgcgaaagcgccaagttttcgccacgaagcgtacgaagcttacaaagccgggcgtgctccaacgccggaagactttcctcgccaattggcgcttatgaaggaattagtggatttgcttggcctcgaacgcttggaagttcccggtttcgaggcagacgacgtattagcgactctcgcaaagaaagccgaacgtgagggctatgaagtccagatcttgacagcagatcgcgatcttttccagcttttatctccgcgcatctcggtgttacacccggaagggcatcgtatcaccccggaatggctctgggagaaatatggtttgcgtcccgaacaatgggtggattttcgcgccttagcaggcgatccgagcgacaatattccgggagttaaaggtatcggcgagaagacggcgctcaagctccttaaagaatgggggtcgttggagaacttgcttaagaatttagatcaggtcaaaccagagtcagtgcgtgagaagattcttgcacacctcgaagacctcaaattaagccgcgaattgtcccgtgtacgcaccgatttgccgctcgaagttgatttccgtcgccgccgcgaacctgactgggagggtcttaaagcgtttttagagcgtcttgaatttggttcgctcttgcatgaattcggccttttagaaagcccgttaccagccgaagaagcaccttggccaccgcccgaaggcgcgtttttaggttaccgtttgagtcgcccggaaccgatgtgggccgaattattggctcttgcagcgtctgcccagggacgtgtgtatcgcgcggaagaccctcatggtgcgctccgcggcctcttcgaagtccgtggactccttgccaaagacttagctgttgttgcattgcgcgaaggtcttgatttacctccgactgatgatccaatgcttcttgcgtacctcttggacccgtcaaacacgacgcccgaaggcgtagcccgtcgttacggcggcgaggttaccgaagatgcagcgaaacgcgcgttattggccgaacgtttgcacgccaatttattaggacgtttgcaaggcgaggaacgtctcctctggctttacgaagaagtggagaaaccattgagtcgcgtgctcgcgcatatggaagctaccggtgtcaaattagacgtggcgtatttggaggctctcagccttgaagttgctgccgaaatgcgccgcttggaggaagaagtattccgtttagcaggccattcctttcgccttaattctcgcgatcagttagaacgtgtgttgttcgatgaacttggtctccctcctatcggcaagacagagaagaccggtaaacgtagcacttcagcggcggttttagaagctcttcgcgaagtccatcccattgtggacaagatcttgcagtaccgcgaactcgcgaaattgaaaggcacctatattgaccctcttccggcattagtccacccgaaaacgggacgcctccatacccgcttcaaccaaacagccacggcgaccggtcgtttgtcctcctctgatccaaaccttcagaatattccagtacgtaccccattgggccagaagatccgccgcgcgtttgtagctgaggagggttggcgtttagtggccctcgattatagccaaattgaattacgtgtccttgcccatctttctggcgatgagaacctcatccgcgtgtttcaggaaggcaaagacattcacactcaaacggcaagctggatgtttggattatcagctgaagcgatcgatcctttgatgcgtcgtgcagcgaagaccatcaatttcggtgttctctacggtatgagtgcctttcgtttgtcgcaggaattaggcattccctatgaagaagctgcggcgttcattcagaaatactttcaaagctatcccaaagttaaagcatggatcgagaagactctcgaagaaggccgcacacgtggttacgtagagaccttatttggacgtcgccgctatgttcccgatttaaacgctcgcgtgaaatctgtccgtgaagccgccgaacgcatggcgttcaacatgcctgtacagggcacggcagctgacctcatgaaacttgcaatggtgcgcctttttccacaattgcgtgaagttggtgcccgcatgctcttgcaggtccacgatgaactcttgttagaagcgccaaaagagcgtgcggaagaggtggcagccctcgcgaaagaggttatggaaggcgtgtggcccttagcggtgcctcttgaagtcgaagttggtattggcgaggattggctggctgccaaaggataatga

SEQ ID NO: 2424 - protein, 841 aa, synthetic construct
  REGION 1..841: note = Variant of DNA polymerase I from Thermus sp. strain 2.9
MHHHHHHGGSGVLPVFEPKGRVLLVDGHHLAYRNFFALKGLTTSRGEPVQGVYGFAKSLLKALKEDGDVVIVVFDAKAPSFRHEAYEAYKAGRAPTPEDFPRQLALMKELVDLLGLERLEVPGFEADDVLATLAKKAEREGYEVQILTADRDLFQLLSPRISVLHPEGHRITPEWLWEKYGLRPEQWVDFRALAGDPSDNIPGVKGIGEKTALKLLKEWGSLENLLKNLDQVKPESVREKILAHLEDLKLSRELSRVRTDLPLEVDFRRRREPDWEGLKAFLERLEFGSLLHEFGLLESPLPAEEAPWPPPEGAFLGYRLSRPEPMWAELLALAASAQGRVYRAEDPHGALRGLFEVRGLLAKDLAVVALREGLDLPPTDDPMLLAYLLDPSNTTPEGVARRYGGEVTEDAAKRALLAERLHANLLGRLQGEERLLWLYEEVEKPLSRVLAHMEATGVKLDVAYLEALSLEVAAEMRRLEEEVFRLAGHSFRLNSRDQLERVLFDELGLPPIGKTEKTGKRSTSAAVLEALREVHPIVDKILQYRELAKLKGTYIDPLPALVHPKTGRLHTRFNQTATATGRLSSSDPNLQNIPVRTPLGQKIRRAFVAEEGWRLVALDYSQIELRVLAHLSGDENLIRVFQEGKDIHTQTASWMFGLSAEAIDPLMRRAAKTINFGVLYGMSAFRLSQELGIPYEEAAAFIQKYFQSYPKVKAWIEKTLEEGRTRGYVETLFGRRRYVPDLNARVKSVREAAERMAFNMPVQGTAADLMKLAMVRLFPQLREVGARMLLQVHDELLLEAPKERAEEVAALAKEVMEGVWPLAVPLEVEVGIGEDWLAAKG

SEQ ID NO: 2425 - DNA, 2529 bp, synthetic construct
  misc_feature 1..2529: note = Variant of DNA polymerase I from Thermus sp. strain 2.9
  source 1..2529: mol_type = other DNA
atgcaccatcatcatcatcatggcggtagcggcgtgttaccggtgttcgagcctaaaggtcgcgtgcttctggttgatggccatcatctcgcgtatcgtaacttctttgccctgaaaggattaaccaccagccgtggcgagccggtacagggtgtctacggctttgcaaagtcgctcctgaaagctctgaaagaagacggtgatgtggtgattgttgtctttgatgcgaaagcgccaagttttcgccacgaagcgtacgaagcttacaaagccgggcgtgctccaacgccggaagactttcctcgccaattggcgcttatgaaggaattagtggatttgcttggcctcgaacgcttggaagttcccggtttcgaggcagacgacgtattagcgactctcgcaaagaaagccgaacgtgagggctatgaagtccagatcttgacagcagatcgcgatcttttccagcttttatctccgcgcatctcggtgttacacccggaagggcatcgtatcaccccggaatggctctgggagaaatatggtttgcgtcccgaacaatgggtggattttcgcgccttagcaggcgatccgagcgacaatattccgggagttaaaggtatcggcgagaagacggcgctcaagctccttaaagaatgggggtcgttggagaacttgcttaagaatttagatcaggtcaaaccagagtcagtgcgtgagaagattcttgcacacctcgaagacctcaaattaagccgcgaattgtcccgtgtacgcaccgatttgccgctcgaagttgatttccgtcgccgccgcgaacctgactgggagggtcttaaagcgtttttagagcgtcttgaatttggttcgctcttgcatgaattcggccttttagaaagcccgttaccagccgaagaagcaccttggccaccgcccgaaggcgcgtttttaggttaccgtttgagtcgcccggaaccgatgtgggccgaattattggctcttgcagcgtctgcccagggacgtgtgtatcgcgcggaagaccctcatggtgcgctccgcggcctcttcgaagtccgtggactccttgccaaagacttagctgttgttgcattgcgcgaaggtcttgatttacctccgactgatgatccaatgcttcttgcgtacctcttggacccgtcaaacacgacgcccgaaggcgtagcccgtcgttacggcggcgagtggaccgaagatgcagcgaaacgcgcgttattggccgaacgtttgcacgccaatttattaggacgtttgcaaggcgaggaacgtctcctctggctttacgaagaagtggagaaaccattgagtcgcgtgctcgcgcatatggaagctaccggtgtcaaattagacgtggcgtatttggaggctctcagccttgaagttgctgccgaaatgcgccgcttggaggaagaagtattccgtttagcaggccattcctttcgccttaattctcgcgatcagttagaacgtgtgttgttcgatgaacttggtctccctcctatcggcaagacagagaagaccggtaaacgtagcacttcagcggcggttttagaagctcttcgcgaagggcatcccattgtggacaagatcttgcagtaccgcgaactcgcgaaattgaaaggcacctatattgaccctcttccggcattagtccacccgaaaacgggacgcctccatacccgcttcaaccaaacagccacggcgaccggtcgtttgtcctcctctgatccaaaccttcagaatattccagtacgtaccccattgggccagaagatccgccgcgcgtttgtagctgaggagggttggcgtttagtggccctcgattatagccaaattgaattacgtgtccttgcccatctttctggcgatgagaacctcatccgcgtgtttcaggaaggcaaagacattcacactcaaacggcaagctggatgtttggattatcagctgaagcgatcgatcctttgatgcgtcgtgcagcgaagaccatcaatttcggtgttctctacggtatgagtgcctttcgtttgtcgcaggaattaggcattccctatgaagaagctgcggcgttcattcagaaatactttcaaagctatcccaaagttaaagcatggatcgagaagactctcgaagaaggccgcacacgtggttacgtagagaccttatttggacgtcgccgctatgttcccgatttaaacgctcgcgtgaaatctgtccgtgaagccgccgaacgcatggcgttcaacatgcctgtacagggcacggcagctgacctcatgaaacttgcaatggtgcgcctttttccacaattgcgtgaagttggtgcccgcatgctcttgcaggtccacgatgaactcttgttagaagcgccaaaagagcgtgcggaagaggtggcagccctcgcgaaagaggttatggaaggcgtgtggcccttagcggtgcctcttgaagtcgaagttggtattggcgaggattggctggctgccaaaggataatga

SEQ ID NO: 2426 - protein, 841 aa, synthetic construct
  REGION 1..841: note = Variant of DNA polymerase I from Thermus sp. strain 2.9
MHHHHHHGGSGVLPVFEPKGRVLLVDGHHLAYRNFFALKGLTTSRGEPVQGVYGFAKSLLKALKEDGDVVIVVFDAKAPSFRHEAYEAYKAGRAPTPEDFPRQLALMKELVDLLGLERLEVPGFEADDVLATLAKKAEREGYEVQILTADRDLFQLLSPRISVLHPEGHRITPEWLWEKYGLRPEQWVDFRALAGDPSDNIPGVKGIGEKTALKLLKEWGSLENLLKNLDQVKPESVREKILAHLEDLKLSRELSRVRTDLPLEVDFRRRREPDWEGLKAFLERLEFGSLLHEFGLLESPLPAEEAPWPPPEGAFLGYRLSRPEPMWAELLALAASAQGRVYRAEDPHGALRGLFEVRGLLAKDLAVVALREGLDLPPTDDPMLLAYLLDPSNTTPEGVARRYGGEWTEDAAKRALLAERLHANLLGRLQGEERLLWLYEEVEKPLSRVLAHMEATGVKLDVAYLEALSLEVAAEMRRLEEEVFRLAGHSFRLNSRDQLERVLFDELGLPPIGKTEKTGKRSTSAAVLEALREGHPIVDKILQYRELAKLKGTYIDPLPALVHPKTGRLHTRFNQTATATGRLSSSDPNLQNIPVRTPLGQKIRRAFVAEEGWRLVALDYSQIELRVLAHLSGDENLIRVFQEGKDIHTQTASWMFGLSAEAIDPLMRRAAKTINFGVLYGMSAFRLSQELGIPYEEAAAFIQKYFQSYPKVKAWIEKTLEEGRTRGYVETLFGRRRYVPDLNARVKSVREAAERMAFNMPVQGTAADLMKLAMVRLFPQLREVGARMLLQVHDELLLEAPKERAEEVAALAKEVMEGVWPLAVPLEVEVGIGEDWLAAKG

SEQ ID NO: 2427 - DNA, 2529 bp, synthetic construct
  misc_feature 1..2529: note = Variant of DNA polymerase I from Thermus sp. strain 2.9
  source 1..2529: mol_type = other DNA
atgcaccatcatcatcatcatggcggtagcggcgtgttaccggtgttcgagcctaaaggtcgcgtgcttctggttgatggccatcatctcgcgtatcgtaacttctttgccctgaaaggattaaccaccagccgtggcgagccggtacagggtgtctacggctttgcaaagtcgctcctgaaagctctgaaagaagacggtgatgtggtgattgttgtctttgatgcgaaagcgccaagttttcgccacgaagcgtacgaagcttacaaagccgggcgtgctccaacgccggaagactttcctcgccaattggcgcttatgaaggaattagtggatttgcttggcctcgaacgcttggaagttcccggtttcgaggcagacgacgtattagcgactctcgcaaagaaagccgaacgtgagggctatgaagtccagatcttgacagcagatcgcgatcttttccagcttttatctccgcgcatctcggtgttacacccggaagggcatcgtatcaccccggaatggctctgggagaaatatggtttgcgtcccgaacaatgggtggattttcgcgccttagcaggcgatccgagcgacaatattccgggagttaaaggtatcggcgagaagacggcgctcaagctccttaaagaatgggggtcgttggagaacttgcttaagaatttagatcaggtcaaaccagagtcagtgcgtgagaagattcttgcacacctcgaagacctcaaattaagccgcgaattgtcccgtgtacgcaccgatttgccgctcgaagttgatttccgtcgccgccgcgaacctgactgggagggtcttaaagcgtttttagagcgtcttgaatttggttcgctcttgcatgaattcggccttttagaaagcccgttaccagccgaagaagcaccttggccaccgcccgaaggcgcgtttttaggttaccgtttgagtcgcccggaaccgatgtgggccgaattattggctcttgcagcgtctgcccagggacgtgtgtatcgcgcggaagaccctcatggtgcgctccgcggcctcttcgaagtccgtggactccttgccaaagacttagctgttgttgcattgcgcgaaggtcttgatttacctccgactgatgatccaatgcttcttgcgtacctcttggacccgtcaaacacgacgcccgaaggcgtagcccgtcgttacggcggcgagtggaccgaagatgcagcgaaacgcgcgttattggccgaacgtttgcacgccaatttattaggacgtttgcaaggcgaggaacgtctcctctggctttacgaagaagtggagaaaccattgagtcgcgtgctcgcgcatatggaagctaccggtgtcaaattagacgtggcgtatttggaggctctcagccttgaagttgctgccgaaatgcgccgcttggaggaagaagtattccgtttagcaggccattcctttcgccttaattctcgcgatcagttagaacgtgtgttgttcgatgaacttggtctccctcctatcggcaagacagagaagaccggtaaacgtagcacttcagcggcggttttagaagctcttcgcgaagtccatcccattgtggacaagatcttgcagtaccgcgaactcgcgaaattgaaaggcacctatattgaccctcttccggcattagtccacccgaaaacgggacgcctccatacccgcttcaaccaaacagccacggcgaccggtcgtttgtcctcctctgatccaaaccttcagaatattccagtacgtggtccattgggccagaagatccgccgcgcgtttgtagctgaggagggttggcgtttagtggccctcgattatagccaaattgaattacgtgtccttgcccatctttctggcgatgagaacctcatccgcgtgtttcaggaaggcaaagacattcacactcaaacggcaagctggatgtttggattatcagctgaagcgatcgatcctttgatgcgtcgtgcagcgaagaccatcaatttcggtgttctctacggtatgagtgcctttcgtttgtcgcaggaattaggcattccctatgaagaagctgcggcgttcattcagaaatactttcaaagctatcccaaagttaaagcatggatcgagaagactctcgaagaaggccgcacacgtggttacgtagagaccttatttggacgtcgccgctatgttcccgatttaaacgctcgcgtgaaatctgtccgtgaagccgccgaacgcatggcgttcaacatgcctgtacagggcacggcagctgacctcatgaaacttgcaatggtgcgcctttttccacaattgcgtgaagttggtgcccgcatgctcttgcaggtccacgatgaactcttgttagaagcgccaaaagagcgtgcggaagaggtggcagccctcgcgaaagaggttatggaaggcgtgtggcccttagcggtgcctcttgaagtcgaagttggtattggcgaggattggctggctgccaaaggataatga

SEQ ID NO: 2428 - protein, 841 aa, synthetic construct
  REGION 1..841: note = Variant of DNA polymerase I from Thermus sp. strain 2.9
MHHHHHHGGSGVLPVFEPKGRVLLVDGHHLAYRNFFALKGLTTSRGEPVQGVYGFAKSLLKALKEDGDVVIVVFDAKAPSFRHEAYEAYKAGRAPTPEDFPRQLALMKELVDLLGLERLEVPGFEADDVLATLAKKAEREGYEVQILTADRDLFQLLSPRISVLHPEGHRITPEWLWEKYGLRPEQWVDFRALAGDPSDNIPGVKGIGEKTALKLLKEWGSLENLLKNLDQVKPESVREKILAHLEDLKLSRELSRVRTDLPLEVDFRRRREPDWEGLKAFLERLEFGSLLHEFGLLESPLPAEEAPWPPPEGAFLGYRLSRPEPMWAELLALAASAQGRVYRAEDPHGALRGLFEVRGLLAKDLAVVALREGLDLPPTDDPMLLAYLLDPSNTTPEGVARRYGGEWTEDAAKRALLAERLHANLLGRLQGEERLLWLYEEVEKPLSRVLAHMEATGVKLDVAYLEALSLEVAAEMRRLEEEVFRLAGHSFRLNSRDQLERVLFDELGLPPIGKTEKTGKRSTSAAVLEALREVHPIVDKILQYRELAKLKGTYIDPLPALVHPKTGRLHTRFNQTATATGRLSSSDPNLQNIPVRGPLGQKIRRAFVAEEGWRLVALDYSQIELRVLAHLSGDENLIRVFQEGKDIHTQTASWMFGLSAEAIDPLMRRAAKTINFGVLYGMSAFRLSQELGIPYEEAAAFIQKYFQSYPKVKAWIEKTLEEGRTRGYVETLFGRRRYVPDLNARVKSVREAAERMAFNMPVQGTAADLMKLAMVRLFPQLREVGARMLLQVHDELLLEAPKERAEEVAALAKEVMEGVWPLAVPLEVEVGIGEDWLAAKG

SEQ ID NO: 2429 - DNA, 2529 bp, synthetic construct
  misc_feature 1..2529: note = Variant of DNA polymerase I from Thermus sp. strain 2.9
  source 1..2529: mol_type = other DNA
atgcaccatcatcatcatcatggcggtagcggcgtgttaccggtgttcgagcctaaaggtcgcgtgcttctggttgatggccatcatctcgcgtatcgtaacttctttgccctgaaaggattaaccaccagccgtggcgagccggtacagggtgtctacggctttgcaaggtcgctcctgaaagctctgaaagaagacggtgatgtggtgattgttgtctttgatgcgaaagcgccaagttttcgccacgaagcgtacgaagcttacaaagccgggcgtgctccaacgccggaagactttcctcgccaattggcgcttatgaaggaattagtggatttgcttggcctcgaacgcttggaagttcccggtttcgaggcagacgacgtattagcgactctcgcaaagaaagccgaacgtgagggctatgaagtccagatcttgacagcagatcgcgatcttttccagcttttatctccgcgcatctcggtgttacacccggaagggcatcgtatcaccccggaatggctctgggagaaatatggtttgcgtcccgaacaatgggtggattttcgcgccttagcaggcgatccgagcgacaatattccgggagttaaaggtatcggcgagaagacggcgctcaagctccttaaagaatgggggtcgttggagaacttgcttaagaatttagatcaggtcaaaccagagtcagtgcgtgagaagattcttgcacacctcgaagacctcaaattaagccgcgaattgtcccgtgtacgcaccgatttgccgctcgaagttgatttccgtcgccgccgcgaacctgactgggagggtcttaaagcgtttttagagcgtcttgaatttggttcgctcttgcatgaattcggccttttagaaagcccgttaccagccgaagaagcaccttggccaccgcccgaaggcgcgtttttaggttaccgtttgagtcgcccggaaccgatgtgggccgaattattggctcttgcagcgtctgcccagggacgtgtgtatcgcgcggaagaccctcatggtgcgctccgcggcctcttcgaagtccgtggactccttgccaaagacttagctgttgttgcattgcgcgaaggtcttgatttacctccgactgatgatccaatgcttcttgcgtacctcttggacccgtcaaacacgacgcccgaaggcgtagcccgtcgttacggcggcgagtggaccgaagatgcagcgaaacgcgcgttattggccgaacgtttgcacgccaatttattaggacgtttgcaaggcgaggaacgtctcctctggctttacgaagaagtggagaaaccattgagtcgcgtgctcgcgcatatggaagctaccggtgtcaaattagacgtggcgtatttggaggctctcagccttgaagttgctgccgaaatgcgccgcttggaggaagaagtattccgtttagcaggccattcctttcgccttaattctcgcgatcagttagaacgtgtgttgttcgatgaacttggtctccctcctatcggcaagacagagaagaccggtaaacgtagcacttcagcggcggttttagaagctcttcgcgaagtccatcccattgtggacaagatcttgcagtaccgcgaactcgcgaaattgaaaggcacctatattgaccctcttccggcattagtccacccgaaaacgggacgcctccatacccgcttcaaccaaacagccacggcgaccggtcgtttgtcctcctctgatccaaaccttcagaatattccagtacgtaccccattgggccagaagatccgccgcgcgtttgtagctgaggagggttggcgtttagtggccctcgattatagccaaattgaattacgtgtccttgcccatctttctggcgatgagaacctcatccgcgtgtttcaggaaggcaaagacattcacactcaaacggcaagctggatgtttggattatcagctgaagcgatcgatcctttgatgcgtcgtgcagcgaagaccatcaatttcggtgttctctacggtatgagtgcctttcgtttgtcgcaggaattaggcattccctatgaagaagctgcggcgttcattcagaaatactttcaaagctatcccaaagttaaagcatggatcgagaagactctcgaagaaggccgcacacgtggttacgtagagaccttatttggacgtcgccgctatgttcccgatttaaacgctcgcgtgaaatctgtccgtgaagccgccgaacgcatggcgttcaacatgcctgtacagggcacggcagctgacctcatgaaacttgcaatggtgcgcctttttccacaattgcgtgaagttggtgcccgcatgctcttgcaggtccacgatgaactcttgttagaagcgccaaaagagcgtgcggaagaggtggcagccctcgcgaaagaggttatggaaggcgtgtggcccttagcggtgcctcttgaagtcgaagttggtattggcgaggattggctggctgccaaaggataatga

SEQ ID NO: 2430 - protein, 841 aa, synthetic construct
  REGION 1..841: note = Variant of DNA polymerase I from Thermus sp. strain 2.9
MHHHHHHGGSGVLPVFEPKGRVLLVDGHHLAYRNFFALKGLTTSRGEPVQGVYGFARSLLKALKEDGDVVIVVFDAKAPSFRHEAYEAYKAGRAPTPEDFPRQLALMKELVDLLGLERLEVPGFEADDVLATLAKKAEREGYEVQILTADRDLFQLLSPRISVLHPEGHRITPEWLWEKYGLRPEQWVDFRALAGDPSDNIPGVKGIGEKTALKLLKEWGSLENLLKNLDQVKPESVREKILAHLEDLKLSRELSRVRTDLPLEVDFRRRREPDWEGLKAFLERLEFGSLLHEFGLLESPLPAEEAPWPPPEGAFLGYRLSRPEPMWAELLALAASAQGRVYRAEDPHGALRGLFEVRGLLAKDLAVVALREGLDLPPTDDPMLLAYLLDPSNTTPEGVARRYGGEWTEDAAKRALLAERLHANLLGRLQGEERLLWLYEEVEKPLSRVLAHMEATGVKLDVAYLEALSLEVAAEMRRLEEEVFRLAGHSFRLNSRDQLERVLFDELGLPPIGKTEKTGKRSTSAAVLEALREVHPIVDKILQYRELAKLKGTYIDPLPALVHPKTGRLHTRFNQTATATGRLSSSDPNLQNIPVRTPLGQKIRRAFVAEEGWRLVALDYSQIELRVLAHLSGDENLIRVFQEGKDIHTQTASWMFGLSAEAIDPLMRRAAKTINFGVLYGMSAFRLSQELGIPYEEAAAFIQKYFQSYPKVKAWIEKTLEEGRTRGYVETLFGRRRYVPDLNARVKSVREAAERMAFNMPVQGTAADLMKLAMVRLFPQLREVGARMLLQVHDELLLEAPKERAEEVAALAKEVMEGVWPLAVPLEVEVGIGEDWLAAKG

SEQ ID NO: 2431 - DNA, 2529 bp, synthetic construct
  misc_feature 1..2529: note = Variant of DNA polymerase I from Thermus sp. strain 2.9
  source 1..2529: mol_type = other DNA
atgcaccatcatcatcatcatggcggtagcggcgtgttaccggtgttcgagcctaaaggtcgcgtgcttctggttgatggccatcatctcgcgtatcgtaacttctttgccctgaaaggattaaccaccagccgtggcgagccggtacagggtgtctacggctttgcaaagtcgctcctgaaagctctgaaagaagacggtgatgtggtgattgttgtctttgatgcgaaagcgccaagttttcgccacgaagcgtacgaagcttacaaagccgggcgtgctccaacgccggaagactttcctcgccaattggcgcttatgaaggaattagtggatttgcttggcctcgaacgcttggaagttcccggtttcgaggcagacgacgtattagcgactctcgcaaagaaagccgaacgtgagggctatgaagtccagatcttgacagcagatcgcgatcttttccagcttttatctccgcgcatctcggtgttacacccggaagggcatcgtatcaccccggaatggctctgggagaaatatggtttgcgtcccgaacaatgggtggattttcgcgccttagcaggcgatccgagcgacaatattccgggagttaaaggtatcggcgagaagacggcgctcaagctccttaaagaatgggggtcgttggagaacttgcttaagaatttagatcaggtcaaaccagagtcagtgcgtgagaagattcttgcacacctcgaagacctcaaattaagccgcgaattgtcccgtgtacgcaccgatttgccgctcgaagttgatttccgtcgccgccgcgaacctgactgggagggtcttaaagcgtttttagagcgtcttgaatttggttcgctcttgcatgaattcggccttttagaaagcccgttaccagccgaagaagcaccttggccaccgcccgagggcgcgtttttaggttaccgtttgagtcgcccggaaccgatgtgggccgaattattggctcttgcagcgtctgcccagggacgtgtgtatcgcgcggaagaccctcatggtgcgctccgcggcctcttcgaagtccgtggactccttgccaaagacttagctgttgttgcattgcgcgaaggtcttgatttacctccgactgatgatccaatgcttcttgcgtacctcttggacccgtcaaacacgacgcccgaaggcgtagcccgtcgttacggcggcgagtggaccgaagatgcagcgaaacgcgcgttattggccgaacgtttgcacgccaatttattaggacgtttgcaaggcgaggaacgtctcctctggctttacgaagaagtggagaaaccattgagtcgcgtgctcgcgcatatggaagctaccggtgtcaaattagacgtggcgtatttggaggctctcagccttgaagttgctgccgaaatgcgccgcttggaggaagaagtattccgtttagcaggccgttcctttcgccttgtatctcgcgatcagttagaacgtgtgttgttcgatgaacttggtctccctcctatcggcaagacagagaagaccggtaaacgtagcacttcagcggcggttttagaagctcttcgcgaagtccatcccattgtggacaagatcttgcagtaccgcgaactcgcgaaattgaaaggcacctatattgaccctcttccggcattagtccacccgaaaacgggacgcctccatacccgcttcaaccaaacagccacggcgaccggtcgtttgtcctcctctgatccaaaccttcagaatattccagtacgtaccccattgggccagaagatccgccgcgcgtttgtagctgaggagggttggcgtttagtggccctcgattatagccaaattgaattacgtgtccttgcccatctttctggcgatgagaacctcatccgcgtgtttcaggaaggcaaagacattcacactcaaacggcaagctggatgtttggattatcagctgaagcgatcgatcctttgatgcgtcgtgcagcgaagaccatcaatttcggtgttctctacggtatgagtgcctttcgtttgtcgcaggaattaggcattccctatgaagaagctgcggcgttcattcagaaatactttcaaagctatcccaaagttaaagcatggatcgagaagactctcgaagaaggccgcacacgtggttacgtagagaccttatttggacgtcgccgctatgttcccgatttaaacgctcgcgtgaaaagcgtccgtgaagccgccgaacgcatggcgttcaacatgcctgtacagggcacggcagctgacctcatgaaacttgcaatggtgcgcctttttccacaattgcgtgaagttggtgcccgcatgctcttgcaggtccacgatgaactcttgttagaagcgccaaaagagcgtgcggaagaggtggcagccctcgcgaaagaggttatggaaggcgtgtggcccttagcggtgcctcttgaagtcgaagttggtattggcgaggattggctggctgccaaaggataatga

SEQ ID NO: 2432 - protein, 841 aa, synthetic construct
  REGION 1..841: note = Variant of DNA polymerase I from Thermus sp. strain 2.9
MHHHHHHGGSGVLPVFEPKGRVLLVDGHHLAYRNFFALKGLTTSRGEPVQGVYGFAKSLLKALKEDGDVVIVVFDAKAPSFRHEAYEAYKAGRAPTPEDFPRQLALMKELVDLLGLERLEVPGFEADDVLATLAKKAEREGYEVQILTADRDLFQLLSPRISVLHPEGHRITPEWLWEKYGLRPEQWVDFRALAGDPSDNIPGVKGIGEKTALKLLKEWGSLENLLKNLDQVKPESVREKILAHLEDLKLSRELSRVRTDLPLEVDFRRRREPDWEGLKAFLERLEFGSLLHEFGLLESPLPAEEAPWPPPEGAFLGYRLSRPEPMWAELLALAASAQGRVYRAEDPHGALRGLFEVRGLLAKDLAVVALREGLDLPPTDDPMLLAYLLDPSNTTPEGVARRYGGEWTEDAAKRALLAERLHANLLGRLQGEERLLWLYEEVEKPLSRVLAHMEATGVKLDVAYLEALSLEVAAEMRRLEEEVFRLAGRSFRLVSRDQLERVLFDELGLPPIGKTEKTGKRSTSAAVLEALREVHPIVDKILQYRELAKLKGTYIDPLPALVHPKTGRLHTRFNQTATATGRLSSSDPNLQNIPVRTPLGQKIRRAFVAEEGWRLVALDYSQIELRVLAHLSGDENLIRVFQEGKDIHTQTASWMFGLSAEAIDPLMRRAAKTINFGVLYGMSAFRLSQELGIPYEEAAAFIQKYFQSYPKVKAWIEKTLEEGRTRGYVETLFGRRRYVPDLNARVKSVREAAERMAFNMPVQGTAADLMKLAMVRLFPQLREVGARMLLQVHDELLLEAPKERAEEVAALAKEVMEGVWPLAVPLEVEVGIGEDWLAAKG

SEQ ID NO: 2433 - DNA, 2529 bp, synthetic construct
  misc_feature 1..2529: note = Variant of DNA polymerase I from Thermus sp. strain 2.9
  source 1..2529: mol_type = other DNA
atgcaccatcatcatcatcatggcggtagcggcgtgttaccggtgttcgagcctaaaggtcgcgtgcttctggttgatggccatcatctcgcgtatcgtaacttctttgccctgaaaggattaaccaccagccgtggcgagccggtacagggtgtctacggctttgcaaagtcgctcctgaaagctctgaaagaagacggtgatgtggtgattgttgtctttgatgcgaaagcgccaagttttcgccacgaagcgtacgaagcttacaaagccgggcgtgctccaacgccggaagactttcctcgccaattggcgcttatgaaggaattagtggatttgcttggcctcgaacgcttggaagttcccggtttcgaggcagacgacgtattagcgactctcgcaaagaaagccgaacgtgagggctatgaagtccagatcttgacagcagatcgcgatcttttccagcttttatctccgcgcatctcggtgttacacccggaagggcatcgtatcaccccggaatggctctgggagaaatatggtttgcgtcccgaacaatgggtggattttcgcgccttagcaggcgatccgagcgacaatattccgggagttaaaggtatcggcgagaagacggcgctcaagctccttaaagaatgggggtcgttggagaacttgcttaagaatttagatcaggtcaaaccagagtcagtgcgtgagaagattcttgcacacctcgaagacctcaaattaagccgcgaattgtcccgtgtacgcaccgatttgccgctcgaagttgatttccgtcgccgccgcgaacctgactgggagggtcttaaagcgtttttagagcgtcttgaatttggttcgctcttgcatgaattcggccttttagaaagcccgttaccagccgaagaagcaccttggccaccgcccgaaggcgcgtttttaggttaccgtttgagtcgcccggaaccgatgtgggccgaattattggctcttgcagcgtctgcccagggacgtgtgtatcgcgcggaagaccctcatggtgcgctccgcggcctcgtggaagtccgtggactccttgccaaagacttagctgttgttgcattgcgcgaaggtcttgatttacctccgactgatgatccaatgcttcttgcgtacctcttggacccgtcaaacacgacgcccgaaggcgtagcccgtcgttacggcggcgagtggaccgaagatgcagcgaaacgcgcgttattggccgaacgtttgcacgccaatttattaggacgtttgcaaggcgaggaacgtctcctctggctttacgaagaagtggagaaaccattgagtcgcgtgctcgcgcatatggaagctaccggtgtcaaattagacgtggcgtatttggaggctctcagccttgaagttgctgccgaaatgcgccgcttggaggaagaagtattccgtttagcaggccattcctttcgccttaattctcgcgatcagttagaacgtgtgttgttcgatgaacttggtctccctcctatcggcaagacagagaagaccggtaaacgtagcacttcagcggcggttttagaagctcttcgcgaagtccatcccattgtggacaagatcttgcagtaccgcgaactcgcgaaattgaaaggcacctatattgaccctcttccggcattagtccacccgaaaacgggacgcctccatacccgcttcaaccaaacagccacggcgaccggtcgtttgtcctcctctgatccaaaccttcagaatattccagtacgtaccccattgggccagaagatccgccgcgcgtttgtagctgaggagggttggcgtttagtggccctcgattatagccaaattgaattacgtgtccttgcccatctttctggcgatgagaacctcatccgcgtgtttcaggaaggcaaagacattcacactcaaacggcaagctggatgtttggattatcagctgaagcgatcgatcctttgatgcgtcgtgcagcgaagaccatcaatttcggtgttctctacggtatgagtgcctttcgtttgtcgcaggaattaggcattccctatgaagaagctgcggcgttcattcagaaatactttcaaagctatcccaaagttaaagcatggatcgagaagactctcgaagaaggccgcacacgtggttacgtagagaccttatttggacgtcgccgctatgttcccgatttaaacgctcgcgtgaaatctgtccgtgaagccgccgaacgcatggcgttcaacatgcctgtacagggcacggcagctgacctcatgaaacttgcaatggtgcgcctttttccacaattgcgtgaagttggtgcccgcatgctcttgcaggtccacgatgaactcttgttagaagcgccaaaagagcgtgcggaagaggtggcagccctcgcgaaagaggttatggaaggcgtgtggcccttagcggtgcctcttgaagtcgaagttggtattggcgaggattggctggctgccaaaggataatga

SEQ ID NO: 2434 - protein, 841 aa, synthetic construct
  REGION 1..841: note = Variant of DNA polymerase I from Thermus sp. strain 2.9
MHHHHHHGGSGVLPVFEPKGRVLLVDGHHLAYRNFFALKGLTTSRGEPVQGVYGFAKSLLKALKEDGDVVIVVFDAKAPSFRHEAYEAYKAGRAPTPEDFPRQLALMKELVDLLGLERLEVPGFEADDVLATLAKKAEREGYEVQILTADRDLFQLLSPRISVLHPEGHRITPEWLWEKYGLRPEQWVDFRALAGDPSDNIPGVKGIGEKTALKLLKEWGSLENLLKNLDQVKPESVREKILAHLEDLKLSRELSRVRTDLPLEVDFRRRREPDWEGLKAFLERLEFGSLLHEFGLLESPLPAEEAPWPPPEGAFLGYRLSRPEPMWAELLALAASAQGRVYRAEDPHGALRGLVEVRGLLAKDLAVVALREGLDLPPTDDPMLLAYLLDPSNTTPEGVARRYGGEWTEDAAKRALLAERLHANLLGRLQGEERLLWLYEEVEKPLSRVLAHMEATGVKLDVAYLEALSLEVAAEMRRLEEEVFRLAGHSFRLNSRDQLERVLFDELGLPPIGKTEKTGKRSTSAAVLEALREVHPIVDKILQYRELAKLKGTYIDPLPALVHPKTGRLHTRFNQTATATGRLSSSDPNLQNIPVRTPLGQKIRRAFVAEEGWRLVALDYSQIELRVLAHLSGDENLIRVFQEGKDIHTQTASWMFGLSAEAIDPLMRRAAKTINFGVLYGMSAFRLSQELGIPYEEAAAFIQKYFQSYPKVKAWIEKTLEEGRTRGYVETLFGRRRYVPDLNARVKSVREAAERMAFNMPVQGTAADLMKLAMVRLFPQLREVGARMLLQVHDELLLEAPKERAEEVAALAKEVMEGVWPLAVPLEVEVGIGEDWLAAKG

SEQ ID NO: 2435 - DNA, 2529 bp, synthetic construct
  misc_feature 1..2529: note = Variant of DNA polymerase I from Thermus sp. strain 2.9
  source 1..2529: mol_type = other DNA
atgcaccatcatcatcatcatggcggtagcggcgtgttaccggtgttcgagcctaaaggtcgcgtgcttctggttgatggccatcatctcgcgtatcgtaacttctttgccctgaaaggattaaccaccagccgtggcgagccggtacagggtgtctacggctttgcaaagtcgctcctgaaagctctgaaagaagacggtgatgtggtgattgttgtctttgatgcgaaagcgccaagttttcgccacgaagcgtacgaagcttacaaagccgggcgtgctccaacgccggaagactttcctcgccaattggcgcttatgaaggaattagtggatttgcttggcctcgaacgcttggaagttcccggtttcgaggcagacgacgtattagcgactctcgcaaagaaagccgaacgtgagggctatgaagtccagatcttgacagcagatcgcgatcttttccagcttttatctccgcgcatctcggtgttacacccggaagggcatcgtatcaccccggaatggctctgggagaaatatggtttgcgtcccgaacaatgggtggattttcgcgccttagcaggcgatccgagcgacaatattccgggagttaaaggtatcggcgagaagacggcgctcaagctccttaaagaatgggggtcgttggagaacttgcttaagaatttagatcaggtcaaaccagagtcagtgcgtgagaagattcttgcacacctcgaagacctcaaattaagccgcgaattgtcccgtgtacgcaccgatttgccgctcgaagttgatttccgtcgccgccgcgaacctgactgggagggtcttaaagcgtttttagagcgtcttgaatttggttcgctcttgcatgaattcggccttttagaaagcccgttaccagccgaagaagcaccttggccaccgcccgaaggcgcgtttttaggttaccgtttgagtcgcccggaaccgatgtgggccgaattattggctcttgcagcgtctgcccagggacgtgtgtatcgcgcggaagaccctcatggtgcgctccgcggcctcttcgaagtccgtggactccttgccaaagacttagctgttgttgcattgcgcgaaggtcttgatttacctccgactgatgatccaatgcttcttgcgtacctcttggacccgtcaaacacgacgcccgaaggcgtagcccgtcgttacggcggcgagtggaccgaagatgcagcgaaacgcgcgttattggccgaacgtttgcacgccaatttattaggacgtttgcaaggcgaggaacgtctcctctggctttacgaagaagtggagaaaccattgagtcgcgtgctcgcgcatatggaagctaccggtgtcaaattagacgtggcgtatttggaggctctcagccttgaagttgctgccgaaatgcgccgcttggaggaagaagtattccgtttagcaggccattcctttcgccttaattctcgcgatcagttagaacgtgtgttgttcgatgaacttggtctccctcctatcggcaagacagagaagaccggtaaacgtagcacttcagcggcggttttagaagctcttcgcgaagctcatcccattgtggacaagatcttgcagtaccgcgaactcgcgaaattgaaaggcacctatattgaccctcttccggcattagtccacccgaaaacgggacgcctccatacccgcttcaaccaaacagccacggcgaccggtcgtttgtcctcctctgatccaaaccttcagaatattccagtacgtaccccattgggccagaagatccgccgcgcgtttgtagctgaggagggttggcgtttagtggccctcgattatagccaaattgaattacgtgtccttgcccatctttctggcgatgagaacctcatccgcgtgtttcaggaaggcaaagacattcacactcaaacggcaagctggatgtttggattatcagctgaagcgatcgatcctttgatgcgtcgtgcagcgaagaccatcaatttcggtgttctctacggtatgagtgcctttcgtttgtcgcaggaattaggcattccctatgaagaagctgcggcgttcattcagaaatactttcaaagctatcccaaagttaaagcatggatcgagaagactctcgaagaaggccgcacacgtggttacgtagagaccttatttggacgtcgccgctatgttcccgatttaaacgctcgcgtgaaatctgtccgtgaagccgccgaacgcatggcgttcaacatgcctgtacagggcacggcagctgacctcatgaaacttgcaatggtgcgcctttttccacaattgcgtgaagttggtgcccgcatgctcttgcaggtccacgatgaactcttgttagaagcgccaaaagagcgtgcggaagaggtggcagccctcgcgaaagaggttatggaaggcgtgtggcccttagcggtgcctcttgaagtcgaagttggtattggcgaggattggctggctgccaaaggataatga

SEQ ID NO: 2436 - protein, 841 aa, synthetic construct
  REGION 1..841: note = Variant of DNA polymerase I from Thermus sp. strain 2.9
MHHHHHHGGSGVLPVFEPKGRVLLVDGHHLAYRNFFALKGLTTSRGEPVQGVYGFAKSLLKALKEDGDVVIVVFDAKAPSFRHEAYEAYKAGRAPTPEDFPRQLALMKELVDLLGLERLEVPGFEADDVLATLAKKAEREGYEVQILTADRDLFQLLSPRISVLHPEGHRITPEWLWEKYGLRPEQWVDFRALAGDPSDNIPGVKGIGEKTALKLLKEWGSLENLLKNLDQVKPESVREKILAHLEDLKLSRELSRVRTDLPLEVDFRRRREPDWEGLKAFLERLEFGSLLHEFGLLESPLPAEEAPWPPPEGAFLGYRLSRPEPMWAELLALAASAQGRVYRAEDPHGALRGLFEVRGLLAKDLAVVALREGLDLPPTDDPMLLAYLLDPSNTTPEGVARRYGGEWTEDAAKRALLAERLHANLLGRLQGEERLLWLYEEVEKPLSRVLAHMEATGVKLDVAYLEALSLEVAAEMRRLEEEVFRLAGHSFRLNSRDQLERVLFDELGLPPIGKTEKTGKRSTSAAVLEALREAHPIVDKILQYRELAKLKGTYIDPLPALVHPKTGRLHTRFNQTATATGRLSSSDPNLQNIPVRTPLGQKIRRAFVAEEGWRLVALDYSQIELRVLAHLSGDENLIRVFQEGKDIHTQTASWMFGLSAEAIDPLMRRAAKTINFGVLYGMSAFRLSQELGIPYEEAAAFIQKYFQSYPKVKAWIEKTLEEGRTRGYVETLFGRRRYVPDLNARVKSVREAAERMAFNMPVQGTAADLMKLAMVRLFPQLREVGARMLLQVHDELLLEAPKERAEEVAALAKEVMEGVWPLAVPLEVEVGIGEDWLAAKG

SEQ ID NO: 2437 - DNA, 2529 bp, synthetic construct
  misc_feature 1..2529: note = Variant of DNA polymerase I from Thermus sp. strain 2.9
  source 1..2529: mol_type = other DNA
atgcaccatcatcatcatcatggcggtagcggcgtgttaccggtgttcgagcctaaaggtcgcgtgcttctggttgatggccatcatctcgcgtatcgtaacttctttgccctgaaaggattaaccaccagccgtggcgagccggtacagggtgtctacggctttgcaaagtcgctcctgaaagctctgaaagaagacggtgatgtggtgattgttgtctttgatgcgaaagcgccaagttttcgccacgaagcgtacgaagcttacaaagccgggcgtgctccaacgccggaagactttcctcgccaattggcgcttatgaaggaattagtggatttgcttggcctcgaacgcttggaagttcccggtttcgaggcagacgacgtattagcgactctcgcaaagaaagccgaacgtgagggctatgaagtccagatcttgacagcagatcgcgatcttttccagcttttatctccgcgcatctcggtgttacacccggaagggcatcgtatcaccccggaatggctctgggagaaatatggtttgcgtcccgaacaatgggtggattttcgcgccttagcaggcgatccgagcgacaatattccgggagttaaaggtatcggcgagaagacggcgctcaagctccttaaagaatgggggtcgttggagaacttgcttaagaatttagatcaggtcaaaccagagtcagtgcgtgagaagattcttgcacacctcgaagacctcaaattaagccgcgaattgtcccgtgtacgcaccgatttgccgctcgaagttgatttccgtcgccgccgcgaacctgactgggagggtcttaaagcgtttttagagcgtcttgaatttggttcgctcttgcatgaattcggccttttagaaagcccgttaccagccgaagaagcaccttggccaccgcccgaaggcgcgtttttaggttaccgtttgagtcgcccggaaccgatgtgggccgaattattggctcttgcagcgtctgcccagggacgtgtgtatcgcgcggaagaccctcatggtgcgctccgcggcctcttcgaagtccgtggactccttgccaaagacttagctgttgttgcattgcgcgaaggtcttgatttacctccgactgatgatccaatgcttcttgcgtacctcttggacccgtcaaacacgacgcccgaaggcgtagcccgtcgttacggcggcgagtggaccgaagatgcagcgaaacgcgcgttattggccgaacgtttgcacgccaatttattaggacgtttgcaaggcgaggaacgtctcctctggctttacgaagaagtggagaaaccattgagtcgcgtgctcgcgcatatggaagctaccggtgtcaaattagacgtggcgtatttggaggctctcagccttgaagttgctgccgaaatgcgccgcttggaggaagaagtattccgtttagcaggccattcctttcgccttaattctcgcgatcagttagaacgtgtgttgttcgatgaacttggtctccctcctatcggcaagacagagaagaccggtaaacgtagcacttcagcggcggttttagaagctcttcgcgaagtccatcccattgtggacaagatcttgcagtaccgcgaactcgcgaaattgaaaggcacctatattgacatgcttccggcattagtccacccgaaaacgggacgcctccatacccgcttcaaccaaacagccacggcgaccggtcgtttgtcctcctctgatccaaaccttcagaatattccagtacgtaccccattgggccagaagatccgccgcgcgtttgtagctgaggagggttggcgtttagtggccctcgattatagccaaattgaattacgtgtccttgcccatctttctggcgatgagaacctcatccgcgtgtttcaggaaggcaaagacattcacactcaaacggcaagctggatgtttggattatcagctgaagcgatcgatcctttgatgcgtcgtgcagcgaagaccatcaatttcggtgttctctacggtatgagtgcctttcgtttgtcgcaggaattaggcattccctatgaagaagctgcggcgttcattcagaaatactttcaaagctatcccaaagttaaagcatggatcgagaagactctcgaagaaggccgcacacgtggttacgtagagaccttatttggacgtcgccgctatgttcccgatttaaacgctcgcgtgaaatctgtccgtgaagccgccgaacgcatggcgttcaacatgcctgtacagggcacggcagctgacctcatgaaacttgcaatggtgcgcctttttccacaattgcgtgaagttggtgcccgcatgctcttgcaggtccacgatgaactcttgttagaagcgccaaaagagcgtgcggaagaggtggcagccctcgcgaaagaggttatggaaggcgtgtggcccttagcggtgcctcttgaagtcgaagttggtattggcgaggattggctggctgccaaaggataatga

SEQ ID NO: 2438 - protein, 841 aa, synthetic construct
  REGION 1..841: note = Variant of DNA polymerase I from Thermus sp. strain 2.9
MHHHHHHGGSGVLPVFEPKGRVLLVDGHHLAYRNFFALKGLTTSRGEPVQGVYGFAKSLLKALKEDGDVVIVVFDAKAPSFRHEAYEAYKAGRAPTPEDFPRQLALMKELVDLLGLERLEVPGFEADDVLATLAKKAEREGYEVQILTADRDLFQLLSPRISVLHPEGHRITPEWLWEKYGLRPEQWVDFRALAGDPSDNIPGVKGIGEKTALKLLKEWGSLENLLKNLDQVKPESVREKILAHLEDLKLSRELSRVRTDLPLEVDFRRRREPDWEGLKAFLERLEFGSLLHEFGLLESPLPAEEAPWPPPEGAFLGYRLSRPEPMWAELLALAASAQGRVYRAEDPHGALRGLFEVRGLLAKDLAVVALREGLDLPPTDDPMLLAYLLDPSNTTPEGVARRYGGEWTEDAAKRALLAERLHANLLGRLQGEERLLWLYEEVEKPLSRVLAHMEATGVKLDVAYLEALSLEVAAEMRRLEEEVFRLAGHSFRLNSRDQLERVLFDELGLPPIGKTEKTGKRSTSAAVLEALREVHPIVDKILQYRELAKLKGTYIDMLPALVHPKTGRLHTRFNQTATATGRLSSSDPNLQNIPVRTPLGQKIRRAFVAEEGWRLVALDYSQIELRVLAHLSGDENLIRVFQEGKDIHTQTASWMFGLSAEAIDPLMRRAAKTINFGVLYGMSAFRLSQELGIPYEEAAAFIQKYFQSYPKVKAWIEKTLEEGRTRGYVETLFGRRRYVPDLNARVKSVREAAERMAFNMPVQGTAADLMKLAMVRLFPQLREVGARMLLQVHDELLLEAPKERAEEVAALAKEVMEGVWPLAVPLEVEVGIGEDWLAAKG

SEQ ID NO: 2439 - DNA, 2529 bp, synthetic construct
  misc_feature 1..2529: note = Variant of DNA polymerase I from Thermus sp. strain 2.9
  source 1..2529: mol_type = other DNA
atgcaccatcatcatcatcatggcggtagcggcgtgttaccggtgttcgagcctaaaggtcgcgtgcttctggttgatggccatcatctcgcgtatcgtaacttctttgccctgaaaggattaaccaccagccgtggcgagccggtacagggtgtctacggctttgcaaagtcgctcctgaaagctctgaaagaagacggtgatgtggtgattgttgtctttgatgcgaaagcgccaagttttcgccacgaagcgtacgaagcttacaaagccgggcgtgctccaacgccggaagactttcctcgccaattggcgcttatgaaggaattagtggatttgcttggcctcgaacgcttggaagttcccggtttcgaggcagacgacgtattagcgactctcgcaaagaaagccgaacgtgagggctatgaagtccagatcttgacagcagatcgcgatcttttccagcttttatctccgcgcatctcggtgttacacccggaagggcatcgtatcaccccggaatggctctgggagaaatatggtttgcgtcccgaacaatgggtggattttcgcgccttagcaggcgatccgagcgacaatattccgggagttaaaggtatcggcgagaagacggcgctcaagctccttaaagaatgggggtcgttggagaacttgcttaagaatttagatcaggtcaaaccagagtcagtgcgtgagaagattcttgcacacctcgaagacctcaaattaagccgcgaattgtcccgtgtacgcaccgatttgccgctcgaagttgatttccgtcgccgccgcgaacctgactgggagggtcttaaagcgtttttagagcgtcttgaatttggttcgctcttgcatgaattcggccttttagaaagcccgttagttgccgaagaagcaccttggccaccgcccgaaggcgcgtttttaggttaccgtttgagtcgcccggaaccgatgtgggccgaattattggctcttgcagcgtctgcccagggaaccgtgtatcgcgcggaagaccctcatggtgcgctccgcggcctcttcgaagtccgtggactccttgccaaagacttagctgttgttgcattgcgcgaaggtcttgatttacctccgactgatgatccaatgcttcttgcgtacctcttggacccgtcaaacacgacgcccgaaggcgtagcccgtcgttacggcggcgagtggaccgaagatgcagcgaaacgcgcgttattggccgaacgtttgcacgccaatttattaggacgtttgcaaggcgaggaacgtctcctctggctttacgaagaagtggagaaaccattgagtcgcgtgctcgcgcatatggaagctaccggtgtcaaattagacgtggcgtatttggaggctctcagccttgaagttgctgccgaaatgcgccgcttggaggaagaagtattccgtttagcaggccattcctttcgccttgtatctcgcgatcagttagaacgtgtgttgttcgatgaacttggtctccctcctatcggcaagacagagaagaccggtaaacgtagcacttcagctgcggttttagaagctcttcgcgaagtccatcccattgtggacaagatcttgcagtaccgcgaactcgcgaaattgaaaggcacctatattgaccctcttccggcattagtccacccgaaaacgggacgcctccatacccgcttcaaccaaacagccacggcgaccggtcgtttgtcctcctctgatccaaaccttcagaatattccagtacgtaccccattgggccagaagatccgccgcgcgtttgtagctgaggagggttggcgtttagtggccctcgattatagccaaattgaattacgtgtccttgcccatctttctggcgatgagaacctcatccgcgtgtttcaggaaggcaaagacattcacactcaaacggcaagctggatgtttggattatcagctgaagcgatcgatcctttgatgcgtcgtgcagcgaagaccatcaatttcggtgttctctacggtatgagtgcctttcgtttgtcgcaggaattaggcattccctatgaagaagctgcggcgttcattcagaaatactttcaaagctatcccaaagttaaagcatggatcgagaagactctcgaagaaggccgcacacgtggttacgtagagaccttatttggacgtcgccgctatgttcccgatttaaacgctcgcgtgaaatctgtccgtgaagccgccgaacgcatggcgttcaacatgcctgtacagggcacggcagctgacctcatgaaacttgcaatggtgcgcctttttccacaattgcgtgaagttggtgcccgcatgctcttgcaggtccacgatgaactcttgttagaagcgccaaaagagcgtgcggaagaggtggcagccctcgcgaaagaggttatggaaggcgtgtggcccttagcggtgcctcttgaagtcgaagttggtattggcgaggattggctggctgccaaaggataatga

SEQ ID NO: 2440 - protein, 841 aa, synthetic construct
  REGION 1..841: note = Variant of DNA polymerase I from Thermus sp. strain 2.9
MHHHHHHGGSGVLPVFEPKGRVLLVDGHHLAYRNFFALKGLTTSRGEPVQGVYGFAKSLLKALKEDGDVVIVVFDAKAPSFRHEAYEAYKAGRAPTPEDFPRQLALMKELVDLLGLERLEVPGFEADDVLATLAKKAEREGYEVQILTADRDLFQLLSPRISVLHPEGHRITPEWLWEKYGLRPEQWVDFRALAGDPSDNIPGVKGIGEKTALKLLKEWGSLENLLKNLDQVKPESVREKILAHLEDLKLSRELSRVRTDLPLEVDFRRRREPDWEGLKAFLERLEFGSLLHEFGLLESPLVAEEAPWPPPEGAFLGYRLSRPEPMWAELLALAASAQGTVYRAEDPHGALRGLFEVRGLLAKDLAVVALREGLDLPPTDDPMLLAYLLDPSNTTPEGVARRYGGEWTEDAAKRALLAERLHANLLGRLQGEERLLWLYEEVEKPLSRVLAHMEATGVKLDVAYLEALSLEVAAEMRRLEEEVFRLAGHSFRLVSRDQLERVLFDELGLPPIGKTEKTGKRSTSAAVLEALREVHPIVDKILQYRELAKLKGTYIDPLPALVHPKTGRLHTRFNQTATATGRLSSSDPNLQNIPVRTPLGQKIRRAFVAEEGWRLVALDYSQIELRVLAHLSGDENLIRVFQEGKDIHTQTASWMFGLSAEAIDPLMRRAAKTINFGVLYGMSAFRLSQELGIPYEEAAAFIQKYFQSYPKVKAWIEKTLEEGRTRGYVETLFGRRRYVPDLNARVKSVREAAERMAFNMPVQGTAADLMKLAMVRLFPQLREVGARMLLQVHDELLLEAPKERAEEVAALAKEVMEGVWPLAVPLEVEVGIGEDWLAAKG

SEQ ID NO: 2441 - DNA, 2529 bp, synthetic construct
  misc_feature 1..2529: note = Variant of DNA polymerase I from Thermus sp. strain 2.9
  source 1..2529: mol_type = other DNA
atgcaccatcatcatcatcatggcggtagcggcgtgttaccggtgttcgagcctaaaggtcgcgtgcttctggttgatggccatcatctcgcgtatcgtaacttctttgccctgaaaggattaaccaccagccgtggcgagccggtacagggtgtctacggctttgcaaagtcgctcctgaaagctctgaaagaagacggtgatgtggtgattgttgtctttgatgcgaaagcgccaagttttcgccacgaagcgtacgaagcttacaaagccgggcgtgctccaacgccggaagactttcctcgccaattggcgcttatgaaggaattagtggatttgcttggcctcgaacgcttggaagttcccggtttcgaggcagacgacgtattagcgactctcgcaaagaaagccgaacgtgagggctatgaagtccagatcttgacagcagatcgcgatcttttccagcttttatctccgcgcatctcggtgttacacccggaagggcatcgtatcaccccggaatggctctgggagaaatatggtttgcgtcccgaacaatgggtggattttcgcgccttagcaggcgatccgagcgacaatattccgggagttaaaggtatcggcgagaagacggcgctcaagctccttaaagaatgggggtcgttggagaacttgcttaagaatttagatcaggtcaaaccagagtcagtgcgtgagaagattcttgcacacctcgaagacctcaaattaagccgcgaattgtcccgtgtacgcaccgatttgccgctcgaagttgatttccgtcgccgccgcgaacctgactgggagggtcttaaagcgtttttagagcgtcttgaatttggttcgctcttgcatgaattcggccttttagaaagcccgttaccagccgaagaagcaccttggccaccgcccgaaggcgcgtttttaggttaccgtttgagtcgcccggaaccgatgtgggccgaattattggctcttgcagcgtctgcccagggaaaggtgtatcgcgcggaagaccctcatggtgcgctccgcggcctcttcgaagtccgtggactccttgccaaagacttagctgttgttgcattgcgcgaaggtcttgatttacctccgactgatgatccaatgcttcttgcgtacctcttggacccgtcaaacacgacgcccgaaggcgtagcccgtcgttacggcggcgagtggaccgaagatgcagcgaaacgcgcgttattggccgaacgtttgcacgccaatttattaggacgtttgcaaggcgaggaacgtctcctctggctttacgaagaagtggagaaaccattgagtcgcgtgctcgcgcatatggaagctaccggtgtcaaattagacgtggcgtatttggaggctctcagccttgaagttgctgccgaaatgcgccgcttggaggaagaagtattccgtttagcaggccattcctttcgccttaattctcgcgatcagttagaacgtgtgttgttcgatgaacttggtctccctcctatcggcaagacagagaagaccggtaaacgtagcacttcagcggcggttttagaagctcttcgcgaagtccatcccattgtggacaagatcttgcagtaccgcgaactcgcgaaattgaaaggcacctatattgaccctcttccggcattagtccacccgaaaacgggacgcctccatacccgcttcaaccaaacagccacggcgaccggtcgtttgtcctcctctgatccaaaccttcagaatattccagtacgtaccccattgggccagaagatccgccgcgcgtttgtagctgaggagggttggcgtttagtggccctcgattatagccaaattgaattacgtgtccttgcccatctttctggcgatgagaacctcatccgcgtgtttcaggaaggcaaagacattcacactcaaacggcaagctggatgtttggattatcagctgaagcgatcgatcctttgatgcgtcgtgcagcgaagaccatcaatttcggtgttctctacggtatgagtgcctttcgtttgtcgcaggaattaggcattccctatgaagaagctgcggcgttcattcagaaatactttcaaagctatcccaaagttaaagcatggatcgagaagactctcgaagaaggccgcacacgtggttacgtagagaccttatttggacgtcgccgctatgttcccgatttaaacgctcgcgtgaaatctgtccgtgaagccgccgaacgcatggcgttcaacatgcctgtacagggcacggcagctgacctcatgaaacttgcaatggtgcgcctttttccacaattgcgtgaagttggtgcccgcatgctcttgcaggtccacgatgaactcttgttagaagcgccaaaagagcgtgcggaagaggtggcagccctcgcgaaagaggttatggaaggcgtgtggcccttagcggtgcctcttgaagtcgaagttggtattggcgaggattggctggctgccaaaggataatga

SEQ ID NO: 2442 - protein, 841 aa, synthetic construct
  REGION 1..841: note = Variant of DNA polymerase I from Thermus sp. strain 2.9
MHHHHHHGGSGVLPVFEPKGRVLLVDGHHLAYRNFFALKGLTTSRGEPVQGVYGFAKSLLKALKEDGDVVIVVFDAKAPSFRHEAYEAYKAGRAPTPEDFPRQLALMKELVDLLGLERLEVPGFEADDVLATLAKKAEREGYEVQILTADRDLFQLLSPRISVLHPEGHRITPEWLWEKYGLRPEQWVDFRALAGDPSDNIPGVKGIGEKTALKLLKEWGSLENLLKNLDQVKPESVREKILAHLEDLKLSRELSRVRTDLPLEVDFRRRREPDWEGLKAFLERLEFGSLLHEFGLLESPLPAEEAPWPPPEGAFLGYRLSRPEPMWAELLALAASAQGKVYRAEDPHGALRGLFEVRGLLAKDLAVVALREGLDLPPTDDPMLLAYLLDPSNTTPEGVARRYGGEWTEDAAKRALLAERLHANLLGRLQGEERLLWLYEEVEKPLSRVLAHMEATGVKLDVAYLEALSLEVAAEMRRLEEEVFRLAGHSFRLNSRDQLERVLFDELGLPPIGKTEKTGKRSTSAAVLEALREVHPIVDKILQYRELAKLKGTYIDPLPALVHPKTGRLHTRFNQTATATGRLSSSDPNLQNIPVRTPLGQKIRRAFVAEEGWRLVALDYSQIELRVLAHLSGDENLIRVFQEGKDIHTQTASWMFGLSAEAIDPLMRRAAKTINFGVLYGMSAFRLSQELGIPYEEAAAFIQKYFQSYPKVKAWIEKTLEEGRTRGYVETLFGRRRYVPDLNARVKSVREAAERMAFNMPVQGTAADLMKLAMVRLFPQLREVGARMLLQVHDELLLEAPKERAEEVAALAKEVMEGVWPLAVPLEVEVGIGEDWLAAKG

SEQ ID NO: 2443 - DNA, 2529 bp, synthetic construct
  misc_feature 1..2529: note = Variant of DNA polymerase I from Thermus sp. strain 2.9
  source 1..2529: mol_type = other DNA
atgcaccatcatcatcatcatggcggtagcggcgtgttaccggtgttcgagcctaaaggtcgcgtgcttctggttgatggccatcatctcgcgtatcgtaacttctttgccctgaaaggattaaccaccagccgtggcgagccggtacagggtgtctacggctttgcaaagtcgctcctgaaagctctgaaagaagacggtgatgtggtgattgttgtctttgatgcgaaagcgccaagttttcgccacgaagcgtacgaagcttacaaagccgggcgtaagccaacgccggaagactttcctcgccaattggcgcttatgaaggaattagtggatttgcttggcctcgaacgcttggaagttcccggtttcgaggcagacgacgtattagcgactctcgcaaagaaagccgaacgtgagggctatgaagtccagatcttgacagcagatcgcgatcttttccagcttttatctccgcgcatctcggtgttacacccggaagggcatcgtatcaccccggaatggctctgggagaaatatggtttgcgtcccgaacaatgggtggattttcgcgccttagcaggcgatccgagcgacaatattccgggagttaaaggtatcggcgagaagacggcgctcaagctccttaaagaatgggggtcgttggagaacttgcttaagaatttagatcaggtcaaaccagagtcagtgcgtgagaagattcttgcacacctcgaagacctcaaattaagccgcgaattgtcccgtgtacgcaccgatttgccgctcgaagttgatttccgtcgccgccgcgaacctgactgggagggtcttaaagcgtttttagagcgtcttgaatttggttcgctcttgcatgaattcggccttttagaaagcccgttaccagccgaagaagcaccttggccaccgcccgaaggcgcgtttttaggttaccgtttgagtcgcccggaaccgatgtgggccgaattattggctcttgcagcgtctgcccagggacgtgtgtatcgcgcggaagaccctcatggtgcgctccgcggcctcttcgaagtccgtggactccttgccaaagacttagctgttgttgcattgcgcgaaggtcttgatttacctccgactgatgatccaatgcttcttgcgtacctcttggacccgtcaaacacgacgcccgaaggcgtagcccgtcgttacggcggcgagtggaccgaagatgcagcgaaacgcgcgttattggccgaacgtttgcacgccaatttattaggacgtttgcaaggcgaggaacgtctcctctggctttacgaagaagtggagaaaccattgagtcgcgtgctcgcgcatatggaagctaccggtgtcaaattagacgtggcgtatttggaggctctcagccttgaagttgctgccgaaatgcgccgcttggaggaagaagtattccgtttagcaggccattcctttcgccttaattctcgcgatcagttagaacgtgtgttgttcgatgaacttggtctccctcctatcggcaagacagagaagaccggtaaacgtagcacttcagcggcggttttagaagctcttcgcgaagtccatcccattgtggacaagatcttgcagtaccgcgaactcgcgaaattgaaaggcacctatattgaccctcttccggcattagtccacccgaaaacgggacgcctccatacccgcttcaaccaaacagccacggcgaccggtcgtttgtcctcctctgatccaaaccttcagaatattccagtacgtaccccattgggccagaagatccgccgcgcgtttgtagctgaggagggttggcgtttagtggccctcgattatagccaaattgaattacgtgtccttgcccatctttctggcgatgagaacctcatccgcgtgtttcaggaaggcaaagacattcacactcaaacggcaagctggatgtttggattatcagctgaagcgatcgatcctttgatgcgtcgtgcagcgaagaccatcaatttcggtgttctctacggtatgagtgcctttcgtttgtcgcaggaattaggcattccctatgaagaagctgcggcgttcattcagaaatactttcaaagctatcccaaagttaaagcatggatcgagaagactctcgaagaaggccgcacacgtggttacgtagagaccttatttggacgtcgccgctatgttcccgatttaaacgctcgcgtgaaatctgtccgtgaagccgccgaacgcatggcgttcaacatgcctgtacagggcacggcagctgacctcatgaaacttgcaatggtgcgcctttttccacaattgcgtgaagttggtgcccgcatgctcttgcaggtccacgatgaactcttgttagaagcgccaaaagagcgtgcggaagaggtggcagccctcgcgaaagaggttatggaaggcgtgtggcccttagcggtgcctcttgaagtcgaagttggtattggcgaggattggctggctgccaaaggataatga

SEQ ID NO: 2444 - protein, 841 aa, synthetic construct
  REGION 1..841: note = Variant of DNA polymerase I from Thermus sp. strain 2.9
MHHHHHHGGSGVLPVFEPKGRVLLVDGHHLAYRNFFALKGLTTSRGEPVQGVYGFAKSLLKALKEDGDVVIVVFDAKAPSFRHEAYEAYKAGRKPTPEDFPRQLALMKELVDLLGLERLEVPGFEADDVLATLAKKAEREGYEVQILTADRDLFQLLSPRISVLHPEGHRITPEWLWEKYGLRPEQWVDFRALAGDPSDNIPGVKGIGEKTALKLLKEWGSLENLLKNLDQVKPESVREKILAHLEDLKLSRELSRVRTDLPLEVDFRRRREPDWEGLKAFLERLEFGSLLHEFGLLESPLPAEEAPWPPPEGAFLGYRLSRPEPMWAELLALAASAQGRVYRAEDPHGALRGLFEVRGLLAKDLAVVALREGLDLPPTDDPMLLAYLLDPSNTTPEGVARRYGGEWTEDAAKRALLAERLHANLLGRLQGEERLLWLYEEVEKPLSRVLAHMEATGVKLDVAYLEALSLEVAAEMRRLEEEVFRLAGHSFRLNSRDQLERVLFDELGLPPIGKTEKTGKRSTSAAVLEALREVHPIVDKILQYRELAKLKGTYIDPLPALVHPKTGRLHTRFNQTATATGRLSSSDPNLQNIPVRTPLGQKIRRAFVAEEGWRLVALDYSQIELRVLAHLSGDENLIRVFQEGKDIHTQTASWMFGLSAEAIDPLMRRAAKTINFGVLYGMSAFRLSQELGIPYEEAAAFIQKYFQSYPKVKAWIEKTLEEGRTRGYVETLFGRRRYVPDLNARVKSVREAAERMAFNMPVQGTAADLMKLAMVRLFPQLREVGARMLLQVHDELLLEAPKERAEEVAALAKEVMEGVWPLAVPLEVEVGIGEDWLAAKG

SEQ ID NO: 2445 - DNA, 2529 bp, synthetic construct
  misc_feature 1..2529: note = Variant of DNA polymerase I from Thermus sp. strain 2.9
  source 1..2529: mol_type = other DNA
atgcaccatcatcatcatcatggcggtagcggcgtgttaccggtgttcgagcctaaaggtcgcgtgcttctggttgatggccatcatctcgcgtatcgtaacttctttgccctgaaaggattaaccaccagccgtggcgagccggtacagggtgtctacggctttgcaaagtcgctcctgaaagctctgaaagaagacggtgatgtggtgattgttgtctttgatgcgaaagcgccaagttttcgccacgaagcgtacgaagcttacaaagccgggcgtgctccaacgccggaagactttcctcgccaattggcgcttatgaaggaattagtggatttgcttggcctcgaacgcttggaagttcccggtttcgaggcagacgacgtattagcgactctcgcaaagaaagccgaacgtgagggctatgaagtccagatcttgacagcagatcgcgatcttttccagcttttatctccgcgcatctcggtgttacacccggaagggcatcgtatcaccccggaatggctctgggagaaatatggtttgcgtcccgaacaatgggtggattttcgcgccttagcaggcgatccgagcgacaatattccgggagttaaaggtatcggcgagtcgacggcgctcaagctccttaaagaatgggggtcgttggagaacttgcttaagaatttagatcaggtcaaaccagagtcagtgcgtgagaagattcttgcacacctcgaagacctcaaattaagccgcgaattgtcccgtgtacgcaccgatttgccgctcgaagttgatttccgtcgccgccgcgaacctgactgggagggtcttaaagcgtttttagagcgtcttgaatttggttcgctcttgcatgaattcggccttttagaaagcccgttaccagccgaagaagcaccttggccaccgcccgaaggcgcgtttttaggttaccgtttgagtcgcccggaaccgatgtgggccgaattattggctcttgcagcgtctgcccagggacgtgtgtatcgcgcggaagaccctcatggtgcgctccgcggcctcttcgaagtccgtggactccttgccaaagacttagctgttgttgcattgcgcgaaggtcttgatttacctccgactgatgatccaatgcttcttgcgtacctcttggacccgtcaaacacgacgcccgaaggcgtagcccgtcgttacggcggcgagtggaccgaagatgcagcgaaacgcgcgttattggccgaacgtttgcacgccaatttattaggacgtttgcaaggcgaggaacgtctcctctggctttacgaagaagtggagaaaccattgagtcgcgtgctcgcgcatatggaagctaccggtgtcaaattagacgtggcgtatttggaggctctcagccttgaagttgctgccgaaatgcgccgcttggaggaagaagtattccgtttagcaggccattcctttcgccttaattctcgcgatcagttagaacgtgtgttgttcgatgaacttggtctccctcctatcggcaagacagagaagaccggtaaacgtagcacttcagcggcggttttagaagctcttcgcgaagtccatcccattgtggacaagatcttgcagtaccgcgaactcgcgaaattgaaaggcacctatattgaccctcttccggcattagtccacccgaaaacgggacgcctccatacccgcttcaaccaaacagccacggcgaccggtcgtttgtcctcctctgatccaaaccttcagaatattccagtacgtaccccattgggccagaagatccgccgcgcgtttgtagctgaggagggttggcgtttagtggccctcgattatagccaaattgaattacgtgtccttgcccatctttctggcgatgagaacctcatccgcgtgtttcaggaaggcaaagacattcacactcaaacggcaagctggatgtttggattatcagctgaagcgatcgatcctttgatgcgtcgtgcagcgaagaccatcaatttcggtgttctctacggtatgagtgcctttcgtttgtcgcaggaattaggcattccctatgaagaagctgcggcgttcattcagaaatactttcaaagctatcccaaagttaaagcatggatcgagaagactctcgaagaaggccgcacacgtggttacgtagagaccttatttggacgtcgccgctatgttcccgatttaaacgctcgcgtgaaatctgtccgtgaagccgccgaacgcatggcgttcaacatgcctgtacagggcacggcagctgacctcatgaaacttgcaatggtgcgcctttttccacaattgcgtgaagttggtgcccgcatgctcttgcaggtccacgatgaactcttgttagaagcgccaaaagagcgtgcggaagaggtggcagccctcgcgaaagaggttatggaaggcgtgtggcccttagcggtgcctcttgaagtcgaagttggtattggcgaggattggctggctgccaaaggataatga

SEQ ID NO: 2446 - protein, 841 aa, synthetic construct
  REGION 1..841: note = Variant of DNA polymerase I from Thermus sp. strain 2.9
MHHHHHHGGSGVLPVFEPKGRVLLVDGHHLAYRNFFALKGLTTSRGEPVQGVYGFAKSLLKALKEDGDVVIVVFDAKAPSFRHEAYEAYKAGRAPTPEDFPRQLALMKELVDLLGLERLEVPGFEADDVLATLAKKAEREGYEVQILTADRDLFQLLSPRISVLHPEGHRITPEWLWEKYGLRPEQWVDFRALAGDPSDNIPGVKGIGESTALKLLKEWGSLENLLKNLDQVKPESVREKILAHLEDLKLSRELSRVRTDLPLEVDFRRRREPDWEGLKAFLERLEFGSLLHEFGLLESPLPAEEAPWPPPEGAFLGYRLSRPEPMWAELLALAASAQGRVYRAEDPHGALRGLFEVRGLLAKDLAVVALREGLDLPPTDDPMLLAYLLDPSNTTPEGVARRYGGEWTEDAAKRALLAERLHANLLGRLQGEERLLWLYEEVEKPLSRVLAHMEATGVKLDVAYLEALSLEVAAEMRRLEEEVFRLAGHSFRLNSRDQLERVLFDELGLPPIGKTEKTGKRSTSAAVLEALREVHPIVDKILQYRELAKLKGTYIDPLPALVHPKTGRLHTRFNQTATATGRLSSSDPNLQNIPVRTPLGQKIRRAFVAEEGWRLVALDYSQIELRVLAHLSGDENLIRVFQEGKDIHTQTASWMFGLSAEAIDPLMRRAAKTINFGVLYGMSAFRLSQELGIPYEEAAAFIQKYFQSYPKVKAWIEKTLEEGRTRGYVETLFGRRRYVPDLNARVKSVREAAERMAFNMPVQGTAADLMKLAMVRLFPQLREVGARMLLQVHDELLLEAPKERAEEVAALAKEVMEGVWPLAVPLEVEVGIGEDWLAAKG

SEQ ID NO: 2447 - DNA, 2529 bp, synthetic construct
  misc_feature 1..2529: note = Variant of DNA polymerase I from Thermus sp. strain 2.9
  source 1..2529: mol_type = other DNA
atgcaccatcatcatcatcatggcggtagcggcgtgttaccggtgttcgagcctaaaggtcgcgtgcttctggttgatggccatcatctcgcgtatcgtaacttctttgccctgaaaggattaaccaccagccgtggcgagccggtacagggtgtctacggctttgcaaagtcgctcctgaaagctctgaaagaagacggtgatgtggtgattgttgtctttgatgcgaaagcgccaagttttcgccacgaagcgtacgaagcttacaaagccgggcgtgctccaacgccggaagactttcctcgccaattggcgcttatgaaggaattagtggatttgcttggcctcgaacgcttggaagttcccggtttcgaggcagacgacgtattagcgactctcgcaaagaaagccgaacgtgagggctatgaagtccagatcttgacagcagatcgcgatcttttccagcttttatctccgcgcatctcggtgttacacccggaagggcatcgtatcaccccggaatggctctgggagaaatatggtttgcgtcccgaacaatgggtggattttcgcgccttagcaggcgatccgagcgacaatattccgggagttaaaggtatcggcgagaagacggcgctcaagctccttaaagaatgggggtcgttggagaacttgcttaagaatttagatcaggtcaaaccagagtcagtgcgtgagaagattcttgcacacctcgaagacctcaaattaagccgcgaattgtcccgtgtacgcaccgatttgccgctcgaagttgatttccgtagtcgccgcgaacctgactgggagggtcttaaagcgtttttagagcgtcttgaatttggttcgctcttgcatgaattcggccttttagaaagcccgttaccagccgaagaagcaccttggccaccgcccgaaggcgcgtttttaggttaccgtttgagtcgcccggaaccgatgtgggccgaattattggctcttgcagcgtctgcccagggacgtgtgtatcgcgcggaagaccctcatggtgcgctccgcggcctcttcgaagtccgtggactccttgccaaagacttagctgttgttgcattgcgcgaaggtcttgatttacctccgactgatgatccaatgcttcttgcgtacctcttggacccgtcaaacacgacgcccgaaggcgtagcccgtcgttacggcggcgagtggaccgaagatgcagcgaaacgcgcgttattggccgaacgtttgcacgccaatttattaggacgtttgcaaggcgaggaacgtctcctctggctttacgaagaagtggagaaaccattgagtcgcgtgctcgcgcatatggaagctaccggtgtcaaattagacgtggcgtatttggaggctctcagccttgaagttgctgccgaaatgcgccgcttggaggaagaagtattccgtttagcaggccattcctttcgccttaattctcgcgatcagttagaacgtgtgttgttcgatgaacttggtctccctcctatcggcaagacagagaagaccggtaaacgtagcacttcagcggcggttttagaagctcttcgcgaagtccatcccattgtggacaagatcttgcagtaccgcgaactcgcgaaattgaaaggcacctatattgaccctcttccggcattagtccacccgaaaacgggacgcctccatacccgcttcaaccaaacagccacggcgaccggtcgtttgtcctcctctgatccaaaccttcagaatattccagtacgtaccccattgggccagaagatccgccgcgcgtttgtagctgaggagggttggcgtttagtggccctcgattatagccaaattgaattacgtgtccttgcccatctttctggcgatgagaacctcatccgcgtgtttcaggaaggcaaagacattcacactcaaacggcaagctggatgtttggattatcagctgaagcgatcgatcctttgatgcgtcgtgcagcgaagaccatcaatttcggtgttctctacggtatgagtgcctttcgtttgtcgcaggaattaggcattccctatgaagaagctgcggcgttcattcagaaatactttcaaagctatcccaaagttaaagcatggatcgagaagactctcgaagaaggccgcacacgtggttacgtagagaccttatttggacgtcgccgctatgttcccgatttaaacgctcgcgtgaaatctgtccgtgaagccgccgaacgcatggcgttcaacatgcctgtacagggcacggcagctgacctcatgaaacttgcaatggtgcgcctttttccacaattgcgtgaagttggtgcccgcatgctcttgcaggtccacgatgaactcttgttagaagcgccaaaagagcgtgcggaagaggtggcagccctcgcgaaagaggttatggaaggcgtgtggcccttagcggtgcctcttgaagtcgaagttggtattggcgaggattggctggctgccaaaggataatga

SEQ ID NO: 2448 - protein, 841 aa, synthetic construct
  REGION 1..841: note = Variant of DNA polymerase I from Thermus sp. strain 2.9
MHHHHHHGGSGVLPVFEPKGRVLLVDGHHLAYRNFFALKGLTTSRGEPVQGVYGFAKSLLKALKEDGDVVIVVFDAKAPSFRHEAYEAYKAGRAPTPEDFPRQLALMKELVDLLGLERLEVPGFEADDVLATLAKKAEREGYEVQILTADRDLFQLLSPRISVLHPEGHRITPEWLWEKYGLRPEQWVDFRALAGDPSDNIPGVKGIGEKTALKLLKEWGSLENLLKNLDQVKPESVREKILAHLEDLKLSRELSRVRTDLPLEVDFRSRREPDWEGLKAFLERLEFGSLLHEFGLLESPLPAEEAPWPPPEGAFLGYRLSRPEPMWAELLALAASAQGRVYRAEDPHGALRGLFEVRGLLAKDLAVVALREGLDLPPTDDPMLLAYLLDPSNTTPEGVARRYGGEWTEDAAKRALLAERLHANLLGRLQGEERLLWLYEEVEKPLSRVLAHMEATGVKLDVAYLEALSLEVAAEMRRLEEEVFRLAGHSFRLNSRDQLERVLFDELGLPPIGKTEKTGKRSTSAAVLEALREVHPIVDKILQYRELAKLKGTYIDPLPALVHPKTGRLHTRFNQTATATGRLSSSDPNLQNIPVRTPLGQKIRRAFVAEEGWRLVALDYSQIELRVLAHLSGDENLIRVFQEGKDIHTQTASWMFGLSAEAIDPLMRRAAKTINFGVLYGMSAFRLSQELGIPYEEAAAFIQKYFQSYPKVKAWIEKTLEEGRTRGYVETLFGRRRYVPDLNARVKSVREAAERMAFNMPVQGTAADLMKLAMVRLFPQLREVGARMLLQVHDELLLEAPKERAEEVAALAKEVMEGVWPLAVPLEVEVGIGEDWLAAKG

SEQ ID NO: 2449 - DNA, 2529 bp, synthetic construct
  misc_feature 1..2529: note = Variant of DNA polymerase I from Thermus sp. strain 2.9
  source 1..2529: mol_type = other DNA
atgcaccatcatcatcatcatggcggtagcggcgtgttaccggtgttcgagcctaaaggtcgcgtgcttctggttgatggccatcatctcgcgtatcgtaacttctttgccctgaaaggattaaccaccagccgtggcgagccggtacagggtgtctacggctttgcaaagtcgctcctgaaagctctgaaagaagacggtgatgtggtgattgttgtctttgatgcgaaagcgccaagttttcgccacgaagcgtacgaagcttacaaagccgggcgtgctccaacgccggaagactttcctcgccaattggcgcttatgaaggaattagtggatttgcttggcctcgaacgcttggaagttcccggtttcgaggcagacgacgtattagcgactctcgcaaagaaagccgaacgtgagggctatgaagtccagatcttgacagcagatcgcgatcttttccagcttttatctccgcgcatctcggtgttacacccggaagggcatcgtatcaccccggaatggctctgggagaaatatggtttgcgtcccgaacaatgggtggattttcgcgccttagcaggcgatccgagcgacaatattccgggagttaaaggtatcggcgagaagacggcgctcaagctccttaaagaatgggggtcgttggagaacttgcttaagaatttagatcaggtcaaaccagagtcagtgcgtgagaagattcttgcacacctcgaagacctcaaattaagccgcgaattgtcccgtgtacgcaccgatttgccgctcgaagttgatttccgtcgccgccgcgaacctgactgggagggtcttaaagcgtttttagagcgtcttgaatttggttcgctcttgcatgaattcggccttttagaaagcccgttaccagccgaagaagcaccttggccaccgcccgaaggcgcgtttttaggttaccgtttgagtcgcccggaaccgatgtgggccgaattattggctcttgcagcgtctgcccagggacgtgtgtatcgcgcggaagaccctcatggtgcgctccgcggcctcttcgaagtccgtggactccttgccaaagacttagctgttgttgcattgcgcgaaggtcttgatttacctccgactgatgatccaatgcttcttgcgtacctcttggacccgtcaaacacgacgcccgaaggcgtagcccgtcgttacggcggcctgtggaccgaagatgcagcgaaacgcgcgttattggccgaacgtttgcacgccaatttattaggacgtttgcaaggcgaggaacgtctcctctggctttacgaagaagtggagaaaccattgagtcgcgtgctcgcgcatatggaagctaccggtgtcaaattagacgtggcgtatttggaggctctcagccttgaagttgctgccgaaatgcgccgcttggaggaagaagtattccgtttagcaggccattcctttcgccttaattctcgcgatcagttagaacgtgtgttgttcgatgaacttggtctccctcctatcggcaagacagagaagaccggtaaacgtagcacttcagcggcggttttagaagctcttcgcgaagtccatcccattgtggacaagatcttgcagtaccgcgaactcgcgaaattgaaaggcacctatattgaccctcttccggcattagtccacccgaaaacgggacgcctccatacccgcttcaaccaaacagccacggcgaccggtcgtttgtcctcctctgatccaaaccttcagaatattccagtacgtaccccattgggccagaagatccgccgcgcgtttgtagctgaggagggttggcgtttagtggccctcgattatagccaaattgaattacgtgtccttgcccatctttctggcgatgagaacctcatccgcgtgtttcaggaaggcaaagacattcacactcaaacggcaagctggatgtttggattatcagctgaagcgatcgatcctttgatgcgtcgtgcagcgaagaccatcaatttcggtgttctctacggtatgagtgcctttcgtttgtcgcaggaattaggcattccctatgaagaagctgcggcgttcattcagaaatactttcaaagctatcccaaagttaaagcatggatcgagaagactctcgaagaaggccgcacacgtggttacgtagagaccttatttggacgtcgccgctatgttcccgatttaaacgctcgcgtgaaatctgtccgtgaagccgccgaacgcatggcgttcaacatgcctgtacagggcacggcagctgacctcatgaaacttgcaatggtgcgcctttttccacaattgcgtgaagttggtgcccgcatgctcttgcaggtccacgatgaactcttgttagaagcgccaaaagagcgtgcggaagaggtggcagccctcgcgaaagaggttatggaaggcgtgtggcccttagcggtgcctcttgaagtcgaagttggtattggcgaggattggctggctgccaaaggataatga

SEQ ID NO: 2450 - protein, 841 aa, synthetic construct
  REGION 1..841: note = Variant of DNA polymerase I from Thermus sp. strain 2.9
MHHHHHHGGSGVLPVFEPKGRVLLVDGHHLAYRNFFALKGLTTSRGEPVQGVYGFAKSLLKALKEDGDVVIVVFDAKAPSFRHEAYEAYKAGRAPTPEDFPRQLALMKELVDLLGLERLEVPGFEADDVLATLAKKAEREGYEVQILTADRDLFQLLSPRISVLHPEGHRITPEWLWEKYGLRPEQWVDFRALAGDPSDNIPGVKGIGEKTALKLLKEWGSLENLLKNLDQVKPESVREKILAHLEDLKLSRELSRVRTDLPLEVDFRRRREPDWEGLKAFLERLEFGSLLHEFGLLESPLPAEEAPWPPPEGAFLGYRLSRPEPMWAELLALAASAQGRVYRAEDPHGALRGLFEVRGLLAKDLAVVALREGLDLPPTDDPMLLAYLLDPSNTTPEGVARRYGGLWTEDAAKRALLAERLHANLLGRLQGEERLLWLYEEVEKPLSRVLAHMEATGVKLDVAYLEALSLEVAAEMRRLEEEVFRLAGHSFRLNSRDQLERVLFDELGLPPIGKTEKTGKRSTSAAVLEALREVHPIVDKILQYRELAKLKGTYIDPLPALVHPKTGRLHTRFNQTATATGRLSSSDPNLQNIPVRTPLGQKIRRAFVAEEGWRLVALDYSQIELRVLAHLSGDENLIRVFQEGKDIHTQTASWMFGLSAEAIDPLMRRAAKTINFGVLYGMSAFRLSQELGIPYEEAAAFIQKYFQSYPKVKAWIEKTLEEGRTRGYVETLFGRRRYVPDLNARVKSVREAAERMAFNMPVQGTAADLMKLAMVRLFPQLREVGARMLLQVHDELLLEAPKERAEEVAALAKEVMEGVWPLAVPLEVEVGIGEDWLAAKG

SEQ ID NO: 2451 - DNA, 2529 bp, synthetic construct
  misc_feature 1..2529: note = Variant of DNA polymerase I from Thermus sp. strain 2.9
  source 1..2529: mol_type = other DNA
atgcaccatcatcatcatcatggcggtagcggcgtgttaccggtgttcgagcctaaaggtcgcgtgcttctggttgatggccatcatctcgcgtatcgtaacttctttgccctgaaaggattaaccaccagccgtggcgagccggtacagggtgtctacggctttgcaaagtcgctcctgaaagctctgaaagaagacggtgatgtggtgattgttgtctttgatgcgaaagcgccaagttttcgccacgaagcgtacgaagcttacaaagccgggcgtgctccaacgccggaagactttcctcgccaattggcgcttatgaaggaattagtggatttgcttggcctcgaacgcttggaagttcccggtttcgaggcagacgacgtattagcgactctcgcaaagaaagccgaacgtgagggctatgaagtccagatcttgacagcagatcgcgatcttttccagcttttatctccgcgcatctcggtgttacacccggaagggcatcgtatcaccccggaatggctctgggagaaatatggtttgcgtcccgaacaatgggtggattttcgcgccttagcaggcgatccgagcgacaatattccgggagttaaaggtatcggcgagaagacggcgctcaagctccttaaagaatgggggtcgttggagaacttgcttaagaatttagatcaggtcaaaccagagtcagtgcgtgagaagattcttgcacacctcgaagacctcaaattaagccgcgaattgtcccgtgtacgcaccgatttgccgctcgaagttgatttccgtcgccgccgcgaacctgactgggagggtcttaaagcgtttttagagcgtcttgaatttggttcgctcttgcatgaattcggccttttagaaagcccgttaccagccgaagaagcaccttggccaccgcccgaaggcgcgtttttaggttaccgtttgagtcgcccggaaccgatgtgggccgaattattggctcttgcagcgtctgcccagggacgtgtgtatcgcgcggaagaccctcatggtgcgctccgcggcctcttcgaagtccgtggactccttgccaaagacttagctgttgttgcattgcgcgaaggtcttgatttacctccgactgatgatccaatgcttcttgcgtacctcttggacccgtcaaacacgacgcccgaaggcgtagcccgtcgttacggcggcgagtggaccgaagatgcagcgaaacgcgcgttattggccgaacgtttgcacgccaatttattaggacgtttgcaaggcgaggaacgtctcctctggctttacgaagaagtggagaaaccattgagtcgcgtgctcgcgcatatggaagctaccggtgtcaaattagacgtggcgtatttggaggctctcagccttgaagttgctgccgaaatgcgccgcttggaggaagaagtattccgtttagcagcgcattcctttcgccttaattctcgcgatcagttagaacgtgtgttgttcgatgaacttggtctccctcctatcggcaagacagagaagaccggtaaacgtagcacttcagcggcggttttagaagctcttcgcgaagtccatcccattgtggacaagatcttgcagtaccgcgaactcgcgaaattgaaaggcacctatattgaccctcttccggcattagtccacccgaaaacgggacgcctccatacccgcttcaaccaaacagccacggcgaccggtcgtttgtcctcctctgatccaaaccttcagaatattccagtacgtaccccattgggccagaagatccgccgcgcgtttgtagctgaggagggttggcgtttagtggccctcgattatagccaaattgaattacgtgtccttgcccatctttctggcgatgagaacctcatccgcgtgtttcaggaaggcaaagacattcacactcaaacggcaagctggatgtttggattatcagctgaagcgatcgatcctttgatgcgtcgtgcagcgaagaccatcaatttcggtgttctctacggtatgagtgcctttcgtttgtcgcaggaattaggcattccctatgaagaagctgcggcgttcattcagaaatactttcaaagctatcccaaagttaaagcatggatcgagaagactctcgaagaaggccgcacacgtggttacgtagagaccttatttggacgtcgccgctatgttcccgatttaaacgctcgcgtgaaatctgtccgtgaagccgccgaacgcatggcgttcaacatgcctgtacagggcacggcagctgacctcatgaaacttgcaatggtgcgcctttttccacaattgcgtgaagttggtgcccgcatgctcttgcaggtccacgatgaactcttgttagaagcgccaaaagagcgtgcggaagaggtggcagccctcgcgaaagaggttatggaaggcgtgtggcccttagcggtgcctcttgaagtcgaagttggtattggcgaggattggctggctgccaaaggataatga

SEQ ID NO: 2452 - protein, 841 aa, synthetic construct
  REGION 1..841: note = Variant of DNA polymerase I from Thermus sp. strain 2.9
MHHHHHHGGSGVLPVFEPKGRVLLVDGHHLAYRNFFALKGLTTSRGEPVQGVYGFAKSLLKALKEDGDVVIVVFDAKAPSFRHEAYEAYKAGRAPTPEDFPRQLALMKELVDLLGLERLEVPGFEADDVLATLAKKAEREGYEVQILTADRDLFQLLSPRISVLHPEGHRITPEWLWEKYGLRPEQWVDFRALAGDPSDNIPGVKGIGEKTALKLLKEWGSLENLLKNLDQVKPESVREKILAHLEDLKLSRELSRVRTDLPLEVDFRRRREPDWEGLKAFLERLEFGSLLHEFGLLESPLPAEEAPWPPPEGAFLGYRLSRPEPMWAELLALAASAQGRVYRAEDPHGALRGLFEVRGLLAKDLAVVALREGLDLPPTDDPMLLAYLLDPSNTTPEGVARRYGGEWTEDAAKRALLAERLHANLLGRLQGEERLLWLYEEVEKPLSRVLAHMEATGVKLDVAYLEALSLEVAAEMRRLEEEVFRLAAHSFRLNSRDQLERVLFDELGLPPIGKTEKTGKRSTSAAVLEALREVHPIVDKILQYRELAKLKGTYIDPLPALVHPKTGRLHTRFNQTATATGRLSSSDPNLQNIPVRTPLGQKIRRAFVAEEGWRLVALDYSQIELRVLAHLSGDENLIRVFQEGKDIHTQTASWMFGLSAEAIDPLMRRAAKTINFGVLYGMSAFRLSQELGIPYEEAAAFIQKYFQSYPKVKAWIEKTLEEGRTRGYVETLFGRRRYVPDLNARVKSVREAAERMAFNMPVQGTAADLMKLAMVRLFPQLREVGARMLLQVHDELLLEAPKERAEEVAALAKEVMEGVWPLAVPLEVEVGIGEDWLAAKG

SEQ ID NO: 2453 - DNA, 2529 bp, synthetic construct
  misc_feature 1..2529: note = Variant of DNA polymerase I from Thermus sp. strain 2.9
  source 1..2529: mol_type = other DNA
atgcaccatcatcatcatcatggcggtagcggcgtgttaccggtgttcgagcctaaaggtcgcgtgcttctggttgatggccatcatctcgcgtatcgtaacttctttgccctgaaaggattaaccaccagccgtggcgagccggtacagggtgtctacggctttgcaaagtcgctcctgaaagctctgaaagaagacggtgatgtggtgattgttgtctttgatgcgaaagcgccaagttttcgccacgaagcgtacgaagcttacaaagccgggcgtgctccaacgccggaagactttcctcgccaattggcgcttatgaaggaattagtggatttgcttggcctcgaacgcttggaagttcccggtttcgaggcagacgacgtattagcgactctcgcaaagaaagccgaacgtgagggctatgaagtccagatcttgacagcagatcgcgatcttttccagcttttatctccgcgcatctcggtgttacacccggaagggcatcgtatcaccccggaatggctctgggagaaatatggtttgcgtcccgaacaatgggtggattttcgcgccttagcaggcgatccgagcgacaatattccgggagttaaaggtatcggcgagaagacggcgctcaagctccttaaagaatgggggtcgttggagaacttgcttaagaatttagatcaggtcaaaccagagtcagtgcgtgagaagattcttgcacacctcgaagacctcaaattaagccgcgaattgtcccgtgtacgcaccgatttgccgctcgaagttgatttcgggcgccgccgcgaacctgactgggagggtcttaaagcgtttttagagcgtcttgaatttggttcgctcttgcatgaattcggccttttagaaagcccgttaccagccgaagaagcaccttggccaccgcccgaaggcgcgtttttaggttaccgtttgagtcgcccggaaccgatgtgggccgaattattggctcttgcagcgtctgcccagggacgtgtgtatcgcgcggaagaccctcatggtgcgctccgcggcctcttcgaagtccgtggactccttgccaaagacttagctgttgttgcattgcgcgaaggtcttgatttacctccgactgatgatccaatgcttcttgcgtacctcttggacccgtcaaacacgacgcccgaaggcgtagcccgtcgttacggcggcgagtggaccgaagatgcagcgaaacgcgcgttattggccgaacgtttgcacgccaatttattaggacgtttgcaaggcgaggaacgtctcctctggctttacgaagaagtggagaaaccattgagtcgcgtgctcgcgcatatggaagctaccggtgtcaaattagacgtggcgtatttggaggctctcagccttgaagttgctgccgaaatgcgccgcttggaggaagaagtattccgtttagcaggccattcctttcgccttaattctcgcgatcagttagaacgtgtgttgttcgatgaacttggtctccctcctatcggcaagacagagaagaccggtaaacgtagcacttcagcggcggttttagaagctcttcgcgaagtccatcccattgtggacaagatcttgcagtaccgcgaactcgcgaaattgaaaggcacctatattgaccctcttccggcattagtccacccgaaaacgggacgcctccatacccgcttcaaccaaacagccacggcgaccggtcgtttgtcctcctctgatccaaaccttcagaatattccagtacgtaccccattgggccagaagatccgccgcgcgtttgtagctgaggagggttggcgtttagtggccctcgattatagccaaattgaattacgtgtccttgcccatctttctggcgatgagaacctcatccgcgtgtttcaggaaggcaaagacattcacactcaaacggcaagctggatgtttggattatcagctgaagcgatcgatcctttgatgcgtcgtgcagcgaagaccatcaatttcggtgttctctacggtatgagtgcctttcgtttgtcgcaggaattaggcattccctatgaagaagctgcggcgttcattcagaaatactttcaaagctatcccaaagttaaagcatggatcgagaagactctcgaagaaggccgcacacgtggttacgtagagaccttatttggacgtcgccgctatgttcccgatttaaacgctcgcgtgaaatctgtccgtgaagccgccgaacgcatggcgttcaacatgcctgtacagggcacggcagctgacctcatgaaacttgcaatggtgcgcctttttccacaattgcgtgaagttggtgcccgcatgctcttgcaggtccacgatgaactcttgttagaagcgccaaaagagcgtgcggaagaggtggcagccctcgcgaaagaggttatggaaggcgtgtggcccttagcggtgcctcttgaagtcgaagttggtattggcgaggattggctggctgccaaaggataatga

SEQ ID NO: 2454 - protein, 841 aa, synthetic construct
  REGION 1..841: note = Variant of DNA polymerase I from Thermus sp. strain 2.9
MHHHHHHGGSGVLPVFEPKGRVLLVDGHHLAYRNFFALKGLTTSRGEPVQGVYGFAKSLLKALKEDGDVVIVVFDAKAPSFRHEAYEAYKAGRAPTPEDFPRQLALMKELVDLLGLERLEVPGFEADDVLATLAKKAEREGYEVQILTADRDLFQLLSPRISVLHPEGHRITPEWLWEKYGLRPEQWVDFRALAGDPSDNIPGVKGIGEKTALKLLKEWGSLENLLKNLDQVKPESVREKILAHLEDLKLSRELSRVRTDLPLEVDFGRRREPDWEGLKAFLERLEFGSLLHEFGLLESPLPAEEAPWPPPEGAFLGYRLSRPEPMWAELLALAASAQGRVYRAEDPHGALRGLFEVRGLLAKDLAVVALREGLDLPPTDDPMLLAYLLDPSNTTPEGVARRYGGEWTEDAAKRALLAERLHANLLGRLQGEERLLWLYEEVEKPLSRVLAHMEATGVKLDVAYLEALSLEVAAEMRRLEEEVFRLAGHSFRLNSRDQLERVLFDELGLPPIGKTEKTGKRSTSAAVLEALREVHPIVDKILQYRELAKLKGTYIDPLPALVHPKTGRLHTRFNQTATATGRLSSSDPNLQNIPVRTPLGQKIRRAFVAEEGWRLVALDYSQIELRVLAHLSGDENLIRVFQEGKDIHTQTASWMFGLSAEAIDPLMRRAAKTINFGVLYGMSAFRLSQELGIPYEEAAAFIQKYFQSYPKVKAWIEKTLEEGRTRGYVETLFGRRRYVPDLNARVKSVREAAERMAFNMPVQGTAADLMKLAMVRLFPQLREVGARMLLQVHDELLLEAPKERAEEVAALAKEVMEGVWPLAVPLEVEVGIGEDWLAAKG

SEQ ID NO: 2455 - DNA, 2529 bp, synthetic construct
  misc_feature 1..2529: note = Variant of DNA polymerase I from Thermus sp. strain 2.9
  source 1..2529: mol_type = other DNA
atgcaccatcatcatcatcatggcggtagcggcgtgttaccggtgttcgagcctaaaggtcgcgtgcttctggttgatggccatcatctcgcgtatcgtaacttctttgccctgaaaggattaaccaccagccgtggcgagccggtacagggtgtctacggctttgcaaagtcgctcctgaaagctctgaaagaagacggtgatgtggtgattgttgtctttgatgcgaaagcgccaagttttcgccacgaagcgtacgaagcttacaaagccgggcgtgctccaacgccggaagactttcctcgccaattggcgcttatgaaggaattagtggatttgcttggcctcgaacgcttggaagttcccggtttcgaggcagacgacgtattagcgactctcgcaaagaaagccgaacgtgagggctatgaagtccagatcttgacagcagatcgcgatcttttccagcttttatctccgcgcatctcggtgttacacccggaagggcatcgtatcaccccggaatggctctgggagaaatatggtttgcgtcccgaacaatgggtggattttcgcgccttagcaggcgatccgagcgacaatattccgggagttaaaggtatcggcgagaagacggcgctcaagctccttaaagaatgggggtcgttggagaacttgcttaagaatttagatcaggtcaaaccagagtcagtgcgtgagaagattcttgcacacctcgaagacctcaaattaagccgcgaattgtcccgtgtacgcaccgatttgccgctcgaagttgatttccgtcgccgccgcgaacctgactgggagggtcttaaagcgtttttagagcgtcttgaatttggttcgctcttgcatgaattcggccttttagaaagcccgttaccagccgaagaagcaccttggccaccgcccgaaggcgcgtttttaggttaccgtttgagtcgcccggaaccgatgtgggccgaattattggctcttgcagcgtctgcccagggacgtgtgtatcgcgcggaagaccctcatggtgcgctccgcggcctcttcgaagtccgtggactccttgccaaagacttagctgttgttgcattgcgcgaaggtcttgatttacctccgactgatgatccaatgcttcttgcgtacctcttggacccgtcaaacacgacgcccgaaggcgtagcccgtcgttacggcggcgagtggaccgaagatgcagcgaaacgcgcgttattggccgaacgtttgcacgccaatttattaggacgtttgcaaggcgaggaacgtctcctctggctttacgaagaagtggagaaaccattgagtcgcgtgctcgcgcatatggaagctaccggtgtcaaattagacgtggcgtatttggaggctctcagccttgaagttgctgccgaaatgcgccgcttggaggaagaagtattccgtttagcaggccactcctttcgccttgtgtctcgcgatcagttagaacgtgtgttgttcgatgaacttggtctccctcctatcggcaagacagagaagaccggtaaacgtagcacttcagcggcggttttagaagctcttcgcgaagtccatcccattgtggacaagatcttgcagtaccgcgaactcgcgaaattgaaaggcacctatattgaccctcttccggcattagtccacccgaaaacgggacgcctccatacccgcttcaaccaaacagccacggcgaccggtcgtttgtcctcctctgatccaaaccttcagaatattccagtacgtaccccattgggccagaagatccgccgcgcgtttgtagctgaggagggttggcgtttagtggccctcgattatagccaaattgaattacgtgtccttgcccatctttctggcgatgagaacctcatccgcgtgtttcaggaaggcaaagacattcacactcaaacggcaagctggatgtttggattatcagctgaagcgatcgatcctttgatgcgtcgtgcagcgaagaccatcaatttcggtgttctctacggtatgagtgcctttcgtttgtcgcaggaattaggcattccctatgaagaagctgcggcgttcattcagaaatactttcaaagctatcccaaagttaaagcatggatcgagaagactctcgaagaaggccgcacacgtggttacgtagagaccttatttggacgtcgccgctatgttcccgatttaaacgctcgcgtgaaatctgtccgtgaagccgccgaacgcatggcgttcaacatgcctgtacagggcacggcagctgacctcatgaaacttgcaatggtgcgcctttttccacaattgcgtgaagttggtgcccgcatgctcttgcaggtccacgatgaactcttgttagaagcgccaaaagagcgtgcggaagaggtggcagccctcgcgaaagaggttatggaaggcgtgtggcccttagcggtgcctcttgaagtcgaagttggtattggcgaggattggctggctgccaaaggataatga

SEQ ID NO: 2456 - protein, 841 aa, synthetic construct
  REGION 1..841: note = Variant of DNA polymerase I from Thermus sp. strain 2.9
MHHHHHHGGSGVLPVFEPKGRVLLVDGHHLAYRNFFALKGLTTSRGEPVQGVYGFAKSLLKALKEDGDVVIVVFDAKAPSFRHEAYEAYKAGRAPTPEDFPRQLALMKELVDLLGLERLEVPGFEADDVLATLAKKAEREGYEVQILTADRDLFQLLSPRISVLHPEGHRITPEWLWEKYGLRPEQWVDFRALAGDPSDNIPGVKGIGEKTALKLLKEWGSLENLLKNLDQVKPESVREKILAHLEDLKLSRELSRVRTDLPLEVDFRRRREPDWEGLKAFLERLEFGSLLHEFGLLESPLPAEEAPWPPPEGAFLGYRLSRPEPMWAELLALAASAQGRVYRAEDPHGALRGLFEVRGLLAKDLAVVALREGLDLPPTDDPMLLAYLLDPSNTTPEGVARRYGGEWTEDAAKRALLAERLHANLLGRLQGEERLLWLYEEVEKPLSRVLAHMEATGVKLDVAYLEALSLEVAAEMRRLEEEVFRLAGHSFRLVSRDQLERVLFDELGLPPIGKTEKTGKRSTSAAVLEALREVHPIVDKILQYRELAKLKGTYIDPLPALVHPKTGRLHTRFNQTATATGRLSSSDPNLQNIPVRTPLGQKIRRAFVAEEGWRLVALDYSQIELRVLAHLSGDENLIRVFQEGKDIHTQTASWMFGLSAEAIDPLMRRAAKTINFGVLYGMSAFRLSQELGIPYEEAAAFIQKYFQSYPKVKAWIEKTLEEGRTRGYVETLFGRRRYVPDLNARVKSVREAAERMAFNMPVQGTAADLMKLAMVRLFPQLREVGARMLLQVHDELLLEAPKERAEEVAALAKEVMEGVWPLAVPLEVEVGIGEDWLAAKG

SEQ ID NO: 2457 - DNA, 2529 bp, synthetic construct
  misc_feature 1..2529: note = Variant of DNA polymerase I from Thermus sp. strain 2.9
  source 1..2529: mol_type = other DNA
atgcaccatcatcatcatcatggcggtagcggcgtgttaccggtgttcgagcctaaaggtcgcgtgcttctggttgatggccatcatctcgcgtatcgtaacttctttgccctgaaaggattaaccaccagccgtggcgagccggtacagggtgtctacggctttgcaaagtcgctcctgaaagctctgaaagaagacggtgatgtggtgattgttgtctttgatgcgaaagcgccaagttttcgccacgaagcgtacgaagcttacaaagccgggcgtgctccaacgccggaagactttcctcgccaattggcgcttatgaagtgtttagtggatttgcttggcctcgaacgcttggaagttcccggtttcgaggcagacgacgtattagcgactctcgcaaagaaagccgaacgtgagggctatgaagtccagatcttgacagcagatcgcgatcttttccagcttttatctccgcgcatctcggtgttacacccggaagggcatcgtatcaccccggaatggctctgggagaaatatggtttgcgtcccgaacaatgggtggattttcgcgccttagcaggcgatccgagcgacaatattccgggagttaaaggtatcggcgagaagacggcgctcaagctccttaaagaatgggggtcgttggagaacttgcttaagaatttagatcaggtcaaaccagagtcagtgcgtgagaagattcttgcacacctcgaagacctcaaattaagccgcgaattgtcccgtgtacgcaccgatttgccgctcgaagttgatttccgtcgccgccgcgaacctgactgggagggtcttaaagcgtttttagagcgtcttgaatttggttcgctcttgcatgaattcggccttttagaaagcccgttaccagccgaagaagcaccttggccaccgcccgaaggcgcgtttttaggttaccgtttgagtcgcccggaaccgatgtgggccgaattattggctcttgcagcgtctgcccagggacgtgtgtatcgcgcggaagaccctcatggtgcgctccgcggcctcttcgaagtccgtggactccttgccaaagacttagctgttgttgcattgcgcgaaggtcttgatttacctccgactgatgatccaatgcttcttgcgtacctcttggacccgtcaaacacgacgcccgaaggcgtagcccgtcgttacggcggcgagtggaccgaagatgcagcgaaacgcgcgttattggccgaacgtttgcacgccaatttattaggacgtttgcaaggcgaggaacgtctcctctggctttacgaagaagtggagaaaccattgagtcgcgtgctcgcgcatatggaagctaccggtgtcaaattagacgtggcgtatttggaggctctcagccttgaagttgctgccgaaatgcgccgcttggaggaagaagtattccgtttagcaggccattcctttcgccttaattctcgcgatcagttagaacgtgtgttgttcgatgaacttggtctccctcctatcggcaagacagagaagaccggtaaacgtagcacttcagcggcggttttagaagctcttcgcgaagtccatcccattgtggacaagatcttgcagtaccgcgaactcgcgaaattgaaaggcacctatattgaccctcttccggcattagtccacccgaaaacgggacgcctccatacccgcttcaaccaaacagccacggcgaccggtcgtttgtcctcctctgatccaaaccttcagaatattccagtacgtaccccattgggccagaagatccgccgcgcgtttgtagctgaggagggttggcgtttagtggccctcgattatagccaaattgaattacgtgtccttgcccatctttctggcgatgagaacctcatccgcgtgtttcaggaaggcaaagacattcacactcaaacggcaagctggatgtttggattatcagctgaagcgatcgatcctttgatgcgtcgtgcagcgaagaccatcaatttcggtgttctctacggtatgagtgcctttcgtttgtcgcaggaattaggcattccctatgaagaagctgcggcgttcattcagaaatactttcaaagctatcccaaagttaaagcatggatcgagaagactctcgaagaaggccgcacacgtggttacgtagagaccttatttggacgtcgccgctatgttcccgatttaaacgctcgcgtgaaatctgtccgtgaagccgccgaacgcatggcgttcaacatgcctgtacagggcacggcagctgacctcatgaaacttgcaatggtgcgcctttttccacaattgcgtgaagttggtgcccgcatgctcttgcaggtccacgatgaactcttgttagaagcgccaaaagagcgtgcggaagaggtggcagccctcgcgaaagaggttatggaaggcgtgtggcccttagcggtgcctcttgaagtcgaagttggtattggcgaggattggctggctgccaaaggataatga

SEQ ID NO: 2458 - protein, 841 aa, synthetic construct
  REGION 1..841: note = Variant of DNA polymerase I from Thermus sp. strain 2.9
MHHHHHHGGSGVLPVFEPKGRVLLVDGHHLAYRNFFALKGLTTSRGEPVQGVYGFAKSLLKALKEDGDVVIVVFDAKAPSFRHEAYEAYKAGRAPTPEDFPRQLALMKCLVDLLGLERLEVPGFEADDVLATLAKKAEREGYEVQILTADRDLFQLLSPRISVLHPEGHRITPEWLWEKYGLRPEQWVDFRALAGDPSDNIPGVKGIGEKTALKLLKEWGSLENLLKNLDQVKPESVREKILAHLEDLKLSRELSRVRTDLPLEVDFRRRREPDWEGLKAFLERLEFGSLLHEFGLLESPLPAEEAPWPPPEGAFLGYRLSRPEPMWAELLALAASAQGRVYRAEDPHGALRGLFEVRGLLAKDLAVVALREGLDLPPTDDPMLLAYLLDPSNTTPEGVARRYGGEWTEDAAKRALLAERLHANLLGRLQGEERLLWLYEEVEKPLSRVLAHMEATGVKLDVAYLEALSLEVAAEMRRLEEEVFRLAGHSFRLNSRDQLERVLFDELGLPPIGKTEKTGKRSTSAAVLEALREVHPIVDKILQYRELAKLKGTYIDPLPALVHPKTGRLHTRFNQTATATGRLSSSDPNLQNIPVRTPLGQKIRRAFVAEEGWRLVALDYSQIELRVLAHLSGDENLIRVFQEGKDIHTQTASWMFGLSAEAIDPLMRRAAKTINFGVLYGMSAFRLSQELGIPYEEAAAFIQKYFQSYPKVKAWIEKTLEEGRTRGYVETLFGRRRYVPDLNARVKSVREAAERMAFNMPVQGTAADLMKLAMVRLFPQLREVGARMLLQVHDELLLEAPKERAEEVAALAKEVMEGVWPLAVPLEVEVGIGEDWLAAKG

SEQ ID NO: 2459 - DNA, 2529 bp, synthetic construct
  misc_feature 1..2529: note = Variant of DNA polymerase I from Thermus sp. strain 2.9
  source 1..2529: mol_type = other DNA
atgcaccatcatcatcatcatggcggtagcggcgtgttaccggtgttcgagcctaaaggtcgcgtgcttctggttgatggccatcatctcgcgtatcgtaacttctttgccctgaaaggattaaccaccagccgtggcgagccggtacagggtgtctacggctttgcaaagtcgctcctgaaagctctgaaagaagacggtgatgtggtgattgttgtctttgatgcgaaagcgccaagttttcgccacgaagcgtacgaagcttacaaagccgggcgtgctccaacgccggaagactttcctcgccaattggcgcttatgaaggaattagtggatttgcttggcctcgaacgcttggaagttcccggtttcgaggcagacgacgtattagcgactctcgcaaagaaagccgaacgtgagggctatgaagtccagatcttgacagcagatcgcgatcttttccagcttttatctccgcgcatctcggtgttacacccggaagggcatcgtatcaccccggaatggctctgggagaaatatggtttgcgtcccgaacaatgggtggattttcgcgccttagcaggcgatccgagcgacaatattccgggagttaaaggtatcggcgagaagacggcgctcaagctccttaaagaatgggggtcgttggagaacttgcttaagaatttagatcaggtcaaaccagagtcagtgcgtgagaagattcttgcacacctcgaagacctcaaattaagccgcgaattgtcccgtgtacgcaccgatttgccgctcgaagttgatttccgtcgccgccgcgaacctgactgggagggtcttaaagcgtttttagagcgtcttgaatttggttcgctcttgcatgaattcggccttttagaaagcctgttaccagccgaagaagcaccttggccaccgcccgaaggcgcgtttttaggttaccgtttgagtcgcccggaaccgatgtgggccgaattattggctcttgcagcgtctgcccagggacgtgtgtatcgcgcggaagaccctcatggtgcgctccgcggcctcttcgaagtccgtggactccttgccaaagacttagctgttgttgcattgcgcgaaggtcttgatttacctccgactgatgatccaatgcttcttgcgtacctcttggacccgtcaaacacgacgcccgaaggcgtagcccgtcgttacggcggcgagtggaccgaagatgcagcgaaacgcgcgttattggccgaacgtttgcacgccaatttattaggacgtttgcaaggcgaggaacgtctcctctggctttacgaagaagtggagaaaccattgagtcgcgtgctcgcgcatatggaagctaccggtgtcaaattagacgtggcgtatttggaggctctcagccttgaagttgctgccgaaatgcgccgcttggaggaagaagtattccgtttagcaggccattcctttcgccttaattctcgcgatcagttagaacgtgtgttgttcgatgaacttggtctccctcctatcggcaagacagagaagaccggtaaacgtagcacttcagcggcggttttagaagctcttcgcgaagtccatcccattgtggacaagatcttgcagtaccgcgaactcgcgaaattgaaaggcacctatattgaccctcttccggcattagtccacccgaaaacgggacgcctccatacccgcttcaaccaaacagccacggcgaccggtcgtttgtcctcctctgatccaaaccttcagaatattccagtacgtaccccattgggccagaagatccgccgcgcgtttgtagctgaggagggttggcgtttagtggccctcgattatagccaaattgaattacgtgtccttgcccatctttctggcgatgagaacctcatccgcgtgtttcaggaaggcaaagacattcacactcaaacggcaagctggatgtttggattatcagctgaagcgatcgatcctttgatgcgtcgtgcagcgaagaccatcaatttcggtgttctctacggtatgagtgcctttcgtttgtcgcaggaattaggcattccctatgaagaagctgcggcgttcattcagaaatactttcaaagctatcccaaagttaaagcatggatcgagaagactctcgaagaaggccgcacacgtggttacgtagagaccttatttggacgtcgccgctatgttcccgatttaaacgctcgcgtgaaatctgtccgtgaagccgccgaacgcatggcgttcaacatgcctgtacagggcacggcagctgacctcatgaaacttgcaatggtgcgcctttttccacaattgcgtgaagttggtgcccgcatgctcttgcaggtccacgatgaactcttgttagaagcgccaaaagagcgtgcggaagaggtggcagccctcgcgaaagaggttatggaaggcgtgtggcccttagcggtgcctcttgaagtcgaagttggtattggcgaggattggctggctgccaaaggataatga

SEQ ID NO: 2460 - protein, 841 aa, synthetic construct
  REGION 1..841: note = Variant of DNA polymerase I from Thermus sp. strain 2.9
MHHHHHHGGSGVLPVFEPKGRVLLVDGHHLAYRNFFALKGLTTSRGEPVQGVYGFAKSLLKALKEDGDVVIVVFDAKAPSFRHEAYEAYKAGRAPTPEDFPRQLALMKELVDLLGLERLEVPGFEADDVLATLAKKAEREGYEVQILTADRDLFQLLSPRISVLHPEGHRITPEWLWEKYGLRPEQWVDFRALAGDPSDNIPGVKGIGEKTALKLLKEWGSLENLLKNLDQVKPESVREKILAHLEDLKLSRELSRVRTDLPLEVDFRRRREPDWEGLKAFLERLEFGSLLHEFGLLESLLPAEEAPWPPPEGAFLGYRLSRPEPMWAELLALAASAQGRVYRAEDPHGALRGLFEVRGLLAKDLAVVALREGLDLPPTDDPMLLAYLLDPSNTTPEGVARRYGGEWTEDAAKRALLAERLHANLLGRLQGEERLLWLYEEVEKPLSRVLAHMEATGVKLDVAYLEALSLEVAAEMRRLEEEVFRLAGHSFRLNSRDQLERVLFDELGLPPIGKTEKTGKRSTSAAVLEALREVHPIVDKILQYRELAKLKGTYIDPLPALVHPKTGRLHTRFNQTATATGRLSSSDPNLQNIPVRTPLGQKIRRAFVAEEGWRLVALDYSQIELRVLAHLSGDENLIRVFQEGKDIHTQTASWMFGLSAEAIDPLMRRAAKTINFGVLYGMSAFRLSQELGIPYEEAAAFIQKYFQSYPKVKAWIEKTLEEGRTRGYVETLFGRRRYVPDLNARVKSVREAAERMAFNMPVQGTAADLMKLAMVRLFPQLREVGARMLLQVHDELLLEAPKERAEEVAALAKEVMEGVWPLAVPLEVEVGIGEDWLAAKG

SEQ ID NO: 2461 - DNA, 2529 bp, synthetic construct
  misc_feature 1..2529: note = Variant of DNA polymerase I from Thermus sp. strain 2.9
  source 1..2529: mol_type = other DNA
atgcaccatcatcatcatcatggcggtagcggcgtgttaccggtgttcgagcctaaaggtcgcgtgcttctggttgatggccatcatctcgcgtatcgtaacttctttgccctgaaaggattaaccaccagccgtggcgagccggtacagggtgtctacggctttgcaaagtcgctcctgaaagctctgaaagaagacggtgatgtggtgattgttgtctttgatgcgaaagcgccaagttttcgccacgaagcgtacgaagcttacaaagccgggcgtgctccaacgccggaagactttcctcgccaattggcgcttatgaaggaattagtggatttgcttggcctcgaacgcttggaagttcccggtttcgaggcagacgacgtattagcgactctcgcaaagaaagccgaacgtgagggctatgaagtccagatcttgacagcagatcgcgatcttttccagcttttatctccgcgcatctcggtgttacacccggaagggcatcgtatcaccccggaatggctctgggagaaatatggtttgcgtcccgaacaatgggtggattttcgcgccttagcaggcgatccgagcgacaatattccgggagttaaaggtatcggcgagaagacggcgctcaagctccttaaagaatgggggtcgttggagaacttgcttaagaatttagatcaggtcaaaccagagtcagtgcgtgagaagattcttgcacacctcgaagacctcaaattaagccgcgaattgtcccgtgtacgcaccgatttgccgctcgaagttgatttccgtcgccgccgcgaacctgactgggagggtcttaaagcgtttttagagcgtcttgaatttggttcgctcttgcatgaattcggccttttagaaagcccgttaccagccgaagaagcaccttggccaccgcccgaaggcgcgtttttaggttaccgtttgagtcgcccggaaccgatgtgggccgaattattggctcttgcagcgtctgcccagggacgtgtgtatcgcgcggaagaccctcatggtgcgctccgcggcctcttcgaagtccgtggactccttgccaaagacttagctgttgttgcattgcgcgaaggtcttgatttacctccgactgatgatccaatgcttcttgcgtacctcttggacccgtcaaacacgacgcccgaaggcgtagcccgtcgttacggcggcgagtggaccgaagatgcagcgaaacgcgcgttattggccgaacgtttgcacgccaatttattaggacgtttgcaaggcgaggaacgtctcctctggctttacgaagaagtggagaaaccattgagtcgcgtgctcgcgcatatggaagctaccggtgtcaaattagacgtggcgtatttggaggctctcagccttgaagttgctgccgaaatgcgccgcttggaggaagaagtattccgtttagcaggccattcctttcgccttaattctcgcgatcagttagaacgtgtgttgttcgatgaacttggtctccctcctatcggcaagacagagaagaccggtaaacgtagcacttcagcggcggttttagaagctcttcgcgaagtccatcccattgtggacaagatcttgcagtaccgcgaactcgcgaaattgaaaggcacctatattgaccctcttccggcattagtccacccgaaaacgggacgcctccatacccgcttcaaccaaacagccacggcgaccggtcgtttgtcctcctctgatccaaaccttcagaatattccagtacgtaccccattgggccagaagatccgccgcgcgtttgtagctgaggagggttggcgtttagtggccctcgattatcagcaaattgaattacgtgtccttgcccatctttctggcgatgagaacctcatccgcgtgtttcaggaaggcaaagacattcacactcaaacggcaagctggatgtttggattatcagctgaagcgatcgatcctttgatgcgtcgtgcagcgaagaccatcaatttcggtgttctctacggtatgagtgcctttcgtttgtcgcaggaattaggcattccctatgaagaagctgcggcgttcattcagaaatactttcaaagctatcccaaagttaaagcatggatcgagaagactctcgaagaaggccgcacacgtggttacgtagagaccttatttggacgtcgccgctatgttcccgatttaaacgctcgcgtgaaatctgtccgtgaagccgccgaacgcatggcgttcaacatgcctgtacagggcacggcagctgacctcatgaaacttgcaatggtgcgcctttttccacaattgcgtgaagttggtgcccgcatgctcttgcaggtccacgatgaactcttgttagaagcgccaaaagagcgtgcggaagaggtggcagccctcgcgaaagaggttatggaaggcgtgtggcccttagcggtgcctcttgaagtcgaagttggtattggcgaggattggctggctgccaaaggataatga

SEQ ID NO: 2462 - protein, 841 aa, synthetic construct
  REGION 1..841: note = Variant of DNA polymerase I from Thermus sp. strain 2.9
MHHHHHHGGSGVLPVFEPKGRVLLVDGHHLAYRNFFALKGLTTSRGEPVQGVYGFAKSLLKALKEDGDVVIVVFDAKAPSFRHEAYEAYKAGRAPTPEDFPRQLALMKELVDLLGLERLEVPGFEADDVLATLAKKAEREGYEVQILTADRDLFQLLSPRISVLHPEGHRITPEWLWEKYGLRPEQWVDFRALAGDPSDNIPGVKGIGEKTALKLLKEWGSLENLLKNLDQVKPESVREKILAHLEDLKLSRELSRVRTDLPLEVDFRRRREPDWEGLKAFLERLEFGSLLHEFGLLESPLPAEEAPWPPPEGAFLGYRLSRPEPMWAELLALAASAQGRVYRAEDPHGALRGLFEVRGLLAKDLAVVALREGLDLPPTDDPMLLAYLLDPSNTTPEGVARRYGGEWTEDAAKRALLAERLHANLLGRLQGEERLLWLYEEVEKPLSRVLAHMEATGVKLDVAYLEALSLEVAAEMRRLEEEVFRLAGHSFRLNSRDQLERVLFDELGLPPIGKTEKTGKRSTSAAVLEALREVHPIVDKILQYRELAKLKGTYIDPLPALVHPKTGRLHTRFNQTATATGRLSSSDPNLQNIPVRTPLGQKIRRAFVAEEGWRLVALDYQQIELRVLAHLSGDENLIRVFQEGKDIHTQTASWMFGLSAEAIDPLMRRAAKTINFGVLYGMSAFRLSQELGIPYEEAAAFIQKYFQSYPKVKAWIEKTLEEGRTRGYVETLFGRRRYVPDLNARVKSVREAAERMAFNMPVQGTAADLMKLAMVRLFPQLREVGARMLLQVHDELLLEAPKERAEEVAALAKEVMEGVWPLAVPLEVEVGIGEDWLAAKG

SEQ ID NO: 2463 - DNA, 2529 bp, synthetic construct
  misc_feature 1..2529: note = Variant of DNA polymerase I from Thermus sp. strain 2.9
  source 1..2529: mol_type = other DNA
atgcaccatcatcatcatcatggcggtagcggcgtgttaccggtgttcgagcctaaaggtcgcgtgcttctggttgatggccatcatctcgcgtatcgtaacttctttgccctgaaaggattaaccaccagccgtggcgagccggtacagggtgtctacggctttgcaaagtcgctcctgaaagctctgaaagaagacggtgatgtggtgattgttgtctttgatgcgaaagcgccaagttttcgccacgaagcgtacgaagcttacaaagccgggcgtgctccaacgccggaagactttcctcgccaattggcgcttatgaaggaattagtggatttgcttggcctcgaacgcttggaagttcccggtttcgaggcagacgacgtattagcgactctcgcaaagaaagccgaacgtgagggctatgaagtccagatcttgacagcagatcgcgatcttttccagcttttatctccgcgcatctcggtgttacacccggaagggcatcgtatcaccccggaatggctctgggagaaatatggtttgcgtcccgaacaatgggtggattttcgcgccttagcaggcgatccgagcgacaatattccgggagttaaaggtatcggcgagaagacggcgctcaagctccttaaagaatgggggtcgttggagaacttgcttaagaatttagatcaggtcaaaccagagtcagtgcgtgagaagattcttgcacacctcgaagacctcaaattaagccgcgaattgtcccgtgtacgcaccgatttgccgctcgaagttgatttccgtcgccgccgcgaacctgactgggagggtcttaaagcgtttttagagcgtcttgaatttggttcgctcttgcatgaattcggccttttagaaagcccgttaccagccgaagaagcaccttggccaccgcccgaaggcgcgtttttaggttaccgtttgagtcgcccggaaccgatgtgggccgaattattggctcttgcagcgtctgcccagggacgtgtgtatcgcgcggaagaccctcatggtgcgctccgcggcctcttcgaagtccgtggactccttgccaaagacttagctgttgttgcattgcgcgaaggtcttgatttacctccgactgatgatccaatgcttcttgcgtacctcttggacccgtcaaacacgacgcccgaaggcgtagcccgtcgttacggcggcgagtggaccgaagatgcagcgaaacgcgcgttattggccgaacgtttgcacgccaatttattaggacgtttgcaaggcgaggaacgtctcctctggctttacgaagaagtggagaaaccattgagtcgcgtgctcgcgcatatggaagctaccggtgtcaaattagacgtggcgtatttggaggctctcagccttgaagttgctgccgaaatgcgccgcttggaggaagaagtattccgtttagcaggccattcctttcgccttaattctcgcgatcagttagaacgtgtgttgttcgatgaacttggtctccctcctatcggcaagacagagaagaccggtaaacgtagcacttcagcggcggttttagaagctcttcgcgaagtccatcccattgtggacaagatcttgcagtaccgcgaactcgcgaaattgaaaggcacctatattgacctgcttccggcattagtccacccgaaaacgggacgcctccatacccgcttcaaccaaacagccacggcgaccggtcgtttgtcctcctctgatccaaaccttcagaatattccagtacgtaccccattgggccagaagatccgccgcgcgtttgtagctgaggagggttggcgtttagtggccctcgattatagccaaattgaattacgtgtccttgcccatctttctggcgatgagaacctcatccgcgtgtttcaggaaggcaaagacattcacactcaaacggcaagctggatgtttggattatcagctgaagcgatcgatcctttgatgcgtcgtgcagcgaagaccatcaatttcggtgttctctacggtatgagtgcctttcgtttgtcgcaggaattaggcattccctatgaagaagctgcggcgttcattcagaaatactttcaaagctatcccaaagttaaagcatggatcgagaagactctcgaagaaggccgcacacgtggttacgtagagaccttatttggacgtcgccgctatgttcccgatttaaacgctcgcgtgaaatctgtccgtgaagccgccgaacgcatggcgttcaacatgcctgtacagggcacggcagctgacctcatgaaacttgcaatggtgcgcctttttccacaattgcgtgaagttggtgcccgcatgctcttgcaggtccacgatgaactcttgttagaagcgccaaaagagcgtgcggaagaggtggcagccctcgcgaaagaggttatggaaggcgtgtggcccttagcggtgcctcttgaagtcgaagttggtattggcgaggattggctggctgccaaaggataatga

SEQ ID NO: 2464 - protein, 841 aa, synthetic construct
  REGION 1..841: note = Variant of DNA polymerase I from Thermus sp. strain 2.9
MHHHHHHGGSGVLPVFEPKGRVLLVDGHHLAYRNFFALKGLTTSRGEPVQGVYGFAKSLLKALKEDGDVVIVVFDAKAPSFRHEAYEAYKAGRAPTPEDFPRQLALMKELVDLLGLERLEVPGFEADDVLATLAKKAEREGYEVQILTADRDLFQLLSPRISVLHPEGHRITPEWLWEKYGLRPEQWVDFRALAGDPSDNIPGVKGIGEKTALKLLKEWGSLENLLKNLDQVKPESVREKILAHLEDLKLSRELSRVRTDLPLEVDFRRRREPDWEGLKAFLERLEFGSLLHEFGLLESPLPAEEAPWPPPEGAFLGYRLSRPEPMWAELLALAASAQGRVYRAEDPHGALRGLFEVRGLLAKDLAVVALREGLDLPPTDDPMLLAYLLDPSNTTPEGVARRYGGEWTEDAAKRALLAERLHANLLGRLQGEERLLWLYEEVEKPLSRVLAHMEATGVKLDVAYLEALSLEVAAEMRRLEEEVFRLAGHSFRLNSRDQLERVLFDELGLPPIGKTEKTGKRSTSAAVLEALREVHPIVDKILQYRELAKLKGTYIDLLPALVHPKTGRLHTRFNQTATATGRLSSSDPNLQNIPVRTPLGQKIRRAFVAEEGWRLVALDYSQIELRVLAHLSGDENLIRVFQEGKDIHTQTASWMFGLSAEAIDPLMRRAAKTINFGVLYGMSAFRLSQELGIPYEEAAAFIQKYFQSYPKVKAWIEKTLEEGRTRGYVETLFGRRRYVPDLNARVKSVREAAERMAFNMPVQGTAADLMKLAMVRLFPQLREVGARMLLQVHDELLLEAPKERAEEVAALAKEVMEGVWPLAVPLEVEVGIGEDWLAAKG

SEQ ID NO: 2465 - DNA, 2529 bp, synthetic construct
  misc_feature 1..2529: note = Variant of DNA polymerase I from Thermus sp. strain 2.9
  source 1..2529: mol_type = other DNA
atgcaccatcatcatcatcatggcggtagcggcgtgttaccggtgttcgagcctaaaggtcgcgtgcttctggttgatggccatcatctcgcgtatcgtaacttctttgccctgaaaggattaaccaccagccgtggcgagccggtacagggtgtctacggctttgcaaagtcgctcctgaaagctctgaaagaagacggtgatgtggtgattgttgtctttgatgcgaaagcgccaagttttcgccacgaagcgtacgaagcttacaaagccgggcgtgctccaacgccggaagactttcctcgccaattggcgcttatgaaggaattagtggatttgcttggcctcgaacgcttggaagttcccggtttcgaggcagacgacgtattagcgactctcgcaaagaaagccgaacgtgagggctatgaagtccagatcttgacagcagatcgcgatcttttccagcttttatctccgcgcatctcggtgttacacccggaagggcatcgtatcaccccggaatggctctgggagaaatatggtttgcgtcccgaacaatgggtggattttcgcgccttagcaggcgatccgagcgacaatattccgggagttaaaggtatcggcgagaagacggcgctcaagctccttaaagaatgggggtcgttggagaacttgcttaagaatttagatcaggtcaaaccagagtcagtgcgtgagaagattcttgcacacctcgaagacctcaaattaagccgcgaattgtcccgtgtacgcaccgatttgccgctcgaagttgatttccgtcgccgccgcgaacctgactgggagggtcttaaagcgtttttagagcgtcttgaatttggttcgctcttgcatgaattcggccttttagaaagcccgttaccagccgaagaagcaccttggccaccgcccgaaggcgcgtttttaggttaccgtttgagtcgcccggaaccgatgtgggccgaattattggctcttgcagcgtctgcccagggacgtgtgtatcgcgcggaagaccctcatggtgcgctccgcggcctcttcgaagtccgtggactccttgccaaagacttagctgttgttgcattgcgcgaaggtcttgatttacctccgactgatgatccaatgcttcttgcgtacctcttggacccgtcaaacacgacgcccgaaggcgtagcccgtcgttacggcggcgagtggaccgaagatgcagcgaaacgcgcgttattggccgaacgtttgcacgccaatttattaggacgtttgcaaggcgaggaacgtctcctctggctttacgaagaagtggagaaaccattgagtcgcgtgctcgcgcatatggaagctaccggtgtcaaattagacgtggcgtatttggaggctctcagccttgaagttgctgccgaaatgcgccgcttggaggaagaagtattccgtttagcaggccattcctttcgccttaattctcgcgatcagttagaacgtgtgttgttcgatgaacttggtctccctcctatcggcaagacagagaagaccggtaaacgtagcacttcagcggcggttttagaagctcttcgcgaagtccatcccattgtggacaagatcttgcagtaccgcgaactcgcgaaattgaaaggcacctatattgaccctcttccggcattagtccacccgaaaacgggacgcctccatacccgcttcaaccaaacagccacggcgaccggtcgtttgtcctcctctgatccaaaccttcagaatattccagtacgtaccccattgggccagaagatccgccgcgcgtttgtagctgaggagggttggcgtttagtggccctcgattatagccaaattgaattacgtgtccttgcccatctttctggcgatgagaacctcatccgcgtgtttcaggaaggcaaagacattcacactcaaacggcaagctggatgtttggattatcagctgaagcgatcgatcctttgatgcgtcgtgcagcgaagaccatcaatttcggtgttctctacggtatgagtgcctttcgtttgtcgcaggaattaggcattccctatgaagaagctgcggcgttcattcagaaatactttcaaagctatcccaaagttaaagcatggatcgagaagactctcgaagaaggccgcacacgtggttacgtagagaccttatttggacgtcgccgctatgttcccgatttaaacgctcgcgtgaaatctgtccgtgaagccgccgaacgcatggcgttcaacatgcctgtacagggcacggcagctgacctcatgaaacttgcaatggtgcgcctttttccacaattgcgtgaagttggtgcccgcatgctcttgcaggtccacgatgaactcttgttagaagcgccaaaagagcgtgcggaagaggtggcagccctcgcgaaagaggttatggaaggcgtgtggcccttagcggtgcctcttgaagtcgaagttggtattggcttggattggctggctgccaaaggataatga

SEQ ID NO: 2466 - protein, 841 aa, synthetic construct
  REGION 1..841: note = Variant of DNA polymerase I from Thermus sp. strain 2.9
MHHHHHHGGSGVLPVFEPKGRVLLVDGHHLAYRNFFALKGLTTSRGEPVQGVYGFAKSLLKALKEDGDVVIVVFDAKAPSFRHEAYEAYKAGRAPTPEDFPRQLALMKELVDLLGLERLEVPGFEADDVLATLAKKAEREGYEVQILTADRDLFQLLSPRISVLHPEGHRITPEWLWEKYGLRPEQWVDFRALAGDPSDNIPGVKGIGEKTALKLLKEWGSLENLLKNLDQVKPESVREKILAHLEDLKLSRELSRVRTDLPLEVDFRRRREPDWEGLKAFLERLEFGSLLHEFGLLESPLPAEEAPWPPPEGAFLGYRLSRPEPMWAELLALAASAQGRVYRAEDPHGALRGLFEVRGLLAKDLAVVALREGLDLPPTDDPMLLAYLLDPSNTTPEGVARRYGGEWTEDAAKRALLAERLHANLLGRLQGEERLLWLYEEVEKPLSRVLAHMEATGVKLDVAYLEALSLEVAAEMRRLEEEVFRLAGHSFRLNSRDQLERVLFDELGLPPIGKTEKTGKRSTSAAVLEALREVHPIVDKILQYRELAKLKGTYIDPLPALVHPKTGRLHTRFNQTATATGRLSSSDPNLQNIPVRTPLGQKIRRAFVAEEGWRLVALDYSQIELRVLAHLSGDENLIRVFQEGKDIHTQTASWMFGLSAEAIDPLMRRAAKTINFGVLYGMSAFRLSQELGIPYEEAAAFIQKYFQSYPKVKAWIEKTLEEGRTRGYVETLFGRRRYVPDLNARVKSVREAAERMAFNMPVQGTAADLMKLAMVRLFPQLREVGARMLLQVHDELLLEAPKERAEEVAALAKEVMEGVWPLAVPLEVEVGIGLDWLAAKG

SEQ ID NO: 2467 - DNA, 2529 bp, synthetic construct
  misc_feature 1..2529: note = Variant of DNA polymerase I from Thermus sp. strain 2.9
  source 1..2529: mol_type = other DNA
atgcaccatcatcatcatcatggcggtagcggcgtgttaccggtgttcgagcctaaaggtcgcgtgcttctggttgatggccatcatctcgcgtatcgtaacttctttgccctgaaaggattaaccaccagccgtggcgagccggtacagggtgtctacggctttgcaaagtcgctcctgaaagctctgaaagaagacggtgatgtggtgattgttgtctttgatgcgaaagcgccaagttttcgccacgaagcgtacgaagcttacaaagccgggcgtgctccaacgccggaagactttcctcgccaattggcgcttatgaaggaattagtggatttgcttggcctcgaacgcttggaagttcccggtttcgaggcagacgacgtattagcgactctcgcaaagaaagccgaacgtgagggctatgaagtccagatcttgacagcagatcgcgatcttttccagcttttatctccgcgcatctcggtgttacacccggaagggcatcgtatcaccccggaatggctctgggagaaatatggtttgcgtcccgaacaatgggtggattttcgcgccttagcaggcgatccgagcgacaatattccgggagttaaaggtatcggcgagaagacggcgctcaagctccttaaagaatgggggtcgttggagaacttgcttaagaatttagatcaggtcaaaccagagtcagtgcgtgagaagattcttgcacacctcgaagacctcaaattaagccgcgaattgtcccgtgtacgcaccgatttgccgctcgaagttgatttccgtcgccgccgcgaacctgactgggagggtcttaaagcgtttttagagcgtcttgaatttggttcgctcttgcatgaattcggccttttagaaagcccgtgtccagccgaagaagcaccttggccaccgcccgaaggcgcgtttttaggttaccgtttgagtcgcccggaaccgatgtgggccgaattattggctcttgcagcgtctgcccagggacgtgtgtatcgcgcggaagaccctcatggtgcgctccgcggcctcttcgaagtccgtggactccttgccaaagacttagctgttgttgcattgcgcgaaggtcttgatttacctccgactgatgatccaatgcttcttgcgtacctcttggacccgtcaaacacgacgcccgaaggcgtagcccgtcgttacggcggcgagtggaccgaagatgcagcgaaacgcgcgttattggccgaacgtttgcacgccaatttattaggacgtttgcaaggcgaggaacgtctcctctggctttacgaagaagtggagaaaccattgagtcgcgtgctcgcgcatatggaagctaccggtgtcaaattagacgtggcgtatttggaggctctcagccttgaagttgctgccgaaatgcgccgcttggaggaagaagtattccgtttagcaggccattcctttcgccttaattctcgcgatcagttagaacgtgtgttgttcgatgaacttggtctccctcctatcggcaagacagagaagaccggtaaacgtagcacttcagcggcggttttagaagctcttcgcgaagtccatcccattgtggacaagatcttgcagtaccgcgaactcgcgaaattgaaaggcacctatattgaccctcttccggcattagtccacccgaaaacgggacgcctccatacccgcttcaaccaaacagccacggcgaccggtcgtttgtcctcctctgatccaaaccttcagaatattccagtacgtaccccattgggccagaagatccgccgcgcgtttgtagctgaggagggttggcgtttagtggccctcgattatagccaaattgaattacgtgtccttgcccatctttctggcgatgagaacctcatccgcgtgtttcaggaaggcaaagacattcacactcaaacggcaagctggatgtttggattatcagctgaagcgatcgatcctttgatgcgtcgtgcagcgaagaccatcaatttcggtgttctctacggtatgagtgcctttcgtttgtcgcaggaattaggcattccctatgaagaagctgcggcgttcattcagaaatactttcaaagctatcccaaagttaaagcatggatcgagaagactctcgaagaaggccgcacacgtggttacgtagagaccttatttggacgtcgccgctatgttcccgatttaaacgctcgcgtgaaatctgtccgtgaagccgccgaacgcatggcgttcaacatgcctgtacagggcacggcagctgacctcatgaaacttgcaatggtgcgcctttttccacaattgcgtgaagttggtgcccgcatgctcttgcaggtccacgatgaactcttgttagaagcgccaaaagagcgtgcggaagaggtggcagccctcgcgaaagaggttatggaaggcgtgtggcccttagcggtgcctcttgaagtcgaagttggtattggcgaggattggctggctgccaaaggataatga

SEQ ID NO: 2468 - protein, 841 aa, synthetic construct
  REGION 1..841: note = Variant of DNA polymerase I from Thermus sp. strain 2.9
MHHHHHHGGSGVLPVFEPKGRVLLVDGHHLAYRNFFALKGLTTSRGEPVQGVYGFAKSLLKALKEDGDVVIVVFDAKAPSFRHEAYEAYKAGRAPTPEDFPRQLALMKELVDLLGLERLEVPGFEADDVLATLAKKAEREGYEVQILTADRDLFQLLSPRISVLHPEGHRITPEWLWEKYGLRPEQWVDFRALAGDPSDNIPGVKGIGEKTALKLLKEWGSLENLLKNLDQVKPESVREKILAHLEDLKLSRELSRVRTDLPLEVDFRRRREPDWEGLKAFLERLEFGSLLHEFGLLESPCPAEEAPWPPPEGAFLGYRLSRPEPMWAELLALAASAQGRVYRAEDPHGALRGLFEVRGLLAKDLAVVALREGLDLPPTDDPMLLAYLLDPSNTTPEGVARRYGGEWTEDAAKRALLAERLHANLLGRLQGEERLLWLYEEVEKPLSRVLAHMEATGVKLDVAYLEALSLEVAAEMRRLEEEVFRLAGHSFRLNSRDQLERVLFDELGLPPIGKTEKTGKRSTSAAVLEALREVHPIVDKILQYRELAKLKGTYIDPLPALVHPKTGRLHTRFNQTATATGRLSSSDPNLQNIPVRTPLGQKIRRAFVAEEGWRLVALDYSQIELRVLAHLSGDENLIRVFQEGKDIHTQTASWMFGLSAEAIDPLMRRAAKTINFGVLYGMSAFRLSQELGIPYEEAAAFIQKYFQSYPKVKAWIEKTLEEGRTRGYVETLFGRRRYVPDLNARVKSVREAAERMAFNMPVQGTAADLMKLAMVRLFPQLREVGARMLLQVHDELLLEAPKERAEEVAALAKEVMEGVWPLAVPLEVEVGIGEDWLAAKG

SEQ ID NO: 2469 - DNA, 2529 bp, synthetic construct
  misc_feature 1..2529: note = Variant of DNA polymerase I from Thermus sp. strain 2.9
  source 1..2529: mol_type = other DNA
atgcaccatcatcatcatcatggcggtagcggcgtgttaccggtgttcgagcctaaaggtcgcgtgcttctggttgatggccatcatctcgcgtatcgtaacttctttgccctgaaaggattaaccaccagccgtggcgagccggtacagggtgtctacggctttgcaaagtcgctcctgaaagctctgaaagaagacggtgatgtggtgattgttgtctttgatgcgaaagcgccaagttttcgccacgaagcgtacgaagcttacaaagccgggcgtgctccaacgccggaagactttcctcgccaattggcgcttatgaaggaattagtggatttgcttggcctcgaacgcttggaagttcccggtttcgaggcagacgacgtattagcgactctcgcaaagaaagccgaacgtgagggctatgaagtccagatcttgacagcagatcgcgatcttttccagcttttatctccgcgcatctcggtgttacacccggaagggcatcgtatcaccccggaatggctctgggagaaatatggtttgcgtcccgaacaatgggtggattttcgcgccttagcaggcgatccgagcgacaatattccgggagttaaaggtatcggcgagaagacggcgctcaagctccttaaagaatgggggtcgttggagaacttgcttaagaatttagatcaggtcaaaccagagtcagtgcgtgagaagattcttgcacacctcgaagacctcaaattaagccgcgaattgtcccgtgtacgcaccgatttgccgctcgaagttgatttccgtcgccgccgcgaacctgactgggagggtcttaaagcgtttttagagcgtcttgaatttggttcgctcttgcatgaattcggccttttagaaagcccgttaccagccgaagaagcaccttggccaccgcccgaaggcgcgtttttaggttaccgtttgagtcgcccggaaccgatgtgggccgaattagtggctcttgcagcgtctgcccagggacgtgtgtatcgcgcggaagaccctcatggtgcgctccgcggcctcttcgaagtccgtggactccttgccaaagacttagctgttgttgcattgcgcgaaggtcttgatttacctccgactgatgatccaatgcttcttgcgtacctcttggacccgtcaaacacgacgcccgaaggcgtagcccgtcgttacggcggcgagtggaccgaagatgcagcgaaacgcgcgttattggccgaacgtttgcacgccaatttattaggacgtttgcaaggcgaggaacgtctcctctggctttacgaagaagtggagaaaccattgagtcgcgtgctcgcgcatatggaagctaccggtgtcaaattagacgtggcgtatttggaggctctcagccttgaagttgctgccgaaatgcgccgcttggaggaagaagtattccgtttagcaggccattcctttcgccttaattctcgcgatcagttagaacgtgtgttgttcgatgaacttggtctccctcctatcggcaagacagagaagaccggtaaacgtagcacttcagcggcggttttagaagctcttcgcgaagtccatcccattgtggacaagatcttgcagtaccgcgaactcgcgaaattgaaaggcacctatattgaccctcttccggcattagtccacccgaaaacgggacgcctccatacccgcttcaaccaaacagccacggcgaccggtcgtttgtcctcctctgatccaaaccttcagaatattccagtacgtaccccattgggccagaagatccgccgcgcgtttgtagctgaggagggttggcgtttagtggccctcgattatagccaaattgaattacgtgtccttgcccatctttctggcgatgagaacctcatccgcgtgtttcaggaaggcaaagacattcacactcaaacggcaagctggatgtttggattatcagctgaagcgatcgatcctttgatgcgtcgtgcagcgaagaccatcaatttcggtgttctctacggtatgagtgcctttcgtttgtcgcaggaattaggcattccctatgaagaagctgcggcgttcattcagaaatactttcaaagctatcccaaagttaaagcatggatcgagaagactctcgaagaaggccgcacacgtggttacgtagagaccttatttggacgtcgccgctatgttcccgatttaaacgctcgcgtgaaatctgtccgtgaagccgccgaacgcatggcgttcaacatgcctgtacagggcacggcagctgacctcatgaaacttgcaatggtgcgcctttttccacaattgcgtgaagttggtgcccgcatgctcttgcaggtccacgatgaactcttgttagaagcgccaaaagagcgtgcggaagaggtggcagccctcgcgaaagaggttatggaaggcgtgtggcccttagcggtgcctcttgaagtcgaagttggtattggcgaggattggctggctgccaaaggataatga

SEQ ID NO: 2470 - protein, 841 aa, synthetic construct
  REGION 1..841: note = Variant of DNA polymerase I from Thermus sp. strain 2.9
MHHHHHHGGSGVLPVFEPKGRVLLVDGHHLAYRNFFALKGLTTSRGEPVQGVYGFAKSLLKALKEDGDVVIVVFDAKAPSFRHEAYEAYKAGRAPTPEDFPRQLALMKELVDLLGLERLEVPGFEADDVLATLAKKAEREGYEVQILTADRDLFQLLSPRISVLHPEGHRITPEWLWEKYGLRPEQWVDFRALAGDPSDNIPGVKGIGEKTALKLLKEWGSLENLLKNLDQVKPESVREKILAHLEDLKLSRELSRVRTDLPLEVDFRRRREPDWEGLKAFLERLEFGSLLHEFGLLESPLPAEEAPWPPPEGAFLGYRLSRPEPMWAELVALAASAQGRVYRAEDPHGALRGLFEVRGLLAKDLAVVALREGLDLPPTDDPMLLAYLLDPSNTTPEGVARRYGGEWTEDAAKRALLAERLHANLLGRLQGEERLLWLYEEVEKPLSRVLAHMEATGVKLDVAYLEALSLEVAAEMRRLEEEVFRLAGHSFRLNSRDQLERVLFDELGLPPIGKTEKTGKRSTSAAVLEALREVHPIVDKILQYRELAKLKGTYIDPLPALVHPKTGRLHTRFNQTATATGRLSSSDPNLQNIPVRTPLGQKIRRAFVAEEGWRLVALDYSQIELRVLAHLSGDENLIRVFQEGKDIHTQTASWMFGLSAEAIDPLMRRAAKTINFGVLYGMSAFRLSQELGIPYEEAAAFIQKYFQSYPKVKAWIEKTLEEGRTRGYVETLFGRRRYVPDLNARVKSVREAAERMAFNMPVQGTAADLMKLAMVRLFPQLREVGARMLLQVHDELLLEAPKERAEEVAALAKEVMEGVWPLAVPLEVEVGIGEDWLAAKG

SEQ ID NO: 2471 - DNA, 2529 bp, synthetic construct
  misc_feature 1..2529: note = Variant of DNA polymerase I from Thermus sp. strain 2.9
  source 1..2529: mol_type = other DNA
atgcaccatcatcatcatcatggcggtagcggcgtgttaccggtgttcgagcctaaaggtcgcgtgcttctggttgatggccatcatctcgcgtatcgtaacttctttgccctgaaaggattaaccaccagccgtggcgagccggtacagggtgtctacggctttgcaaagtcgctcctgaaagctctgaaagaagacggtgatgtggtgattgttgtctttgatgcgaaagcgccaagttttcgccacgaagcgtacgaagcttacaaagccgggcgtgctccaacgccggaagactttcctcgccaattggcgcttatgaaggaattagtggatttgcttggcctcgaacgcttggaagttcccggtttcgaggcagacgacgtattagcgactctcgcaaagaaagccgaacgtgagggctatgaagtccagatcttgacagcagatcgcgatcttttccagcttttatctccgcgcatctcggtgttacacccggaagggcatcgtatcaccccggaatggctctgggagaaatatggtttgcgtcccgaacaatgggtggattttcgcgccttagcaggcgatccgagcgacaatattccgggagttaaaggtatcggcgagaagacggcgctcaagctccttaaagaatgggggtcgttggagaacttgcttaagaatttagatcaggtcaaaccagagtcagtgcgtgagaagattcttgcacacctcgaagacctcaaattaagccgcgaattgtcccgtgtacgcaccgatttgccgctcgaagttgatttccgtcgccgccgcgaacctgactgggagggtcttaaagcgtttttagagcgtcttgaatttggttcgctcttgcatgaattcggccttttagaaagcccgttaccagccgaagaagcaccttggccaccgcccgaaggcgcgtttttaggttaccgtttgagtcgcccggaaccgatgtgggccgaattattggctcttgcagcgtctgcccagggacgtgtgtatcgcgcggaagaccctcatggtgcgctccgcggcctcttcgaagtccgtggactccttgccaaagacttagctgttgttgcattgcgcgaaggtcttgatttacctccgactgatgatccaatgcttcttgcgtacctcttggacccgtcaaacacgacgcccgaaggcgtagcccgtcgttacggcggcgagtggaccgaagatgcagcgaaacgcgcgttattggccgaacgtttgcacgccaatttattaggacgtttgcaaggcgaggaacgtctcctctggctttacgaagaagtggagaaaccattgagtcgcgtgctcgcgcatatggaagctaccggtgtcaaattagacgtgtggtatttggaggctctcagccttgaagttgctgccgaaatgcgccgcttggaggaagaagtattccgtttagcaggccattcctttcgccttaattctcgcgatcagttagaacgtgtgttgttcgatgaacttggtctccctcctatcggcaagacagagaagaccggtaaacgtagcacttcagcggcggttttagaagctcttcgcgaagtccatcccattgtggacaagatcttgcagtaccgcgaactcgcgaaattgaaaggcacctatattgaccctcttccggcattagtccacccgaaaacgggacgcctccatacccgcttcaaccaaacagccacggcgaccggtcgtttgtcctcctctgatccaaaccttcagaatattccagtacgtaccccattgggccagaagatccgccgcgcgtttgtagctgaggagggttggcgtttagtggccctcgattatagccaaattgaattacgtgtccttgcccatctttctggcgatgagaacctcatccgcgtgtttcaggaaggcaaagacattcacactcaaacggcaagctggatgtttggattatcagctgaagcgatcgatcctttgatgcgtcgtgcagcgaagaccatcaatttcggtgttctctacggtatgagtgcctttcgtttgtcgcaggaattaggcattccctatgaagaagctgcggcgttcattcagaaatactttcaaagctatcccaaagttaaagcatggatcgagaagactctcgaagaaggccgcacacgtggttacgtagagaccttatttggacgtcgccgctatgttcccgatttaaacgctcgcgtgaaatctgtccgtgaagccgccgaacgcatggcgttcaacatgcctgtacagggcacggcagctgacctcatgaaacttgcaatggtgcgcctttttccacaattgcgtgaagttggtgcccgcatgctcttgcaggtccacgatgaactcttgttagaagcgccaaaagagcgtgcggaagaggtggcagccctcgcgaaagaggttatggaaggcgtgtggcccttagcggtgcctcttgaagtcgaagttggtattggcgaggattggctggctgccaaaggataatga

SEQ ID NO: 2472 - protein, 841 aa, synthetic construct
  REGION 1..841: note = Variant of DNA polymerase I from Thermus sp. strain 2.9
MHHHHHHGGSGVLPVFEPKGRVLLVDGHHLAYRNFFALKGLTTSRGEPVQGVYGFAKSLLKALKEDGDVVIVVFDAKAPSFRHEAYEAYKAGRAPTPEDFPRQLALMKELVDLLGLERLEVPGFEADDVLATLAKKAEREGYEVQILTADRDLFQLLSPRISVLHPEGHRITPEWLWEKYGLRPEQWVDFRALAGDPSDNIPGVKGIGEKTALKLLKEWGSLENLLKNLDQVKPESVREKILAHLEDLKLSRELSRVRTDLPLEVDFRRRREPDWEGLKAFLERLEFGSLLHEFGLLESPLPAEEAPWPPPEGAFLGYRLSRPEPMWAELLALAASAQGRVYRAEDPHGALRGLFEVRGLLAKDLAVVALREGLDLPPTDDPMLLAYLLDPSNTTPEGVARRYGGEWTEDAAKRALLAERLHANLLGRLQGEERLLWLYEEVEKPLSRVLAHMEATGVKLDVWYLEALSLEVAAEMRRLEEEVFRLAGHSFRLNSRDQLERVLFDELGLPPIGKTEKTGKRSTSAAVLEALREVHPIVDKILQYRELAKLKGTYIDPLPALVHPKTGRLHTRFNQTATATGRLSSSDPNLQNIPVRTPLGQKIRRAFVAEEGWRLVALDYSQIELRVLAHLSGDENLIRVFQEGKDIHTQTASWMFGLSAEAIDPLMRRAAKTINFGVLYGMSAFRLSQELGIPYEEAAAFIQKYFQSYPKVKAWIEKTLEEGRTRGYVETLFGRRRYVPDLNARVKSVREAAERMAFNMPVQGTAADLMKLAMVRLFPQLREVGARMLLQVHDELLLEAPKERAEEVAALAKEVMEGVWPLAVPLEVEVGIGEDWLAAKG

SEQ ID NO: 2473 - DNA, 2529 bp, synthetic construct
  misc_feature 1..2529: note = Variant of DNA polymerase I from Thermus sp. strain 2.9
  source 1..2529: mol_type = other DNA
atgcaccatcatcatcatcatggcggtagcggcgtgttaccggtgttcgagcctaaaggtcgcgtgcttctggttgatggccatcatctcgcgtatcgtaacttctttgccctgaaaggattaaccaccagcgtgggcgagccggtacagggtgtctacggctttgcaaagtcgctcctgaaagctctgaaagaagacggtgatgtggtgattgttgtctttgatgcgaaagcgccaagttttcgccacgaagcgtacgaagcttacaaagccgggcgtgctccaacgccggaagactttcctcgccaattggcgcttatgaaggaattagtggatttgcttggcctcgaacgcttggaagttcccggtttcgaggcagacgacgtattagcgactctcgcaaagaaagccgaacgtgagggctatgaagtccagatcttgacagcagatcgcgatcttttccagcttttatctccgcgcatctcggtgttacacccggaagggcatcgtatcaccccggaatggctctgggagaaatatggtttgcgtcccgaacaatgggtggattttcgcgccttagcaggcgatccgagcgacaatattccgggagttaaaggtatcggcgagaagacggcgctcaagctccttaaagaatgggggtcgttggagaacttgcttaagaatttagatcaggtcaaaccagagtcagtgcgtgagaagattcttgcacacctcgaagacctcaaattaagccgcgaattgtcccgtgtacgcaccgatttgccgctcgaagttgatttccgtcgccgccgcgaacctgactgggagggtcttaaagcgtttttagagcgtcttgaatttggttcgctcttgcatgaattcggccttttagaaagcccgttaccagccgaagaagcaccttggccaccgcccgaaggcgcgtttttaggttaccgtttgagtcgcccggaaccgatgtgggccgaattattggctcttgcagcgtctgcccagggacgtgtgtatcgcgcggaagaccctcatggtgcgctccgcggcctcttcgaagtccgtggactccttgccaaagacttagctgttgttgcattgcgcgaaggtcttgatttacctccgactgatgatccaatgcttcttgcgtacctcttggacccgtcaaacacgacgcccgaaggcgtagcccgtcgttacggcggcgagtggaccgaagatgcagcgaaacgcgcgttattggccgaacgtttgcacgccaatttattaggacgtttgcaaggcgaggaacgtctcctctggctttacgaagaagtggagaaaccattgagtcgcgtgctcgcgcatatggaagctaccggtgtcaaattagacgtggcgtatttggaggctctcagccttgaagttgctgccgaaatgcgccgcttggaggaagaagtattccgtttagcaggccattcctttcgccttaattctcgcgatcagttagaacgtgtgttgttcgatgaacttggtctccctcctatcggcaagacagagaagaccggtaaacgtagcacttcagcggcggttttagaagctcttcgcgaagtccatcccattgtggacaagatcttgcagtaccgcgaactcgcgaaattgaaaggcacctatattgaccctcttccggcattagtccacccgaaaacgggacgcctccatacccgcttcaaccaaacagccacggcgaccggtcgtttgtcctcctctgatccaaaccttcagaatattccagtacgtaccccattgggccagaagatccgccgcgcgtttgtagctgaggagggttggcgtttagtggccctcgattatagccaaattgaattacgtgtccttgcccatctttctggcgatgagaacctcatccgcgtgtttcaggaaggcaaagacattcacactcaaacggcaagctggatgtttggattatcagctgaagcgatcgatcctttgatgcgtcgtgcagcgaagaccatcaatttcggtgttctctacggtatgagtgcctttcgtttgtcgcaggaattaggcattccctatgaagaagctgcggcgttcattcagaaatactttcaaagctatcccaaagttaaagcatggatcgagaagactctcgaagaaggccgcacacgtggttacgtagagaccttatttggacgtcgccgctatgttcccgatttaaacgctcgcgtgaaatctgtccgtgaagccgccgaacgcatggcgttcaacatgcctgtacagggcacggcagctgacctcatgaaacttgcaatggtgcgcctttttccacaattgcgtgaagttggtgcccgcatgctcttgcaggtccacgatgaactcttgttagaagcgccaaaagagcgtgcggaagaggtggcagccctcgcgaaagaggttatggaaggcgtgtggcccttagcggtgcctcttgaagtcgaagttggtattggcgaggattggctggctgccaaaggataatga

SEQ ID NO: 2474 - protein, 841 aa, synthetic construct
  REGION 1..841: note = Variant of DNA polymerase I from Thermus sp. strain 2.9
MHHHHHHGGSGVLPVFEPKGRVLLVDGHHLAYRNFFALKGLTTSVGEPVQGVYGFAKSLLKALKEDGDVVIVVFDAKAPSFRHEAYEAYKAGRAPTPEDFPRQLALMKELVDLLGLERLEVPGFEADDVLATLAKKAEREGYEVQILTADRDLFQLLSPRISVLHPEGHRITPEWLWEKYGLRPEQWVDFRALAGDPSDNIPGVKGIGEKTALKLLKEWGSLENLLKNLDQVKPESVREKILAHLEDLKLSRELSRVRTDLPLEVDFRRRREPDWEGLKAFLERLEFGSLLHEFGLLESPLPAEEAPWPPPEGAFLGYRLSRPEPMWAELLALAASAQGRVYRAEDPHGALRGLFEVRGLLAKDLAVVALREGLDLPPTDDPMLLAYLLDPSNTTPEGVARRYGGEWTEDAAKRALLAERLHANLLGRLQGEERLLWLYEEVEKPLSRVLAHMEATGVKLDVAYLEALSLEVAAEMRRLEEEVFRLAGHSFRLNSRDQLERVLFDELGLPPIGKTEKTGKRSTSAAVLEALREVHPIVDKILQYRELAKLKGTYIDPLPALVHPKTGRLHTRFNQTATATGRLSSSDPNLQNIPVRTPLGQKIRRAFVAEEGWRLVALDYSQIELRVLAHLSGDENLIRVFQEGKDIHTQTASWMFGLSAEAIDPLMRRAAKTINFGVLYGMSAFRLSQELGIPYEEAAAFIQKYFQSYPKVKAWIEKTLEEGRTRGYVETLFGRRRYVPDLNARVKSVREAAERMAFNMPVQGTAADLMKLAMVRLFPQLREVGARMLLQVHDELLLEAPKERAEEVAALAKEVMEGVWPLAVPLEVEVGIGEDWLAAKG

SEQ ID NO: 2475 - DNA, 2529 bp, synthetic construct
  misc_feature 1..2529: note = Variant of DNA polymerase I from Thermus sp. strain 2.9
  source 1..2529: mol_type = other DNA
atgcaccatcatcatcatcatggcggtagcggcgtgttaccggtgttcgagcctaaaggtcgcgtgcttctggttgatggccatcatctcgcgtatcgtaacttctttgccctgaaaggattaaccaccagccgtggcgagccggtacagggtgtctacggctttgcaaagtcgctcctgaaagctctgaaagaagacggtgatgtggtgattgttgtctttgatgcgaaagcgccaagttttcgccacgaagcgtacgaagcttacaaagccgggcgtgctccaacgccggaagactttcctcgccaattggcgcttatgaaggaattagtggatttgcttggcctcgaacgcttggaagttcccggtttcgaggcagacgacgtattagcgactctcgcaaagaaagccgaacgtgagggctatgaagtccagatcttgacagcagatcgcgatcttttccagcttttatctccgcgcatctcggtgttacacccggaagggcatcgtatcaccccggaatggctctgggagaaatatggtttgcgtcccgaacaatgggtggattttcgcgccttagcaggcgatccgagcgacaatattccgggagttaaaggtatcggcgagaagacggcgctcaagctccttaaagaatgggggtcgttggagaacttgcttaagaatttagatcaggtcaaaccagagtcagtgcgtgagaagattcttgcacacctcgaagacctcaaattaagccgcgaattgtcccgtgtacgcaccgatttgccgctcgaagttgatttccgtcgccgccgcgaacctgactgggagggtcttaaagcgtttttagagcgtcttgaatttggttcgctcttgcatgaattcggccttttagaaagcccgttaccagccgaagaagcaccttggccaccgcccgaaggcgcgtttttaggttaccgtttgagtcgcccggaaccgatgtgggccgaattaaaggctcttgcagcgtctgcccagggacgtgtgtatcgcgcggaagaccctcatggtgcgctccgcggcctcttcgaagtccgtggactccttgccaaagacttagctgttgttgcattgcgcgaaggtcttgatttacctccgactgatgatccaatgcttcttgcgtacctcttggacccgtcaaacacgacgcccgaaggcgtagcccgtcgttacggcggcgagtggaccgaagatgcagcgaaacgcgcgttattggccgaacgtttgcacgccaatttattaggacgtttgcaaggcgaggaacgtctcctctggctttacgaagaagtggagaaaccattgagtcgcgtgctcgcgcatatggaagctaccggtgtcaaattagacgtggcgtatttggaggctctcagccttgaagttgctgccgaaatgcgccgcttggaggaagaagtattccgtttagcaggccattcctttcgccttaattctcgcgatcagttagaacgtgtgttgttcgatgaacttggtctccctcctatcggcaagacagagaagaccggtaaacgtagcacttcagcggcggttttagaagctcttcgcgaagtccatcccattgtggacaagatcttgcagtaccgcgaactcgcgaaattgaaaggcacctatattgaccctcttccggcattagtccacccgaaaacgggacgcctccatacccgcttcaaccaaacagccacggcgaccggtcgtttgtcctcctctgatccaaaccttcagaatattccagtacgtaccccattgggccagaagatccgccgcgcgtttgtagctgaggagggttggcgtttagtggccctcgattatagccaaattgaattacgtgtccttgcccatctttctggcgatgagaacctcatccgcgtgtttcaggaaggcaaagacattcacactcaaacggcaagctggatgtttggattatcagctgaagcgatcgatcctttgatgcgtcgtgcagcgaagaccatcaatttcggtgttctctacggtatgagtgcctttcgtttgtcgcaggaattaggcattccctatgaagaagctgcggcgttcattcagaaatactttcaaagctatcccaaagttaaagcatggatcgagaagactctcgaagaaggccgcacacgtggttacgtagagaccttatttggacgtcgccgctatgttcccgatttaaacgctcgcgtgaaatctgtccgtgaagccgccgaacgcatggcgttcaacatgcctgtacagggcacggcagctgacctcatgaaacttgcaatggtgcgcctttttccacaattgcgtgaagttggtgcccgcatgctcttgcaggtccacgatgaactcttgttagaagcgccaaaagagcgtgcggaagaggtggcagccctcgcgaaagaggttatggaaggcgtgtggcccttagcggtgcctcttgaagtcgaagttggtattggcgaggattggctggctgccaaaggataatga

SEQ ID NO: 2476 - protein, 841 aa, synthetic construct
  REGION 1..841: note = Variant of DNA polymerase I from Thermus sp. strain 2.9
MHHHHHHGGSGVLPVFEPKGRVLLVDGHHLAYRNFFALKGLTTSRGEPVQGVYGFAKSLLKALKEDGDVVIVVFDAKAPSFRHEAYEAYKAGRAPTPEDFPRQLALMKELVDLLGLERLEVPGFEADDVLATLAKKAEREGYEVQILTADRDLFQLLSPRISVLHPEGHRITPEWLWEKYGLRPEQWVDFRALAGDPSDNIPGVKGIGEKTALKLLKEWGSLENLLKNLDQVKPESVREKILAHLEDLKLSRELSRVRTDLPLEVDFRRRREPDWEGLKAFLERLEFGSLLHEFGLLESPLPAEEAPWPPPEGAFLGYRLSRPEPMWAELKALAASAQGRVYRAEDPHGALRGLFEVRGLLAKDLAVVALREGLDLPPTDDPMLLAYLLDPSNTTPEGVARRYGGEWTEDAAKRALLAERLHANLLGRLQGEERLLWLYEEVEKPLSRVLAHMEATGVKLDVAYLEALSLEVAAEMRRLEEEVFRLAGHSFRLNSRDQLERVLFDELGLPPIGKTEKTGKRSTSAAVLEALREVHPIVDKILQYRELAKLKGTYIDPLPALVHPKTGRLHTRFNQTATATGRLSSSDPNLQNIPVRTPLGQKIRRAFVAEEGWRLVALDYSQIELRVLAHLSGDENLIRVFQEGKDIHTQTASWMFGLSAEAIDPLMRRAAKTINFGVLYGMSAFRLSQELGIPYEEAAAFIQKYFQSYPKVKAWIEKTLEEGRTRGYVETLFGRRRYVPDLNARVKSVREAAERMAFNMPVQGTAADLMKLAMVRLFPQLREVGARMLLQVHDELLLEAPKERAEEVAALAKEVMEGVWPLAVPLEVEVGIGEDWLAAKG

SEQ ID NO: 2477 - DNA, 2529 bp, synthetic construct
  misc_feature 1..2529: note = Variant of DNA polymerase I from Thermus sp. strain 2.9
  source 1..2529: mol_type = other DNA
atgcaccatcatcatcatcatggcggtagcggcgtgttaccggtgttcgagcctaaaggtcgcgtgcttctggttgatggccatcatctcgcgtatcgtaacttctttgccctgaaaggattaaccaccagccgtggcgagccggtacagggtgtctacggctttgcaaagtcgctcctgaaagctctgaaagaagacggtgatgtggtgattgttgtctttgatgcgaaagcgccaagttttcgccacgaagcgtacgaagcttacaaagccgggcgtgctccaacgccggaagactttcctcgccaattggcgcttatgaaggaattagtggatttgcttggcctcgaacgcttggaagttcccggtttcgaggcagacgacgtattagcgactctcgcaaagaaagccgaacgtgagggctatgaagtccagatcttgacagcagatcgcgatcttttccagcttttatctccgcgcatctcggtgttacacccggaagggcatcgtatcaccccggaatggctctgggagaaatatggtttgcgtcccgaacaatgggtggattttcgcgccttagcaggcgatccgagcgacaatattccgggagttaaaggtatcggcgagaagacggcgctcaagctccttaaagaatgggggtcgttggagaacttgcttaagaatttagatcaggtcaaaccagagtcagtgcgtgagaagattcttgcacacctcgaagacctcaaattaagccgcgaattgtcccgtgtacgcaccgatttgccgctcgaagttgatttccgtcgccgccgcgaacctgactgggagggtcttaaagcgtttttagagcgtcttgaatttggttcgctcttgcatgaattcggccttttagaaagcccgttaccagccgaagaagcaccttggccaccgcccgaaggcgcgtttttaggttaccgtttgagtcgcccggaaccgatgtgggccgaattattggctcttgcagcgtctgcccagggacgtgtgtatcgcgcggaagaccctcatggtgcgctccgcggcctcttcgaagtccgtggactccttgccaaagacttagctgttgttgcattgcgcgaaggtcttgatttacctccgactgatgatccaatgcttcttgcgtacctcttggacccgtcaaacacgacgcccgaaggcgtagcccgtcgttacggcggcgagtggaccgaagatgcagcgaaacgcgcgttattggccgaacgtttgcacgccaatttattaggacgtttgcaaggcgaggaacgtctcctctggctttacgaagaagtggagaaaccattgagtcgcgtgctcgcgcatatggaagctaccggtgtcaaattagacgtggcgtatttggaggctctcagccttgaagttgctgccgaaatgcgccgcttggaggaagaagtattccgtttagcaggccactcctttcgccttaattctcgcgatcagttagaacgtgtgttgttcgatgaacttggtctccctcctatcggcaagacagagaagaccggtaaacgtagcacttcagcggcggttttagaagctcttcgcgaagtccatcccattgtggacaagatcttggcgtaccgcgaactcgcgaaattgaaaggcacctatattgaccctcttccggcattagtccacccgaaaacgggacgcctccatacccgcttcaaccaaacagccacggcgaccggtcgtttgtcctcctctgatccaaaccttcagaatattccagtacgtaccccattgggccagaagatccgccgcgcgtttgtagctgaggagggttggcgtttagtggccctcgattatagccaaattgaattacgtgtccttgcccatctttctggcgatgagaacctcatccgcgtgtttcaggaaggcaaagacattcacactcaaacggcaagctggatgtttggactgtcagctgaagcgatcgatcctttgatgcgtcgtgcagcgaagaccatcaatttcggtgttctctacggtatgagtgcctttcgtttgtcgcaggaattaggcattccctatgaagaagctgcggcgttcattcagaaatactttcaaagctatcccaaagttaaagcatggatcgagaagactctcgaagaaggccgcacacgtggttacgtagagaccttatttggacgtcgccgctatgttcccgatttaaacgctcgcgtgaaatctgtccgtgaagccgccgaacgcatggcgttcaacatgcctgtacagggcacggcagctgacctcatgaaacttgcaatggtgcgcctttttccacaattgcgtgaagttggtgcccgcatgctcttgcaggtccacgatgaactcttgttagaagcgccaaaagagcgtgcggaagaggtggcagccctcgcgaaagaggttatggaaggcgtgtggcccttagcggtgcctcttgaagtcgaagttggtattggcgaggattggctggctgccaaaggataatga

SEQ ID NO: 2478 - protein, 841 aa, synthetic construct
  REGION 1..841: note = Variant of DNA polymerase I from Thermus sp. strain 2.9
MHHHHHHGGSGVLPVFEPKGRVLLVDGHHLAYRNFFALKGLTTSRGEPVQGVYGFAKSLLKALKEDGDVVIVVFDAKAPSFRHEAYEAYKAGRAPTPEDFPRQLALMKELVDLLGLERLEVPGFEADDVLATLAKKAEREGYEVQILTADRDLFQLLSPRISVLHPEGHRITPEWLWEKYGLRPEQWVDFRALAGDPSDNIPGVKGIGEKTALKLLKEWGSLENLLKNLDQVKPESVREKILAHLEDLKLSRELSRVRTDLPLEVDFRRRREPDWEGLKAFLERLEFGSLLHEFGLLESPLPAEEAPWPPPEGAFLGYRLSRPEPMWAELLALAASAQGRVYRAEDPHGALRGLFEVRGLLAKDLAVVALREGLDLPPTDDPMLLAYLLDPSNTTPEGVARRYGGEWTEDAAKRALLAERLHANLLGRLQGEERLLWLYEEVEKPLSRVLAHMEATGVKLDVAYLEALSLEVAAEMRRLEEEVFRLAGHSFRLNSRDQLERVLFDELGLPPIGKTEKTGKRSTSAAVLEALREVHPIVDKILAYRELAKLKGTYIDPLPALVHPKTGRLHTRFNQTATATGRLSSSDPNLQNIPVRTPLGQKIRRAFVAEEGWRLVALDYSQIELRVLAHLSGDENLIRVFQEGKDIHTQTASWMFGLSAEAIDPLMRRAAKTINFGVLYGMSAFRLSQELGIPYEEAAAFIQKYFQSYPKVKAWIEKTLEEGRTRGYVETLFGRRRYVPDLNARVKSVREAAERMAFNMPVQGTAADLMKLAMVRLFPQLREVGARMLLQVHDELLLEAPKERAEEVAALAKEVMEGVWPLAVPLEVEVGIGEDWLAAKG

SEQ ID NO: 2479 - DNA, 2529 bp, synthetic construct
  source 1..2529: mol_type = other DNA
atgcaccatcatcatcatcatggcggtagcggcgtgttaccggtgttcgagcctaaaggtcgcgtgcttctggttgatggccatcatctcgcgtatcgtaacttctttgccctgaaaggattaaccaccagccgtggcgagccggtacagggtgtctacggctttgcaaagtcgctcctgaaagctctgaaagaagacggtgatgtggtgattgttgtctttgatgcgaaagcgccaagttttcgccacgaagcgtacgaagcttacaaagccgggcgtgctccaacgccggaagactttcctcgccaattggcgcttatgaaggaattagtggatttgcttggcctcgaacgcttggaagttcccggtttcgaggcagacgacgtattagcgactctcgcaaagaaagccgaacgtgagggctatgaagtccagatcttgacagcagatcgcgatcttttccagcttttatctccgcgcatctcggtgttacacccggaagggcatcgtatcaccccggaatggctctgggagaaatatggtttgcgtcccgaacaatgggtggattttcgcgccttagcaggcgatccgagcgacaatattccgggagttaaaggtatcggcgagaagacggcgctcaagctccttaaagaatgggggtcgttggagaacttgcttaagaatttagatcaggtcaaaccagagtcagtgcgtgagaagattcttgcacacctcgaagacctcaaattaagccgcgaattgtcccgtgtacgcaccgatttgccgctcgaagttgatttccgtcgccgccgcgaacctgactgggagggtcttaaagcgtttttagagcgtcttgaatttggttcgctcttgcatgaattcggccttttagaaagcccgttaccagccgaagaagcaccttggccaccgcccgaaggcgcgtttttaggttaccgtttgagtcgcccggaaccgatgtgggccgaattattggctcttgcagcgtctgcccagggacgtgtgtatcgcgcggaagaccctcatggtgcgctccgcggcctcttcgaagtccgtggactccttgccaaagacttagctgttgttgcattgcgcgaaggtcttgatttacctccgactgatgatccaatgcttcttgcgtacctcttggacccgtcaaacacgacgcccgaaggcgtagcccgtcgttacggcggcgagtggaccgaagatgcagcgaaacgcgcgttattggccgaacgtttgcacgccaatttattaggacgtttgcaaggcgaggaacgtctcctctggctttacgaagaagtggagaaaccattgagtcgcgtgctcgcgcatatggaagctaccggtgtcaaattagacgtggcgtatttggaggctctcagccttgaagttgctgccgaaatgcgccgcttggaggaagaagtattccgtttagcaggccattcctttcgccttaattctcgcgatcagttagaacgtgtgttgttcgatgaacttggtctccctcctatcggcaagacagagaagaccggtaaacgtagcacttcagcggcggttttagaagctcttcgcgaagtccatcccattgtggacaagatcttgcagtaccgcgaactcgcgaaattgaaaggcacctatattgaccctcttccgtctttagtccacccgaaaacgggacgcctccatacccgcttcaaccaaacagccacggcgaccggtcgtttgtcctcctctgatccaaaccttcagaatattccagtacgtaccccattgggccagaagatccgccgcgcgtttgtagctgaggagggttggcgtttagtggccctcgattatagccaaattgaattacgtgtccttgcccatctttctggcgatgagaacctcatccgcgtgtttcaggaaggcaaagacattcacactcaaacggcaagctggatgtttggattatcagctgaagcgatcgatcctttgatgcgtcgtgcagcgaagaccatcaatttcggtgttctctacggtatgagtgcctttcgtttgtcgcaggaattaggcattccctatgaagaagctgcggcgttcattcagaaatactttcaaagctatcccaaagttaaagcatggatcgagaagactctcgaagaaggccgcacacgtggttacgtagagaccttatttggacgtcgccgctatgttcccgatttaaacgctcgcgtgaaatctgtccgtgaagccgccgaacgcatggcgttcaacatgcctgtacagggcacggcagctgacctcatgaaacttgcaatggtgcgcctttttccacaattgcgtgaagttggtgcccgcatgctcttgcaggtccacgatgaactcttgttagaagcgccaaaagagcgtgcggaagaggtggcagccctcgcgaaagaggttatggaaggcgtgtggcccttagcggtgcctcttgaagtcgaagttggtattggcgaggattggctggctgccaaaggataatga

SEQ ID NO: 2480 - protein, 841 aa, synthetic construct
  REGION 1..841: note = Variant of DNA polymerase I from Thermus sp. strain 2.9
MHHHHHHGGSGVLPVFEPKGRVLLVDGHHLAYRNFFALKGLTTSRGEPVQGVYGFAKSLLKALKEDGDVVIVVFDAKAPSFRHEAYEAYKAGRAPTPEDFPRQLALMKELVDLLGLERLEVPGFEADDVLATLAKKAEREGYEVQILTADRDLFQLLSPRISVLHPEGHRITPEWLWEKYGLRPEQWVDFRALAGDPSDNIPGVKGIGEKTALKLLKEWGSLENLLKNLDQVKPESVREKILAHLEDLKLSRELSRVRTDLPLEVDFRRRREPDWEGLKAFLERLEFGSLLHEFGLLESPLPAEEAPWPPPEGAFLGYRLSRPEPMWAELLALAASAQGRVYRAEDPHGALRGLFEVRGLLAKDLAVVALREGLDLPPTDDPMLLAYLLDPSNTTPEGVARRYGGEWTEDAAKRALLAERLHANLLGRLQGEERLLWLYEEVEKPLSRVLAHMEATGVKLDVAYLEALSLEVAAEMRRLEEEVFRLAGHSFRLNSRDQLERVLFDELGLPPIGKTEKTGKRSTSAAVLEALREVHPIVDKILQYRELAKLKGTYIDPLPSLVHPKTGRLHTRFNQTATATGRLSSSDPNLQNIPVRTPLGQKIRRAFVAEEGWRLVALDYSQIELRVLAHLSGDENLIRVFQEGKDIHTQTASWMFGLSAEAIDPLMRRAAKTINFGVLYGMSAFRLSQELGIPYEEAAAFIQKYFQSYPKVKAWIEKTLEEGRTRGYVETLFGRRRYVPDLNARVKSVREAAERMAFNMPVQGTAADLMKLAMVRLFPQLREVGARMLLQVHDELLLEAPKERAEEVAALAKEVMEGVWPLAVPLEVEVGIGEDWLAAKG

SEQ ID NO: 2481 - DNA, 2529 bp, synthetic construct
  misc_feature 1..2529: note = Variant of DNA polymerase I from Thermus sp. strain 2.9
  source 1..2529: mol_type = other DNA
atgcaccatcatcatcatcatggcggtagcggcgtgttaccggtgttcgagcctaaaggtcgcgtgcttctggttgatggccatcatctcgcgtatcgtaacttctttgccctgaaaggattaaccaccagccgtggcgagccggtacagggtgtctacggctttgcaaagtcgctcctgaaagctctgaaagaagacggtgatgtggtgattgttgtctttgatgcgaaagcgccaagttttcgccacgaagcgtacgaagcttacaaagccgggcgtgctccaacgccggaagactttcctcgccaattggcgcttatgaaggaattagtggatttgcttggcctcgaacgcttggaagttcccggtttcgaggcagacgacgtattagcgactctcgcaaagaaagccgaacgtgagggctatgaagtccagatcttgacagcagatcgcgatcttttccagcttttatctccgcgcatctcggtgttacacccggaagggcatcgtatcaccccggaatggctctgggagaaatatggtttgcgtcccgaacaatgggtggattttcgcgccttagcaggcgatccgagcgacaatattccgggagttaaaggtatcggcgagaagacggcgctcaagctccttaaagaatgggggtcgttggagaacttgcttaagaatttagatcaggtcaaaccagagtcagtgcgtgagaagattcttgcacacctcgaagacctcaaattaagccgcgaattgtcccgtgtacgcaccgatttgccgctcgaagttgatttccgtcgccgccgcgaacctgactgggagggtcttaaagcgtttttagagcgtcttgaatttggttcgctcttgcatgaattcggccttttagaaagcccgttaccagccgaagaagcaccttggccaccgcccgaaggcgcgtttttaggttaccgtttgagtcgcccggaaccgatgtgggccgaattattggctcttgcagcgtctgcccagggacgtgtgtatcgcgcggaagaccctcatggtgcgctccgcggcctcttcgaagtccgtggactccttgccaaagacttagctgttgttgcattgcgcgaaggtcttgatttacctccgactgatgatccaatgcttcttgcgtacctcttggacccgtcaaacacgacgcccgaaggcgtagcccgtcgttacggcggcgagtggaccgaagatgcagcgaaacgcgcgttattggccgaacgtttgcacgccaatttattaggacgtttgcaaggcgaggaacgtctcctctggctttacgaagaagtggagaaaccattgagtcgcgtgctcgcgcatatggaagctaccggtgtcaaattagacgtggcgtatttggaggctctcagccttgaagttgctgccgaaatgcgccgcttggaggaagaagtattccgtttagcaggccattcctttcgccttaattctcgcgatcagttagaacgtgtgttgttcgatgaacttggtctccctcctatcggcaagacagagaagaccggtaaacgtagcacttcagcggcggttttagaagctcttcgcgaagtccatgatattgtggacaagatcttgcagtaccgcgaactcgcgaaattgaaaggcacctatattgaccctcttccggcattagtccacccgaaaacgggacgcctccatacccgcttcaaccaaacagccacggcgaccggtcgtttgtcctcctctgatccaaaccttcagaatattccagtacgtaccccattgggccagaagatccgccgcgcgtttgtagctgaggagggttggcgtttagtggccctcgattatagccaaattgaattacgtgtccttgcccatctttctggcgatgagaacctcatccgcgtgtttcaggaaggcaaagacattcacactcaaacggcaagctggatgtttggattatcagctgaagcgatcgatcctttgatgcgtcgtgcagcgaagaccatcaatttcggtgttctctacggtatgagtgcctttcgtttgtcgcaggaattaggcattccctatgaagaagctgcggcgttcattcagaaatactttcaaagctatcccaaagttaaagcatggatcgagaagactctcgaagaaggccgcacacgtggttacgtagagaccttatttggacgtcgccgctatgttcccgatttaaacgctcgcgtgaaatctgtccgtgaagccgccgaacgcatggcgttcaacatgcctgtacagggcacggcagctgacctcatgaaacttgcaatggtgcgcctttttccacaattgcgtgaagttggtgcccgcatgctcttgcaggtccacgatgaactcttgttagaagcgccaaaagagcgtgcggaagaggtggcagccctcgcgaaagaggttatggaaggcgtgtggcccttagcggtgcctcttgaagtcgaagttggtattggcgaggattggctggctgccaaaggataatga

SEQ ID NO: 2482 - protein, 841 aa, synthetic construct
  REGION 1..841: note = Variant of DNA polymerase I from Thermus sp. strain 2.9
MHHHHHHGGSGVLPVFEPKGRVLLVDGHHLAYRNFFALKGLTTSRGEPVQGVYGFAKSLLKALKEDGDVVIVVFDAKAPSFRHEAYEAYKAGRAPTPEDFPRQLALMKELVDLLGLERLEVPGFEADDVLATLAKKAEREGYEVQILTADRDLFQLLSPRISVLHPEGHRITPEWLWEKYGLRPEQWVDFRALAGDPSDNIPGVKGIGEKTALKLLKEWGSLENLLKNLDQVKPESVREKILAHLEDLKLSRELSRVRTDLPLEVDFRRRREPDWEGLKAFLERLEFGSLLHEFGLLESPLPAEEAPWPPPEGAFLGYRLSRPEPMWAELLALAASAQGRVYRAEDPHGALRGLFEVRGLLAKDLAVVALREGLDLPPTDDPMLLAYLLDPSNTTPEGVARRYGGEWTEDAAKRALLAERLHANLLGRLQGEERLLWLYEEVEKPLSRVLAHMEATGVKLDVAYLEALSLEVAAEMRRLEEEVFRLAGHSFRLNSRDQLERVLFDELGLPPIGKTEKTGKRSTSAAVLEALREVHDIVDKILQYRELAKLKGTYIDPLPALVHPKTGRLHTRFNQTATATGRLSSSDPNLQNIPVRTPLGQKIRRAFVAEEGWRLVALDYSQIELRVLAHLSGDENLIRVFQEGKDIHTQTASWMFGLSAEAIDPLMRRAAKTINFGVLYGMSAFRLSQELGIPYEEAAAFIQKYFQSYPKVKAWIEKTLEEGRTRGYVETLFGRRRYVPDLNARVKSVREAAERMAFNMPVQGTAADLMKLAMVRLFPQLREVGARMLLQVHDELLLEAPKERAEEVAALAKEVMEGVWPLAVPLEVEVGIGEDWLAAKG

SEQ ID NO: 2483 - DNA, 2529 bp, synthetic construct
  misc_feature 1..2529: note = Variant of DNA polymerase I from Thermus sp. strain 2.9
  source 1..2529: mol_type = other DNA
atgcaccatcatcatcatcatggcggtagcggcgtgttaccggtgttcgagcctaaaggtcgcgtgcttctggttgatggccatcatctcgcgtatcgtaacttctttgccctgaaaggattaaccaccagccgtggcgagccggtacagggtgtctacggctttgcaaagtcgctcctgaaagctctgaaagaagacggtgatgtggtgattgttgtctttgatgcgaaagcgccaagttttcgccacgaagcgtacgaagcttacaaagccgggcgtgctccaacgccggaagactttcctcgccaattggcgcttatgaaggaattagtggatttgcttggcctcgaacgcttggaagttcccggtttcgaggcagacgacgtattagcgactctcgcaaagaaagccgaacgtgagggctatgaagtccagatcttgacagcagatcgcgatcttttccagcttttatctccgcgcatctcggtgttacacccggaagggcatcgtatcaccccggaatggctctgggagaaatatggtttgcgtcccgaacaatgggtggattttcgcgccttagcaggcgatccgagcgacaatattccgggagttaaaggtatcggcgagaagacggcgctcaagctccttaaagaatgggggtcgttggagaacttgcttaagaatttagatcaggtcaaaccagagtcagtgcgtgagaagattcttgcacacctcgaagacctcaaattaagccgcgaattgtcccgtgtacgcaccgatttgccgctcgaagttgatttccgtcgccgccgcgaacctgactgggagggtcttaaagcgtttttatcgcgtcttgaatttggttcgctcttgcatgaattcggccttttagaaagcccgttaccagccgaagaagcaccttggccaccgcccgaaggcgcgtttttaggttaccgtttgagtcgcccggaaccgatgtgggccgaattattggctcttgcagcgtctgcccagggacgtgtgtatcgcgcggaagaccctcatggtgcgctccgcggcctcttcgaagtccgtggactccttgccaaagacttagctgttgttgcattgcgcgaaggtcttgatttacctccgactgatgatccaatgcttcttgcgtacctcttggacccgtcaaacacgacgcccgaaggcgtagcccgtcgttacggcggcgagtggaccgaagatgcagcgaaacgcgcgttattggccgaacgtttgcacgccaatttattaggacgtttgcaaggcgaggaacgtctcctctggctttacgaagaagtggagaaaccattgagtcgcgtgctcgcgcatatggaagctaccggtgtcaaattagacgtggcgtatttggaggctctcagccttgaagttgctgccgaaatgcgccgcttggaggaagaagtattccgtttagcaggccattcctttcgccttaattctcgcgatcagttagaacgtgtgttgttcgatgaacttggtctccctcctatcggcaagacagagaagaccggtaaacgtagcacttcagcggcggttttagaagctcttcgcgaagtccatcccattgtggacaagatcttgcagtaccgcgaactcgcgaaattgaaaggcacctatattgaccctcttccggcattagtccacccgaaaacgggacgcctccatacccgcttcaaccaaacagccacggcgaccggtcgtttgtcctcctctgatccaaaccttcagaatattccagtacgtaccccattgggccagaagatccgccgcgcgtttgtagctgaggagggttggcgtttagtggccctcgattatagccaaattgaattacgtgtccttgcccatctttctggcgatgagaacctcatccgcgtgtttcaggaaggcaaagacattcacactcaaacggcaagctggatgtttggattatcagctgaagcgatcgatcctttgatgcgtcgtgcagcgaagaccatcaatttcggtgttctctacggtatgagtgcctttcgtttgtcgcaggaattaggcattccctatgaagaagctgcggcgttcattcagaaatactttcaaagctatcccaaagttaaagcatggatcgagaagactctcgaagaaggccgcacacgtggttacgtagagaccttatttggacgtcgccgctatgttcccgatttaaacgctcgcgtgaaatctgtccgtgaagccgccgaacgcatggcgttcaacatgcctgtacagggcacggcagctgacctcatgaaacttgcaatggtgcgcctttttccacaattgcgtgaagttggtgcccgcatgctcttgcaggtccacgatgaactcttgttagaagcgccaaaagagcgtgcggaagaggtggcagccctcgcgaaagaggttatggaaggcgtgtggcccttagcggtgcctcttgaagtcgaagttggtattggcgaggattggctggctgccaaaggataatga

SEQ ID NO: 2484 - protein, 841 aa, synthetic construct
  REGION 1..841: note = Variant of DNA polymerase I from Thermus sp. strain 2.9
MHHHHHHGGSGVLPVFEPKGRVLLVDGHHLAYRNFFALKGLTTSRGEPVQGVYGFAKSLLKALKEDGDVVIVVFDAKAPSFRHEAYEAYKAGRAPTPEDFPRQLALMKELVDLLGLERLEVPGFEADDVLATLAKKAEREGYEVQILTADRDLFQLLSPRISVLHPEGHRITPEWLWEKYGLRPEQWVDFRALAGDPSDNIPGVKGIGEKTALKLLKEWGSLENLLKNLDQVKPESVREKILAHLEDLKLSRELSRVRTDLPLEVDFRRRREPDWEGLKAFLSRLEFGSLLHEFGLLESPLPAEEAPWPPPEGAFLGYRLSRPEPMWAELLALAASAQGRVYRAEDPHGALRGLFEVRGLLAKDLAVVALREGLDLPPTDDPMLLAYLLDPSNTTPEGVARRYGGEWTEDAAKRALLAERLHANLLGRLQGEERLLWLYEEVEKPLSRVLAHMEATGVKLDVAYLEALSLEVAAEMRRLEEEVFRLAGHSFRLNSRDQLERVLFDELGLPPIGKTEKTGKRSTSAAVLEALREVHPIVDKILQYRELAKLKGTYIDPLPALVHPKTGRLHTRFNQTATATGRLSSSDPNLQNIPVRTPLGQKIRRAFVAEEGWRLVALDYSQIELRVLAHLSGDENLIRVFQEGKDIHTQTASWMFGLSAEAIDPLMRRAAKTINFGVLYGMSAFRLSQELGIPYEEAAAFIQKYFQSYPKVKAWIEKTLEEGRTRGYVETLFGRRRYVPDLNARVKSVREAAERMAFNMPVQGTAADLMKLAMVRLFPQLREVGARMLLQVHDELLLEAPKERAEEVAALAKEVMEGVWPLAVPLEVEVGIGEDWLAAKG

SEQ ID NO: 2485 - DNA, 2529 bp, synthetic construct
  misc_feature 1..2529: note = Variant of DNA polymerase I from Thermus sp. strain 2.9
  source 1..2529: mol_type = other DNA
atgcaccatcatcatcatcatggcggtagcggcgtgttaccggtgttcgagcctaaaggtcgcgtgcttctggttgatggccatcatctcgcgtatcgtaacttctttgccctgaaaggattaaccaccagccgtggcgagccggtacagggtgtctacggctttgcaaagtcgctcctgaaagctctgaaagaagacggtgatgtggtgattgttgtctttgatgcgaaagcgccaagttttcgccacgaagcgtacgaagcttacaaagccgggcgtgctccaacgccggaagactttcctcgccaattggcgcttatgaaggaattagtggatttgcttggcctcgaacgcttggaagttcccggtttcgaggcagacgacgtattagcgactctcgcaaagaaagccgaacgtgagggctatgaagtccagatcttgacagcagatcgcgatcttttccagcttttatctccgcgcatctcggtgttacacccggaagggcatcgtatcaccccggaatggctctgggagaaatatggtttgcgtcccgaacaatgggtggattttcgcgccttagcaggcgatccgagcgacaatattccgggagttaaaggtatcggcgagaagacggcgctcaagctccttaaagaatgggggtcgttggagaacttgcttaagaatttagatcaggtcaaaccagagtcagtgcgtgagaagattcttgcacacctcgaagacctcaaattaagccgcgaattgtcccgtgtacgcaccgatttgccgctcgaagttgatttccgtcgccgccgcgaacctgactgggagggtcttaaaaagtttttagagcgtcttgaatttggttcgctcttgcatgaattcggccttttagaaagcccgttaccagccgaagaagcaccttggccaccgcccgaaggcgcgtttttaggttaccgtttgagtcgcccggaaccgatgtgggccgaattattggctcttgcagcgtctgcccagggacgtgtgtatcgcgcggaagaccctcatggtgcgctccgcggcctcttcgaagtccgtggactccttgccaaagacttagctgttgttgcattgcgcgaaggtcttgatttacctccgactgatgatccaatgcttcttgcgtacctcttggacccgtcaaacacgacgcccgaaggcgtagcccgtcgttacggcggcgagtggaccgaagatgcagcgaaacgcgcgttattggccgaacgtttgcacgccaatttattaggacgtttgcaaggcgaggaacgtctcctctggctttacgaagaagtggagaaaccattgagtcgcgtgctcgcgcatatggaagctaccggtgtcaaattagacgtggcgtatttggaggctctcagccttgaagttgctgccgaaatgcgccgcttggaggaagaagtattccgtttagcaggccattcctttcgccttaattctcgcgatcagttagaacgtgtgttgttcgatgaacttggtctccctcctatcggcaagacagagaagaccggtaaacgtagcacttcagcggcggttttagaagctcttcgcgaagtccatcccattgtggacaagatcttgcagtaccgcgaactcgcgaaattgaaaggcacctatattgaccctcttccggcattagtccacccgaaaacgggacgcctccatacccgcttcaaccaaacagccacggcgaccggtcgtttgtcctcctctgatccaaaccttcagaatattccagtacgtaccccattgggccagaagatccgccgcgcgtttgtagctgaggagggttggcgtttagtggccctcgattatagccaaattgaattacgtgtccttgcccatctttctggcgatgagaacctcatccgcgtgtttcaggaaggcaaagacattcacactcaaacggcaagctggatgtttggattatcagctgaagcgatcgatcctttgatgcgtcgtgcagcgaagaccatcaatttcggtgttctctacggtatgagtgcctttcgtttgtcgcaggaattaggcattccctatgaagaagctgcggcgttcattcagaaatactttcaaagctatcccaaagttaaagcatggatcgagaagactctcgaagaaggccgcacacgtggttacgtagagaccttatttggacgtcgccgctatgttcccgatttaaacgctcgcgtgaaatctgtccgtgaagccgccgaacgcatggcgttcaacatgcctgtacagggcacggcagctgacctcatgaaacttgcaatggtgcgcctttttccacaattgcgtgaagttggtgcccgcatgctcttgcaggtccacgatgaactcttgttagaagcgccaaaagagcgtgcggaagaggtggcagccctcgcgaaagaggttatggaaggcgtgtggcccttagcggtgcctcttgaagtcgaagttggtattggcgaggattggctggctgccaaaggataatga

SEQ ID NO: 2486 - protein, 841 aa, synthetic construct
  REGION 1..841: note = Variant of DNA polymerase I from Thermus sp. strain 2.9
MHHHHHHGGSGVLPVFEPKGRVLLVDGHHLAYRNFFALKGLTTSRGEPVQGVYGFAKSLLKALKEDGDVVIVVFDAKAPSFRHEAYEAYKAGRAPTPEDFPRQLALMKELVDLLGLERLEVPGFEADDVLATLAKKAEREGYEVQILTADRDLFQLLSPRISVLHPEGHRITPEWLWEKYGLRPEQWVDFRALAGDPSDNIPGVKGIGEKTALKLLKEWGSLENLLKNLDQVKPESVREKILAHLEDLKLSRELSRVRTDLPLEVDFRRRREPDWEGLKKFLERLEFGSLLHEFGLLESPLPAEEAPWPPPEGAFLGYRLSRPEPMWAELLALAASAQGRVYRAEDPHGALRGLFEVRGLLAKDLAVVALREGLDLPPTDDPMLLAYLLDPSNTTPEGVARRYGGEWTEDAAKRALLAERLHANLLGRLQGEERLLWLYEEVEKPLSRVLAHMEATGVKLDVAYLEALSLEVAAEMRRLEEEVFRLAGHSFRLNSRDQLERVLFDELGLPPIGKTEKTGKRSTSAAVLEALREVHPIVDKILQYRELAKLKGTYIDPLPALVHPKTGRLHTRFNQTATATGRLSSSDPNLQNIPVRTPLGQKIRRAFVAEEGWRLVALDYSQIELRVLAHLSGDENLIRVFQEGKDIHTQTASWMFGLSAEAIDPLMRRAAKTINFGVLYGMSAFRLSQELGIPYEEAAAFIQKYFQSYPKVKAWIEKTLEEGRTRGYVETLFGRRRYVPDLNARVKSVREAAERMAFNMPVQGTAADLMKLAMVRLFPQLREVGARMLLQVHDELLLEAPKERAEEVAALAKEVMEGVWPLAVPLEVEVGIGEDWLAAKG

SEQ ID NO: 2487 - DNA, 2529 bp, synthetic construct
  misc_feature 1..2529: note = Variant of DNA polymerase I from Thermus sp. strain 2.9
  source 1..2529: mol_type = other DNA
atgcaccatcatcatcatcatggcggtagcggcgtgttaccggtgttcgagcctaaaggtcgcgtgcttctggttgatggccatcatctcgcgtatcgtaacttctttgccctgaaaggattaaccaccagccgtggcgagccggtacagggtgtctacggctttgcaaagtcgctcctgaaagctctgaaagaagacggtgatgtggtgattgttgtctttgatgcgaaagcgccaagttttcgccacgaagcgtacgaagcttacaaagccgggcgtgctccaacgccggaagactttcctcgccaattggcgcttatgaaggaattagtggatttgcttggcctcgaacgcttggaagttcccggtttcgaggcagacgacgtattagcgactctcgcaaagaaagccgaacgtgagggctatgaagtccagatcttgacagcagatcgcgatcttttccagcttttatctccgcgcatctcggtgttacacccggaagggcatcgtatcaccccggaatggctctgggagaaatatggtttgcgtcccgaacaatgggtggattttcgcgccttagcaggcgatccgagcgacaatattccgggagttaaaggtatcggcgagaagacggcgctcaagctccttaaagaatgggggtcgttggagaacttgcttaagaatttagatcaggtcaaaccagagtcagtgcgtgagaagattcttgcacacctcgaagacctcaaattaagccgcgaattgtcccgtgtacgcaccgatttgccgctcgaagttgatttccgtcgccgccgcgaacctgactgggagggtcttaaagcgtttttagagcgtcttgaatttggttcgctcttgcatgaattcggccttttagaaagcccgttaccagccgaagaagcaccttggccaccgcccgaaggcgcgtttttaggttaccgtttgagtcgcccggaaccgatgtgggccgaattattggctcttgcagcgtctgcccagggacgtgtgtatcgcgcggaagaccctcatggtgcgctccgcggcctcttcgaagtccgtggactccttgccaaagacttagctgttgttgcattgcgcgaaggtcttgatttacctccgactgatgatccaatgcttcttgcgtacctcttggacccgtcaaacacgacgcccgaaggcgtagcccgtcgttacggcggcgagtggaccgaagatgcagcgaaacgcgcgttattggccgaacgtttgcacgccaatttattaggacgtttgcaaggcgaggaacgtctcctctggctttacgaagaagtggagaaaccattgagtcgcgtgctcgcgcatatggaagctaccggtgtcaaattagacgtggcgtatttggaggctctcagccttgaagttgctgccgaaatgcgccgcttggaggaagaagtattccgtttagcaggccattcctttcgccttaattctcgcgatcagttagaacgtgtgttgttcgatgaacttggtctccctcctatcggcaagacagagaagaccggtaaacgtagcacttcagcggcggttttagaagctcttcgcgaagtccatcccattgtggacaagatcttgcagtaccgcgaactcgcgaaattgaaaggcacctatattgaccctcttccggcattagtccacccgaaaacgggacgcctccatacccgcttcaaccaaacagccacggcgaccggtcgtttgtcctcctctgatccaaaccttcagaatattccagtacgtaccccattgggccagaagatccgccgcgcgtttgtagctgaggagggttggcgtttagtggccctcgattatagccaaattgaattacgtgtccttgcccatctttctggcgatgagaacctcatccgcgtgtttcaggaaggcaaagacattcacactcaaacggcaagctggatgtttggattatcagctgaagcgatcgatcctttgatgcgtcgtgcagcgaagaccatcaatttcggtgttctctacggtatgagtgcctttcgtttgtcgcaggaattaggcattacgtatgaagaagctgcggcgttcattcagaaatactttcaaagctatcccaaagttaaagcatggatcgagaagactctcgaagaaggccgcacacgtggttacgtagagaccttatttggacgtcgccgctatgttcccgatttaaacgctcgcgtgaaatctgtccgtgaagccgccgaacgcatggcgttcaacatgcctgtacagggcacggcagctgacctcatgaaacttgcaatggtgcgcctttttccacaattgcgtgaagttggtgcccgcatgctcttgcaggtccacgatgaactcttgttagaagcgccaaaagagcgtgcggaagaggtggcagccctcgcgaaagaggttatggaaggcgtgtggcccttagcggtgcctcttgaagtcgaagttggtattggcgaggattggctggctgccaaaggataatga

SEQ ID NO: 2488 - protein, 841 aa, synthetic construct
  REGION 1..841: note = Variant of DNA polymerase I from Thermus sp. strain 2.9
MHHHHHHGGSGVLPVFEPKGRVLLVDGHHLAYRNFFALKGLTTSRGEPVQGVYGFAKSLLKALKEDGDVVIVVFDAKAPSFRHEAYEAYKAGRAPTPEDFPRQLALMKELVDLLGLERLEVPGFEADDVLATLAKKAEREGYEVQILTADRDLFQLLSPRISVLHPEGHRITPEWLWEKYGLRPEQWVDFRALAGDPSDNIPGVKGIGEKTALKLLKEWGSLENLLKNLDQVKPESVREKILAHLEDLKLSRELSRVRTDLPLEVDFRRRREPDWEGLKAFLERLEFGSLLHEFGLLESPLPAEEAPWPPPEGAFLGYRLSRPEPMWAELLALAASAQGRVYRAEDPHGALRGLFEVRGLLAKDLAVVALREGLDLPPTDDPMLLAYLLDPSNTTPEGVARRYGGEWTEDAAKRALLAERLHANLLGRLQGEERLLWLYEEVEKPLSRVLAHMEATGVKLDVAYLEALSLEVAAEMRRLEEEVFRLAGHSFRLNSRDQLERVLFDELGLPPIGKTEKTGKRSTSAAVLEALREVHPIVDKILQYRELAKLKGTYIDPLPALVHPKTGRLHTRFNQTATATGRLSSSDPNLQNIPVRTPLGQKIRRAFVAEEGWRLVALDYSQIELRVLAHLSGDENLIRVFQEGKDIHTQTASWMFGLSAEAIDPLMRRAAKTINFGVLYGMSAFRLSQELGITYEEAAAFIQKYFQSYPKVKAWIEKTLEEGRTRGYVETLFGRRRYVPDLNARVKSVREAAERMAFNMPVQGTAADLMKLAMVRLFPQLREVGARMLLQVHDELLLEAPKERAEEVAALAKEVMEGVWPLAVPLEVEVGIGEDWLAAKG

SEQ ID NO: 2489 - DNA, 2529 bp, synthetic construct
  misc_feature 1..2529: note = Variant of DNA polymerase I from Thermus sp. strain 2.9
  source 1..2529: mol_type = other DNA
atgcaccatcatcatcatcatggcggtagcggcgtgttaccggtgttcgagcctaaaggtcgcgtgcttctggttgatggccatcatctcgcgtatcgtaacttctttgccctgaaaggattaaccaccagccgtggcgagccggtacagggtgtctacggctttgcaaagtcgctcctgaaagctctgaaagaagacggtgatgtggtgattgttgtctttgatgcgaaagcgccaagttttcgccacgaagcgtacgaagcttacaaagccgggcgtgctccaacgccggaagactttcctcgccaattggcgcttatgaaggaattagtggatttgcttggcctcgaacgcttggaagttcccggtttcgaggcagacgacgtattagcgactctcgcaaagaaagccgaacgtgagggctatgaagtccagatcttgacagcagatcgcgatcttttccagcttttatctccgcgcatctcggtgttacacccggaagggcatcgtatcaccccggaatggctctgggagaaatatggtttgcgtcccgaacaatgggtggattttcgcgccttagcaggcgatccgagcgacaatattccgggagttaaaggtatcggcgagaagacggcgctcaagctccttaaagaatgggggtcgttggagaacttgcttaagaatttagatcaggtcaaaccagagtcagtgcgtgagaagattcttgcacacctcgaagacctcaaattaagccgcgaattgtcccgtgtacgcaccgatttgccgctcgaagttgatttccgtcgccgccgcgaacctgactgggagggtcttaaagcgtttttagagcgtcttgaatttggttcgctcttgcatgaattcggccttttagaaagcccgttaccagccgaagaagcaccttggccaccgcccgaaggcgcgtttttaggttaccgtttgagtcgcccggaaccgatgtgggccgaattattggctcttgcagcgtctgcccagggacgtgtgtatcgcgcggaagaccctcatggtgcgctccgcggcctcttcgaagtccgtggactccttgccaaagacttagctgttgttgcattgcgcgaaggtcttgatttacctccgactgatgatccaatgcttcttgcgtacctcttggacccgtcaaacacgacgcccgaaggcgtagcccgtcgttacggcggcgagtggaccgaagatgcagcgaaacgcgcgttattggccgaacgtttgcacgccaatttattaggacgtttgcaaggcgaggaacgtctcctctggctttacgaagaagtggagaaaccattgagtcgcgtgctcgcgcatatggaagctaccggtgtcaaattagacgtggcgtatttggaggctctcagccttgaagttgctgccgaaatgcgccgcttggaggaagaagtattccgtttagcaggccattcctttcgccttaattctcgcgatcagttagaacgtgtgttgttcgatgaacttggtctccctcctatcggcaagacagagaagaccggtaaacgtagcacttcagcggcggttttagaagctcttcgcgaagtccatcccattgtggacaagatcttgcagtaccgcgaactcgcgaaattgaaaggcacctatattgaccctcttccggcattagtccacccgaaaacgggacgcctccatacccgcttcaaccaaacagccacggcgaccggtcgtttgtcctcctctgatccaaaccttcagaatattccagtacgtaccccattgggccagaagatccgccgcgcgtttgtagctgaggagggttggcgtttagtggccctcgattatagccaaattgaattacgtgtccttgcccatctttctggcgatgagaacctcatccgcgtgtttcaggaaggcaaagacattcacactcaaacggcaagctggatgtttggattatcagctgaagcgatcgatcctttgatgcgtcgtgcagcgaagaccatcaatttcggtgttctctacggtatgagtgcctttcgtttgtcgcaggaattaggcattccctatgaagaagctgcggcgttcattcagaaatactttcaaagctatcccaaagttaaagcatggatcgagaagactctcgaagaaggccgcacacgtggttacgtagagaccttatttggacgtcgccgctatgttcccgatttaaacgctcgcgtgaaatctgtccgtgaagccgccgaacgcatggcgttcaacatgcctgtacagggcacggcagctgacctcatgaaacttgcaatggtgcgcctttttccacaattgcgtgaagttggtgcccgcatgctcttgcaggtccacgatgaactcttgttagaagcgccaaaagagcgtgcggaagaggtggcagccctcgcgaaaatggttatggaaggcgtgtggcccttagcggtgcctcttgaagtcgaagttggtattggcgaggattggctggctgccaaaggataatga

SEQ ID NO: 2490 - protein, 841 aa, synthetic construct
  REGION 1..841: note = Variant of DNA polymerase I from Thermus sp. strain 2.9
MHHHHHHGGSGVLPVFEPKGRVLLVDGHHLAYRNFFALKGLTTSRGEPVQGVYGFAKSLLKALKEDGDVVIVVFDAKAPSFRHEAYEAYKAGRAPTPEDFPRQLALMKELVDLLGLERLEVPGFEADDVLATLAKKAEREGYEVQILTADRDLFQLLSPRISVLHPEGHRITPEWLWEKYGLRPEQWVDFRALAGDPSDNIPGVKGIGEKTALKLLKEWGSLENLLKNLDQVKPESVREKILAHLEDLKLSRELSRVRTDLPLEVDFRRRREPDWEGLKAFLERLEFGSLLHEFGLLESPLPAEEAPWPPPEGAFLGYRLSRPEPMWAELLALAASAQGRVYRAEDPHGALRGLFEVRGLLAKDLAVVALREGLDLPPTDDPMLLAYLLDPSNTTPEGVARRYGGEWTEDAAKRALLAERLHANLLGRLQGEERLLWLYEEVEKPLSRVLAHMEATGVKLDVAYLEALSLEVAAEMRRLEEEVFRLAGHSFRLNSRDQLERVLFDELGLPPIGKTEKTGKRSTSAAVLEALREVHPIVDKILQYRELAKLKGTYIDPLPALVHPKTGRLHTRFNQTATATGRLSSSDPNLQNIPVRTPLGQKIRRAFVAEEGWRLVALDYSQIELRVLAHLSGDENLIRVFQEGKDIHTQTASWMFGLSAEAIDPLMRRAAKTINFGVLYGMSAFRLSQELGIPYEEAAAFIQKYFQSYPKVKAWIEKTLEEGRTRGYVETLFGRRRYVPDLNARVKSVREAAERMAFNMPVQGTAADLMKLAMVRLFPQLREVGARMLLQVHDELLLEAPKERAEEVAALAKMVMEGVWPLAVPLEVEVGIGEDWLAAKG

SEQ ID NO: 2491 - DNA, 2529 bp, synthetic construct
  misc_feature 1..2529: note = Variant of DNA polymerase I from Thermus sp. strain 2.9
  source 1..2529: mol_type = other DNA
atgcaccatcatcatcatcatggcggtagcggcgtgttaccggtgttcgagcctaaaggtcgcgtgcttctggttgatggccatcatctcgcgtatcgtaacttctttgccctgaaaggattaaccaccagccgtggcgagccggtacagggtgtctacggctttgcaaagtcgctcctgaaagctctgaaagaagacggtgatgtggtgattgttgtctttgatgcgaaagcgccaagttttcgccacgaagcgtacgaagcttacaaagccgggcgtgctccaacgccggaagactttcctcgccaattggcgcttatgaaggaattagtggatttgcttggcctcgaacgcttggaagttcccggtttcgaggcagacgacgtattagcgactctcgcaaagaaagccgaacgtgagggctatgaagtccagatcttgacagcagatcgcgatcttttccagcttttatctccgcgcatctcggtgttacacccggaagggcatcgtatcaccccggaatggctctgggagaaatatggtttgcgtcccgaacaatgggtggattttcgcgccttagcaggcgatccgagcgacaatattccgggagttaaaggtatcggcgagaagacggcgctcaagctccttaaagaatgggggtcgttggagaacttgcttaagaatttagatcaggtcaaaccagagtcagtgcgtgagaagattcttgcacacctcgaagacctcaaattaagccgcgaattgtcccgtgtacgcaccgatttgccgctcgaagttgatttccgtcgccgccgcgaacctgactgggagggtcttaaagcgtttttagagcgtcttgaatttggttcgctcttgcatgaattcggccttttagaaagcccgttaccagccgaagaagcaccttggccaccgcccgaaggcgcgtttttaggttaccgtttgagtcgcccggaaccgatgtgggccgaattattggctcttgcagcgtctgcccagggacgtgtgtatcgcgcggaagaccctcatggtgcgctccgcggcctcttcgaagtccgtggactccttgccaaagacttagctgttgttgcattgcgcgaaggtcttgatttacctccgactgatgatccaatgcttcttgcgtacctcttggacccgtcaaacacgacgcccgaaggcgtagcccgtcgttacggcggcgagtggaccgaagatgcagcgaaacgcgcgttattggccgaacgtttgcacgccaatttattaggacgtttgcaaggcgaggaacgtctcctctggctttacgaagaagtggagaaaccattgagtcgcgtgctcgcgcatatggaagctaccggtgtcaaattagacgtggcgtatttggaggctctcagccttgaagttgctgccgaaatgcgccgcttggaggaagaagtattccgtttagcaggccattcctttcgccttaattctcgcgatcagttagaacgtgtgttgttcgatgaacttggtctccctcctatcggcaagacagagaagaccggtaaacgtagcacttcagcggcggttttagaagctcttcgcgaagtccatcccattgtggacaagatcttgcagtaccgcgaactcgcgaaattgaaaggcacctatattgaccctcttccggcattagtccacccgaaaacgggacgcctccatacccgcttcaaccaaacagccacggcgaccggtcgtttgtcctcctctgatccaaaccttcagaatattccagtacgtaccccattgggccagaagatccgccgcgcgtttgtagctgaggagggttggcgtttagtggccctcgattatagccaaattgaattacgtgtccttgcccatctttctggcgatgagaacctcatccgcgtgtttcaggaaggcaaagacattcacactcaaacggcaagctggatgtttggattatcagctgaagcgatcgatcctttgatgcgtcgtgcagcgaagaccatcaatttcggtgttctctacggtatgagtgcctttcgtttgtcgcaggaattaggcattccctatgaagaagctgcggcgttcattcagaaatactttcaaagctatcccaaagttaaagcatggatcgagaagactctcgaagaaggccgcacacgtggttacgtagagaccttatttggacgtcgccgctatgttcccgatttaaacgctcgcgtgaaatctagtcgtgaagccgccgaacgcatggcgttcaacatgcctgtacagggcacggcagctgacctcatgaaacttgcaatggtgcgcctttttccacaattgcgtgaagttggtgcccgcatgctcttgcaggtccacgatgaactcttgttagaagcgccaaaagagcgtgcggaagaggtggcagccctcgcgaaagaggttatggaaggcgtgtggcccttagcggtgcctcttgaagtcgaagttggtattggcgaggattggctggctgccaaaggataatga

SEQ ID NO: 2492 - protein, 841 aa, synthetic construct
  REGION 1..841: note = Variant of DNA polymerase I from Thermus sp. strain 2.9
MHHHHHHGGSGVLPVFEPKGRVLLVDGHHLAYRNFFALKGLTTSRGEPVQGVYGFAKSLLKALKEDGDVVIVVFDAKAPSFRHEAYEAYKAGRAPTPEDFPRQLALMKELVDLLGLERLEVPGFEADDVLATLAKKAEREGYEVQILTADRDLFQLLSPRISVLHPEGHRITPEWLWEKYGLRPEQWVDFRALAGDPSDNIPGVKGIGEKTALKLLKEWGSLENLLKNLDQVKPESVREKILAHLEDLKLSRELSRVRTDLPLEVDFRRRREPDWEGLKAFLERLEFGSLLHEFGLLESPLPAEEAPWPPPEGAFLGYRLSRPEPMWAELLALAASAQGRVYRAEDPHGALRGLFEVRGLLAKDLAVVALREGLDLPPTDDPMLLAYLLDPSNTTPEGVARRYGGEWTEDAAKRALLAERLHANLLGRLQGEERLLWLYEEVEKPLSRVLAHMEATGVKLDVAYLEALSLEVAAEMRRLEEEVFRLAGHSFRLNSRDQLERVLFDELGLPPIGKTEKTGKRSTSAAVLEALREVHPIVDKILQYRELAKLKGTYIDPLPALVHPKTGRLHTRFNQTATATGRLSSSDPNLQNIPVRTPLGQKIRRAFVAEEGWRLVALDYSQIELRVLAHLSGDENLIRVFQEGKDIHTQTASWMFGLSAEAIDPLMRRAAKTINFGVLYGMSAFRLSQELGIPYEEAAAFIQKYFQSYPKVKAWIEKTLEEGRTRGYVETLFGRRRYVPDLNARVKSSREAAERMAFNMPVQGTAADLMKLAMVRLFPQLREVGARMLLQVHDELLLEAPKERAEEVAALAKEVMEGVWPLAVPLEVEVGIGEDWLAAKG

SEQ ID NO: 2493 - DNA, 2529 bp, synthetic construct
  misc_feature 1..2529: note = Variant of DNA polymerase I from Thermus sp. strain 2.9
  source 1..2529: mol_type = other DNA
atgcaccatcatcatcatcatggcggtagcggcgtgttaccggtgttcgagcctaaaggtcgcgtgcttctggttgatggccatcatctcgcgtatcgtaacttctttgccctgaaaggattaaccaccagccgtggcgagccggtacagggtgtctacggctttgcaaagtcgctcctgaaagctctgaaagaagacggtgatgtggtgattgttgtctttgatgcgaaagcgccaagttttcgccacgaagcgtacgaagcttacaaagccgggcgtgctccaacgccggaagactttcctcgccaattggcgcttatgaaggaattagtggatttgcttggcctcgaacgcttggaagttcccggtttcgaggcagacgacgtattagcgactctcgcaaagaaagccgaacgtgagggctatgaagtccagatcttgacagcagatcgcgatcttttccagcttttatctccgcgcatctcggtgttacacccggaagggcatcgtatcaccccggaatggctctgggagaaatatggtttgcgtcccgaacaatgggtggattttcgcgccttagcaggcgatccgagcgacaatattccgggagttaaaggtatcggcgagaagacggcgctcaagctccttaaagaatgggggtcgttggagaacttgcttaagaatttagatcaggtcaaaccagagtcagtgcgtgagaagattcttgcacacctcgaagacctcaaattaagccgcgaattgtcccgtgtacgcaccgatttgccgctcgaagttgatttccgtcgccgccgcgaacctgactgggagggtcttaaagcgtttttagagcgtcttgaatttggttcgctcttgcatgaattcggccttttagaaagcccgttaccagccgaagaagcaccttggccaccgcccgaaggcgcgtttttaggttaccgtttgagtcgcccggaaccgatgtgggccgaattattggctcttgcagcgtctgcccagggacgtgtgtatcgcgcggaagaccctcatggtgcgctccgcggcctcttcgaagtccgtggactccttgccaaagacttagctgttgttgcattgcgcgaaggtcttgatttacctccgactgatgatccaatgcttcttgcgtacctcttggacccgtcaaacacgacgcccgaaggcgtagcccgtcgttacggcggcgagtggaccgaagatgcagcgaaacgcgcgttattggccgaacgtttgcacgccaatttattaggacgtttgcaaggcgaggaacgtctcctctggctttacgaagaagtggagaaaccattgagtcgcgtgctcgcgcatatggaagctaccggtgtcaaattagacgtggcgtatttggaggctctcagccttgaagttgctgccgaaatgcgccgcttggaggaagaagtattccgtttagcaggccattcctttcgccttaattctcgcgatcagttagaacgtgtgttgttcgatgaacttggtctccctcctatcggcaagacagagaagaccggtaaacgtagcacttcagcggcggttttagaagctcttcgcgaagtccatcccattgtggacaagatcttgcagtaccgcgaactcgcgaaattgaaaggcacctatattgaccctcttccggcattagtccacccgaaaacgggacgcctccatacccgcttcaaccaaacagccacggcgaccggtcgtttgtcctcctctgatccaaaccttcagaatattccagtacgtaccccattgggccagaagatccgccgcgcgtttgtagctgaggagggttggcgtttagtggccctcgattatagccaaattgaattacgtgtccttgcccatctttctggcgatgagaacctcatccgcgtgtttcaggaaggcaaagacattcacactcaaacggcaagctggatgtttggattatcagctgaagcgatcgatcctttgatgcgtcgtgcagcgaagaccatcaatttcggtgttctctacggtatgagtgcctttcgtttgtcgcaggaattaggcattccctatgaagaagctgcggcgttcattcagaaatactttcaaagctatcccaaagttaaagcatggatcgataagactctcgaagaaggccgcacacgtggttacgtagagaccttatttggacgtcgccgctatgttcccgatttaaacgctcgcgtgaaatctgtccgtgaagccgccgaacgcatggcgttcaacatgcctgtacagggcacggcagctgacctcatgaaacttgcaatggtgcgcctttttccacaattgcgtgaagttggtgcccgcatgctcttgcaggtccacgatgaactcttgttagaagcgccaaaagagcgtgcggaagaggtggcagccctcgcgaaagaggttatggaaggcgtgtggcccttagcggtgcctcttgaagtcgaagttggtattggcgaggattggctggctgccaaaggataatga

SEQ ID NO: 2494 - protein, 841 aa, synthetic construct
  REGION 1..841: note = Variant of DNA polymerase I from Thermus sp. strain 2.9
MHHHHHHGGSGVLPVFEPKGRVLLVDGHHLAYRNFFALKGLTTSRGEPVQGVYGFAKSLLKALKEDGDVVIVVFDAKAPSFRHEAYEAYKAGRAPTPEDFPRQLALMKELVDLLGLERLEVPGFEADDVLATLAKKAEREGYEVQILTADRDLFQLLSPRISVLHPEGHRITPEWLWEKYGLRPEQWVDFRALAGDPSDNIPGVKGIGEKTALKLLKEWGSLENLLKNLDQVKPESVREKILAHLEDLKLSRELSRVRTDLPLEVDFRRRREPDWEGLKAFLERLEFGSLLHEFGLLESPLPAEEAPWPPPEGAFLGYRLSRPEPMWAELLALAASAQGRVYRAEDPHGALRGLFEVRGLLAKDLAVVALREGLDLPPTDDPMLLAYLLDPSNTTPEGVARRYGGEWTEDAAKRALLAERLHANLLGRLQGEERLLWLYEEVEKPLSRVLAHMEATGVKLDVAYLEALSLEVAAEMRRLEEEVFRLAGHSFRLNSRDQLERVLFDELGLPPIGKTEKTGKRSTSAAVLEALREVHPIVDKILQYRELAKLKGTYIDPLPALVHPKTGRLHTRFNQTATATGRLSSSDPNLQNIPVRTPLGQKIRRAFVAEEGWRLVALDYSQIELRVLAHLSGDENLIRVFQEGKDIHTQTASWMFGLSAEAIDPLMRRAAKTINFGVLYGMSAFRLSQELGIPYEEAAAFIQKYFQSYPKVKAWIDKTLEEGRTRGYVETLFGRRRYVPDLNARVKSVREAAERMAFNMPVQGTAADLMKLAMVRLFPQLREVGARMLLQVHDELLLEAPKERAEEVAALAKEVMEGVWPLAVPLEVEVGIGEDWLAAKG

SEQ ID NO: 2495 - DNA, 2529 bp, synthetic construct
  misc_feature 1..2529: note = Variant of DNA polymerase I from Thermus sp. strain 2.9
  source 1..2529: mol_type = other DNA
atgcaccatcatcatcatcatggcggtagcggcgtgttaccggtgttcgagcctaaaggtcgcgtgcttctggttgatggccatcatctcgcgtatcgtaacttctttgccctgaaaggattaaccaccagccgtggcgagccggtacagggtgtctacggctttgcaaagtcgctcctgaaagctctgaaagaagacggtgatgtggtgattgttgtctttgatgcgaaagcgccaagttttcgccacgaagcgtacgaagcttacaaagccgggcgtgctccaacgccggaagactttcctcgccaattggcgcttatgaaggaattagtggatttgcttggcctcgaacgcttggaagttcccggtttcgaggcagacgacgtattagcgactctcgcaaagaaagccgaacgtgagggctatgaagtccagatcttgacagcagatcgcgatcttttccagcttttatctccgcgcatctcggtgttacacccggaagggcatcgtatcaccccggaatggctctgggagaaatatggtttgcgtcccgaacaatgggtggattttcgcgccttagcaggcgatccgagcgacaatattccgggagttaaaggtatcggcgagaagacggcgctcaagctccttaaagaatgggggtcgttggagaacttgcttaagaatttagatcaggtcaaaccagagtcagtgcgtgagaagattcttgcacacctcgaagacctcaaattaagccgcgaattgtcccgtgtacgcaccgatttgccgctcgaagttgatttccagcgccgccgcgaacctgactgggagggtcttaaagcgtttttagagcgtcttgaatttggttcgctcttgcatgaattcggccttttagaaagcccgttaccagccgaagaagcaccttggccaccgcccgaaggcgcgtttttaggttaccgtttgagtcgcccggaaccgatgtgggccgaattattggctcttgcagcgtctgcccagggacgtgtgtatcgcgcggaagaccctcatggtgcgctccgcggcctcttcgaagtccgtggactccttgccaaagacttagctgttgttgcattgcgcgaaggtcttgatttacctccgactgatgatccaatgcttcttgcgtacctcttggacccgtcaaacacgacgcccgaaggcgtagcccgtcgttacggcggcgagtggaccgaagatgcagcgaaacgcgcgttattggccgaacgtttgcacgagaatttattaggacgtttgcaaggggaggaacgtctcctctggctttacgaagaagtggagaaaccattgagtcgcgtgctcgcgcatatggaagctaccggtgtcaaattagacgtggcgtatttggaggctctcagccttgaagttgctgccgaaatgcgccgcttggaggaagaagtattccgtttagcaggccattcctttcgccttaattctcgcgatcagttagaacgtgtgttgttcgatgaacttggtctccctcctatcggcaagacagagaagaccggtaaacgtagcacttcagcggcggttttagaagctcttcgcgaagtccatcccattgtggacaagatcttgcaataccgcgaactcgcgaaattgaaaggcacctatattgaccctcttccggcattagtccacccgaaaacgggacgcctccatacccgcttcaaccaaacagccacggcgaccggtcgtttgtcctcctctgatccaaaccttcagaatattccagtacgtaccccattgggccagaagatccgccgcgcgtttgtagctgaggagggttggcgtttagtggccctcgattatagccaaattgaattacgtgtccttgcccatctttctggcgatgagaacctcatccgcgtgtttcaggaaggcaaagacattcacactcaaacggcaagctggatgtttggattatcagctgaagcgatcgatcctttgatgcgtcgtgcagcgaagaccatcaatttcggtgttctctacggtatgagtgcctttcgtttgtcgcaggaattaggcattccctatgaagaagctgcggcgttcattcagaaatactttcaaagctatcccaaagttaaagcatggatcgagaagactctcgaagaaggccgcacacgtggttacgtagagaccttatttggacgtcgccgctatgttcccgatttaaacgctcgcgtgaaatctgtccgtgaagccgccgaacgcatggcgttcaacatgcctgtacagggcacggcagctgacctcatgaaacttgcaatggtgcgcctttttccacaattgcgtgaagttggtgcccgcatgctcttgcaggtccacgatgaactcttgttagaagcgccaaaagagcgtgcggaagaggtggcagccctcgcgaaagaggttatggaaggcgtgtggcccttagcggtgcctcttgaagtcgaagttggtattggcgaggattggctggctgccaaaggataatga

SEQ ID NO: 2496 - protein, 841 aa, synthetic construct
  REGION 1..841: note = Variant of DNA polymerase I from Thermus sp. strain 2.9
MHHHHHHGGSGVLPVFEPKGRVLLVDGHHLAYRNFFALKGLTTSRGEPVQGVYGFAKSLLKALKEDGDVVIVVFDAKAPSFRHEAYEAYKAGRAPTPEDFPRQLALMKELVDLLGLERLEVPGFEADDVLATLAKKAEREGYEVQILTADRDLFQLLSPRISVLHPEGHRITPEWLWEKYGLRPEQWVDFRALAGDPSDNIPGVKGIGEKTALKLLKEWGSLENLLKNLDQVKPESVREKILAHLEDLKLSRELSRVRTDLPLEVDFQRRREPDWEGLKAFLERLEFGSLLHEFGLLESPLPAEEAPWPPPEGAFLGYRLSRPEPMWAELLALAASAQGRVYRAEDPHGALRGLFEVRGLLAKDLAVVALREGLDLPPTDDPMLLAYLLDPSNTTPEGVARRYGGEWTEDAAKRALLAERLHENLLGRLQGEERLLWLYEEVEKPLSRVLAHMEATGVKLDVAYLEALSLEVAAEMRRLEEEVFRLAGHSFRLNSRDQLERVLFDELGLPPIGKTEKTGKRSTSAAVLEALREVHPIVDKILQYRELAKLKGTYIDPLPALVHPKTGRLHTRFNQTATATGRLSSSDPNLQNIPVRTPLGQKIRRAFVAEEGWRLVALDYSQIELRVLAHLSGDENLIRVFQEGKDIHTQTASWMFGLSAEAIDPLMRRAAKTINFGVLYGMSAFRLSQELGIPYEEAAAFIQKYFQSYPKVKAWIEKTLEEGRTRGYVETLFGRRRYVPDLNARVKSVREAAERMAFNMPVQGTAADLMKLAMVRLFPQLREVGARMLLQVHDELLLEAPKERAEEVAALAKEVMEGVWPLAVPLEVEVGIGEDWLAAKG

SEQ ID NO: 2497 - DNA, 2529 bp, synthetic construct
  misc_feature 1..2529: note = Variant of DNA polymerase I from Thermus sp. strain 2.9
  source 1..2529: mol_type = other DNA
atgcaccatcatcatcatcatggcggtagcggcgtgttaccggtgttcgagcctaaaggtcgcgtgcttctggttgatggccatcatctcgcgtatcgtaacttctttgccctgaaaggattaaccaccagccgtggcgagccggtacagggtgtctacggctttgcaaagtcgctcctgaaagctctgaaagaagacggtgatgtggtgattgttgtctttgatgcgaaagcgccaagttttcgccacgaagcgtacgaagcttacaaagccgggcgtgctccaacgccggaagactttcctcgccaattggcgcttatgaaggaattagtggatttgcttggcctcgaacgcttggaagttcccggtttcgaggcagacgacgtattagcgactctcgcaaagaaagccgaacgtgagggctatgaagtccagatcttgacagcagatcgcgatcttttccagcttttatctccgcgcatctcggtgttacacccggaagggcatcgtatcaccccggaatggctctgggagaaatatggtttgcgtcccgaacaatgggtggattttcgcgccttagcaggcgatccgagcgacaatattccgggagttaaaggtatcggcgagaagacggcgctcaagctccttaaagaatgggggtcgttggagaacttgcttaagaatttagatcaggtcaaaccagagtcagtgcgtgagaagattcttgcacacctcgaagacctcaaattaagccgcgaattgtcccgtgtacgcaccgatttgccgctcgaagttgatttccgtcgccgccgcgaacctgactgggagggtcttaaagcgtttttagagcgtcttgaatttggttcgctcttgcatgaattcggccttttagaaagcccgttaccagccgaagaagcaccttggccaccgcccgaaggcgcgtttttaggttaccgtttgagtcgcccggaaccgatgtgggccgaattattggctcttgcagcgtctgcccagggacgtgtgtatcgcgcggaagaccctcatggtgcgctccgcggcctcttcgaagtccgtggactccttgccaaagacttagctgttgttgcattgcgcgaaggtcttgatttacctccgactgatgatccaatgcttcttgcgtacctcttggacccgtcaaacacgacgcccgaaggcgtagcccgtcgttacggcggcgagtggaccgaagatgcagcgaaacgcgcgttattggccgaacgtttgcacgccaatttattaggacgtttgcaaggcgaggaacgtctcctctggctttacgaagaagtggagaaaccattgagtcgcgtgctcgcgcatatggaagctaccggtgtcaaattagacgtggcgtatttggaggctctcagccttgaagttgctgccgaaatgcgccgcttggaggaagaagtattccgtttagcaggccattcctttcgccttaattctcgcgatcagttagaacgtgtgttgttcgatgaacttggtctccctcctatcggcaagacagagaagaccggtaaacgtagcacttcagcggcggttttagaagctcttcgcgaagtccatcccattgtggacaagatcttgcagtaccgcgaactcgcgaaattgaaaggcacctatattgaccctcttccgatgttagtccacccgaaaacgggacgcctccatacccgcttcaaccaaacagccacggcgaccggtcgtttgtcctcctctgatccaaaccttcagaatattccagtacgtaccccattgggccagaagatccgccgcgcgtttgtagctgaggagggttggcgtttagtggccctcgattatagccaaattgaattacgtgtccttgcccatctttctggcgatgagaacctcatccgcgtgtttcaggaaggcaaagacattcacactcaaacggcaagctggatgtttggattatcagctgaagcgatcgatcctttgatgcgtcgtgcagcgaagaccatcaatttcggtgttctctacggtatgagtgcctttcgtttgtcgcaggaattaggcattccctatgaagaagctgcggcgttcattcagaaatactttcaaagctatcccaaagttaaagcatggatcgagaagactctcgaagaaggccgcacacgtggttacgtagagaccttatttggacgtcgccgctatgttcccgatttaaacgctcgcgtgaaatctgtccgtgaagccgccgaacgcatggcgttcaacatgcctgtacagggcacggcagctgacctcatgaaacttgcaatggtgcgcctttttccacaattgcgtgaagttggtgcccgcatgctcttgcaggtccacgatgaactcttgttagaagcgccaaaagagcgtgcggaagaggtggcagccctcgcgaaagaggttatggaaggcgtgtggcccttagcggtgcctcttgaagtcgaagttggtattggcgaggattggctggctgccaaaggataatga

SEQ ID NO: 2498 - protein, 841 aa, synthetic construct
  REGION 1..841: note = Variant of DNA polymerase I from Thermus sp. strain 2.9
MHHHHHHGGSGVLPVFEPKGRVLLVDGHHLAYRNFFALKGLTTSRGEPVQGVYGFAKSLLKALKEDGDVVIVVFDAKAPSFRHEAYEAYKAGRAPTPEDFPRQLALMKELVDLLGLERLEVPGFEADDVLATLAKKAEREGYEVQILTADRDLFQLLSPRISVLHPEGHRITPEWLWEKYGLRPEQWVDFRALAGDPSDNIPGVKGIGEKTALKLLKEWGSLENLLKNLDQVKPESVREKILAHLEDLKLSRELSRVRTDLPLEVDFRRRREPDWEGLKAFLERLEFGSLLHEFGLLESPLPAEEAPWPPPEGAFLGYRLSRPEPMWAELLALAASAQGRVYRAEDPHGALRGLFEVRGLLAKDLAVVALREGLDLPPTDDPMLLAYLLDPSNTTPEGVARRYGGEWTEDAAKRALLAERLHANLLGRLQGEERLLWLYEEVEKPLSRVLAHMEATGVKLDVAYLEALSLEVAAEMRRLEEEVFRLAGHSFRLNSRDQLERVLFDELGLPPIGKTEKTGKRSTSAAVLEALREVHPIVDKILQYRELAKLKGTYIDPLPMLVHPKTGRLHTRFNQTATATGRLSSSDPNLQNIPVRTPLGQKIRRAFVAEEGWRLVALDYSQIELRVLAHLSGDENLIRVFQEGKDIHTQTASWMFGLSAEAIDPLMRRAAKTINFGVLYGMSAFRLSQELGIPYEEAAAFIQKYFQSYPKVKAWIEKTLEEGRTRGYVETLFGRRRYVPDLNARVKSVREAAERMAFNMPVQGTAADLMKLAMVRLFPQLREVGARMLLQVHDELLLEAPKERAEEVAALAKEVMEGVWPLAVPLEVEVGIGEDWLAAKG

SEQ ID NO: 2499 - DNA, 2529 bp, synthetic construct
  misc_feature 1..2529: note = Variant of DNA polymerase I from Thermus sp. strain 2.9
  source 1..2529: mol_type = other DNA
atgcaccatcatcatcatcatggcggtagcggcgtgttaccggtgttcgagcctaaaggtcgcgtgcttctggttgatggccatcatctcgcgtatcgtaacttctttgccctgaaaggattaaccaccagccgtggcgagccggtacagggtgtctacggctttgcaaagtcgctcctgaaagctctgaaaaatgacggtgatgtggtgattgttgtctttgatgcgaaagcgccaagttttcgccacgaagcgtacgaagcttacaaagccgggcgtgctccaacgccggaagactttcctcgccaattggcgcttatgaaggaattagtggatttgcttggcctcgaacgcttggaagttcccggtttcgaggcagacgacgtattagcgactctcgcaaagaaagccgaacgtgagggctatgaagtccagatcttgacagcagatcgcgatcttttccagcttttatctccgcgcatctcggtgttacacccggaagggcatcgtatcaccccggaatggctctgggagaaatatggtttgcgtcccgaacaatgggtggattttcgcgccttagcaggcgatccgagcgacaatattccgggagttaaaggtatcggcgagaagacggcgctcaagctccttaaagaatgggggtcgttggagaacttgcttaagaatttagatcaggtcaaaccagagtcagtgcgtgagaagattcttgcacacctcgaagacctcaaattaagccgcgaattgtcccgtgtacgcaccgatttgccgctcgaagttgatttccgtcgccgccgcgaacctgactgggagggtcttaaagcgtttttagagcgtcttgaatttggttcgctcttgcatgaattcggccttttagaaagcccgttaccagccgaagaagcaccttggccaccgcccgaaggcgcgtttttaggttaccgtttgagtcgcccggaaccgatgtgggccgaattattggctcttgcagcgtctgcccagggacgtgtgtatcgcgcggaagaccctcatggtgcgctccgcggcctcttcgaagtccgtggactccttgccaaagacttagctgttgttgcattgcgcgaaggtcttgatttacctccgactgatgatccaatgcttcttgcgtacctcttggacccgtcaaacacgacgcccgaaggcgtagcccgtcgttacggcggcgagtggaccgaagatgcagcgaaacgcgcgttattggccgaacgtttgcacgccaatttattaggacgtttgcaaggcgaggaacgtctcctctggctttacgaagaagtggagaaaccattgagtcgcgtgctcgcgcatatggaagctaccggtgtcaaattagacgtggcgtatttggaggctctcagccttgaagttgctgccgaaatgcgccgcttggaggaagaagtattccgtttagcaggccattcctttcgccttaattctcgcgatcagttagaacgtgtgttgttcgatgaacttggtctccctcctatcggcaagacagagaagaccggtaaacgtagcacttcagcggcggttttagaagctcttcgcgaagtccatcccattgtggacaagatcttgcagtaccgcgaactcgcgaaattgaaaggcacctatattgaccctcttccggcattagtccacccgaaaacgggacgcctccatacccgcttcaaccaaacagccacggcgaccggtcgtttgtcctcctctgatccaaaccttcagaatattccagtacgtaccccattgggccagaagatccgccgcgcgtttgtagctgaggagggttggcgtttagtggccctcgattatagccaaattgaattacgtgtccttgcccatctttctggcgatgagaacctcatccgcgtgtttcaggaaggcaaagacattcacactcaaacggcaagctggatgtttggattatcagctgaagcgatcgatcctttgatgcgtcgtgcagcgaagaccatcaatttcggtgttctctacggtatgagtgcctttcgtttgtcgcaggaattaggcattccctatgaagaagctgcggcgttcattcagaaatactttcaaagctatcccaaagttaaagcatggatcgagaagactctcgaagaaggccgcacacgtggttacgtagagaccttatttggacgtcgccgctatgttcccgatttaaacgctcgcgtgaaatctgtccgtgaagccgccgaacgcatggcgttcaacatgcctgtacagggcacggcagctgacctcatgaaacttgcaatggtgcgcctttttccacaattgcgtgaagttggtgcccgcatgctcttgcaggtccacgatgaactcttgttagaagcgccaaaagagcgtgcggaagaggtggcagccctcgcgaaagaggttatggaaggcgtgtggcccttagcggtgcctcttgaagtcgaagttggtattggcgaggattggctggctgccaaaggataatga

SEQ ID NO: 2500 - protein, 841 aa, synthetic construct
  REGION 1..841: note = Variant of DNA polymerase I from Thermus sp. strain 2.9
MHHHHHHGGSGVLPVFEPKGRVLLVDGHHLAYRNFFALKGLTTSRGEPVQGVYGFAKSLLKALKNDGDVVIVVFDAKAPSFRHEAYEAYKAGRAPTPEDFPRQLALMKELVDLLGLERLEVPGFEADDVLATLAKKAEREGYEVQILTADRDLFQLLSPRISVLHPEGHRITPEWLWEKYGLRPEQWVDFRALAGDPSDNIPGVKGIGEKTALKLLKEWGSLENLLKNLDQVKPESVREKILAHLEDLKLSRELSRVRTDLPLEVDFRRRREPDWEGLKAFLERLEFGSLLHEFGLLESPLPAEEAPWPPPEGAFLGYRLSRPEPMWAELLALAASAQGRVYRAEDPHGALRGLFEVRGLLAKDLAVVALREGLDLPPTDDPMLLAYLLDPSNTTPEGVARRYGGEWTEDAAKRALLAERLHANLLGRLQGEERLLWLYEEVEKPLSRVLAHMEATGVKLDVAYLEALSLEVAAEMRRLEEEVFRLAGHSFRLNSRDQLERVLFDELGLPPIGKTEKTGKRSTSAAVLEALREVHPIVDKILQYRELAKLKGTYIDPLPALVHPKTGRLHTRFNQTATATGRLSSSDPNLQNIPVRTPLGQKIRRAFVAEEGWRLVALDYSQIELRVLAHLSGDENLIRVFQEGKDIHTQTASWMFGLSAEAIDPLMRRAAKTINFGVLYGMSAFRLSQELGIPYEEAAAFIQKYFQSYPKVKAWIEKTLEEGRTRGYVETLFGRRRYVPDLNARVKSVREAAERMAFNMPVQGTAADLMKLAMVRLFPQLREVGARMLLQVHDELLLEAPKERAEEVAALAKEVMEGVWPLAVPLEVEVGIGEDWLAAKG

SEQ ID NO: 2501 - DNA, 2529 bp, synthetic construct
  misc_feature 1..2529: note = Variant of DNA polymerase I from Thermus sp. strain 2.9
  source 1..2529: mol_type = other DNA
atgcaccatcatcatcatcatggcggtagcggcgtgttaccggtgttcgagcctaaaggtcgcgtgcttctggttgatggccatcatctcgcgtatcgtaacttctttgccctgaaaggattaaccaccagccgtggcgagccggtacagggtgtctacggctttgcaaagtcgctcctgaaagctctgaaagaagacggtgatgtggtgattgttgtctttgatgcgaaagcgccaagttttcgccacgaagcgtacgaagcttacaaagccgggcgtgctccaacgccggaagactttcctcgccaattggcgcttatgaaggaattagtggatttgcttggcctcgaacgcttggaagttcccggtttcgaggcagacgacgtattagcgactctcgcaaagaaagccgaacgtgagggctatgaagtccagatcttgacagcagatcgcgatcttttccagcttttatctccgcgcatctcggtgttacacccggaagggcatcgtatcaccccggaatggctctgggagaaatatggtttgcgtcccgaacaatgggtggattttcgcgccttagcaggcgatccgagcgacaatattccgggagttaaaggtatcggcgagaagacggcgctcaagctccttaaagaatgggggtcgttggagaacttgcttaagaatttagatcaggtcaaaccagagtcagtgcgtgagaagattcttgcacacctcgaagacctcaaattaagccgcgaattgtcccgtgtacgcaccgatttgccgctcgaagttgatttccgtcgccgccgcgaacctgactgggagggtcttaaagcgtttttagagcgtcttgaatttggttcgctcttgcatgaattcggccttttagaaagcccgttaccagccgaagaagcaccttggccaccgcccgaaggcgcgtttttaggttaccgtttgagtcgcccggaaccgatgtgggccgaattattggctcttgcagcgtctgcccagggacgtgtgtatcgcgcggaagaccctcatggtgcgctccgcggcctcttcgaagtccgtggactccttgccaaagacttagctgttgttgcattgcgcgaaggtcttgatttacctccgactgatgatccaatgcttcttgcgtacctcttggacccgtcaaacacgacgcccgaaggcgtagcccgtcgttacggcggcgagtggaccgaagatgcagcgaaacgcgcgttattggccgaacgtttgcacgccaatttattaggacgtttgcaaggcgaggaacgtctcctctggctttacgaagaagtggagaaaccattgagtcgcgtgctcgcgcatatggaagctaccggtgtcaaattagacgtggcgtatttggaggctctcagccttgaagttgctgccgaaatgcgccgcttggaggaagaagtattccgtttagcaggccattcctttcgccttaattctcgcgatcagttagaacgtgtgttgttcgatgaacttggtctccctcctatcggcaagacagagaagaccggtaaacgtagcacttcagcggcggttttagaagctcttcgcgaagtccatcccattgtggacaagatcttgcagtaccgcgaactcgcgaaattgaaaggcacctatattgaccctcttccggcattagtccacccgaaaacgggacgcctccatacccgcttcaaccaaacagccacggcgaccggtcgtttgtcctcctctgatccaaaccttcagaatattccagtacgtaccccattgggccagaagatccgccgcgcgtttgtagctgaggagggttggcgtttagtggccctcgattatagccaaattgaattacgtgtccttgcccatctttctggcgatgagaacctcatccgcgtgtttcaggaaggcaaagacattcacactcaaacggcaagctggatgtttggattatcagctgaagcgatcgatccttcgatgcgtcgtgcagcgaagaccatcaatttcggtgttctctacggtatgagtgcctttcgtttgtcgcaggaattaggcattccctatgaagaagctgcggcgttcattcagaaatactttcaaagctatcccaaagttaaagcatggatcgagaagactctcgaagaaggccgcacacgtggttacgtagagaccttatttggacgtcgccgctatgttcccgatttaaacgctcgcgtgaaatctgtccgtgaagccgccgaacgcatggcgttcaacatgcctgtacagggcacggcagctgacctcatgaaacttgcaatggtgcgcctttttccacaattgcgtgaagttggtgcccgcatgctcttgcaggtccacgatgaactcttgttagaagcgccaaaagagcgtgcggaagaggtggcagccctcgcgaaagaggttatggaaggcgtgtggcccttagcggtgcctcttgaagtcgaagttggtattggcgaggattggctggctgccaaaggataatga

SEQ ID NO: 2502 - protein, 841 aa, synthetic construct
  REGION 1..841: note = Variant of DNA polymerase I from Thermus sp. strain 2.9
MHHHHHHGGSGVLPVFEPKGRVLLVDGHHLAYRNFFALKGLTTSRGEPVQGVYGFAKSLLKALKEDGDVVIVVFDAKAPSFRHEAYEAYKAGRAPTPEDFPRQLALMKELVDLLGLERLEVPGFEADDVLATLAKKAEREGYEVQILTADRDLFQLLSPRISVLHPEGHRITPEWLWEKYGLRPEQWVDFRALAGDPSDNIPGVKGIGEKTALKLLKEWGSLENLLKNLDQVKPESVREKILAHLEDLKLSRELSRVRTDLPLEVDFRRRREPDWEGLKAFLERLEFGSLLHEFGLLESPLPAEEAPWPPPEGAFLGYRLSRPEPMWAELLALAASAQGRVYRAEDPHGALRGLFEVRGLLAKDLAVVALREGLDLPPTDDPMLLAYLLDPSNTTPEGVARRYGGEWTEDAAKRALLAERLHANLLGRLQGEERLLWLYEEVEKPLSRVLAHMEATGVKLDVAYLEALSLEVAAEMRRLEEEVFRLAGHSFRLNSRDQLERVLFDELGLPPIGKTEKTGKRSTSAAVLEALREVHPIVDKILQYRELAKLKGTYIDPLPALVHPKTGRLHTRFNQTATATGRLSSSDPNLQNIPVRTPLGQKIRRAFVAEEGWRLVALDYSQIELRVLAHLSGDENLIRVFQEGKDIHTQTASWMFGLSAEAIDPSMRRAAKTINFGVLYGMSAFRLSQELGIPYEEAAAFIQKYFQSYPKVKAWIEKTLEEGRTRGYVETLFGRRRYVPDLNARVKSVREAAERMAFNMPVQGTAADLMKLAMVRLFPQLREVGARMLLQVHDELLLEAPKERAEEVAALAKEVMEGVWPLAVPLEVEVGIGEDWLAAKG

SEQ ID NO: 2503 - DNA, 2529 bp, synthetic construct
  misc_feature 1..2529: note = Variant of DNA polymerase I from Thermus sp. strain 2.9
  source 1..2529: mol_type = other DNA
atgcaccatcatcatcatcatggcggtagcggcgtgttaccggtgttcgagcctaaaggtcgcgtgcttctggttgatggccatcatctcgcgtatcgtaacttctttgccctgaaaggattaaccaccagccgtggcgagccggtacagggtgtctacggctttgcaaagtcgctcctgaaagctctgaaagaagacggtgatgtggtgattgttgtctttgatgcgaaagcgccaagttttcgccacgaagcgtacgaagcttacaaagccgggcgtgctccaacgccggaagactttcctcgccaattggcgcttatgaaggaattagtggatttgcttggcctcgaacgcttggaagttcccggtttcgaggcagacgacgtattagcgactctcgcaaagaaagccgaacgtgagggctatgaagtccagatcttgacagcagatcgcgatcttttccagcttttatctccgcgcatctcggtgttacacccggaagggcatcgtatcaccccggaatggctctgggagaaatatggtttgcgtcccgaacaatgggtggattttcgcgccttagcaggcgatccgagcgacaatattccgggagttaaaggtatcggcgagaagacggcgctcaagctccttaaagaatgggggtcgttggagaacttgcttaagaatttagatcaggtcaaaccagagtcagtgcgtgagaagattcttgcacacctcgaagacctcaaattaagccgcgaattgtcccgtgtacgcaccgatttgccgctcgaagttgatttccgtggccgccgcgaacctgactgggagggtcttaaagcgtttttagagcgtcttgaatttggttcgctcttgcatgaattcggccttttagaaagcccgttaccagccgaagaagcaccttggccaccgcccgaaggcgcgtttttaggttaccgtttgagtcgcccggaaccgatgtgggccgaattactggctcttgcagcgtctgcccagggacgtgtgtatcgcgcggaagaccctcatggtgcgctccgcggcctcttcgaagtccgtggactccttgccaaagacttagctgttgttgcattgcgcgaaggtcttgatttacctccgactgatgatccaatgcttcttgcgtacctcttggacccgtcaaacacgacgcccgaaggcgtagcccgtcgttacggcggcgagtggaccgaagatgcagcgaaacgcgcgttattggccgaacgtttgcacgccaatttattaggacgtttgcaaggcgaggaacgtctcctctggctttacgaagaagtggagaaaccattgagtcgcgtgctcgcgcatatggaagctaccggtgtcaaattagacgtggcgtatttggaggctctcagccttgaagttgctgccgaaatgcgccgcttggaggaagaagtattccgtttagcaggccactcctttcgccttaattctcgcgatcagttagaacgtgtgttgttcgatgaacttggtctccctcctatcggcaagacagagaagaccggtaaacgtagcacttcagcggcggttttagaagctcttcgcgaagtccatcccattgtggacaagatcttgcagtaccgcgaactcgcgaaattgaaaggcacctatattgaccctcttccggcattagtccacccgaaaacgggacgcctccatacccgcttcaaccaaacagccacggcgaccggtcgtttgtcctcctctgatccaaaccttcagaatattccagtacgtaccccattgggccagaagatccgccgcgcgtttgtagctgaggagggttggcgtttagtggccctcgattatagccaaattgaattacgtgtccttgcccatctttctggcgatgagaacctcatccgcgtgtttcaggaaggcaaagacattcacactcaaacggcaagctggatgtttggagaatcagctgaagcgatcgatcctttgatgcgtcgtgcagcgaagaccatcaatttcggtgttctctacggtatgagtgcctttcgtttgtcgcaggaattaggcattccctatgaagaagctgcggcgttcattcagaaatactttcaaagctatcccaaagttaaagcatggatcgagaagactctcgaagaaggccgcacacgtggttacgtagagaccttatttggacgtcgccgctatgttcccgatttaaacgctcgcgtgaaatctgtccgtgaagccgccgaacgcatggcgttcaacatgcctgtacagggcacggcagctgacctcatgaaacttgcaatggtgcgcctttttccacaattgcgtgaagttggtgcccgcatgctcttgcaggtccacgatgaactcttgttagaagcgccaaaagagcgtgcggaagaggtggcagccctcgcgaaagaggttatggaaggcgtgtggcccttagcggtgcctcttgaagtcgaagttggtattggcgaggattggctggctgccaaaggataatga

SEQ ID NO: 2504 - protein, 841 aa, synthetic construct
  REGION 1..841: note = Variant of DNA polymerase I from Thermus sp. strain 2.9
MHHHHHHGGSGVLPVFEPKGRVLLVDGHHLAYRNFFALKGLTTSRGEPVQGVYGFAKSLLKALKEDGDVVIVVFDAKAPSFRHEAYEAYKAGRAPTPEDFPRQLALMKELVDLLGLERLEVPGFEADDVLATLAKKAEREGYEVQILTADRDLFQLLSPRISVLHPEGHRITPEWLWEKYGLRPEQWVDFRALAGDPSDNIPGVKGIGEKTALKLLKEWGSLENLLKNLDQVKPESVREKILAHLEDLKLSRELSRVRTDLPLEVDFRGRREPDWEGLKAFLERLEFGSLLHEFGLLESPLPAEEAPWPPPEGAFLGYRLSRPEPMWAELLALAASAQGRVYRAEDPHGALRGLFEVRGLLAKDLAVVALREGLDLPPTDDPMLLAYLLDPSNTTPEGVARRYGGEWTEDAAKRALLAERLHANLLGRLQGEERLLWLYEEVEKPLSRVLAHMEATGVKLDVAYLEALSLEVAAEMRRLEEEVFRLAGHSFRLNSRDQLERVLFDELGLPPIGKTEKTGKRSTSAAVLEALREVHPIVDKILQYRELAKLKGTYIDPLPALVHPKTGRLHTRFNQTATATGRLSSSDPNLQNIPVRTPLGQKIRRAFVAEEGWRLVALDYSQIELRVLAHLSGDENLIRVFQEGKDIHTQTASWMFGESAEAIDPLMRRAAKTINFGVLYGMSAFRLSQELGIPYEEAAAFIQKYFQSYPKVKAWIEKTLEEGRTRGYVETLFGRRRYVPDLNARVKSVREAAERMAFNMPVQGTAADLMKLAMVRLFPQLREVGARMLLQVHDELLLEAPKERAEEVAALAKEVMEGVWPLAVPLEVEVGIGEDWLAAKG

SEQ ID NO: 2505 - DNA, 2529 bp, synthetic construct
  misc_feature 1..2529: note = Variant of DNA polymerase I from Thermus sp. strain 2.9
  source 1..2529: mol_type = other DNA
atgcaccatcatcatcatcatggcggtagcggcgtgttaccggtgttcgagcctaaaggtcgcgtgcttctggttgatggccatcatctcgcgtatcgtaacttctttgccctgaaaggattaaccaccagccgtggcgagccggtacagggtgtctacggctttgcaaagtcgctcctgaaagctctgaaagaagacggtgatgtggtgattgttgtctttgatgcgaaagcgccaagttttcgccacgaagcgtacgaagcttacaaagccgggcgtgctccaacgccggaagactttcctcgccaattggcgcttatgaaggaattagtggatttgcttggcctcgaacgcttggaagttcccggtttcgaggcagacgacgtattagcgactctcgcaaagaaagccgaacgtgagggctatgaagtccagatcttgacagcagatcgcgatcttttccagcttttatctccgcgcatctcggtgttacacccggaagggcatcgtatcaccccggaatggctctgggagaaatatggtttgcgtcccgaacaatgggtggattttcgcgccttagcaggcgatccgagcgacaatattccgggagttaaaggtatcggcgagaagacggcgctcaagctccttaaagaatgggggtcgttggagaacttgcttaagaatttagatcaggtcaaaccagagtcagtgcgtgagaagattcttgcacacctcgaagacctcaaattaagccgcgaattgtcccgtgtacgcaccgatttgccgctcgaagttgatttccgtcgccgccgcgaacctgactgggagggtcttaaagcgtttttagagcgtcttgaatttggttcgctcttgcatgaattcggccttttagaaagcccgttaccagccgaagaagcaccttggccaccgcccgaaggcgcgtttttaggttaccgtttgagtcgcccggaaccgatgtgggccgaattattggctcttgcagcgtctgcccagggacgtgtgtatcgcgcggaagaccctcatggtgcgctccgcggcctcttcgaagtccgtggactccttgccaaagacttagctgttgttgcattgcgcgaaggtcttgatttacctccgactgatgatccaatgcttcttgcgtacctcttggacccgtcaaacacgacgcccgaaggcgtagcccgtcgttacggcggcgagcttaccgaagatgcagcgaaacgcgcgttattggccgaacgtttgcacgccaatttattaggacgtttgcaaggcgaggaacgtctcctctggctttacgaagaagtggagaaaccattgagtcgcgtgctcgcgcatatggaagctaccggtgtcaaattagacgtggcgtatttggaggctctcagccttgaagttgctgccgaaatgcgccgcttggaggaagaagtattccgtttagcaggccattcctttcgccttaattctcgcgatcagttagaacgtgtgttgttcgatgaacttggtctccctcctatcggcaagacagagaagaccggtaaacgtagcacttcagcggcggttttagaagctcttcgcgaagtccatcccattgtggacaagatcttgcagtaccgcgaactcgcgaaattgaaaggcacctatattgaccctcttccggcattagtccacccgaaaacgggacgcctccatacccgcttcaaccaaacagccacggcgaccggtcgtttgtcctcctctgatccaaaccttcagaatattccagtacgtaccccattgggccagaagatccgccgcgcgtttgtagctgaggagggttggcgtttagtggccctcgattatagccaaattgaattacgtgtccttgcccatctttctggcgatgagaacctcatccgcgtgtttcaggaaggcaaagacattcacactcaaacggcaagctggatgtttggattatcagctgaagcgatcgatcctttgatgcgtcgtgcagcgaagaccatcaatttcggtgttctctacggtatgagtgcctttcgtttgtcgcaggaattaggcattccctatgaagaagctgcggcgttcattcagaaatactttcaaagctatcccaaagttaaagcatggatcgagaagactctcgaagaaggccgcacacgtggttacgtagagaccttatttggacgtcgccgctatgttcccgatttaaacgctcgcgtgaaatctgtccgtgaagccgccgaacgcatggcgttcaacatgcctgtacagggcacggcagctgacctcatgaaacttgcaatggtgcgcctttttccacaattgcgtgaagttggtgcccgcatgctcttgcaggtccacgatgaactcttgttagaagcgccaaaagagcgtgcggaagaggtggcagccctcgcgaaagaggttatggaaggcgtgtggcccttagcggtgcctcttgaagtcgaagttggtattggcgaggattggctggctgccaaaggataatga

SEQ ID NO: 2506 - protein, 841 aa, synthetic construct
  REGION 1..841: note = Variant of DNA polymerase I from Thermus sp. strain 2.9
MHHHHHHGGSGVLPVFEPKGRVLLVDGHHLAYRNFFALKGLTTSRGEPVQGVYGFAKSLLKALKEDGDVVIVVFDAKAPSFRHEAYEAYKAGRAPTPEDFPRQLALMKELVDLLGLERLEVPGFEADDVLATLAKKAEREGYEVQILTADRDLFQLLSPRISVLHPEGHRITPEWLWEKYGLRPEQWVDFRALAGDPSDNIPGVKGIGEKTALKLLKEWGSLENLLKNLDQVKPESVREKILAHLEDLKLSRELSRVRTDLPLEVDFRRRREPDWEGLKAFLERLEFGSLLHEFGLLESPLPAEEAPWPPPEGAFLGYRLSRPEPMWAELLALAASAQGRVYRAEDPHGALRGLFEVRGLLAKDLAVVALREGLDLPPTDDPMLLAYLLDPSNTTPEGVARRYGGELTEDAAKRALLAERLHANLLGRLQGEERLLWLYEEVEKPLSRVLAHMEATGVKLDVAYLEALSLEVAAEMRRLEEEVFRLAGHSFRLNSRDQLERVLFDELGLPPIGKTEKTGKRSTSAAVLEALREVHPIVDKILQYRELAKLKGTYIDPLPALVHPKTGRLHTRFNQTATATGRLSSSDPNLQNIPVRTPLGQKIRRAFVAEEGWRLVALDYSQIELRVLAHLSGDENLIRVFQEGKDIHTQTASWMFGLSAEAIDPLMRRAAKTINFGVLYGMSAFRLSQELGIPYEEAAAFIQKYFQSYPKVKAWIEKTLEEGRTRGYVETLFGRRRYVPDLNARVKSVREAAERMAFNMPVQGTAADLMKLAMVRLFPQLREVGARMLLQVHDELLLEAPKERAEEVAALAKEVMEGVWPLAVPLEVEVGIGEDWLAAKG

SEQ ID NO: 2507 - DNA, 2529 bp, synthetic construct
  misc_feature 1..2529: note = Variant of DNA polymerase I from Thermus sp. strain 2.9
  source 1..2529: mol_type = other DNA
atgcaccatcatcatcatcatggcggtagcggcgtgttaccggtgttcgagcctaaaggtcgcgtgcttctggttgatggccatcatctcgcgtatcgtaacttctttgccctgaaaggattaaccaccagccgtggcgagccggtacagggtgtctacggctttgcaaagtcgctcctgaaagctctgaaagaagacggtgatgtggtgattgttgtctttgatgcgaaagcgccaagttttcgccacgaagcgtacgaagcttacaaagccgggcgtgctccaacgccggaagactttcctcgccaattggcgcttatgaaggaattagtggatttgcttggcctcgaacgcttggaagttcccggtttcgaggcagacgacgtattagcgactctcgcaaagaaagccgaacgtgagggctatgaagtccagatcttgacagcagatcgcgatcttttccagcttttatctccgcgcatctcggtgttacacccggaagggcatcgtatcaccccggaatggctctgggagaaatatggtttgcgtcccgaacaatgggtggattttcgcgccttagcaggcgatccgagcgacaatattccgggagttaaaggtatcggcgagaagacggcgctcaagctccttaaagaatgggggtcgttggagaacttgcttaagaatttagatcaggtcaaaccagagtcagtgcgtgagaagattcttgcacacctcgaagacctcaaattaagccgcgaattgtcccgtgtacgcaccgatttgccgctcgaagttgatttccgtcgccgccgcgaacctgactgggagggtcttaaagcgtttttagagcgtcttgaatttggttcgctcttgcatgaattcggccttttagaaagcccgttaccagccgaagaagcaccttggccaccgcccgaaggcgcgtttttaggttaccgtttgagtcgcccggaaccgatgtgggccgaattattggctcttgcagcgtctgcccagggacgtgtgtatcgcgcggaagaccctcatggtgcgctccgcggcctcttcgaagtccgtggactccttgccaaagacttagctgttgttgcattgcgcgaaggtcttgatttacctccgactgatgatccaatgcttcttgcgtacctcttggacccgtcaaacacgacgcccgaaggcgtagcccgtcgttacggcggcgagtggaccgaagatgcagcgaaacgcgcgttattggccgaacgtttgcacgccaatttattaggacgtttgcaaggcgaggaacgtctcctctggctttacgaagaagtggagaaaccattgagtcgcgtgctcgcgcatatggaagctaccggtgtcaaattagacgtggcgtatttggaggctctcagccttgaagttgctgccgaaatgcgccgcttggaggaagaagtattccgtttagcaggccattcctttcgccttaattctcgcgatcagttagaacgtgtgttgttcgatgaacttggtctccctcctatcggcaagacagagaagaccggtaaacgtagcacttcagcggcggttttagaagctcttcgcgaagtccatcccattgtggacaagatcttgcagtaccgcgaactcgcgaaattgaaaggcacctatattgaccctcttccggcattagtccacccgaaaacgggacgcctccatacccgcttcaaccaaacagccacggcgaccggtcgtttgtcctcctctgatccaaaccttcagaatattccagtacgtaccccattgggccagaagatccgccgcgcgtttgtagctgaggagggttggcgtttagtggccctcgattatagccaaattgaattacgtgtccttgcccatctttctggcgatgagaacctcatccgcgtgtttcaggaaggcaaagacattcacactcaaacggcaagctggatgtttggattatcagctgaagcgatcgatcctttgatgcgtcgtgcagcgaagaccatcaatttcggtgttctctacggtatgagtgcctttcgtttgtcgcaggaattaggcattccctatgaagaagctgcggcgttcattcagaaatactttcaaagctatcccaaagttaaagcatggatcgagaagactctcgaagaaggccgcacacgtggttacgtagagaccttatttggacgtcgccgctatgttcccgatttaaacgctcgcgtgaaatctgtccgtgaagccgccgaacgcatggcgttcaacatgcctgtacagggcacggcagctgacctcatgaaacttgcaatggtgcgcctttttccacaattgcgtgaagttggtgcccgcatgctcttgcaggtccacgatgaactcttgttagaagcgccaaaagagcgtgcggaagaggtggcagccctcgcgaaaaaggttatggaaggcgtgtggcccttagcggtgcctcttgaagtcgaagttggtattggcgaggattggctggctgccaaaggataatga

SEQ ID NO: 2508 - protein, 841 aa, synthetic construct
  REGION 1..841: note = Variant of DNA polymerase I from Thermus sp. strain 2.9
MHHHHHHGGSGVLPVFEPKGRVLLVDGHHLAYRNFFALKGLTTSRGEPVQGVYGFAKSLLKALKEDGDVVIVVFDAKAPSFRHEAYEAYKAGRAPTPEDFPRQLALMKELVDLLGLERLEVPGFEADDVLATLAKKAEREGYEVQILTADRDLFQLLSPRISVLHPEGHRITPEWLWEKYGLRPEQWVDFRALAGDPSDNIPGVKGIGEKTALKLLKEWGSLENLLKNLDQVKPESVREKILAHLEDLKLSRELSRVRTDLPLEVDFRRRREPDWEGLKAFLERLEFGSLLHEFGLLESPLPAEEAPWPPPEGAFLGYRLSRPEPMWAELLALAASAQGRVYRAEDPHGALRGLFEVRGLLAKDLAVVALREGLDLPPTDDPMLLAYLLDPSNTTPEGVARRYGGEWTEDAAKRALLAERLHANLLGRLQGEERLLWLYEEVEKPLSRVLAHMEATGVKLDVAYLEALSLEVAAEMRRLEEEVFRLAGHSFRLNSRDQLERVLFDELGLPPIGKTEKTGKRSTSAAVLEALREVHPIVDKILQYRELAKLKGTYIDPLPALVHPKTGRLHTRFNQTATATGRLSSSDPNLQNIPVRTPLGQKIRRAFVAEEGWRLVALDYSQIELRVLAHLSGDENLIRVFQEGKDIHTQTASWMFGLSAEAIDPLMRRAAKTINFGVLYGMSAFRLSQELGIPYEEAAAFIQKYFQSYPKVKAWIEKTLEEGRTRGYVETLFGRRRYVPDLNARVKSVREAAERMAFNMPVQGTAADLMKLAMVRLFPQLREVGARMLLQVHDELLLEAPKERAEEVAALAKKVMEGVWPLAVPLEVEVGIGEDWLAAKG

SEQ ID NO: 2509 - DNA, 2529 bp, synthetic construct
  misc_feature 1..2529: note = Variant of DNA polymerase I from Thermus sp. strain 2.9
  source 1..2529: mol_type = other DNA
atgcaccatcatcatcatcatggcggtagcggcgtgttaccggtgttcgagcctaaaggtcgcgtgcttctggttgatggccatcatctcgcgtatcgtaacttctttgccctgaaaggattaaccaccagccgtggcgagccggtacagggtgtctacggctttgcaaagtcgctcctgaaagctctgaaagaagacggtgatgtggtgattgttgtctttgatgcgaaagcgccaagttttcgccacgaagcgtacgaagcttacaaagccgggcgtgctccaacgccggaagactttcctcgccaattggcgcttatgaaggaattagtggatttgcttggcctcgaacgcttggaagttcccggtttcgaggcagacgacgtattagcgactctcgcaaagaaagccgaacgtgagggctatgaagtccagatcttgacagcagatcgcgatcttttccagcttttatctccgcgcatctcggtgttacacccggaagggcatcgtatcaccccggaatggctctgggagaaatatggtttgcgtcccgaacaatgggtggattttcgcgccttagcaggcgatccgagcgacaatattccgggagttaaaggtatcggcgagaagacggcgctcaagctccttaaagaatgggggtcgttggagaacttgcttaagaatttagatcaggtcaaaccagagtcagtgcgtgagaagattcttgcacacctcgaagacctcaaattaagccgcgaattgtcccgtgtacgcaccgatttgccgctcgaagttgatttccgtcgccgccgcgaacctgactgggagggtcttaaagcgtttttagagcgtcttgaatttggttcgctcttgcatgaattcggccttttagaaagcccgttaccagccgaagaagcaccttggccaccgcccgaaggcgcgtttttaggttaccgtttgagtcgcccggaaccgatgtgggccgaattaatggctcttgcagcgtctgcccagggacgtgtgtatcgcgcggaagaccctcatggtgcgctccgcggcctcttcgaagtccgtggactccttgccaaagacttagctgttgttgcattgcgcgaaggtcttgatttacctccgactgatgatccaatgcttcttgcgtacctcttggacccgtcaaacacgacgcccgaaggcgtagcccgtcgttacggcggcgagtggaccgaagatgcagcgaaacgcgcgttattggccgaacgtttgcacgccaatttattaggacgtttgcaaggcgaggaacgtctcctctggctttacgaagaagtggagaaaccattgagtcgcgtgctcgcgcatatggaagctaccggtgtcaaattagacgtggcgtatttggaggctctcagccttgaagttgctgccgaaatgcgccgcttggaggaagaagtattccgtttagcaggccattcctttcgccttaattctcgcgatcagttagaacgtgtgttgttcgatgaacttggtctccctcctatcggcaagacagagaagaccggtaaacgtagcacttcagcggcggttttagaagctcttcgcgaagtccatcccattgtggacaagatcttgcagtaccgcgaactcgcgaaattgaaaggcacctatattgaccctcttccggcattagtccacccgaaaacgggacgcctccatacccgcttcaaccaaacagccacggcgaccggtcgtttgtcctcctctgatccaaaccttcagaatattccagtacgtaccccattgggccagaagatccgccgcgcgtttgtagctgaggagggttggcgtttagtggccctcgattatagccaaattgaattacgtgtccttgcccatctttctggcgatgagaacctcatccgcgtgtttcaggaaggcaaagacattcacactcaaacggcaagctggatgtttggattatcagctgaagcgatcgatcctttgatgcgtcgtgcagcgaagaccatcaatttcggtgttctctacggtatgagtgcctttcgtttgtcgcaggaattaggcattccctatgaagaagctgcggcgttcattcagaaatactttcaaagctatcccaaagttaaagcatggatcgagaagactctcgaagaaggccgcacacgtggttacgtagagaccttatttggacgtcgccgctatgttcccgatttaaacgctcgcgtgaaatctgtccgtgaagccgccgaacgcatggcgttcaacatgcctgtacagggcacggcagctgacctcatgaaacttgcaatggtgcgcctttttccacaattgcgtgaagttggtgcccgcatgctcttgcaggtccacgatgaactcttgttagaagcgccaaaagagcgtgcggaagaggtggcagccctcgcgaaagaggttatggaaggcgtgtggcccttagcggtgcctcttgaagtcgaagttggtattggcgaggattggctggctgccaaaggataatga

SEQ ID NO: 2510 - protein, 841 aa, synthetic construct
  REGION 1..841: note = Variant of DNA polymerase I from Thermus sp. strain 2.9
MHHHHHHGGSGVLPVFEPKGRVLLVDGHHLAYRNFFALKGLTTSRGEPVQGVYGFAKSLLKALKEDGDVVIVVFDAKAPSFRHEAYEAYKAGRAPTPEDFPRQLALMKELVDLLGLERLEVPGFEADDVLATLAKKAEREGYEVQILTADRDLFQLLSPRISVLHPEGHRITPEWLWEKYGLRPEQWVDFRALAGDPSDNIPGVKGIGEKTALKLLKEWGSLENLLKNLDQVKPESVREKILAHLEDLKLSRELSRVRTDLPLEVDFRRRREPDWEGLKAFLERLEFGSLLHEFGLLESPLPAEEAPWPPPEGAFLGYRLSRPEPMWAELMALAASAQGRVYRAEDPHGALRGLFEVRGLLAKDLAVVALREGLDLPPTDDPMLLAYLLDPSNTTPEGVARRYGGEWTEDAAKRALLAERLHANLLGRLQGEERLLWLYEEVEKPLSRVLAHMEATGVKLDVAYLEALSLEVAAEMRRLEEEVFRLAGHSFRLNSRDQLERVLFDELGLPPIGKTEKTGKRSTSAAVLEALREVHPIVDKILQYRELAKLKGTYIDPLPALVHPKTGRLHTRFNQTATATGRLSSSDPNLQNIPVRTPLGQKIRRAFVAEEGWRLVALDYSQIELRVLAHLSGDENLIRVFQEGKDIHTQTASWMFGLSAEAIDPLMRRAAKTINFGVLYGMSAFRLSQELGIPYEEAAAFIQKYFQSYPKVKAWIEKTLEEGRTRGYVETLFGRRRYVPDLNARVKSVREAAERMAFNMPVQGTAADLMKLAMVRLFPQLREVGARMLLQVHDELLLEAPKERAEEVAALAKEVMEGVWPLAVPLEVEVGIGEDWLAAKG

SEQ ID NO: 2511 - DNA, 2529 bp, synthetic construct
  misc_feature 1..2529: note = Variant of DNA polymerase I from Thermus sp. strain 2.9
  source 1..2529: mol_type = other DNA
atgcaccatcatcatcatcatggcggtagcggcgtgttaccggtgttcgagcctaaaggtcgcgtgcttctggttgatggccatcatctcgcgtatcgtaacttctttgccctgaaaggattaaccaccagccgtggcgagccggtacagggtgtctacggctttgcaaagtcgctcctgaaagctctgaaagaagacggtgatgtggtgattgttgtctttgatgcgaaagcgccaagttttcgccacgaagcgtacgaagcttacaaagccgggcgtgctccaacgccggaagactttcctcgccaattggcgcttatgaaggaattagtggatttgcttggcctcgaacgcttggaagttcccggtttcgaggcagacgacgtattagcgactctcgcaaagaaagccgaacgtgagggctatgaagtccagatcttgacagcagatcgcgatcttttccagcttttatctccgcgcatctcggtgttacacccggaagggcatcgtatcaccccggaatggctctgggagaaatatggtttgcgtcccgaacaatgggtggattttcgcgccttagcaggcgatccgagcgacaatattccgggagttaaaggtatcggcgagaagacggcgctcaagctccttaaagaatgggggtcgttggagaacttgcttaagaatttagatcaggtcaaaccagagtcagtgcgtgagaagattcttgcacacctcgaagacctcaaattaagccgcgaattgtcccgtgtacgcaccgatttgccgctcgaagttgatttcgtgcgccgccgcgaacctgactgggagggtcttaaagcgtttttagagcgtcttgaatttggttcgctcttgcatgaattcggccttttagaaagcccgttaccagccgaagaagcaccttggccaccgcccgaaggcgcgtttttaggttaccgtttgagtcgcccggaaccgatgtgggccgaattattggctcttgcagcgtctgcccagggacgtgtgtatcgcgcggaagaccctcatggtgcgctccgcggcctcttcgaagtccgtggactccttgccaaagacttagctgttgttgcattgcgcgaaggtcttgatttacctccgactgatgatccaatgcttcttgcgtacctcttggacccgtcaaacacgacgcccgaaggcgtagcccgtcgttacggcggcgagtggaccgaagatgcagcgaaacgcgcgttattggccgaacgtttgcacgccaatttattaggacgtttgcaaggcgaggaacgtctcctctggctttacgaagaagtggagaaaccattgagtcgcgtgctcgcgcatatggaagctaccggtgtcaaattagacgtggcgtatttggaggctctcagccttgaagttgctgccgaaatgcgccgcttggaggaagaagtattccgtttagcaggccattcctttcgccttaattctcgcgatcagttagaacgtgtgttgttcgatgaacttggtctccctcctatcggcaagacagagaagaccggtaaacgtagcacttcagcggcggttttagaagctcttcgcgaagtccatcccattgtggacaagatcttgcagtaccgcgaactcgcgaaattgaaaggcacctatattgaccctcttccggcattagtccacccgaaaacgggacgcctccatacccgcttcaaccaaacagccacggcgaccggtcgtttgtcctcctctgatccaaaccttcagaatattccagtacgtaccccattgggccagaagatccgccgcgcgtttgtagctgaggagggttggcgtttagtggccctcgattatagccaaattgaattacgtgtccttgcccatctttctggcgatgagaacctcatccgcgtgtttcaggaaggcaaagacattcacactcaaacggcaagctggatgtttggattatcagctgaagcgatcgatcctttgatgcgtcgtgcagcgaagaccatcaatttcggtgttctctacggtatgagtgcctttcgtttgtcgcaggaattaggcattccctatgaagaagctgcggcgttcattcagaaatactttcaaagctatcccaaagttaaagcatggatcgagaagactctcgaagaaggccgcacacgtggttacgtagagaccttatttggacgtcgccgctatgttcccgatttaaacgctcgcgtgaaatctgtccgtgaagccgccgaacgcatggcgttcaacatgcctgtacagggcacggcagctgacctcatgaaacttgcaatggtgcgcctttttccacaattgcgtgaagttggtgcccgcatgctcttgcaggtccacgatgaactcttgttagaagcgccaaaagagcgtgcggaagaggtggcagccctcgcgaaagaggttatggaaggcgtgtggcccttagcggtgcctcttgaagtcgaagttggtattggcgaggattggctggctgccaaaggataatga

SEQ ID NO: 2512 - protein, 841 aa, synthetic construct
  REGION 1..841: note = Variant of DNA polymerase I from Thermus sp. strain 2.9
MHHHHHHGGSGVLPVFEPKGRVLLVDGHHLAYRNFFALKGLTTSRGEPVQGVYGFAKSLLKALKEDGDVVIVVFDAKAPSFRHEAYEAYKAGRAPTPEDFPRQLALMKELVDLLGLERLEVPGFEADDVLATLAKKAEREGYEVQILTADRDLFQLLSPRISVLHPEGHRITPEWLWEKYGLRPEQWVDFRALAGDPSDNIPGVKGIGEKTALKLLKEWGSLENLLKNLDQVKPESVREKILAHLEDLKLSRELSRVRTDLPLEVDFVRRREPDWEGLKAFLERLEFGSLLHEFGLLESPLPAEEAPWPPPEGAFLGYRLSRPEPMWAELLALAASAQGRVYRAEDPHGALRGLFEVRGLLAKDLAVVALREGLDLPPTDDPMLLAYLLDPSNTTPEGVARRYGGEWTEDAAKRALLAERLHANLLGRLQGEERLLWLYEEVEKPLSRVLAHMEATGVKLDVAYLEALSLEVAAEMRRLEEEVFRLAGHSFRLNSRDQLERVLFDELGLPPIGKTEKTGKRSTSAAVLEALREVHPIVDKILQYRELAKLKGTYIDPLPALVHPKTGRLHTRFNQTATATGRLSSSDPNLQNIPVRTPLGQKIRRAFVAEEGWRLVALDYSQIELRVLAHLSGDENLIRVFQEGKDIHTQTASWMFGLSAEAIDPLMRRAAKTINFGVLYGMSAFRLSQELGIPYEEAAAFIQKYFQSYPKVKAWIEKTLEEGRTRGYVETLFGRRRYVPDLNARVKSVREAAERMAFNMPVQGTAADLMKLAMVRLFPQLREVGARMLLQVHDELLLEAPKERAEEVAALAKEVMEGVWPLAVPLEVEVGIGEDWLAAKG

SEQ ID NO: 2513 - DNA, 2529 bp, synthetic construct
  misc_feature 1..2529: note = Variant of DNA polymerase I from Thermus sp. strain 2.9
  source 1..2529: mol_type = other DNA
atgcaccatcatcatcatcatggcggtagcggcgtgttaccggtgttcgagcctaaaggtcgcgtgcttctggttgatggccatcatctcgcgtatcgtaacttctttgccctgaaaggattaaccaccagccgtggcgagccggtacagggtgtctacggctttgcaaagtcgctcctgaaagctctgaaagaagacggtgatgtggtgattgttgtctttgatgcgaaagcgccaagttttcgccacgaagcgtacgaagcttacaaagccgggcgtgctccaacgccggaagactttcctcgccaattggcgcttatgaaggaattagtggatttgcttggcctcgaacgcttggaagttcccggtttcgaggcagacgacgtattagcgactctcgcaaagaaagccgaacgtgagggctatgaagtccagatcttgacagcagatcgcgatcttttccagcttttatctccgcgcatctcggtgttacacccggaagggcatcgtatcaccccggaatggctctgggagaaatatggtttgcgtcccgaacaatgggtggattttcgcgccttagcaggcgatccgagcgacaatattccgggagttaaaggtatcggcgagaagacggcgctcaagctccttaaagaatgggggtcgttggagaacttgcttaagaatttagatcaggtcaaaccagagtcagtgcgtgagaagattcttgcacacctcgaagacctcaaattaagccgcgaattgtcccgtgtacgcaccgatttgccgctcgaagttgatttccgtcgccgccgcgaacctgactgggagggtcttaaagcgtttttagagcgtcttgaatttggttcgctcttgcatgaattcggccttttagaaagcccgttaccagccgaagaagcaccttggccaccgcccgaaggcgcgtttttaggttaccgtttgagtcgcccggaaccgatgtgggccgaattattggctcttgcagcgtctgcccagggacgtgtgtatcgcgcggaagaccctcatggtgcgctccgcggcctcttcgaagtccgtggactccttgccaaagacttagctgttgttgcattgcgcgaaggtcttgatttacctccgactgatgatccaatgcttcttgcgtacctcttggacccgtcaaacacgacgcccgaaggcgtagcccgtcgttacggcggcgagtggaccgaagatgcagcgaaacgcgcgttattggccgaacgtttgcacgccaatttattaggacgtttgcaaggcgaggaacgtctcctctggctttacgaagaagtggagaaaccattgagtcgcgtgctcgcgcatatggaagctaccggtgtcaaattagacgtggcgtatttggaggctctcagccttgaagttgctgccgaaatgcgccgcttggaggaagaagtattccgtttagcaggccattcctttcgccttaattctcgcgatcagttagaacgtgtgttgttcgatgaacttggtctccctcctatcggcaagacagagaagaccggtaaacgtagcacttcagcggcggttttagaagctcttcgcgaagtccatcccattgtggacaagatcttgcagtaccgcgaactcgcgaaattgaaaggcacctatattgaccctcttccggcattagtccacccgaaaacgggacgcctccatacccgcttcaaccaaacagccacggcgaccggtcgtttgtcctcctctgatccaaaccttcagaatattccagtacgtaccccattgggccagaagatccgccgcgcgtttgtagctgaggagggttggcgtttagtggccctcgattatagccaaattgaattacgtgtccttgcccatctttctggcgatgagaacctcatccgcgtgtttcaggaaggcaaagacattcacactcaaacggcaagctggatgtttggattatcagctgaagcgatcgatcctttgatgcgtcgtgcagcgaagaccatcaatttcggtgttctctacggtatgagtgcctttcgtttgtcgcaggaattaggcattccctatgaagaagctgcggcgttcattcagaaatactttcaaagctatcccaaagttaaagcatggatcgagaagactctcgaagaaggccgcacacgtggttacgtagagaccttatttggacgtcgccgcccggttcccgatttaaacgctcgcgtgaaatctgtccgtgaagccgccgaacgcatggcgttcaacatgcctgtacagggcacggcagctgacctcatgaaacttgcaatggtgcgcctttttccacaattgcgtgaagttggtgcccgcatgctcttgcaggtccacgatgaactcttgttagaagcgccaaaagagcgtgcggaagaggtggcagccctcgcgaaagaggttatggaaggcgtgtggcccttagcggtgcctcttgaagtcgaagttggtattggcgaggattggctggctgccaaaggataatga

SEQ ID NO: 2514 - protein, 841 aa, synthetic construct
  REGION 1..841: note = Variant of DNA polymerase I from Thermus sp. strain 2.9
MHHHHHHGGSGVLPVFEPKGRVLLVDGHHLAYRNFFALKGLTTSRGEPVQGVYGFAKSLLKALKEDGDVVIVVFDAKAPSFRHEAYEAYKAGRAPTPEDFPRQLALMKELVDLLGLERLEVPGFEADDVLATLAKKAEREGYEVQILTADRDLFQLLSPRISVLHPEGHRITPEWLWEKYGLRPEQWVDFRALAGDPSDNIPGVKGIGEKTALKLLKEWGSLENLLKNLDQVKPESVREKILAHLEDLKLSRELSRVRTDLPLEVDFRRRREPDWEGLKAFLERLEFGSLLHEFGLLESPLPAEEAPWPPPEGAFLGYRLSRPEPMWAELLALAASAQGRVYRAEDPHGALRGLFEVRGLLAKDLAVVALREGLDLPPTDDPMLLAYLLDPSNTTPEGVARRYGGEWTEDAAKRALLAERLHANLLGRLQGEERLLWLYEEVEKPLSRVLAHMEATGVKLDVAYLEALSLEVAAEMRRLEEEVFRLAGHSFRLNSRDQLERVLFDELGLPPIGKTEKTGKRSTSAAVLEALREVHPIVDKILQYRELAKLKGTYIDPLPALVHPKTGRLHTRFNQTATATGRLSSSDPNLQNIPVRTPLGQKIRRAFVAEEGWRLVALDYSQIELRVLAHLSGDENLIRVFQEGKDIHTQTASWMFGLSAEAIDPLMRRAAKTINFGVLYGMSAFRLSQELGIPYEEAAAFIQKYFQSYPKVKAWIEKTLEEGRTRGYVETLFGRRRPVPDLNARVKSVREAAERMAFNMPVQGTAADLMKLAMVRLFPQLREVGARMLLQVHDELLLEAPKERAEEVAALAKEVMEGVWPLAVPLEVEVGIGEDWLAAKG

SEQ ID NO: 2515 - DNA, 2529 bp, synthetic construct
  misc_feature 1..2529: note = Variant of DNA polymerase I from Thermus sp. strain 2.9
  source 1..2529: mol_type = other DNA
atgcaccatcatcatcatcatggcggtagcggcgtgttaccggtgttcgagcctaaaggtcgcgtgcttctggttgatggccatcatctcgcgtatcgtaacttctttgccctgaaaggattaaccaccagccgtggcgagccggtacagggtgtctacggctttgcaaagtcgctcctgaaagctctgaaagaagacggtgatgtggtgattgttgtctttgatgcgaaagcgccaagttttcgccacgaagcgtacgaagcttacaaagccgggcgtgctccaacgccggaagactttcctcgccaattggcgcttatgaaggaattagtggatttgcttggcctcgaacgcttggaagttcccggtttcgaggcagacgacgtattagcgactctcgcaaagaaagccgaacgtgagggctatgaagtccagatcttgacagcagatcgcgatcttttccagcttttatctccgcgcatctcggtgttacacccggaagggcatcgtatcaccccggaatggctctgggagaaatatggtttgcgtcccgaacaatgggtggattttcgcgccttagcaggcgatccgagcgacaatattccgggagttaaaggtatcggcgagaagacggcgctcaagctccttaaagaatgggggtcgttggagaacttgcttaagaatttagatcaggtcaaaccagagtcagtgcgtgagaagattcttgcacacctcgaagacctcaaattaagccgcgaattgtcccgtgtacgcaccgatttgccgctcgaagttgatttccgtcgccgccgcgaacctgactgggagggtcttaaagcgtttttagagcgtcttgaatttggttcgctcttgcatgaattcggccttttagaaagcccgttaccagccgaagaagcaccttggccaccgcccgaaggcgcgtttttaggttaccgtttgagtcgcccggaaccgatgtgggccgaattattggctcttgcagcgtctgcccagggacgtgtgtatcgcgcggaagaccctcatggtgcgctccgcggcctcttcgaagtccgtggactccttgccaaagacttagctgttgttgcattgcgcgaaggtcttgatttacctccgactgatgatccaatgcttcttgcgtacctcttggacccgtcaaacacgacgcccgaaggcgtagcccgtcgttacggcggcgagtggaccgaagatgcagcgaaacgcgcgttattggccgaacgtttgcacgccaatttattaggacgtttgcaaggcgaggaacgtctcctctggctttacgaagaagtggagaaaccattgagtcgcgtgctcgcgcatatggaagctaccggtgtcaaattagacgtggcgtatttggaggctctcagccttgaagttgctgccgaaatgcgccgcttggaggaagaagtattccgtttagcaggccattcctttcgccttaattctcgcgatcagttagaacgtgtgttgttcgatgaacttggtctccctcctatcggcaagacagagaagaccggtaaacgtagcacttcagcggcggttttagaagctcttcgcgaagtccatcccattgtggacaagatcttgcagtaccgcgaactcgcgaaattgaaaggcacctatattgaccctcttccggcattagtccacccgaaaacgggacgcctccatacccgcttcaaccaaacagccacggcgaccggtcgtttgtcctcctctgatccaaaccttcagaatattccagtacgtaccccattgggccagaagatccgccgcgcgtttgtagctgaggagggttggcgtttagtggccctcgattatagccaaattgaattacgtgtccttgcccatctttctggcgatgagaacctcatccgcgtgtttcaggaaggcaaagacattcacactcaaacggcaagctggatgtttggattatcagctgaagcgatcgatcctttgatgcgtcgtgcagcaaagaccatcaatttcggtgttctctacggtatgagtgcctttcgtttgtcgcaggaattaggcattccctatgaagaagctgcggcgttcattcagaaatactttcaaagctatcccaaagttaaagcatggatcgagaagactctcgaagaaggccgcacacgtggttacgtagagaccttatttggacgtcgccgctatgttcccgatttaaacgctcgcgtgaaatctgtccgtgaagccgccgaacgcattgcgttcaacatgcctgtacagggcacggcagctgacctcatgaaacttgcaatggtgcgcctttttccacaattgcgtgaagttggtgcccgcatgctcttgcaggtccacgatgaactcttgttagaagcgccaaaagagcgtgcggaagaggtggcagccctcgcgaaagaggttatggaaggcgtgtggcccttagcggtgcctcttgaagtcgaagttggtattggcgaggattggctggctgccaaaggataatga

SEQ ID NO: 2516 - protein, 841 aa, synthetic construct
  REGION 1..841: note = Variant of DNA polymerase I from Thermus sp. strain 2.9
MHHHHHHGGSGVLPVFEPKGRVLLVDGHHLAYRNFFALKGLTTSRGEPVQGVYGFAKSLLKALKEDGDVVIVVFDAKAPSFRHEAYEAYKAGRAPTPEDFPRQLALMKELVDLLGLERLEVPGFEADDVLATLAKKAEREGYEVQILTADRDLFQLLSPRISVLHPEGHRITPEWLWEKYGLRPEQWVDFRALAGDPSDNIPGVKGIGEKTALKLLKEWGSLENLLKNLDQVKPESVREKILAHLEDLKLSRELSRVRTDLPLEVDFRRRREPDWEGLKAFLERLEFGSLLHEFGLLESPLPAEEAPWPPPEGAFLGYRLSRPEPMWAELLALAASAQGRVYRAEDPHGALRGLFEVRGLLAKDLAVVALREGLDLPPTDDPMLLAYLLDPSNTTPEGVARRYGGEWTEDAAKRALLAERLHANLLGRLQGEERLLWLYEEVEKPLSRVLAHMEATGVKLDVAYLEALSLEVAAEMRRLEEEVFRLAGHSFRLNSRDQLERVLFDELGLPPIGKTEKTGKRSTSAAVLEALREVHPIVDKILQYRELAKLKGTYIDPLPALVHPKTGRLHTRFNQTATATGRLSSSDPNLQNIPVRTPLGQKIRRAFVAEEGWRLVALDYSQIELRVLAHLSGDENLIRVFQEGKDIHTQTASWMFGLSAEAIDPLMRRAAKTINFGVLYGMSAFRLSQELGIPYEEAAAFIQKYFQSYPKVKAWIEKTLEEGRTRGYVETLFGRRRYVPDLNARVKSVREAAERIAFNMPVQGTAADLMKLAMVRLFPQLREVGARMLLQVHDELLLEAPKERAEEVAALAKEVMEGVWPLAVPLEVEVGIGEDWLAAKG

SEQ ID NO: 2517 - DNA, 2529 bp, synthetic construct
  misc_feature 1..2529: note = Variant of DNA polymerase I from Thermus sp. strain 2.9
  source 1..2529: mol_type = other DNA
atgcaccatcatcatcatcatggcggtagcggcgtgttaccggtgttcgagcctaaaggtcgcgtgcttctggttgatggccatcatctcgcgtatcgtaacttctttgccctgaaaggattaaccaccagccgtggcgagccggtacagggtgtctacggctttgcaaagtcgctcctgaaagctctgaaagaagacggtgatgtggtgattgttgtctttgatgcgaaagcgccaagttttcgccacgaagcgtacgaagcttacaaagccgggcgtgctccaacgccggaagactttcctcgccaattggcgcttatgaaggaattagtggatttgcttggcctcgaacgcttggaagttcccggtttcgaggcagacgacgtattagcgactctcgcaaagaaagccgaacgtgagggctatgaagtccagatcttgacagcagatcgcgatcttttccagcttttatctccgcgcatctcggtgttacacccggaagggcatcgtatcaccccggaatggctctgggagaaatatggtttgcgtcccgaacaatgggtggattttcgcgccttagcaggcgatccgagcgacaatattccgggagttaaaggtatcggcgagaagacggcgctcaagctccttaaagaatgggggtcgttggagaacttgcttaagaatttagatcaggtcaaaccagagtcagtgcgtgagaagattcttgcacacctcgaagacctcaaattaagccgcgaattgtcccgtgtacgcaccgatttgccgctcgaagttgatttccgtcgccgccgcgaacctgactgggagggtcttaaagcgtttttagagcgtcttgaatttggttcgctcttgcatgaattcggccttttagaaagcccgttactggccgaagaagcaccttggccaccgcccgaaggcgcgtttttaggttaccgtttgagtcgcccggaaccgatgtgggccgaattattggctcttgcagcgtctgcccagggaaccgtgtatcgcgcggaagaccctcatggtgcgctccgcggcctcttcgaagtccgtggactccttgccaaagacttagctgttgttgcattgcgcgaaggtcttgatttacctccgactgatgatccaatgcttcttgcgtacctcttggacccgtcaaacacgacgcccgaaggcgtagcccgtcgttacggcggcgagtggaccgaagatgcagcgaaacgcgcgttattggccgaacgtttgcacgccaatttattaggacgtttgcaaggcgaggaacgtctcctctggctttacgaagaagtggagaaaccattgagtcgcgtgctcgcgcatatggaagctaccggtgtcaaattagacgtggcgtatttggaggctctcagccttgaagttgctgccgaaatgcgccgcttggaggaagaagtattccgtttagcaggccgttcctttcgccttagctctcgcgatcagttagaacgtgtgttgttcgatgaacttggtctccgtcctatcggcaagacagagaagaccggtaaacgtagcacttcagctgcggttttagaagctcttcgcgaagtccatcccattgtggacaagatcttgcagtaccgcgaactcgcgaaattgaaaggcacctatattgaccctcttccggcattagtccacccgaaaacgggacgcctccatacccgcttcaaccaaacagccacggcgaccggtcgtttgtcctcctctgatccaaaccttcagaatattccagtacgtaccccattgggccagaagatccgccgcgcgtttgtagctgaggagggttggcgtttagtggccctcgattatagccaaattgaattacgtgtccttgcccatctttctggcgatgagaacctcatccgcgtgtttcaggaaggcaaagacattcacactcaaacggcaagctggatgtttggattaagcgctgaagcgatcgatcctttgatgcgtcgtgcagcgaagaccatcaatttcggtgttctctacggtatgagtgcctttcgtttgtcgcaggaattaggcattccctatgaagaagctgcggcgttcattcagaaatactttcaaagctatcccaaagttaaagcatggatcgagaagactctcgaggaaggccgcacacgtggttacgtagagaccttatttggacgtcgccgctatgttcccgatttaaacgctcgcgtgaaaggcgtccgtgaagccgccgaacgcatggcgttcaacatgcctgtacagggcacggcagctgacctcatgaaacttgcaatggtgcgcctttttccacaattgcgtgaagttggtgcccgcatgctcttgcaggtccacgatgaactcttgttagaagcgccaaaagagcgtgcggaagaggtggcagccctcgcgaaaaccgttatggaaggcgtgtggcccttagcggtgcctcttgaagtcgaagttggtattggcgaggattggctggctgccaaaggataatga

SEQ ID NO: 2518 - protein, 841 aa, synthetic construct
  REGION 1..841: note = Variant of DNA polymerase I from Thermus sp. strain 2.9
MHHHHHHGGSGVLPVFEPKGRVLLVDGHHLAYRNFFALKGLTTSRGEPVQGVYGFAKSLLKALKEDGDVVIVVFDAKAPSFRHEAYEAYKAGRAPTPEDFPRQLALMKELVDLLGLERLEVPGFEADDVLATLAKKAEREGYEVQILTADRDLFQLLSPRISVLHPEGHRITPEWLWEKYGLRPEQWVDFRALAGDPSDNIPGVKGIGEKTALKLLKEWGSLENLLKNLDQVKPESVREKILAHLEDLKLSRELSRVRTDLPLEVDFRRRREPDWEGLKAFLERLEFGSLLHEFGLLESPLLAEEAPWPPPEGAFLGYRLSRPEPMWAELLALAASAQGTVYRAEDPHGALRGLFEVRGLLAKDLAVVALREGLDLPPTDDPMLLAYLLDPSNTTPEGVARRYGGEWTEDAAKRALLAERLHANLLGRLQGEERLLWLYEEVEKPLSRVLAHMEATGVKLDVAYLEALSLEVAAEMRRLEEEVFRLAGRSFRLSSRDQLERVLFDELGLRPIGKTEKTGKRSTSAAVLEALREVHPIVDKILQYRELAKLKGTYIDPLPALVHPKTGRLHTRFNQTATATGRLSSSDPNLQNIPVRTPLGQKIRRAFVAEEGWRLVALDYSQIELRVLAHLSGDENLIRVFQEGKDIHTQTASWMFGLSAEAIDPLMRRAAKTINFGVLYGMSAFRLSQELGIPYEEAAAFIQKYFQSYPKVKAWIEKTLEEGRTRGYVETLFGRRRYVPDLNARVKGVREAAERMAFNMPVQGTAADLMKLAMVRLFPQLREVGARMLLQVHDELLLEAPKERAEEVAALAKTVMEGVWPLAVPLEVEVGIGEDWLAAKG

SEQ ID NO: 2519 - DNA, 2529 bp, synthetic construct
  misc_feature 1..2529: note = Variant of DNA polymerase I from Thermus sp. strain 2.9
  source 1..2529: mol_type = other DNA
atgcaccatcatcatcatcatggcggtagcggcgtgttaccggtgttcgagcctaaaggtcgcgtgcttctggttgatggccatcatctcgcgtatcgtaacttctttgccctgaaaggattaaccaccagccgtggcgagccggtacagggtgtctacggctttgcaaagtcgctcctgaaagctctgaaagaagacggtgatgtggtgattgttgtctttgatgcgaaagcgccaagttttcgccacgaagcgtacgaagcttacaaagccgggcgtgctccaacgccggaagactttcctcgccaattggcgcttatgaaggaattagtggatttgcttggcctcgaacgcttggaagttcccggtttcgaggcagacgacgtattagcgactctcgcaaagaaagccgaacgtgagggctatgaagtccagatcttgacagcagatcgcgatcttttccagcttttatctccgcgcatctcggtgttacacccggaagggcatcgtatcaccccggaatggctctgggagaaatatggtttgcgtcccgaacaatgggtggattttcgcgccttagcaggcgatccgagcgacaatattccgggagttaaaggtatcggcgagaagacggcgctcaagctccttaaagaatgggggtcgttggagaacttgcttaagaatttagatcaggtcaaaccagagtcagtgcgtgagaagattcaggcacacctcgaagacctcaaattaagccgcgaattgtcccgtgtacgcaccgatttgccgctcgaagttgatttccgtcgccgccgcgaacctgactgggagggtcttaaagcgtttttagagcgtcttgaatttggttcgctcttgcatgaattcggccttttagaaagcccgttaccagccgaagaagcaccttggccaccgcccgaaggcgcgtttttaggttaccgtttgagtcgcccggaaccgatgtgggccgaattattggctcttgcagcgtctgcccagggacgtgtgtatcgcgcggaagaccctcatggtgcgctccgcggcctcttcgaagtccgtggactccttgccaaagacttagctgttgttgcattgcgcgaaggtcttgatttacctccgactgatgatccaatgcttcttgcgtacctcttggacccgtcaaacacgacgcccgaaggcgtagcccgtcgttacggcggcgagtggaccgaagatgcagcgaaacgcgcgttattggccgaacgtttgcacgccaatttattaggacgtttgcaaggcgaggaacgtctcctctggctttacgaagaagtggagaaaccattgagtcgcgtgctcgcgcatatggaagctaccggtgtcaaattagacgtggcgtatttggaggctctcagccttgaagttgctgccgaaatgcgccgcttggaggaagaagtattccgtttagcaggccattcctttcgccttaattctcgcgatcagttagaacgtgtgttgttcgatgaacttggtctccctcctatcggcaagacagagaagaccggtaaacgtagcacttcagcggcggttttagaagctcttcgcgaagtccatcccattgtggacaagatcttgcagtaccgcgaactcgcgaaattgaaaggcacctatattgaccctcttccggcattagtccacccgaaaacgggacgcctccatacccgcttcaaccaaacagccacggcgaccggtcgtttgtcctcctctgatccaaaccttcagaatattccagtacgtaccccattgggccagaagatccgccgcgcgtttgtagctgaggagggttggcgtttagtggccctcgattatagccaaattgaattacgtgtccttgcccatctttctggcgatgagaacctcatccgcgtgtttcaggaaggcaaagacattcacactcaaacggcaagctggatgtttggattatcagctgaagcgatcgatcctttgatgcgtcgtgcagcgaagaccatcaatttcggtgttctctacggtatgagtgcctttcgtttgtcgcaggaattaggcattccctatgaagaagctgcggcgttcattcagaaatactttcaaagctatcccaaagttaaagcatggatcgagaagactctcgaagaaggccgcacacgtggttacgtagagaccttatttggacgtcgccgctatgttcccgatttaaacgctcgcgtgaaatctgtccgtgaagccgccgaacgcatggcgttcaacatgcctgtacagggcacggcagctgacctcatgaaacttgcaatggtgcgcctttttccacaattgcgtgaagttggtgcccgcatgctcttgcaggtccacgatgaactcttgttagaagcgccaaaagagcgtgcggaagaggtggcagccctcgcgaaagaggttatggaaggcgtgtggcccttagcggtgcctcttgaagtcgaagttggtattggcgaggattggctggctgccaaaggataatga

SEQ ID NO: 2520 - protein, 841 aa, synthetic construct
  REGION 1..841: note = Variant of DNA polymerase I from Thermus sp. strain 2.9
MHHHHHHGGSGVLPVFEPKGRVLLVDGHHLAYRNFFALKGLTTSRGEPVQGVYGFAKSLLKALKEDGDVVIVVFDAKAPSFRHEAYEAYKAGRAPTPEDFPRQLALMKELVDLLGLERLEVPGFEADDVLATLAKKAEREGYEVQILTADRDLFQLLSPRISVLHPEGHRITPEWLWEKYGLRPEQWVDFRALAGDPSDNIPGVKGIGEKTALKLLKEWGSLENLLKNLDQVKPESVREKIQAHLEDLKLSRELSRVRTDLPLEVDFRRRREPDWEGLKAFLERLEFGSLLHEFGLLESPLPAEEAPWPPPEGAFLGYRLSRPEPMWAELLALAASAQGRVYRAEDPHGALRGLFEVRGLLAKDLAVVALREGLDLPPTDDPMLLAYLLDPSNTTPEGVARRYGGEWTEDAAKRALLAERLHANLLGRLQGEERLLWLYEEVEKPLSRVLAHMEATGVKLDVAYLEALSLEVAAEMRRLEEEVFRLAGHSFRLNSRDQLERVLFDELGLPPIGKTEKTGKRSTSAAVLEALREVHPIVDKILQYRELAKLKGTYIDPLPALVHPKTGRLHTRFNQTATATGRLSSSDPNLQNIPVRTPLGQKIRRAFVAEEGWRLVALDYSQIELRVLAHLSGDENLIRVFQEGKDIHTQTASWMFGLSAEAIDPLMRRAAKTINFGVLYGMSAFRLSQELGIPYEEAAAFIQKYFQSYPKVKAWIEKTLEEGRTRGYVETLFGRRRYVPDLNARVKSVREAAERMAFNMPVQGTAADLMKLAMVRLFPQLREVGARMLLQVHDELLLEAPKERAEEVAALAKEVMEGVWPLAVPLEVEVGIGEDWLAAKG

SEQ ID NO: 2521 - DNA, 2529 bp, synthetic construct
  misc_feature 1..2529: note = Variant of DNA polymerase I from Thermus sp. strain 2.9
  source 1..2529: mol_type = other DNA
atgcaccatcatcatcatcatggcggtagcggcgtgttaccggtgttcgagcctaaaggtcgcgtgcttctggttgatggccatcatctcgcgtatcgtaacttctttgccctgaaaggattaaccaccagccgtggcgagccggtacagggtgtctacggctttgcaaagtcgctcctgaaagctctgaaagaagacggtgatgtggtgattgttgtctttgatgcgaaagcgccaagttttcgccacgaagcgtacgaagcttacaaagccgggcgtgctccaacgccggaagactttcctcgccaattggcgcttatgaaggaattagtggatttgcttggcctcgaacgcttggaagttcccggtttcgaggcagacgacgtattagcgactctcgcaaagaaagccgaacgtgagggctatgaagtccagatcttgacagcagatcgcgatcttttccagcttttatctccgcgcatctcggtgttacacccggaagggcatcgtatcaccccggaatggctctgggagaaatatggtttgcgtcccgaacaatgggtggattttcgcgccttagcaggcgatccgagcgacaatattccgggagttaaaggtatcggcgagaagacggcgctcaagctccttaaagaatgggggtcgttggagaacttgcttaagaatttagatcaggtcaaaccagagtcagtgcgtgagaagattcttgcacacctcgaagacctcaaattaagccgcgaattgtcccgtgtacgcaccgatttgccgctcgaagttgatttccgtcgccgccgcgaacctgactgggagggtcttaaagcgtttttagagcgtcttgaatttggttcgctcttgcatgaattcggccttttagaaagcccggagccagccgaagaagcaccttggccaccgcccgaaggcgcgtttttaggttaccgtttgagtcgcccggaaccgatgtgggccgaattattggctcttgcagcgtctgcccagggacgtgtgtatcgcgcggaagaccctcatggtgcgctccgcggcctcttcgaagtccgtggactccttgccaaagacttagctgttgttgcattgcgcgaaggtcttgatttacctccgactgatgatccaatgcttcttgcgtacctcttggacccgtcaaacacgacgcccgaaggcgtagcccgtcgttacggcggcgagtggaccgaagatgcagcgaaacgcgcgttattggccgaacgtttgcacgccaatttattaggacgtttgcaaggcgaggaacgtctcctctggctttacgaagaagtggagaaaccattgagtcgcgtgctcgcgcatatggaagctaccggtgtcaaattagacgtggcgtatttggaggctctcagccttgaagttgctgccgaaatgcgccgcttggaggaagaagtattccgtttagcaggccattcctttcgccttaattctcgcgatcagttagaacgtgtgttgttcgatgaacttggtctccctcctatcggcaagacagagaagaccggtaaacgtagcacttcagcggcggttttagaagctcttcgcgaagtccatcccattgtggacaagatcttgcagtaccgcgaactcgcgaaattgaaaggcacctatattgaccctcttccggcattagtccacccgaaaacgggacgcctccatacccgcttcaaccaaacagccacggcgaccggtcgtttgtcctcctctgatccaaaccttcagaatattccagtacgtaccccattgggccagaagatccgccgcgcgtttgtagctgaggagggttggcgtttagtggccctcgattatagccaaattgaattacgtgtccttgcccatctttctggcgatgagaacctcatccgcgtgtttcaggaaggcaaagacattcacactcaaacggcaagctggatgtttggattatcagctgaagcgatcgatcctttgatgcgtcgtgcagcgaagaccatcaatttcggtgttctctacggtatgagtgcctttcgtttgtcgcaggaattaggcattccctatgaagaagctgcggcgttcattcagaaatactttcaaagctatcccaaagttaaagcgtggatcgagaagactctcgaagaaggccgcacacgtggttacgtagagaccttatttggacgtcgccgctatgttcccgatttaaacgctcgcgtgaaatctgtccgtgaagccgccgaacgcatggcgttcaacatgcctgtacagggcacggcagctgacctcatgaaacttgcaatggtgcgcctttttccacaattgcgtgaagttggtgcccgcatgctcttgcaggtccacgatgaactcttgttagaagcgccaaaagagcgtgcggaagaggtggcagccctcgcgaaagaggttatggaaggcgtgtggcccttagcggtgcctcttgaagtcgaagttggtattggcgaggattggctggctgccaaaggataatga

SEQ ID NO: 2522 - protein, 841 aa, synthetic construct
  REGION 1..841: note = Variant of DNA polymerase I from Thermus sp. strain 2.9
MHHHHHHGGSGVLPVFEPKGRVLLVDGHHLAYRNFFALKGLTTSRGEPVQGVYGFAKSLLKALKEDGDVVIVVFDAKAPSFRHEAYEAYKAGRAPTPEDFPRQLALMKELVDLLGLERLEVPGFEADDVLATLAKKAEREGYEVQILTADRDLFQLLSPRISVLHPEGHRITPEWLWEKYGLRPEQWVDFRALAGDPSDNIPGVKGIGEKTALKLLKEWGSLENLLKNLDQVKPESVREKILAHLEDLKLSRELSRVRTDLPLEVDFRRRREPDWEGLKAFLERLEFGSLLHEFGLLESPEPAEEAPWPPPEGAFLGYRLSRPEPMWAELLALAASAQGRVYRAEDPHGALRGLFEVRGLLAKDLAVVALREGLDLPPTDDPMLLAYLLDPSNTTPEGVARRYGGEWTEDAAKRALLAERLHANLLGRLQGEERLLWLYEEVEKPLSRVLAHMEATGVKLDVAYLEALSLEVAAEMRRLEEEVFRLAGHSFRLNSRDQLERVLFDELGLPPIGKTEKTGKRSTSAAVLEALREVHPIVDKILQYRELAKLKGTYIDPLPALVHPKTGRLHTRFNQTATATGRLSSSDPNLQNIPVRTPLGQKIRRAFVAEEGWRLVALDYSQIELRVLAHLSGDENLIRVFQEGKDIHTQTASWMFGLSAEAIDPLMRRAAKTINFGVLYGMSAFRLSQELGIPYEEAAAFIQKYFQSYPKVKAWIEKTLEEGRTRGYVETLFGRRRYVPDLNARVKSVREAAERMAFNMPVQGTAADLMKLAMVRLFPQLREVGARMLLQVHDELLLEAPKERAEEVAALAKEVMEGVWPLAVPLEVEVGIGEDWLAAKG

SEQ ID NO: 2523 - DNA, 2529 bp, synthetic construct
  misc_feature 1..2529: note = Variant of DNA polymerase I from Thermus sp. strain 2.9
  source 1..2529: mol_type = other DNA
atgcaccatcatcatcatcatggcggtagcggcgtgttaccggtgttcgagcctaaaggtcgcgtgcttctggttgatggccatcatctcgcgtatcgtaacttctttgccctgaaaggattaaccaccagccgtggcgagccggtacagggtgtctacggctttgcaaagtcgctcctgaaagctctgaaagaagacggtgatgtggtgattgttgtctttgatgcgaaagcgccaagttttcgccacgaagcgtacgaagcttacaaagccgggcgtgctccaacgccggaagactttcctcgccaattggcgcttatgaaggaattagtggatttgcttggcctcgaacgcttggaagttcccggtttcgaggcagacgacgtattagcgactctcgcaaagaaagccgaacgtgagggctatgaagtccagatcttgacagcagatcgcgatcttttccagcttttatctccgcgcatctcggtgttacacccggaagggcatcgtatcaccccggaatggctctgggagaaatatggtttgcgtcccgaacaatgggtggattttcgcgccttagcaggcgatccgagcgacaatattccgggagttaaaggtatcggcgagaagacggcgctcaagctccttaaagaatgggggtcgttggagaacttgcttaagaatttagatcaggtcaaaccagagtcagtgcgtgagaagattcttgcacacctcgaagacctcaaattaagccgcgaattgtcccgtgtacgcaccgatttgccgctcgaagttgatttccgtcgccgccgcgaacctgactgggagggtcttaaagcgtttttagagcgtcttgaatttggttcgctcttgcatgaattcggccttttagaaagcccgttaccagccgaagaagcaccttggccaccgcccgaaggcgcgtttttaggttaccgtttgagtcgcccggaaccgatgtgggccgaattattggctcttgcagcgtctgcccagggacgtgtgtatcgcgcggaagaccctcatggttcgctccgcggcctcttcgaagtccgtggactccttgccaaagacttagctgttgttgcattgcgcgaaggtcttgatttacctccgactgatgatccaatgcttcttgcgtacctcttggacccgtcaaacacgacgcccgaaggcgtagcccgtcgttacggcggcgagtggaccgaagatgcagcgaaacgcgcgttattggccgaacgtttgcacgccaatttattaggacgtttgcaaggcgaggaacgtctcctctggctttacgaagaagtggagaaaccattgagtcgcgtgctcgcgcatatggaagctaccggtgtcaaattagacgtggcgtatttggaggctctcagccttgaagttgctgccgaaatgcgccgcttggaggaagaagtattccgtttagcaggccattcctttcgccttaattctcgcgatcagttagaacgtgtgttgttcgatgaacttggtctccctcctatcggcaagacagagaagaccggtaaacgtagcacttcagcggcggttttagaagctcttcgcgaagtccatcccattgtggacaagatcttgcagtaccgcgaactcgcgaaattgaaaggcacctatattgaccctcttccggcattagtccacccgaaaacgggacgcctccatacccgcttcaaccaaacagccacggcgaccggtcgtttgtcctcctctgatccaaaccttcagaatattccagtacgtaccccattgggccagaagatccgccgcgcgtttgtagctgaggagggttggcgtttagtggccctcgattatagccaaattgaattacgtgtccttgcccatctttctggcgatgagaacctcatccgcgtgtttcaggaaggcaaagacattcacactcaaacggcaagctggatgtttggattatcagctgaagcgatcgatcctttgatgcgtcgtgcagcgaagaccatcaatttcggtgttctctacggtatgagtgcctttcgtttgtcgcaggaattaggcattccctatgaagaagctgcggcgttcattcagaaatactttcaaagctatcccaaagttaaagcatggatcgagaagactctcgaagaaggccgcacacgtggttacgtagagaccttatttggacgtcgccgctatgttcccgatttaaacgctcgcgtgaaatctgtccgtgaagccgccgaacgcatggcgttcaacatgcctgtacagggcacggcagctgacctcatgaaacttgcaatggtgcgcctttttccacaattgcgtgaagttggtgcccgcatgctcttgcaggtccacgatgaactcttgttagaagcgccaaaagagcgtgcggaagaggtggcagccctcgcgaaagaggttatggaaggcgtgtggcccttagcggtgcctcttgaagtcgaagttggtattggcgaggattggctggctgccaaaggataatga

SEQ ID NO: 2524 - protein, 841 aa, synthetic construct
  REGION 1..841: note = Variant of DNA polymerase I from Thermus sp. strain 2.9
MHHHHHHGGSGVLPVFEPKGRVLLVDGHHLAYRNFFALKGLTTSRGEPVQGVYGFAKSLLKALKEDGDVVIVVFDAKAPSFRHEAYEAYKAGRAPTPEDFPRQLALMKELVDLLGLERLEVPGFEADDVLATLAKKAEREGYEVQILTADRDLFQLLSPRISVLHPEGHRITPEWLWEKYGLRPEQWVDFRALAGDPSDNIPGVKGIGEKTALKLLKEWGSLENLLKNLDQVKPESVREKILAHLEDLKLSRELSRVRTDLPLEVDFRRRREPDWEGLKAFLERLEFGSLLHEFGLLESPLPAEEAPWPPPEGAFLGYRLSRPEPMWAELLALAASAQGRVYRAEDPHGSLRGLFEVRGLLAKDLAVVALREGLDLPPTDDPMLLAYLLDPSNTTPEGVARRYGGEWTEDAAKRALLAERLHANLLGRLQGEERLLWLYEEVEKPLSRVLAHMEATGVKLDVAYLEALSLEVAAEMRRLEEEVFRLAGHSFRLNSRDQLERVLFDELGLPPIGKTEKTGKRSTSAAVLEALREVHPIVDKILQYRELAKLKGTYIDPLPALVHPKTGRLHTRFNQTATATGRLSSSDPNLQNIPVRTPLGQKIRRAFVAEEGWRLVALDYSQIELRVLAHLSGDENLIRVFQEGKDIHTQTASWMFGLSAEAIDPLMRRAAKTINFGVLYGMSAFRLSQELGIPYEEAAAFIQKYFQSYPKVKAWIEKTLEEGRTRGYVETLFGRRRYVPDLNARVKSVREAAERMAFNMPVQGTAADLMKLAMVRLFPQLREVGARMLLQVHDELLLEAPKERAEEVAALAKEVMEGVWPLAVPLEVEVGIGEDWLAAKG

SEQ ID NO: 2525 - DNA, 2529 bp, synthetic construct
  misc_feature 1..2529: note = Variant of DNA polymerase I from Thermus sp. strain 2.9
  source 1..2529: mol_type = other DNA
atgcaccatcatcatcatcatggcggtagcggcgtgttaccggtgttcgagcctaaaggtcgcgtgcttctggttgatggccatcatctcgcgtatcgtaacttctttgccctgaaaggattaaccaccagccgtggcgagccggtacagggtgtctacggctttgcaaagtcgctcctgaaagctctgaaagaagacggtgatgtggtgattgttgtctttgatgcgaaagcgccaagttttcgccacgaagcgtacgaagcttacaaagccgggcgtgctccaacgccggaagactttcctcgccaattggcgcttatgaaggaattagtggatttgcttggcctcgaacgcttggaagttcccggtttcgaggcagacgacgtattagcgactctcgcaaagaaagccgaacgtgagggctatgaagtccagatcttgacagcagatcgcgatcttttccagcttttatctccgcgcatctcggtgttacacccggaagggcatcgtatcaccccggaatggctctgggagaaatatggtttgcgtcccgaacaatgggtggattttcgcgccttagcaggcgatccgagcgacaatattccgggagttaaaggtatcggcgagaagacggcgctcaagctccttaaagaatgggggtcgttggagaacttgcttaagaatttagatcaggtcaaaccagagtcagtgcgtgagaagattcttgcacacctcgaagacctcaaattaagccgcgaattgtcccgtgtacgcaccgatttgccgctcgaagttgatttccgtcgccgccgcgaacctgactgggagggtcttaaagcgtttttagagcgtcttgaatttggttcgctcttgcatgaattcggccttttagaaagcccgttaccagccgaagaagcaccttggccaccgcccgaaggcgcgtttttaggttaccgtttgagtcgcccggaaccgatgtgggccatgttattggctcttgcagcgtctgcccagggacgtgtgtatcgcgcggaagaccctcatggtgcgctccgcggcctcttcgaagtccgtggactccttgccaaagacttagctgttgttgcattgcgcgaaggtcttgatttacctccgactgatgatccaatgcttcttgcgtacctcttggacccgtcaaacacgacgcccgaaggcgtagcccgtcgttacggcggcgagtggaccgaagatgcagcgaaacgcgcgttattggccgaacgtttgcacgccaatttattaggacgtttgcaaggcgaggaacgtctcctctggctttacgaagaagtggagaaaccattgagtcgcgtgctcgcgcatatggaagctaccggtgtcaaattagacgtggcgtatttggaggctctcagccttgaagttgctgccgaaatgcgccgcttggaggaagaagtattccgtttagcaggccattcctttcgccttaattctcgcgatcagttagaacgtgtgttgttcgatgaacttggtctccctcctatcggcaagacagagaagaccggtaaacgtagcacttcagcggcggttttagaagctcttcgcgaagtccatcccattgtggacaagatcttgcagtaccgcgaactcgcgaaattgaaaggcacctatattgaccctcttccggcattagtccacccgaaaacgggacgcctccatacccgcttcaaccaaacagccacggcgaccggtcgtttgtcctcctctgatccaaaccttcagaatattccagtacgtaccccattgggccagaagatccgccgcgcgtttgtagctgaggagggttggcgtttagtggccctcgattatagccaaattgaattacgtgtccttgcccatctttctggcgatgagaacctcatccgcgtgtttcaggaaggcaaagacattcacactcaaacggcaagctggatgtttggattatcagctgaagcgatcgatcctttgatgcgtcgtgcagcgaagaccatcaatttcggtgttctctacggtatgagtgcctttcgtttgtcgcaggaattaggcattccctatgaagaagctgcggcgttcattcagaaatactttcaaagctatcccaaagttaaagcatggatcgagaagactctcgaagaaggccgcacacgtggttacgtagagaccttatttggacgtcgccgctatgttcccgatttaaacgctcgcgtgaaatctgtccgtgaagccgccgaacgcatggcgttcaacatgcctgtacagggcacggcagctgacctcatgaaacttgcaatggtgcgcctttttccacaattgcgtgaagttggtgcccgcatgctcttgcaggtccacgatgaactcttgttagaagcgccaaaagagcgtgcggaagaggtggcagccctcgcgaaagaggttatggaaggcgtgtggcccttagcggtgcctcttgaagtcgaagttggtattggcgaggattggctggctgccaaaggataatga

SEQ ID NO: 2526 - protein, 841 aa, synthetic construct
  REGION 1..841: note = Variant of DNA polymerase I from Thermus sp. strain 2.9
MHHHHHHGGSGVLPVFEPKGRVLLVDGHHLAYRNFFALKGLTTSRGEPVQGVYGFAKSLLKALKEDGDVVIVVFDAKAPSFRHEAYEAYKAGRAPTPEDFPRQLALMKELVDLLGLERLEVPGFEADDVLATLAKKAEREGYEVQILTADRDLFQLLSPRISVLHPEGHRITPEWLWEKYGLRPEQWVDFRALAGDPSDNIPGVKGIGEKTALKLLKEWGSLENLLKNLDQVKPESVREKILAHLEDLKLSRELSRVRTDLPLEVDFRRRREPDWEGLKAFLERLEFGSLLHEFGLLESPLPAEEAPWPPPEGAFLGYRLSRPEPMWAMLLALAASAQGRVYRAEDPHGALRGLFEVRGLLAKDLAVVALREGLDLPPTDDPMLLAYLLDPSNTTPEGVARRYGGEWTEDAAKRALLAERLHANLLGRLQGEERLLWLYEEVEKPLSRVLAHMEATGVKLDVAYLEALSLEVAAEMRRLEEEVFRLAGHSFRLNSRDQLERVLFDELGLPPIGKTEKTGKRSTSAAVLEALREVHPIVDKILQYRELAKLKGTYIDPLPALVHPKTGRLHTRFNQTATATGRLSSSDPNLQNIPVRTPLGQKIRRAFVAEEGWRLVALDYSQIELRVLAHLSGDENLIRVFQEGKDIHTQTASWMFGLSAEAIDPLMRRAAKTINFGVLYGMSAFRLSQELGIPYEEAAAFIQKYFQSYPKVKAWIEKTLEEGRTRGYVETLFGRRRYVPDLNARVKSVREAAERMAFNMPVQGTAADLMKLAMVRLFPQLREVGARMLLQVHDELLLEAPKERAEEVAALAKEVMEGVWPLAVPLEVEVGIGEDWLAAKG

SEQ ID NO: 2527 - DNA, 2529 bp, synthetic construct
  misc_feature 1..2529: note = Variant of DNA polymerase I from Thermus sp. strain 2.9
  source 1..2529: mol_type = other DNA
atgcaccatcatcatcatcatggcggtagcggcgtgttaccggtgttcgagcctaaaggtcgcgtgcttctggttgatggccatcatctcgcgtatcgtaacttctttgccctgaaaggattaaccaccagccgtggcgagccggtacagggtgtctacggctttgcaaagtcgctcctgaaagctctgaaagaagacggtgatgtggtgattgttgtctttgatgcgaaagcgccaagttttcgccacgaagcgtacgaagcttacaaagccgggcgtgctccaacgccggaagactttcctcgccaattggcgcttatgaaggaattagtggatttgcttggcctcgaacgcttggaagttcccggtttcgaggcagacgacgtattagcgactctcgcaaagaaagccgaacgtgagggctatgaagtccagatcttgacagcagatcgcgatcttttccagcttttatctccgcgcatctcggtgttacacccggaagggcatcgtatcaccccggaatggctctgggagaaatatggtttgcgtcccgaacaatgggtggattttcgcgccttagcaggcgatccgagcgacaatattccgggagttaaaggtatcggcgagaagacggcgctcaagctccttaaagaatgggggtcgttggagaacttgcttaagaatttagatcaggtcaaaccagagtcagtgcgtgagaagattcttgcacacctcgaagacctcaaattaagccgcgaattgtcccgtgtacgcaccgatttgccgctcgaagttgatttccgtcgccgccgcgaacctgactgggagggtcttaaagcgtttttagagcgtcttgaatttggttcgctcttgcatgaattcggccttttagaaagcccgttaccagccgaagaagcaccttggccaccgcccgaaggcgcgtttttaggttaccgtttgagtcgcccggaaccgatgtgggccgaattattggctcttgcagcgtctgcccagggacgtgtgtatcgcgcggaagaccctcatggtgcgctccgcggcctcttcgaagtccgtggactccttgccaaagacttagctgttgttgcattgcgcgaaggtcttgatttacctccgactgatgatccaatgcttcttgcgtacctcttggacccgtcaaacacgacgcccgaaggcgtagcccgtcgttacggcggcgagtggaccgaagatgcagcgaaacgcgcgttattggccgaacgtttgcacgccaatttattaggacgtttgcaaggcgaggaacgtctcctctggctttacgaagaagtggagaaaccattgagtcgcgtgctcgcgcatatggaagctaccggtgtcaaattagacgtggcgtatttggaggctctcagccttgaagttgctgccgaaatgcgccgcttggaggaagaagtattccgtttagcaggccattcctttcgccttaattctcgcgatcagttagaacgtgtgttgttcgatgaacttggtctccctcctatcggcaagacagagaagaccggtaaacgtagcacttcagcggcggttttagaagctcttcgcgaagtccatcccattgtggacaagatcttgcagtaccgcgaactcgcgaaattgaaaggcacctatattgaccctcttccggcattagtccacccgaaaacgggacgcctccatacccgcttcaaccaaacagccacggcgaccggtcgtttgtcctcctctgatccaaaccttcagaatattccagtacgtaccccattgggccagaagatccgccgcgcgtttgtagctgaggagggttggcgtttagtggccctcgattatagccaaattgaattacgtgtccttgcccatctttctggcgatgagaacctcatccgcgtgtttcaggaaggcaaagacattcacactcaaacggcaagctggatgtttggattatcagctgaagcgatcgatcctttgatgcgtcgtgcagcgaagaccatcaatttcggtgttctctacggtatgagtgcctttcgtttgtcgcaggaattaggcattccctatgaagaagcttcggcgttcattcagaaatactttcaaagctatcccaaagttaaagcatggatcgagaagactctcgaagaaggccgcacacgtggttacgtagagaccttatttggacgtcgccgctatgttcccgatttaaacgctcgcgtgaaatctgtccgtgaagccgccgaacgcatggcgttcaacatgcctgtacagggcacggcagctgacctcatgaaacttgcaatggtgcgcctttttccacaattgcgtgaagttggtgcccgcatgctcttgcaggtccacgatgaactcttgttagaagcgccaaaagagcgtgcggaagaggtggcagccctcgcgaaagaggttatggaaggcgtgtggcccttagcggtgcctcttgaagtcgaagttggtattggcgaggattggctggctgccaaaggataatga

SEQ ID NO: 2528 - protein, 841 aa, synthetic construct
  REGION 1..841: note = Variant of DNA polymerase I from Thermus sp. strain 2.9
MHHHHHHGGSGVLPVFEPKGRVLLVDGHHLAYRNFFALKGLTTSRGEPVQGVYGFAKSLLKALKEDGDVVIVVFDAKAPSFRHEAYEAYKAGRAPTPEDFPRQLALMKELVDLLGLERLEVPGFEADDVLATLAKKAEREGYEVQILTADRDLFQLLSPRISVLHPEGHRITPEWLWEKYGLRPEQWVDFRALAGDPSDNIPGVKGIGEKTALKLLKEWGSLENLLKNLDQVKPESVREKILAHLEDLKLSRELSRVRTDLPLEVDFRRRREPDWEGLKAFLERLEFGSLLHEFGLLESPLPAEEAPWPPPEGAFLGYRLSRPEPMWAELLALAASAQGRVYRAEDPHGALRGLFEVRGLLAKDLAVVALREGLDLPPTDDPMLLAYLLDPSNTTPEGVARRYGGEWTEDAAKRALLAERLHANLLGRLQGEERLLWLYEEVEKPLSRVLAHMEATGVKLDVAYLEALSLEVAAEMRRLEEEVFRLAGHSFRLNSRDQLERVLFDELGLPPIGKTEKTGKRSTSAAVLEALREVHPIVDKILQYRELAKLKGTYIDPLPALVHPKTGRLHTRFNQTATATGRLSSSDPNLQNIPVRTPLGQKIRRAFVAEEGWRLVALDYSQIELRVLAHLSGDENLIRVFQEGKDIHTQTASWMFGLSAEAIDPLMRRAAKTINFGVLYGMSAFRLSQELGIPYEEASAFIQKYFQSYPKVKAWIEKTLEEGRTRGYVETLFGRRRYVPDLNARVKSVREAAERMAFNMPVQGTAADLMKLAMVRLFPQLREVGARMLLQVHDELLLEAPKERAEEVAALAKEVMEGVWPLAVPLEVEVGIGEDWLAAKG

SEQ ID NO: 2529 - DNA, 2529 bp, synthetic construct
  misc_feature 1..2529: note = Variant of DNA polymerase I from Thermus sp. strain 2.9
  source 1..2529: mol_type = other DNA
atgcaccatcatcatcatcatggcggtagcggcgtgttaccggtgttcgagcctaaaggtcgcgtgcttctggttgatggccatcatctcgcgtatcgtaacttctttgccctgaaaggattaaccaccagccgcggcgagccggtacagggtgtctacggctttgcaaagtcgctcctgaaagctctgaaagaagacggtgatgtggtgattgttgtctttgatgcgaaagcgccaagttttcgccacgaagcgtacgaagcttacaaagccgggcgtgctccaacgccggaagactttcctcgccaattggcgcttatgaaggaattagtggatttgcttggcctcgaacgcttggaagttcccggtttcgaggcagacgacgtattagcgactctcgcaaagaaagccgaacgtgagggctatgaagtccagatcttgacagcagatcgcgatcttttccagcttttatctccgcgcatctcggtgttacacccggaagggcatcgtatcaccccggaatggctctgggagaaatatggtttgcgtcccgaacaatgggtggattttcgcgccttagcaggcgatccgagcgacaatattccgggagttaaaggtatcggcgagaagacggcgctcaagctccttaaagaatgggggtcgttggagaacttgcttaagaatttagatcaggtcaaaccagagtcagtgcgtgagaagattcttgcacacctcgaagacctcaaattaagccgcgaattgtcccgtgtacgcaccgatttgccgctcgaagttgatttccgtcgccgccgcgaacctgactgggagggtcttaaagcgtttttagagcgtcttgaatttggttcgctcttgcatgaattcggccttttagaaagcccgttaccagccgaagaagcaccttggccaccgcccgaaggcgcgtttttaggttaccgtttgagtcgcccggaaccgatgtgggccgaattattggctcttgcagcgtctgcccagggacgcgtgtatcgcgcggaagaccctcatggtgcgctccgcggcctcttcgaagtccgtggactccttgccaaagacttagctgttgttgcattgcgcgaaggtcttgatttacctccgactgatgatccaatgcttcttgcgtacctcttggacccgtcaaacacgacgcccgaaggcgtagcccgtcgttacggcggcgagtggaccgaagatgcagcgaaacgcgcgttattggccgaacgtttgcacgccaatttattaggacgtttgcaaggcgaggaacgtctcctctggctttacgaagaagtggagaaaccattgagtcgcgtgctcgcgcatatggaagctaccggtgtcaaattagacgtggcgtatttggaggctctcagccttgaagttgctgccgaaatgcgccgcttggaggaagaagtattccgtttagcaggccattcctttcgccttaattctcgcgatcagttagaacgtgtgttgttcgatgaacttggtctccctcctatcggcaagacagagaagaccggtaaacgtagcacttcagcggcggttttagaagctcttcgcgaagtccatcccattgtggacaagatcttgcagtaccgcgaactcgcgaaattgaaaggcacctatattgaccgtcttccggcattagtccacccgaaaacgggacgcctccatacccgcttcaaccaaacagccacggcgaccggtcgtttgtcctcctctgatccaaaccttcagaatattccagtacgtaccccattgggccagaagatccgcaaggcgtttgtagctgaggagggttggcgtttagtggccctcgattatagccaaattgaattacgtgtccttgcccatctttctggcgatgagaacctcatccgcgtgtttcaggaaggcaaagacattcacactcaaacggcaagctggatgtttggattatcagctgaagcgatcgatcctttgatgcgtcgtgcagcgaagaccatcaatttcggtgttctctacggtatgagtgcctttcgtttgtcgcaggaattaggcattccctatgaagaagctcaggcgttcattcagaaatactttcaaagctatcccaaagttaaagcatggatcgagaagactctccgtgaaggccgcacacgtggttacgtagagaccttatttggacgtcgccgctatgttcccgatttaaacgctcgcgtgaaatctgtccgtgaagccgccgaacgcatggcgttcaacatgcctgtacagggcacggcagctgacctcatgaaacttgcaatggtgcgcctttttccacaattgcgtgaagttggtgcccgcatgctcttgcaggtccacgatgaactcttgttagaagcgccaaaagagcgtgcggaagaggtggcagccctcgcgaaagaagttatggaaggcgtgtggcccttagcggtgcctcttgaagtcgaagttggtattggcgaggattggctggctgccaaaggataatga

SEQ ID NO: 2530 - protein, 841 aa, synthetic construct
  REGION 1..841: note = Variant of DNA polymerase I from Thermus sp. strain 2.9
MHHHHHHGGSGVLPVFEPKGRVLLVDGHHLAYRNFFALKGLTTSRGEPVQGVYGFAKSLLKALKEDGDVVIVVFDAKAPSFRHEAYEAYKAGRAPTPEDFPRQLALMKELVDLLGLERLEVPGFEADDVLATLAKKAEREGYEVQILTADRDLFQLLSPRISVLHPEGHRITPEWLWEKYGLRPEQWVDFRALAGDPSDNIPGVKGIGEKTALKLLKEWGSLENLLKNLDQVKPESVREKILAHLEDLKLSRELSRVRTDLPLEVDFRRRREPDWEGLKAFLERLEFGSLLHEFGLLESPLPAEEAPWPPPEGAFLGYRLSRPEPMWAELLALAASAQGRVYRAEDPHGALRGLFEVRGLLAKDLAVVALREGLDLPPTDDPMLLAYLLDPSNTTPEGVARRYGGEWTEDAAKRALLAERLHANLLGRLQGEERLLWLYEEVEKPLSRVLAHMEATGVKLDVAYLEALSLEVAAEMRRLEEEVFRLAGHSFRLNSRDQLERVLFDELGLPPIGKTEKTGKRSTSAAVLEALREVHPIVDKILQYRELAKLKGTYIDRLPALVHPKTGRLHTRFNQTATATGRLSSSDPNLQNIPVRTPLGQKIRKAFVAEEGWRLVALDYSQIELRVLAHLSGDENLIRVFQEGKDIHTQTASWMFGLSAEAIDPLMRRAAKTINFGVLYGMSAFRLSQELGIPYEEAQAFIQKYFQSYPKVKAWIEKTLREGRTRGYVETLFGRRRYVPDLNARVKSVREAAERMAFNMPVQGTAADLMKLAMVRLFPQLREVGARMLLQVHDELLLEAPKERAEEVAALAKEVMEGVWPLAVPLEVEVGIGEDWLAAKG

SEQ ID NO: 2531 - DNA, 2529 bp, synthetic construct
  misc_feature 1..2529: note = Variant of DNA polymerase I from Thermus sp. strain 2.9
  source 1..2529: mol_type = other DNA
atgcaccatcatcatcatcatggcggtagcggcgtgttaccggtgttcgagcctaaaggtcgcgtgcttctggttgatggccatcatctcgcgtatcgtaacttctttgccctgaaaggattaaccaccagccgtggcgagccggtacagggtgtctacggctttgcaaagtcgctcctgaaagctctgaaatgtgacggtgatgtggtgattgttgtctttgatgcgaaagcgccaagttttcgccacgaagcgtacgaagcttacaaagccgggcgtgctccaacgccggaagactttcctcgccaattggcgcttatgaaggaattagtggatttgcttggcctcgaacgcttggaagttcccggtttcgaggcagacgacgtattagcgactctcgcaaagaaagccgaacgtgagggctatgaagtccagatcttgacagcagatcgcgatcttttccagcttttatctccgcgcatctcggtgttacacccggaagggcatcgtatcaccccggaatggctctgggagaaatatggtttgcgtcccgaacaatgggtggattttcgcgccttagcaggcgatccgagcgacaatattccgggagttaaaggtatcggcgagaagacggcgctcaagctccttaaagaatgggggtcgttggagaacttgcttaagaatttagatcaggtcaaaccagagtcagtgcgtgagaagattcttgcacacctcgaagacctcaaattaagccgcgaattgtcccgtgtacgcaccgatttgccgctcgaagttgatttccgtcgccgccgcgaacctgactgggagggtcttaaagcgtttttagagcgtcttgaatttggttcgctcttgcatgaattcggccttttagaaagcccgttaccagccgaagaagcaccttggccaccgcccgaaggcgcgtttttaggttaccgtttgagtcgcccggaaccgatgtgggccgaattattggctcttgcagcgtctgcccagggacgtgtgtatcgcgcggaagaccctcatggtgcgctccgcggcctcttcgaagtccgtggactccttgccaaagacttagctgttgttgcattgcgcgaaggtcttgatttacctccgactgatgatccaatgcttcttgcgtacctcttggacccgtcaaacacgacgcccgaaggcgtagcccgtcgttacggcggcgagtggaccgaagatgcagcgaaacgcgcgttattggccgaacgtttgcacgccaatttattaggacgtttgcaaggcgaggaacgtctcctctggctttacgaagaagtggagaaaccattgagtcgcgtgctcgcgcatatggaagctaccggtgtcaaattagacgtggcgtatttggaggctctcagccttgaagttgctgccgaaatgcgccgcttggaggaagaagtattccgtttagcaggccattcctttcgccttaattctcgcgatcagttagaacgtgtgttgttcgatgaacttggtctccctcctatcggcaagacagagaagaccggtaaacgtagcacttcagcggcggttttagaagctcttcgcgaagtccatcccattgtggacaagatcttgcagtaccgcgaactcgcgaaattgaaaggcacctatattgaccctcttccggcattagtccacccgaaaacgggacgcctccatacccgcttcaaccaaacagccacggcgaccggtcgtttgtcctcctctgatccaaaccttcagaatattccagtacgtaccccattgggccagaagatccgccgcgcgtttgtagctgaggagggttggcgtttagtggccctcgattatagccaaattgaattacgtgtccttgcccatctttctggcgatgagaacctcatccgcgtgtttcaggaaggcaaagacattcacactcaaacggcaagctggatgtttggattatcagctgaagcgatcgatcctttgatgcgtcgtgcagcgaagaccatcaatttcggtgttctctacggtatgagtgcctttcgtttgtcgcaggaattaggcattccctatgaagaagctgcggcgttcattcagaaatactttcaaagctatcccaaagttaaagcatggatcgagaagactctcgaagaaggccgcacacgtggttacgtagagaccttatttggacgtcgccgctatgttcccgatttaaacgctcgcgtgaaatctgtccgtgaagccgccgaacgcatggcgttcaacatgcctgtacagggcacggcagctgacctcatgaaacttgcaatggtgcgcctttttccacaattgcgtgaagttggtgcccgcatgctcttgcaggtccacgatgaactcttgttagaagcgccaaaagagcgtgcggaagaggtggcagccctcgcgaaagaggttatggaaggcgtgtggcccttagcggtgcctcttgaagtcgaagttggtattggcgaggattggctggctgccaaaggataatga

SEQ ID NO: 2532 - protein, 841 aa, synthetic construct
  REGION 1..841: note = Variant of DNA polymerase I from Thermus sp. strain 2.9
MHHHHHHGGSGVLPVFEPKGRVLLVDGHHLAYRNFFALKGLTTSRGEPVQGVYGFAKSLLKALKCDGDVVIVVFDAKAPSFRHEAYEAYKAGRAPTPEDFPRQLALMKELVDLLGLERLEVPGFEADDVLATLAKKAEREGYEVQILTADRDLFQLLSPRISVLHPEGHRITPEWLWEKYGLRPEQWVDFRALAGDPSDNIPGVKGIGEKTALKLLKEWGSLENLLKNLDQVKPESVREKILAHLEDLKLSRELSRVRTDLPLEVDFRRRREPDWEGLKAFLERLEFGSLLHEFGLLESPLPAEEAPWPPPEGAFLGYRLSRPEPMWAELLALAASAQGRVYRAEDPHGALRGLFEVRGLLAKDLAVVALREGLDLPPTDDPMLLAYLLDPSNTTPEGVARRYGGEWTEDAAKRALLAERLHANLLGRLQGEERLLWLYEEVEKPLSRVLAHMEATGVKLDVAYLEALSLEVAAEMRRLEEEVFRLAGHSFRLNSRDQLERVLFDELGLPPIGKTEKTGKRSTSAAVLEALREVHPIVDKILQYRELAKLKGTYIDPLPALVHPKTGRLHTRFNQTATATGRLSSSDPNLQNIPVRTPLGQKIRRAFVAEEGWRLVALDYSQIELRVLAHLSGDENLIRVFQEGKDIHTQTASWMFGLSAEAIDPLMRRAAKTINFGVLYGMSAFRLSQELGIPYEEAAAFIQKYFQSYPKVKAWIEKTLEEGRTRGYVETLFGRRRYVPDLNARVKSVREAAERMAFNMPVQGTAADLMKLAMVRLFPQLREVGARMLLQVHDELLLEAPKERAEEVAALAKEVMEGVWPLAVPLEVEVGIGEDWLAAKG

SEQ ID NO: 2533 - DNA, 2529 bp, synthetic construct
  misc_feature 1..2529: note = Variant of DNA polymerase I from Thermus sp. strain 2.9
  source 1..2529: mol_type = other DNA
atgcaccatcatcatcatcatggcggtagcggcgtgttaccggtgttcgagcctaaaggtcgcgtgcttctggttgatggccatcatctcgcgtatcgtaacttctttgccctgaaaggattaaccaccagccgtggcgagccggtacagggtgtctacggctttgcaaagtcgctcctgaaagctctgaaagaagacggtgatgtggtgattgttgtctttgatgcgaaagcgccaagttttcgccacgaagcgtacgaagcttacaaagccgggcgtgctccaacgccggaagactttcctcgccaattggcgcttatgaaggaattagtggatttgcttggcctcgaacgcttggaagttcccggtttcgaggcagacgacgtattagcgactctcgcaaagaaagccgaacgtgagggctatgaagtccagatcttgacagcagatcgcgatcttttccagcttttatctccgcgcatctcggtgttacacccggaagggcatcgtatcaccccggaatggctctgggagaaatatggtttgcgtcccgaacaatgggtggattttcgcgccttagcaggcgatccgagcgacaatattccgggagttaaaggtatcggcgagaagacggcgctcaagctccttaaagaatgggggtcgttggagaacttgcttaagaatttagatcaggtcaaaccagagtcagtgcgtgagaagattcttgcacacctcgaagacctcaaattaagccgcgaattgtcccgtgtacgcaccgatttgccgctcgaagttgatttccgtcgccgccgcgaacctgactgggagggtcttaaagcgtttttagagcgtcttgaatttggttcgctcttgcatgaattcggccttttagaaagcccgttaccagccgaagaagcaccttggccaccgcccgaaggcgcgtttttaggttaccgtttgagtcgcccggaaccgatgtgggccgaattagcggctcttgcagcgtctgcccagggacgtgtgtatcgcgcggaagaccctcatggtgcgctccgcggcctcttcgaagtccgtggactccttgccaaagacttagctgttgttgcattgcgcgaaggtcttgatttacctccgactgatgatccaatgcttcttgcgtacctcttggacccgtcaaacacgacgcccgaaggcgtagcccgtcgttacggcggcgagtggaccgaagatgcagcgaaacgcgcgttattggccgaacgtttgcacgccaatttattaggacgtttgcaaggcgaggaacgtctcctctggctttacgaagaagtggagaaaccattgagtcgcgtgctcgcgcatatggaagctaccggtgtcaaattagacgtggcgtatttggaggctctcagccttgaagttgctgccgaaatgcgccgcttggaggaagaagtattccgtttagcaggccattcctttcgccttaattctcgcgatcagttagaacgtgtgttgttcgatgaacttggtctccctcctatcggcaagacagagaagaccggtaaacgtagcacttcagcggcggttttagaagctcttcgcgaagtccatcccattgtggacaagatcttgcagtaccgcgaactcgcgaaattgaaaggcacctatattgaccctcttccggcattagtccacccgaaaacgggacgcctccatacccgcttcaaccaaacagccacggcgaccggtcgtttgtcctcctctgatccaaaccttcagaatattccagtacgtaccccattgggccagaagatccgccgcgcgtttgtagctgaggagggttggcgtttagtggccctcgattatagccaaattgaattacgtgtccttgcccatctttctggcgatgagaacctcatccgcgtgtttcaggaaggcaaagacattcacactcaaacggcaagctggatgtttggattatcagctgaagcgatcgatcctttgatgcgtcgtgcagcgaagaccatcaatttcggtgttctctacggtatgagtgcctttcgtttgtcgcaggaattaggcattccctatgaagaagctgcggcgttcattcagaaatactttcaaagctatcccaaagttaaagcatggatcgagaagactctcgaagaaggccgcacacgtggttacgtagagaccttatttggacgtcgccgctatgttcccgatttaaacgctcgcgtgaaatctgtccgtgaagccgccgaacgcatggcgttcaacatgcctgtacagggcacggcagctgacctcatgaaacttgcaatggtgcgcctttttccacaattgcgtgaagttggtgcccgcatgctcttgcaggtccacgatgaactcttgttagaagcgccaaaagagcgtgcggaagaggtggcagccctcgcgaaagaggttatggaaggcgtgtggcccttagcggtgcctcttgaagtcgaagttggtattggcgaggattggctggctgccaaaggataatga

SEQ ID NO: 2534 - protein, 841 aa, synthetic construct
  REGION 1..841: note = Variant of DNA polymerase I from Thermus sp. strain 2.9
MHHHHHHGGSGVLPVFEPKGRVLLVDGHHLAYRNFFALKGLTTSRGEPVQGVYGFAKSLLKALKEDGDVVIVVFDAKAPSFRHEAYEAYKAGRAPTPEDFPRQLALMKELVDLLGLERLEVPGFEADDVLATLAKKAEREGYEVQILTADRDLFQLLSPRISVLHPEGHRITPEWLWEKYGLRPEQWVDFRALAGDPSDNIPGVKGIGEKTALKLLKEWGSLENLLKNLDQVKPESVREKILAHLEDLKLSRELSRVRTDLPLEVDFRRRREPDWEGLKAFLERLEFGSLLHEFGLLESPLPAEEAPWPPPEGAFLGYRLSRPEPMWAELAALAASAQGRVYRAEDPHGALRGLFEVRGLLAKDLAVVALREGLDLPPTDDPMLLAYLLDPSNTTPEGVARRYGGEWTEDAAKRALLAERLHANLLGRLQGEERLLWLYEEVEKPLSRVLAHMEATGVKLDVAYLEALSLEVAAEMRRLEEEVFRLAGHSFRLNSRDQLERVLFDELGLPPIGKTEKTGKRSTSAAVLEALREVHPIVDKILQYRELAKLKGTYIDPLPALVHPKTGRLHTRFNQTATATGRLSSSDPNLQNIPVRTPLGQKIRRAFVAEEGWRLVALDYSQIELRVLAHLSGDENLIRVFQEGKDIHTQTASWMFGLSAEAIDPLMRRAAKTINFGVLYGMSAFRLSQELGIPYEEAAAFIQKYFQSYPKVKAWIEKTLEEGRTRGYVETLFGRRRYVPDLNARVKSVREAAERMAFNMPVQGTAADLMKLAMVRLFPQLREVGARMLLQVHDELLLEAPKERAEEVAALAKEVMEGVWPLAVPLEVEVGIGEDWLAAKG

SEQ ID NO: 2535 - DNA, 2529 bp, synthetic construct
  misc_feature 1..2529: note = Variant of DNA polymerase I from Thermus sp. strain 2.9
  source 1..2529: mol_type = other DNA
atgcaccatcatcatcatcatggcggtagcggcgtgttaccggtgttcgagcctaaaggtcgcgtgcttctggttgatggccatcatctcgcgtatcgtaacttctttgccctgaaaggattaaccaccagccgtggcgagccggtacagggtgtctacggctttgcaaagtcgctcctgaaagctctgaaagaagacggtgatgtggtgattgttgtctttgatgcgaaagcgccaagttttcgccacgaagcgtacgaagcttacaaagccgggcgtatgccaacgccggaagactttcctcgccaattggcgcttatgaaggaattagtggatttgcttggcctcgaacgcttggaagttcccggtttcgaggcagacgacgtattagcgactctcgcaaagaaagccgaacgtgagggctatgaagtccagatcttgacagcagatcgcgatcttttccagcttttatctccgcgcatctcggtgttacacccggaagggcatcgtatcaccccggaatggctctgggagaaatatggtttgcgtcccgaacaatgggtggattttcgcgccttagcaggcgatccgagcgacaatattccgggagttaaaggtatcggcgagaagacggcgctcaagctccttaaagaatgggggtcgttggagaacttgcttaagaatttagatcaggtcaaaccagagtcagtgcgtgagaagattcttgcacacctcgaagacctcaaattaagccgcgaattgtcccgtgtacgcaccgatttgccgctcgaagttgatttccgtcgccgccgcgaacctgactgggagggtcttaaagcgtttttagagcgtcttgaatttggttcgctcttgcatgaattcggccttttagaaagcccgttaccagccgaagaagcaccttggccaccgcccgaaggcgcgtttttaggttaccgtttgagtcgcccggaaccgatgtgggccgaattattggctcttgcagcgtctgcccagggacgtgtgtatcgcgcggaagaccctcatggtgcgctccgcggcctcttcgaagtccgtggactccttgccaaagacttagctgttgttgcattgcgcgaaggtcttgatttacctccgactgatgatccaatgcttcttgcgtacctcttggacccgtcaaacacgacgcccgaaggcgtagcccgtcgttacggcggcgagtggaccgaagatgcagcgaaacgcgcgttattggccgaacgtttgcacgccaatttattaggacgtttgcaaggcgaggaacgtctcctctggctttacgaagaagtggagaaaccattgagtcgcgtgctcgcgcatatggaagctaccggtgtcaaattagacgtggcgtatttggaggctctcagccttgaagttgctgccgaaatgcgccgcttggaggaagaagtattccgtttagcaggccattcctttcgccttaattctcgcgatcagttagaacgtgtgttgttcgatgaacttggtctccctcctatcggcaagacagagaagaccggtaaacgtagcacttcagcggcggttttagaagctcttcgcgaagtccatcccattgtggacaagatcttgcagtaccgcgaactcgcgaaattgaaaggcacctatattgaccctcttccggcattagtccacccgaaaacgggacgcctccatacccgcttcaaccaaacagccacggcgaccggtcgtttgtcctcctctgatccaaaccttcagaatattccagtacgtaccccattgggccagaagatccgccgcgcgtttgtagctgaggagggttggcgtttagtggccctcgattatagccaaattgaattacgtgtccttgcccatctttctggcgatgagaacctcatccgcgtgtttcaggaaggcaaagacattcacactcaaacggcaagctggatgtttggattatcagctgaagcgatcgatcctttgatgcgtcgtgcagcgaagaccatcaatttcggtgttctctacggtatgagtgcctttcgtttgtcgcaggaattaggcattccctatgaagaagctgcggcgttcattcagaaatactttcaaagctatcccaaagttaaagcatggatcgagaagactctcgaagaaggccgcacacgtggttacgtagagaccttatttggacgtcgccgctatgttcccgatttaaacgctcgcgtgaaatctgtccgtgaagccgccgaacgcatggcgttcaacatgcctgtacagggcacggcagctgacctcatgaaacttgcaatggtgcgcctttttccacaattgcgtgaagttggtgcccgcatgctcttgcaggtccacgatgaactcttgttagaagcgccaaaagagcgtgcggaagaggtggcagccctcgcgaaagaggttatggaaggcgtgtggcccttagcggtgcctcttgaagtcgaagttggtattggcgaggattggctggctgccaaaggataatga

SEQ ID NO: 2536 - protein, 841 aa, synthetic construct
  REGION 1..841: note = Variant of DNA polymerase I from Thermus sp. strain 2.9
MHHHHHHGGSGVLPVFEPKGRVLLVDGHHLAYRNFFALKGLTTSRGEPVQGVYGFAKSLLKALKEDGDVVIVVFDAKAPSFRHEAYEAYKAGRMPTPEDFPRQLALMKELVDLLGLERLEVPGFEADDVLATLAKKAEREGYEVQILTADRDLFQLLSPRISVLHPEGHRITPEWLWEKYGLRPEQWVDFRALAGDPSDNIPGVKGIGEKTALKLLKEWGSLENLLKNLDQVKPESVREKILAHLEDLKLSRELSRVRTDLPLEVDFRRRREPDWEGLKAFLERLEFGSLLHEFGLLESPLPAEEAPWPPPEGAFLGYRLSRPEPMWAELLALAASAQGRVYRAEDPHGALRGLFEVRGLLAKDLAVVALREGLDLPPTDDPMLLAYLLDPSNTTPEGVARRYGGEWTEDAAKRALLAERLHANLLGRLQGEERLLWLYEEVEKPLSRVLAHMEATGVKLDVAYLEALSLEVAAEMRRLEEEVFRLAGHSFRLNSRDQLERVLFDELGLPPIGKTEKTGKRSTSAAVLEALREVHPIVDKILQYRELAKLKGTYIDPLPALVHPKTGRLHTRFNQTATATGRLSSSDPNLQNIPVRTPLGQKIRRAFVAEEGWRLVALDYSQIELRVLAHLSGDENLIRVFQEGKDIHTQTASWMFGLSAEAIDPLMRRAAKTINFGVLYGMSAFRLSQELGIPYEEAAAFIQKYFQSYPKVKAWIEKTLEEGRTRGYVETLFGRRRYVPDLNARVKSVREAAERMAFNMPVQGTAADLMKLAMVRLFPQLREVGARMLLQVHDELLLEAPKERAEEVAALAKEVMEGVWPLAVPLEVEVGIGEDWLAAKG

SEQ ID NO: 2537 - DNA, 2529 bp, synthetic construct
  misc_feature 1..2529: note = Variant of DNA polymerase I from Thermus sp. strain 2.9
  source 1..2529: mol_type = other DNA
atgcaccatcatcatcatcatggcggtagcggcgtgttaccggtgttcgagcctaaaggtcgcgtgcttctggttgatggccatcatctcgcgtatcgtaacttctttgccctgaaaggattaaccaccagcagcggcgagccggtacagggtgtctacggctttgcaaagtcgctcctgaaagctctgaaagaagacggtgatgtggtgattgttgtctttgatgcgaaagcgccaagttttcgccacgaagcgtacgaagcttacaaagccgggcgtgctccaacgccggaagactttcctcgccaattggcgcttatgaagcatttagtggatttgcttggcctcgaacgcttggaagttcccggtttcgaggcagacgacgtattagcgactctcgcaaagaaagccgaacgtgagggctatgaagtccagatcttgacagcagatcgcgatcttttccagcttttatctccgcgcatctcggtgttacacccggaagggcatcgtatcaccccggaatggctctgggagaaatatggtttgcgtcccgaacaatgggtggattttcgcgccttagcaggcgatccgagcgacaatattccgggagttaaaggtatcggcgagaagacggcgctcaagctccttaaagaatgggggtcgttggagaacttgcttaagaatttagatcaggtcaaaccagagtcagtgcgtgagaagattcttgctcacctcgaagacctcaaattaagccgcgaattgtcccgtgtacgcaccgatttgccgctcgaagttgatttccgtcgccgccgcgaacctgactgggagggtcttaaagcgtttttagagcgtcttgaatttggttcgctcttgcatgaattcggccttttagaaagcccgttaccagccgaagaagcaccttggccaccgcccgaaggcgcgtttttaggttaccgtttgagtcgcccggaaccgatgtgggccgaattattggctcttgcagcgtctgcccagggaacggtgtatcgcgcggaagaccctcatggtgcgctccgcggcctcttcgaagtccgtggactccttgccaaagacttagctgttgttgcattgcgcgaaggtcttgatttacctccgactgatgatccaatgcttcttgcgtacctcttggacccgtcaaacacgacgcccgaaggcgtagcccgtcgttacggcggcgagtggaccgaagatgcagcgaaacgcgcgttattggccgaacgtttgcacgccaatttattaggacgtttgcaaggggaggaacgtctcctctggctttacgaagaagtggagaaaccattgagtcgcgtgctcgcgcatatggaagctaccggtgtcaaattagacgtggcgtatttggaggctctcagccttgaagttgctgccgaaatgcgccgcttggaggaagaagtattccgtttagcaggccattcctttcgccttaattctcgcgatcagttagaacgtgtgttgttcgatgaacttggtctccctcctatcggcaagacagagaagaccggtaaacgtagcacttcagcggcggttttagaagctcttcgcgaagtccatcccattgtggacaagatcttgcagtaccgcgaactcgcgaaattgaaaggcacctatattgaccctcttccggcattagtccacccgaaaacgggacgcctccatacccgcttcaaccaaacagccacggcgaccggtcgtttgtcctcctctgatccaaaccttcagaatattccagtacgtaccccattgggccagaagatccgcaaggcgtttgtagctgaggagggttggcgtttagtggccctcgattatagccaaattgaattacgtgtccttgcccatctttctggcgatgagaacctcatccgcgtgtttcaggaaggcaaagacattcacactcaaacggcaagctggatgtttggattatcagctgaagcgatcgatcctttgatgcgtcgtgcagcgaagaccatcaatttcggtgttctctacggtatgagtgcctttcgtttgtcgcaggaattaggcattccctatgaagaagctgcggcgttcattcagaaatactttcaaagctatcccaaagttaaagcatggatcgagaagactctcgaagaaggccgcacacgtggttacgtagagaccttatttggacgtcgccgctatgttcccgatttaaacgctcgcgtgaaatctgtccgtgaagccgccgaacgcatggcgttcaacatgcctgtacagggcacggcagctgacctcatgaaacttgcaatggtgcgcctttttccacaattgcgtgaagttggtgcccgcatgctcttgcaggtccacgatgaactcttgttagaagcgccaaaagagcgtgcggaagaggtggcagccctcgcgaaaacggttatggaaggcgtgtggcccttagcggtgcctcttgaagtcgaagttggtattggcgaggattggctggctgccaaaggataatga

SEQ ID NO: 2538 - protein, 841 aa, synthetic construct
  REGION 1..841: note = Variant of DNA polymerase I from Thermus sp. strain 2.9
MHHHHHHGGSGVLPVFEPKGRVLLVDGHHLAYRNFFALKGLTTSSGEPVQGVYGFAKSLLKALKEDGDVVIVVFDAKAPSFRHEAYEAYKAGRAPTPEDFPRQLALMKHLVDLLGLERLEVPGFEADDVLATLAKKAEREGYEVQILTADRDLFQLLSPRISVLHPEGHRITPEWLWEKYGLRPEQWVDFRALAGDPSDNIPGVKGIGEKTALKLLKEWGSLENLLKNLDQVKPESVREKILAHLEDLKLSRELSRVRTDLPLEVDFRRRREPDWEGLKAFLERLEFGSLLHEFGLLESPLPAEEAPWPPPEGAFLGYRLSRPEPMWAELLALAASAQGTVYRAEDPHGALRGLFEVRGLLAKDLAVVALREGLDLPPTDDPMLLAYLLDPSNTTPEGVARRYGGEWTEDAAKRALLAERLHANLLGRLQGEERLLWLYEEVEKPLSRVLAHMEATGVKLDVAYLEALSLEVAAEMRRLEEEVFRLAGHSFRLNSRDQLERVLFDELGLPPIGKTEKTGKRSTSAAVLEALREVHPIVDKILQYRELAKLKGTYIDPLPALVHPKTGRLHTRFNQTATATGRLSSSDPNLQNIPVRTPLGQKIRKAFVAEEGWRLVALDYSQIELRVLAHLSGDENLIRVFQEGKDIHTQTASWMFGLSAEAIDPLMRRAAKTINFGVLYGMSAFRLSQELGIPYEEAAAFIQKYFQSYPKVKAWIEKTLEEGRTRGYVETLFGRRRYVPDLNARVKSVREAAERMAFNMPVQGTAADLMKLAMVRLFPQLREVGARMLLQVHDELLLEAPKERAEEVAALAKTVMEGVWPLAVPLEVEVGIGEDWLAAKG

SEQ ID NO: 2539 - DNA, 2529 bp, synthetic construct
  misc_feature 1..2529: note = Variant of DNA polymerase I from Thermus sp. strain 2.9
  source 1..2529: mol_type = other DNA
atgcaccatcatcatcatcatggcggtagcggcgtgttaccggtgttcgagcctaaaggtcgcgtgcttctggttgatggccatcatctcgcgtatcgtaacttctttgccctgaaaggattaaccaccagccgtggcgagccggtacagggtgtctacggctttgcaaagtcgctcctgaaagctctgaaagaagacggtgatgtggtgattgttgtctttgatgcgaaagcgccaagttttcgccacgaagcgtacgaagcttacaaagccgggcgtgctccaacgccggaagactttcctcgccaattggcgcttatgaaggaattagtggatttgcttggcctcgaacgcttggaagttcccggtttcgaggcagacgacgtattagcgactctcgcaaagaaagccgaacgtgagggctatgaagtccagatcttgacagcagatcgcgatcttttccagcttttatctccgcgcatctcggtgttacacccggaagggcatcgtatcaccccggaatggctctgggagaaatatggtttgcgtcccgaacaatgggtggattttcgcgccttagcaggcgatccgagcgacaatattccgggagttaaaggtatcggcgagaagacggcgctcaagctccttaaagaatgggggtcgttggagaacttgcttaagaatttagatcaggtcaaaccagagtcagtgcgtgagaagattcttgcacacctcgaagacctcaaattaagccgcgaattgtcccgtgtacgcaccgatttgccgctcgaagttgatttccgtgtgcgccgcgaacctgactgggagggtcttaaagcgtttttagagcgtcttgaatttggttcgctcttgcatgaattcggccttttagaaagcccgttaccagccgaagaagcaccttggccaccgcccgaaggcgcgtttttaggttaccgtttgagtcgcccggaaccgatgtgggccgaattattggctcttgcagcgtctgcccagggacgtgtgtatcgcgcggaagaccctcatggtgcgctccgcggcctcttcgaagtccgtggactccttgccaaagacttagctgttgttgcattgcgcgaaggtcttgatttacctccgactgatgatccaatgcttcttgcgtacctcttggacccgtcaaacacgacgcccgaaggcgtagcccgtcgttacggcggcgagtggaccgaagatgcagcgaaacgcgcgttattggccgaacgtttgcacgccaatttattaggacgtttgcaaggcgaggaacgtctcctctggctttacgaagaagtggagaaaccattgagtcgcgtgctcgcgcatatggaagctaccggtgtcaaattagacgtggcgtatttggaggctctcagccttgaagttgctgccgaaatgcgccgcttggaggaagaagtattccgtttagcaggccattcctttcgccttaattctcgcgatcagttagaacgtgtgttgttcgatgaacttggtctccctcctatcggcaagacagagaagaccggtaaacgtagcacttcagcggcggttttagaagctcttcgcgaagtccatcccattgtggacaagatcttgcagtaccgcgaactcgcgaaattgaaaggcacctatattgaccctcttccggcattagtccacccgaaaacgggacgcctccatacccgcttcaaccaaacagccacggcgaccggtcgtttgtcctcctctgatccaaaccttcagaatattccagtacgtaccccattgggccagaagatccgccgcgcgtttgtagctgaggagggttggcgtttagtggccctcgattatagccaaattgaattacgtgtccttgcccatctttctggcgatgagaacctcatccgcgtgtttcaggaaggcaaagacattcacactcaaacggcaagctggatgtttggattatcagctgaagcgatcgatcctttgatgcgtcgtgcagcgaagaccatcaatttcggtgttctctacggtatgagtgcctttcgtttgtcgcaggaattaggcattccctatgaagaagctgcggcgttcattcagaaatactttcaaagctatcccaaagttaaagcatggatcgagaagactctcgaagaaggccgcacacgtggttacgtagagaccttatttggacgtcgccgctatgttcccgatttaaacgctcgcgtgaaatctgtccgtgaagccgccgaacgcatggcgttcaacatgcctgtacagggcacggcagctgacctcatgaaacttgcaatggtgcgcctttttccacaattgcgtgaagttggtgcccgcatgctcttgcaggtccacgatgaactcttgttagaagcgccaaaagagcgtgcggaagaggtggcagccctcgcgaaagaggttatggaaggcgtgtggcccttagcggtgcctcttgaagtcgaagttggtattggcgaggattggctggctgccaaaggataatga

SEQ ID NO: 2540 - protein, 841 aa, synthetic construct
  REGION 1..841: note = Variant of DNA polymerase I from Thermus sp. strain 2.9
MHHHHHHGGSGVLPVFEPKGRVLLVDGHHLAYRNFFALKGLTTSRGEPVQGVYGFAKSLLKALKEDGDVVIVVFDAKAPSFRHEAYEAYKAGRAPTPEDFPRQLALMKELVDLLGLERLEVPGFEADDVLATLAKKAEREGYEVQILTADRDLFQLLSPRISVLHPEGHRITPEWLWEKYGLRPEQWVDFRALAGDPSDNIPGVKGIGEKTALKLLKEWGSLENLLKNLDQVKPESVREKILAHLEDLKLSRELSRVRTDLPLEVDFRVRREPDWEGLKAFLERLEFGSLLHEFGLLESPLPAEEAPWPPPEGAFLGYRLSRPEPMWAELLALAASAQGRVYRAEDPHGALRGLFEVRGLLAKDLAVVALREGLDLPPTDDPMLLAYLLDPSNTTPEGVARRYGGEWTEDAAKRALLAERLHANLLGRLQGEERLLWLYEEVEKPLSRVLAHMEATGVKLDVAYLEALSLEVAAEMRRLEEEVFRLAGHSFRLNSRDQLERVLFDELGLPPIGKTEKTGKRSTSAAVLEALREVHPIVDKILQYRELAKLKGTYIDPLPALVHPKTGRLHTRFNQTATATGRLSSSDPNLQNIPVRTPLGQKIRRAFVAEEGWRLVALDYSQIELRVLAHLSGDENLIRVFQEGKDIHTQTASWMFGLSAEAIDPLMRRAAKTINFGVLYGMSAFRLSQELGIPYEEAAAFIQKYFQSYPKVKAWIEKTLEEGRTRGYVETLFGRRRYVPDLNARVKSVREAAERMAFNMPVQGTAADLMKLAMVRLFPQLREVGARMLLQVHDELLLEAPKERAEEVAALAKEVMEGVWPLAVPLEVEVGIGEDWLAAKG

SEQ ID NO: 2541 - DNA, 2529 bp, synthetic construct
  misc_feature 1..2529: note = Variant of DNA polymerase I from Thermus sp. strain 2.9
  source 1..2529: mol_type = other DNA
atgcaccatcatcatcatcatggcggtagcggcgtgttaccggtgttcgagcctaaaggtcgcgtgcttctggttgatggccatcatctcgcgtatcgtaacttctttgccctgaaaggattaaccaccagccgtggcgagccggtacagggtgtctacggctttgcaaagtcgctcctgaaagctctgaaagaagacggtgatgtggtgattgttgtctttgatgcgaaagcgccaagttttcgccacgaagcgtacgaagcttacaaagccgggcgtgctccaacgccggaagactttcctcgccaattggcgcttatgaaggaattagtggatttgcttggcctcgaacgcttggaagttcccggtttcgaggcagacgacgtattagcgactctcgcaaagaaagccgaacgtgagggctatgaagtccagatcttgacagcagatcgcgatcttttccagcttttatctccgcgcatctcggtgttacacccggaagggcatcgtatcaccccggaatggctctgggagaaatatggtttgcgtcccgaacaatgggtggattttcgcgccttagcaggcgatccgagcgacaatattccgggagttaaaggtatcggcgagaagacggcgctcaagctccttaaagaatgggggtcgttggagaacttgcttaagaatttagatcaggtcaaaccagagtcagtgcgtgagaagattcttgcacacctcgaagacctcaaattaagccgcgaattgtcccgtgtacgcaccgatttgccgctcgaagttgatttccgtcgccgccgcgaacctgactgggagggtcttaaagcgtttttagagcgtcttgaatttggttcgctcttgcatgaattcggccttttagaaagcccgttaccagccgaagaagcaccttggccaccgcccgaaggcgcgtttttaggttaccgtttgagtcgcccggaaccgatgtgggccgaattattggctcttgcagcgtctgcccagggacgtgtgtatcgcgcggaagaccctcatggtgcgctccgcggcctcttcgaagtccgtggactccttgccaaagacttagctgttgttgcattgcgcgaaggtcttgatttacctccgactgatgatccaatgcttcttgcgtacctcttggacccgtcaaacacgacgcccgaaggcgtagcccgtcgttacggcggcgagtggaccgaagatgcagcgaaacgcgcgttattggccgaacgtttgcacgccaatttattaggacgtttgcaaggcgaggaacgtctcctctggctttacgaagaagtggagaaaccattgagtcgcgtgctcgcgcatatggaagctaccggtgtcaaattagacgtggcgtatttggaggctctcagccttgaagttgctgccgaaatgcgccgcttggaggaagaagtattccgtttagcaggccattcctttcgccttaattctcgcgatcagttagaacgtgtgttgttcgatgaacttggtctccctcctatcggcaagacagagaagaccggtaaacgtagcacttcagcggcggttttagaagctcttcgcgaagtccatcccattgtggacaagatcttgcagtaccgcgaactcgcgaaattgaaaggcacctatattgaccctcttccggcattagtccacccgaaaacgggacgcctccatacccgcttcaaccaaacagccacggcgaccggtcgtttgtcctcctctgatccaaaccttcagaatattccagtacgtaccccattgggccagaagatccgccgcgcgtttgtagctgaggagggttggcgtttagtggccctcgattatagccaaattgaattacgtgtccttgcccatctttctggcgatgagaacctcatccgcgtgtttcaggaaggcaaagacattcacactcaaacggcaagctggatgtttggattatcagctgaagcgatcgatcctttgatgcgtcgtgcagcgaagaccatcaatttcggtgttctctacggtatgagtgcctttcgtttgtcgcaggaattaggcattccctatgaagaagctgcggcgttcattcagaaatactttcaaagctatcccaaagttaaagcatggatcgagaagactctcgctgaaggccgcacacgtggttacgtagagaccttatttggacgtcgccgctatgttcccgatttaaacgctcgcgtgaaatctgtccgtgaagccgccgaacgcatggcgttcaacatgcctgtacagggcacggcagctgacctcatgaaacttgcaatggtgcgcctttttccacaattgcgtgaagttggtgcccgcatgctcttgcaggtccacgatgaactcttgttagaagcgccaaaagagcgtgcggaagaggtggcagccctcgcgaaagaggttatggaaggcgtgtggcccttagcggtgcctcttgaagtcgaagttggtattggcgaggattggctggctgccaaaggataatga

SEQ ID NO: 2542 - protein, 841 aa, synthetic construct
  REGION 1..841: note = Variant of DNA polymerase I from Thermus sp. strain 2.9
MHHHHHHGGSGVLPVFEPKGRVLLVDGHHLAYRNFFALKGLTTSRGEPVQGVYGFAKSLLKALKEDGDVVIVVFDAKAPSFRHEAYEAYKAGRAPTPEDFPRQLALMKELVDLLGLERLEVPGFEADDVLATLAKKAEREGYEVQILTADRDLFQLLSPRISVLHPEGHRITPEWLWEKYGLRPEQWVDFRALAGDPSDNIPGVKGIGEKTALKLLKEWGSLENLLKNLDQVKPESVREKILAHLEDLKLSRELSRVRTDLPLEVDFRRRREPDWEGLKAFLERLEFGSLLHEFGLLESPLPAEEAPWPPPEGAFLGYRLSRPEPMWAELLALAASAQGRVYRAEDPHGALRGLFEVRGLLAKDLAVVALREGLDLPPTDDPMLLAYLLDPSNTTPEGVARRYGGEWTEDAAKRALLAERLHANLLGRLQGEERLLWLYEEVEKPLSRVLAHMEATGVKLDVAYLEALSLEVAAEMRRLEEEVFRLAGHSFRLNSRDQLERVLFDELGLPPIGKTEKTGKRSTSAAVLEALREVHPIVDKILQYRELAKLKGTYIDPLPALVHPKTGRLHTRFNQTATATGRLSSSDPNLQNIPVRTPLGQKIRRAFVAEEGWRLVALDYSQIELRVLAHLSGDENLIRVFQEGKDIHTQTASWMFGLSAEAIDPLMRRAAKTINFGVLYGMSAFRLSQELGIPYEEAAAFIQKYFQSYPKVKAWIEKTLAEGRTRGYVETLFGRRRYVPDLNARVKSVREAAERMAFNMPVQGTAADLMKLAMVRLFPQLREVGARMLLQVHDELLLEAPKERAEEVAALAKEVMEGVWPLAVPLEVEVGIGEDWLAAKG

SEQ ID NO: 2543 - DNA, 2529 bp, synthetic construct
  misc_feature 1..2529: note = Variant of DNA polymerase I from Thermus sp. strain 2.9
  source 1..2529: mol_type = other DNA
atgcaccatcatcatcatcatggcggtagcggcgtgttaccggtgttcgagcctaaaggtcgcgtgcttctggttgatggccatcatctcgcgtatcgtaacttctttgccctgaaaggattaaccaccagccgtggcgagccggtacagggtgtctacggctttgcaaagtcgctcctgaaagctctgaaagaagacggtgatgtggtgattgttgtctttgatgcgaaagcgccaagttttcgccacgaagcgtacgaagcttacaaagccgggcgtgctccaacgccggaagactttcctcgccaattggcgcttatgaaggaattagtggatttgcttggcctcgaacgcttggaagttcccggtttcgaggcagacgacgtattagcgactctcgcaaagaaagccgaacgtgagggctatgaagtccagatcttgacagcagatcgcgatcttttccagcttttatctccgcgcatctcggtgttacacccggaagggcatcgtatcaccccggaatggctctgggagaaatatggtttgcgtcccgaacaatgggtggattttcgcgccttagcaggcgatccgagcgacaatattccgggagttaaaggtatcggcgagaagacggcgctcaagctccttaaagaatgggggtcgttggagaacttgcttaagaatttagatcaggtcaaaccagagtcagtgcgtgagaagattcttgcacacctcgaagacctcaaattaagccgcgaattgtcccgtgtacgcaccgatttgccgctcgaagttgatttccgtcgccgccgcgaacctgactgggagggtcttaaagcgtttttagagcgtcttgaatttggttcgctcttgcatgaattcggccttttagaaagcccgttaccagccgaagaagcaccttggccaccgcccgaaggcgcgtttttaggttaccgtttgagtcgcccggaaccgatgtgggccgaattattggctcttgcagcgtctgcccagggacgtgtgtatcgcgcggaagaccctcatggtgcgctccgcggcctcttcgaagtccgtggactccttgccaaagacttagctgttgttgcattgcgcgaaggtcttgatttacctccgactgatgatccaatgcttcttgcgtacctcttggacccgtcaaacacgacgcccgaaggcgtagcccgtcgttacggcggcgagtggaccgaagatgcagcgaaacgcgcgttattggccgaacgtttgcacgccaatttattaggacgtttgcaaggcgaggaacgtctcctctggctttacgaagaagtggagaaaccattgagtcgcgtgctcgcgcatatggaagctaccggtgtcaaattagacgtggcgtatttggaggctctcagccttgaagttgctgccgaaatgcgccgcttggaggaagaagtattccgtttagcaggccattcctttcgccttaattctcgcgatcagttagaacgtgtgttgttcgatgaacttggtctccctcctatcggcaagacagagaagaccggtaaacgtagcacttcagcggcggttttagaagctcttcgcgaagtccatcccattgtggacaagatcttgcagtaccgcgaactcgcgaaattgaaaggcacctatattgaccctcttccggcattagtccacccgaaaacgggacgcctccatacccgcttcaaccaaacagccacggcgaccggtcgtttgtcctcctctgatccaaaccttcagaatattccagtacgtaccccattgggccagaagatccgccgcgcgtttgtagctgaggagggttggcgtttagtggccctcgattatagccaaattgaattacgtgtccttgcccatctttctggcgatgagaacctcatccgcgtgtttcaggaaggcaaagacattcacactcaaacggcaagctggatgtttggattatcagctgaagcgatcgatcctttgatgcgtcgtgcagcgaagaccatcaatttcggtgttctctacggtatgagtgcctttgggttgtcgcaggaattaggcattccctatgaagaagctgcggcgttcattcagaaatactttcaaagctatcccaaagttaaagcatggatcgagaagactctcgaagaaggccgcacacgtggttacgtagagaccttatttggacgtcgccgctatgttcccgatttaaacgctcgcgtgaaatctgtccgtgaagccgccgaacgcatggcgttcaacatgcctgtacagggcacggcagctgacctcatgaaacttgcaatggtgcgcctttttccacaattgcgtgaagttggtgcccgcatgctcttgcaggtccacgatgaactcttgttagaagcgccaaaagagcgtgcggaagaggtggcagccctcgcgaaagaggttatggaaggcgtgtggcccttagcggtgcctcttgaagtcgaagttggtattggcgaggattggctggctgccaaaggataatga

SEQ ID NO: 2544 - protein, 841 aa, synthetic construct
  REGION 1..841: note = Variant of DNA polymerase I from Thermus sp. strain 2.9
MHHHHHHGGSGVLPVFEPKGRVLLVDGHHLAYRNFFALKGLTTSRGEPVQGVYGFAKSLLKALKEDGDVVIVVFDAKAPSFRHEAYEAYKAGRAPTPEDFPRQLALMKELVDLLGLERLEVPGFEADDVLATLAKKAEREGYEVQILTADRDLFQLLSPRISVLHPEGHRITPEWLWEKYGLRPEQWVDFRALAGDPSDNIPGVKGIGEKTALKLLKEWGSLENLLKNLDQVKPESVREKILAHLEDLKLSRELSRVRTDLPLEVDFRRRREPDWEGLKAFLERLEFGSLLHEFGLLESPLPAEEAPWPPPEGAFLGYRLSRPEPMWAELLALAASAQGRVYRAEDPHGALRGLFEVRGLLAKDLAVVALREGLDLPPTDDPMLLAYLLDPSNTTPEGVARRYGGEWTEDAAKRALLAERLHANLLGRLQGEERLLWLYEEVEKPLSRVLAHMEATGVKLDVAYLEALSLEVAAEMRRLEEEVFRLAGHSFRLNSRDQLERVLFDELGLPPIGKTEKTGKRSTSAAVLEALREVHPIVDKILQYRELAKLKGTYIDPLPALVHPKTGRLHTRFNQTATATGRLSSSDPNLQNIPVRTPLGQKIRRAFVAEEGWRLVALDYSQIELRVLAHLSGDENLIRVFQEGKDIHTQTASWMFGLSAEAIDPLMRRAAKTINFGVLYGMSAFGLSQELGIPYEEAAAFIQKYFQSYPKVKAWIEKTLEEGRTRGYVETLFGRRRYVPDLNARVKSVREAAERMAFNMPVQGTAADLMKLAMVRLFPQLREVGARMLLQVHDELLLEAPKERAEEVAALAKEVMEGVWPLAVPLEVEVGIGEDWLAAKG

SEQ ID NO: 2545 - DNA, 2529 bp, synthetic construct
  misc_feature 1..2529: note = Variant of DNA polymerase I from Thermus sp. strain 2.9
  source 1..2529: mol_type = other DNA
atgcaccatcatcatcatcatggcggtagcggcgtgttaccggtgttcgagcctaaaggtcgcgtgcttctggttgatggccatcatctcgcgtatcgtaacttctttgccctgaaaggattaaccaccagccgtggcgagccggtacagggtgtctacggctttgcaaagtcgctcctgaaagctctgaaagaagacggtgatgtggtgattgttgtctttgatgcgaaagcgccaagttttcgccacgaagcgtacgaagcttacaaagccgggcgtgctccaacgccggaagactttcctcgccaattggcgcttatgaaggaattagtggatttgcttggcctcgaacgcttggaagttcccggtttcgaggcagacgacgtattagcgactctcgcaaagaaagccgaacgtgagggctatgaagtccagatcttgacagcagatagtgatcttttccagcttttatctccgcgcatctcggtgttacacccggaagggcatcgtatcaccccggaatggctctgggagaaatatggtttgcgtcccgaacaatgggtggattttcgcgccttagcaggcgatccgagcgacaatattccgggagttaaaggtatcggcgagaagacggcgctcaagctccttaaagaatgggggtcgttggagaacttgcttaagaatttagatcaggtcaaaccagagtcagtgcgtgagaagattcttgcacacctcgaagacctcaaattaagccgcgaattgtcccgtgtacgcaccgatttgccgctcgaagttgatttccgtcgccgccgcgaacctgactgggagggtcttaaagcgtttttagagcgtcttgaatttggttcgctcttgcatgaattcggccttttagaaagcccgttaccagccgaagaagcaccttggccaccgcccgaaggcgcgtttttaggttaccgtttgagtcgcccggaaccgatgtgggccgaattattggctcttgcagcgtctgcccagggacgtgtgtatcgcgcggaagaccctcatggtgcgctccgcggcctcttcgaagtccgtggactccttgccaaagacttagctgttgttgcattgcgcgaaggtcttgatttacctccgactgatgatccaatgcttcttgcgtacctcttggacccgtcaaacacgacgcccgaaggcgtagcccgtcgttacggcggcgagtggaccgaagatgcagcgaaacgcgcgttattggccgaacgtttgcacgccaatttattaggacgtttgcaaggcgaggaacgtctcctctggctttacgaagaagtggagaaaccattgagtcgcgtgctcgcgcatatggaagctaccggtgtcaaattagacgtggcgtatttggaggctctcagccttgaagttgctgccgaaatgcgccgcttggaggaagaagtattccgtttagcaggccattcctttcgccttaattctcgcgatcagttagaacgtgtgttgttcgatgaacttggtctccctcctatcggcaagacagagaagaccggtaaacgtagcacttcagcggcggttttagaagctcttcgcgaagtccatcccattgtggacaagatcttgcagtaccgcgaactcgcgaaattgaaaggcacctatattgaccctcttccggcattagtccacccgaaaacgggacgcctccatacccgcttcaaccaaacagccacggcgaccggtcgtttgtcctcctctgatccaaaccttcagaatattccagtacgtaccccattgggccagaagatccgccgcgcgtttgtagctgaggagggttggcgtttagtggccctcgattatagccaaattgaattacgtgtccttgcccatctttctggcgatgagaacctcatccgcgtgtttcaggaaggcaaagacattcacactcaaacggcaagctggatgtttggattatcagctgaagcgatcgatcctttgatgcgtcgtgcagcgaagaccatcaatttcggtgttctctacggtatgagtgcctttcgtttgtcgcaggaattaggcattccctatgaagaagctgcggcgttcattcagaaatactttcaaagctatcccaaagttaaagcatggatcgagaagactctcgaagaaggccgcacacgtggttacgtagagaccttatttggacgtcgccgctatgttcccgatttaaacgctcgcgtgaaatctgtccgtgaagccgccgaacgcatggcgttcaacatgcctgtacagggcacggcagctgacctcatgaaacttgcaatggtgcgcctttttccacaattgcgtgaagttggtgcccgcatgctcttgcaggtccacgatgaactcttgttagaagcgccaaaagagcgtgcggaagaggtggcagccctcgcgaaagaggttatggaaggcgtgtggcccttagcggtgcctcttgaagtcgaagttggtattggcgaggattggctggctgccaaaggataatga

SEQ ID NO: 2546 - protein, 841 aa, synthetic construct
  REGION 1..841: note = Variant of DNA polymerase I from Thermus sp. strain 2.9
MHHHHHHGGSGVLPVFEPKGRVLLVDGHHLAYRNFFALKGLTTSRGEPVQGVYGFAKSLLKALKEDGDVVIVVFDAKAPSFRHEAYEAYKAGRAPTPEDFPRQLALMKELVDLLGLERLEVPGFEADDVLATLAKKAEREGYEVQILTADSDLFQLLSPRISVLHPEGHRITPEWLWEKYGLRPEQWVDFRALAGDPSDNIPGVKGIGEKTALKLLKEWGSLENLLKNLDQVKPESVREKILAHLEDLKLSRELSRVRTDLPLEVDFRRRREPDWEGLKAFLERLEFGSLLHEFGLLESPLPAEEAPWPPPEGAFLGYRLSRPEPMWAELLALAASAQGRVYRAEDPHGALRGLFEVRGLLAKDLAVVALREGLDLPPTDDPMLLAYLLDPSNTTPEGVARRYGGEWTEDAAKRALLAERLHANLLGRLQGEERLLWLYEEVEKPLSRVLAHMEATGVKLDVAYLEALSLEVAAEMRRLEEEVFRLAGHSFRLNSRDQLERVLFDELGLPPIGKTEKTGKRSTSAAVLEALREVHPIVDKILQYRELAKLKGTYIDPLPALVHPKTGRLHTRFNQTATATGRLSSSDPNLQNIPVRTPLGQKIRRAFVAEEGWRLVALDYSQIELRVLAHLSGDENLIRVFQEGKDIHTQTASWMFGLSAEAIDPLMRRAAKTINFGVLYGMSAFRLSQELGIPYEEAAAFIQKYFQSYPKVKAWIEKTLEEGRTRGYVETLFGRRRYVPDLNARVKSVREAAERMAFNMPVQGTAADLMKLAMVRLFPQLREVGARMLLQVHDELLLEAPKERAEEVAALAKEVMEGVWPLAVPLEVEVGIGEDWLAAKG

SEQ ID NO: 2547 - DNA, 2529 bp, synthetic construct
  misc_feature 1..2529: note = Variant of DNA polymerase I from Thermus sp. strain 2.9
  source 1..2529: mol_type = other DNA
atgcaccatcatcatcatcatggcggtagcggcgtgttaccggtgttcgagcctaaaggtcgcgtgcttctggttgatggccatcatctcgcgtatcgtaacttctttgccctgaaaggattaaccaccagccgtggcgagccggtacagggtgtctacggctttgcaaagtcgctcctgaaagctctgaaagaagacggtgatgtggtgattgttgtctttgatgcgaaagcgccaagttttcgccacgaagcgtacgaagcttacaaagccgggcgtgctccaacgccggaagactttcctcgccaattggcgcttatgaaggaattagtggatttgcttggcctcgaacgcttggaagttcccggtttcgaggcagacgacgtattagcgactctcgcaaagaaagccgaacgtgagggctatgaagtccagatcttgacagcagatcgcgatcttttccagcttttatctccgcgcatctcggtgttacacccggaagggcatcgtatcaccccggaatggctctgggagaaatatggtttgcgtcccgaacaatgggtggattttcgcgccttagcaggcgatccgagcgacaatattccgggagttaaaggtatcggcgagaagacggcgctcaagctccttaaagaatgggggtcgttggagaacttgcttaagaatttagatcaggtcaaaccagagtcagtgcgtgagaagattcttgcacacctcgaagacctcaaattaagccgcgaattgtcccgtgtacgcaccgatttgccgctcgaagttgatttccgtcgccgccgcgaacctgactgggagggtcttaaagcgtttttagagcgtcttgaatttggttcgctcttgcatgaattcggccttttagaaagcccgttaccagccgaagaagcaccttggccaccgcccgaaggcgcgtttttaggttaccgtttgagtcgcccggaaccgatgtgggccgaattattggctcttgcagcgtctgcccagggacgtgtgtatcgcgcggaagaccctcatggtgcgctccgcggcctcttcgaagtccgtggactccttgccaaagacttagctgttgttgcattgcgcgaaggtcttgatttacctccgactgatgatccaatgcttcttgcgtacctcttggacccgtcaaacacgacgcccgaaggcgtagcccgtcgttacggcggcgagtggaccgaagatgcagcgaaacgcgcgttattggccgaacgtttgcacgccaatttattaggacgtttgcaaggcgaggaacgtctcctctggctttacgaagaagtggagaaaccattgagtcgcgtgctcgcgcatatggaagctaccggtgtcaaattagacgtggcgtatttggaggctctcagccttgaagttgctgcctgtatgcgccgcttggaggaagaagtattccgtttagcaggccattcctttcgccttaattctcgcgatcagttagaacgtgtgttgttcgatgaacttggtctccctcctatcggcaagacagagaagaccggtaaacgtagcacttcagcggcggttttagaagctcttcgcgaagtccatcccattgtggacaagatcttgcagtaccgcgaactcgcgaaattgaaaggcacctatattgaccctcttccggcattagtccacccgaaaacgggacgcctccatacccgcttcaaccaaacagccacggcgaccggtcgtttgtcctcctctgatccaaaccttcagaatattccagtacgtaccccattgggccagaagatccgccgcgcgtttgtagctgaggagggttggcgtttagtggccctcgattatagccaaattgaattacgtgtccttgcccatctttctggcgatgagaacctcatccgcgtgtttcaggaaggcaaagacattcacactcaaacggcaagctggatgtttggattatcagctgaagcgatcgatcctttgatgcgtcgtgcagcgaagaccatcaatttcggtgttctctacggtatgagtgcctttcgtttgtcgcaggaattaggcattccctatgaagaagctgcggcgttcattcagaaatactttcaaagctatcccaaagttaaagcatggatcgagaagactctcgaagaaggccgcacacgtggttacgtagagaccttatttggacgtcgccgctatgttcccgatttaaacgctcgcgtgaaatctgtccgtgaagccgccgaacgcatggcgttcaacatgcctgtacagggcacggcagctgacctcatgaaacttgcaatggtgcgcctttttccacaattgcgtgaagttggtgcccgcatgctcttgcaggtccacgatgaactcttgttagaagcgccaaaagagcgtgcggaagaggtggcagccctcgcgaaagaggttatggaaggcgtgtggcccttagcggtgcctcttgaagtcgaagttggtattggcgaggattggctggctgccaaaggataatga

SEQ ID NO: 2548 - protein, 841 aa, synthetic construct
  REGION 1..841: note = Variant of DNA polymerase I from Thermus sp. strain 2.9
MHHHHHHGGSGVLPVFEPKGRVLLVDGHHLAYRNFFALKGLTTSRGEPVQGVYGFAKSLLKALKEDGDVVIVVFDAKAPSFRHEAYEAYKAGRAPTPEDFPRQLALMKELVDLLGLERLEVPGFEADDVLATLAKKAEREGYEVQILTADRDLFQLLSPRISVLHPEGHRITPEWLWEKYGLRPEQWVDFRALAGDPSDNIPGVKGIGEKTALKLLKEWGSLENLLKNLDQVKPESVREKILAHLEDLKLSRELSRVRTDLPLEVDFRRRREPDWEGLKAFLERLEFGSLLHEFGLLESPLPAEEAPWPPPEGAFLGYRLSRPEPMWAELLALAASAQGRVYRAEDPHGALRGLFEVRGLLAKDLAVVALREGLDLPPTDDPMLLAYLLDPSNTTPEGVARRYGGEWTEDAAKRALLAERLHANLLGRLQGEERLLWLYEEVEKPLSRVLAHMEATGVKLDVAYLEALSLEVAACMRRLEEEVFRLAGHSFRLNSRDQLERVLFDELGLPPIGKTEKTGKRSTSAAVLEALREVHPIVDKILQYRELAKLKGTYIDPLPALVHPKTGRLHTRFNQTATATGRLSSSDPNLQNIPVRTPLGQKIRRAFVAEEGWRLVALDYSQIELRVLAHLSGDENLIRVFQEGKDIHTQTASWMFGLSAEAIDPLMRRAAKTINFGVLYGMSAFRLSQELGIPYEEAAAFIQKYFQSYPKVKAWIEKTLEEGRTRGYVETLFGRRRYVPDLNARVKSVREAAERMAFNMPVQGTAADLMKLAMVRLFPQLREVGARMLLQVHDELLLEAPKERAEEVAALAKEVMEGVWPLAVPLEVEVGIGEDWLAAKG

SEQ ID NO: 2549 - DNA, 2529 bp, synthetic construct
  misc_feature 1..2529: note = Variant of DNA polymerase I from Thermus sp. strain 2.9
  source 1..2529: mol_type = other DNA
atgcaccatcatcatcatcatggcggtagcggcgtgttaccggtgttcgagcctaaaggtcgcgtgcttctggttgatggccatcatctcgcgtatcgtaacttctttgccctgaaaggattaaccaccagccgtggcgagccggtacagggtgtctacggctttgcaaagtcgctcctgaaagctctgaaagaagacggtgatgtggtgattgttgtctttgatgcgaaagcgccaagttttcgccacgaagcgtacgaagcttacaaagccgggcgtgctccaacgccggaagactttcctcgccaattggcgcttatgaaggaattagtggatttgcttggcctcgaacgcttggaagttcccggtttcgaggcagacgacgtattagcgactctcgcaaagaaagccgaacgtgagggctatgaagtccagatcttgacagcagatcgcgatcttttccagcttttatctccgcgcatctcggtgttacacccggaagggcatcgtatcaccccggaatggctctgggagaaatatggtttgcgtcccgaacaatgggtggattttcgcgccttagcaggcgatccgagcgacaatattccgggagttaaaggtatcggcgagaagacggcgctcaagctccttaaagaatgggggtcgttggagaacttgcttaagaatttagatcaggtcaaaccagagtcagtgcgtgagaagattcttgcacacctcgaagacctcaaattaagccgcgaattgtcccgtgtacgcaccgatttgccgctcgaagttgatttccgtcgccgccgcgaacctgactgggagggtcttaaagcgtttttagagcgtcttgaatttggttcgctcttgcatgaattcggccttttagaaagcccgttaccagccgaagaagcaccttggccaccgcccgaaggcgcgtttttaggttaccgtttgagtcgcccggaaccgatgtgggccgaattattggctcttgcagcgtctgcccagggacgtgtgtatcgcgcggaagaccctcatggtgcgctccgcggcctcttcgaagtccgtggactccttgccaaagacttagctgttgttgcattgcgcgaaggtcttgatttacctccgactgatgatccaatgcttcttgcgtacctcttggacccgtcaaacacgacgcccgaaggcgtagcccgtcgttacggcggcgagtggaccgaagatgcagcgaaacgcgcgttattggccgaacgtttgcacgccaatttattaggacgtttgcaaggcgaggaacgtctcctctggctttacgaagaagtggagaaaccattgagtcgcgtgctcgcgcatatggaagctaccggtgtcaaattagacgtggcgtatttgatggctctcagccttgaagttgctgccgaaatgcgccgcttggaggaagaagtattccgtttagcaggccattcctttcgccttaattctcgcgatcagttagaacgtgtgttgttcgatgaacttggtctccctcctatcggcaagacagagaagaccggtaaacgtagcacttcagcggcggttttagaagctcttcgcgaagtccatcccattgtggacaagatcttgcagtaccgcgaactcgcgaaattgaaaggcacctatattgaccctcttccggcattagtccacccgaaaacgggacgcctccatacccgcttcaaccaaacagccacggcgaccggtcgtttgtcctcctctgatccaaaccttcagaatattccagtacgtaccccattgggccagaagatccgccgcgcgtttgtagctgaggagggttggcgtttagtggccctcgattatagccaaattgaattacgtgtccttgcccatctttctggcgatgagaacctcatccgcgtgtttcaggaaggcaaagacattcacactcaaacggcaagctggatgtttggattatcagctgaagcgatcgatcctttgatgcgtcgtgcagcgaagaccatcaatttcggtgttctctacggtatgagtgcctttcgtttgtcgcaggaattaggcattccctatgaagaagctgcggcgttcattcagaaatactttcaaagctatcccaaagttaaagcatggatcgagaagactctcgaagaaggccgcacacgtggttacgtagagaccttatttggacgtcgccgctatgttcccgatttaaacgctcgcgtgaaatctgtccgtgaagccgccgaacgcatggcgttcaacatgcctgtacagggcacggcagctgacctcatgaaacttgcaatggtgcgcctttttccacaattgcgtgaagttggtgcccgcatgctcttgcaggtccacgatgaactcttgttagaagcgccaaaagagcgtgcggaagaggtggcagccctcgcgaaagaggttatggaaggcgtgtggcccttagcggtgcctcttgaagtcgaagttggtattggcgaggattggctggctgccaaaggataatga

SEQ ID NO: 2550 - protein, 841 aa, synthetic construct
  REGION 1..841: note = Variant of DNA polymerase I from Thermus sp. strain 2.9
MHHHHHHGGSGVLPVFEPKGRVLLVDGHHLAYRNFFALKGLTTSRGEPVQGVYGFAKSLLKALKEDGDVVIVVFDAKAPSFRHEAYEAYKAGRAPTPEDFPRQLALMKELVDLLGLERLEVPGFEADDVLATLAKKAEREGYEVQILTADRDLFQLLSPRISVLHPEGHRITPEWLWEKYGLRPEQWVDFRALAGDPSDNIPGVKGIGEKTALKLLKEWGSLENLLKNLDQVKPESVREKILAHLEDLKLSRELSRVRTDLPLEVDFRRRREPDWEGLKAFLERLEFGSLLHEFGLLESPLPAEEAPWPPPEGAFLGYRLSRPEPMWAELLALAASAQGRVYRAEDPHGALRGLFEVRGLLAKDLAVVALREGLDLPPTDDPMLLAYLLDPSNTTPEGVARRYGGEWTEDAAKRALLAERLHANLLGRLQGEERLLWLYEEVEKPLSRVLAHMEATGVKLDVAYLMALSLEVAAEMRRLEEEVFRLAGHSFRLNSRDQLERVLFDELGLPPIGKTEKTGKRSTSAAVLEALREVHPIVDKILQYRELAKLKGTYIDPLPALVHPKTGRLHTRFNQTATATGRLSSSDPNLQNIPVRTPLGQKIRRAFVAEEGWRLVALDYSQIELRVLAHLSGDENLIRVFQEGKDIHTQTASWMFGLSAEAIDPLMRRAAKTINFGVLYGMSAFRLSQELGIPYEEAAAFIQKYFQSYPKVKAWIEKTLEEGRTRGYVETLFGRRRYVPDLNARVKSVREAAERMAFNMPVQGTAADLMKLAMVRLFPQLREVGARMLLQVHDELLLEAPKERAEEVAALAKEVMEGVWPLAVPLEVEVGIGEDWLAAKG

SEQ ID NO: 2551 - DNA, 2529 bp, synthetic construct
  misc_feature 1..2529: note = Variant of DNA polymerase I from Thermus sp. strain 2.9
  source 1..2529: mol_type = other DNA
atgcaccatcatcatcatcatggcggtagcggcgtgttaccggtgttcgagcctaaaggtcgcgtgcttctggttgatggccatcatctcgcgtatcgtaacttctttgccctgaaaggattaaccaccagccgtggcgagccggtacagggtgtctacggctttgcaaagtcgctcctgaaagctctgaaagaagacggtgatgtggtgattgttgtctttgatgcgaaagcgccaagttttcgccacgaagcgtacgaagcttacaaagccgggcgtgctccaacgccggaagactttcctcgccaattggcgcttatgaaggaattagtggatttgcttggcctcgaacgcttggaagttcccggtttcgaggcagacgacgtattagcgactctcgcaaagaaagccgaacgtgagggctatgaagtccagatcttgacagcagatcgcgatcttttccagcttttatctccgcgcatctcggtgttacacccggaagggcatcgtatcaccccggaatggctctgggagaaatatggtttgcgtcccgaacaatgggtggattttcgcgccttagcaggcgatccgagcgacaatattccgggagttaaaggtatcggcgagaagacggcgctcaagctccttaaagaatgggggtcgttggagaacttgcttaagaatttagatcaggtcaaaccagagtcagtgcgtgagaagattcttgcacacctcgaagacctcaaattaagccgcgaattgtcccgtgtacgcaccgatttgccgctcgaagttgatttccgtcgccgccgcgaacctgactgggagggtcttaaagcgtttttagagcgtcttgaatttggttcgctcttgcatgaattcggccttttagaaagcccgttaccagccgaagaagcaccttggccaccgcccgaaggcgcgtttttaggttaccgtttgagtcgcccggaaccgatgtgggccgaattatcggctcttgcagcgtctgcccagggacgtgtgtatcgcgcggaagaccctcatggtgcgctccgcggcctcttcgaagtccgtggactccttgccaaagacttagctgttgttgcattgcgcgaaggtcttgatttacctccgactgatgatccaatgcttcttgcgtacctcttggacccgtcaaacacgacgcccgaaggcgtagcccgtcgttacggcggcgagtggaccgaagatgcagcgaaacgcgcgttattggccgaacgtttgcacgccaatttattaggacgtttgcaaggcgaggaacgtctcctctggctttacgaagaagtggagaaaccattgagtcgcgtgctcgcgcatatggaagctaccggtgtcaaattagacgtggcgtatttggaggctctcagccttgaagttgctgccgaaatgcgccgcttggaggaagaagtattccgtttagcaggccattcctttcgccttaattctcgcgatcagttagaacgtgtgttgttcgatgaacttggtctccctcctatcggcaagacagagaagaccggtaaacgtagcacttcagcggcggttttagaagctcttcgcgaagtccatcccattgtggacaagatcttgcagtaccgcgaactcgcgaaattgaaaggcacctatattgaccctcttccggcattagtccacccgaaaacgggacgcctccatacccgcttcaaccaaacagccacggcgaccggtcgtttgtcctcctctgatccaaaccttcagaatattccagtacgtaccccattgggccagaagatccgccgcgcgtttgtagctgaggagggttggcgtttagtggccctcgattatagccaaattgaattacgtgtccttgcccatctttctggcgatgagaacctcatccgcgtgtttcaggaaggcaaagacattcacactcaaacggcaagctggatgtttggattatcagctgaagcgatcgatcctttgatgcgtcgtgcagcgaagaccatcaatttcggtgttctctacggtatgagtgcctttcgtttgtcgcaggaattaggcattccctatgaagaagctgcggcgttcattcagaaatactttcaaagctatcccaaagttaaagcatggatcgagaagactctcgaagaaggccgcacacgtggttacgtagagaccttatttggacgtcgccgctatgttcccgatttaaacgctcgcgtgaaatctgtccgtgaagccgccgaacgcatggcgttcaacatgcctgtacagggcacggcagctgacctcatgaaacttgcaatggtgcgcctttttccacaattgcgtgaagttggtgcccgcatgctcttgcaggtccacgatgaactcttgttagaagcgccaaaagagcgtgcggaagaggtggcagccctcgcgaaagaggttatggaaggcgtgtggcccttagcggtgcctcttgaagtcgaagttggtattggcgaggattggctggctgccaaaggataatga

SEQ ID NO: 2552 - protein, 841 aa, synthetic construct
  REGION 1..841: note = Variant of DNA polymerase I from Thermus sp. strain 2.9
MHHHHHHGGSGVLPVFEPKGRVLLVDGHHLAYRNFFALKGLTTSRGEPVQGVYGFAKSLLKALKEDGDVVIVVFDAKAPSFRHEAYEAYKAGRAPTPEDFPRQLALMKELVDLLGLERLEVPGFEADDVLATLAKKAEREGYEVQILTADRDLFQLLSPRISVLHPEGHRITPEWLWEKYGLRPEQWVDFRALAGDPSDNIPGVKGIGEKTALKLLKEWGSLENLLKNLDQVKPESVREKILAHLEDLKLSRELSRVRTDLPLEVDFRRRREPDWEGLKAFLERLEFGSLLHEFGLLESPLPAEEAPWPPPEGAFLGYRLSRPEPMWAELSALAASAQGRVYRAEDPHGALRGLFEVRGLLAKDLAVVALREGLDLPPTDDPMLLAYLLDPSNTTPEGVARRYGGEWTEDAAKRALLAERLHANLLGRLQGEERLLWLYEEVEKPLSRVLAHMEATGVKLDVAYLEALSLEVAAEMRRLEEEVFRLAGHSFRLNSRDQLERVLFDELGLPPIGKTEKTGKRSTSAAVLEALREVHPIVDKILQYRELAKLKGTYIDPLPALVHPKTGRLHTRFNQTATATGRLSSSDPNLQNIPVRTPLGQKIRRAFVAEEGWRLVALDYSQIELRVLAHLSGDENLIRVFQEGKDIHTQTASWMFGLSAEAIDPLMRRAAKTINFGVLYGMSAFRLSQELGIPYEEAAAFIQKYFQSYPKVKAWIEKTLEEGRTRGYVETLFGRRRYVPDLNARVKSVREAAERMAFNMPVQGTAADLMKLAMVRLFPQLREVGARMLLQVHDELLLEAPKERAEEVAALAKEVMEGVWPLAVPLEVEVGIGEDWLAAKG

SEQ ID NO: 2553 - DNA, 2529 bp, synthetic construct
  misc_feature 1..2529: note = Variant of DNA polymerase I from Thermus sp. strain 2.9
  source 1..2529: mol_type = other DNA
atgcaccatcatcatcatcatggcggtagcggcgtgttaccggtgttcgagcctaaaggtcgcgtgcttctggttgatggccatcatctcgcgtatcgtaacttctttgccctgaaaggattaaccaccagccgtggcgagccggtacagggtgtctacggctttgcaaagtcgctcctgaaagctctgaaagaagacggtgatgtggtgattgttgtctttgatgcgaaagcgccaagttttcgccacgaagcgtacgaagcttacaaagccgggcgtgctccaacgccggaagactttcctcgccaattggcgcttatgaaggaattagtggatttgcttggcctcgaacgcttggaagttcccggtttcgaggcagacgacgtattagcgactctcgcaaagaaagccgaacgtgagggctatgaagtccagatcttgacagcagatcgcgatcttttccagcttttatctccgcgcatctcggtgttacacccggaagggcatcgtatcaccccggaatggctctgggagaaatatggtttgcgtcccgaacaatgggtggattttcgcgccttagcaggcgatccgagcgacaatattccgggagttaaaggtatcggcgagaagacggcgctcaagctccttaaagaatgggggtcgttggagaacttgcttaagaatttagatcaggtcaaaccagagtcagtgcgtgagaagattcttgcacacctcgaagacctcaaattaagccgcgaattgtcccgtgtacgcaccgatttgccgctcgaagttgatttccgtcgccgccgcgaacctgactgggagggtcttaaagcgtttttagagcgtcttgaatttggttcgctcttgcatgaattcggccttttagaaagcccgttaccagccgaagaagcaccttggccaccgcccgaaggcgcgtttttaggttaccgtttgagtcgcccggaaccgatgtgggccgaattattggctcttgcagcgtctgcccagggacgtgtgtatcgcgcggaagaccctcatggtgcgctccgcggcctcttcgaagtccgtggactccttgccaaagacttagctgttgttgcattgcgcgaaggtcttgatttacctccgactgatgatccaatgcttcttgcgtacctcttggacccgtcaaacacgacgcccgaaggcgtagcccgtcgttacggcggcgagtggaccgaagatgcagcgaaacgcgcgttattggccgaacgtttgcacgccaatttattaggacgtttgcaaggcgaggaacgtctcctctggctttacgaagaagtggagaaaccattgagtcgcgtgctcgcgcatatggaagctaccggtgtcaaattagacgtggcgtatttggaggctctcagccttgaagttgctgccgaaatgcgccgcttggaggaagaagtattccgtttagcaggccattcctttcgccttaattctcgcgatcagttagaacgtgtgttgttcgatgaacttggtctccctcctatcggcaagacagagaagaccggtaaacgtagcacttcagcggcggttttagaagctcttcgcgaagtccatcccattgtggacaagatcttgcagtaccgcgaactcgcgaaattgaaaggcacctatattgaccctcttccggcattagtccacccgaaaacgggacgcctccatacccgcttcaaccaaacagccacggcgaccggtcgtttgtcctcctctgatccaaaccttcagaatattccagtacgtaccccattgggccagaagatccgccgcgcgtttgtagctgaggagggttggcgtttagtggccctcgattatagccaaattgaattacgtgtccttgcccatctttctggcgatgagaacctcatccgcgtgtttcaggaaggcaaagacattcacactcaaacggcaagctggatgtttggattatcagctgaagcgatcgatcctttgatgcgtcgtgcagcgaagaccatcaatttcggtgttctctacggtatgagtgcctttcgtttgtcgcaggaattaggcattccctatgaagaagctcaggcgttcattcagaaatactttcaaagctatcccaaagttaaagcatggatcgagaagactctcgaagaaggccgcacacgtggttacgtagagaccttatttggacgtcgccgctatgttcccgatttaaacgctcgcgtgaaatctgtccgtgaagccgccgaacgcatggcgttcaacatgcctgtacagggcacggcagctgacctcatgaaacttgcaatggtgcgcctttttccacaattgcgtgaagttggtgcccgcatgctcttgcaggtccacgatgaactcttgttagaagcgccaaaagagcgtgcggaagaggtggcagccctcgcgaaagaggttatggaaggcgtgtggcccttagcggtgcctcttgaagtcgaagttggtattggcgaggattggctggctgccaaaggataatga

SEQ ID NO: 2554 - protein, 841 aa, synthetic construct
  REGION 1..841: note = Variant of DNA polymerase I from Thermus sp. strain 2.9
MHHHHHHGGSGVLPVFEPKGRVLLVDGHHLAYRNFFALKGLTTSRGEPVQGVYGFAKSLLKALKEDGDVVIVVFDAKAPSFRHEAYEAYKAGRAPTPEDFPRQLALMKELVDLLGLERLEVPGFEADDVLATLAKKAEREGYEVQILTADRDLFQLLSPRISVLHPEGHRITPEWLWEKYGLRPEQWVDFRALAGDPSDNIPGVKGIGEKTALKLLKEWGSLENLLKNLDQVKPESVREKILAHLEDLKLSRELSRVRTDLPLEVDFRRRREPDWEGLKAFLERLEFGSLLHEFGLLESPLPAEEAPWPPPEGAFLGYRLSRPEPMWAELLALAASAQGRVYRAEDPHGALRGLFEVRGLLAKDLAVVALREGLDLPPTDDPMLLAYLLDPSNTTPEGVARRYGGEWTEDAAKRALLAERLHANLLGRLQGEERLLWLYEEVEKPLSRVLAHMEATGVKLDVAYLEALSLEVAAEMRRLEEEVFRLAGHSFRLNSRDQLERVLFDELGLPPIGKTEKTGKRSTSAAVLEALREVHPIVDKILQYRELAKLKGTYIDPLPALVHPKTGRLHTRFNQTATATGRLSSSDPNLQNIPVRTPLGQKIRRAFVAEEGWRLVALDYSQIELRVLAHLSGDENLIRVFQEGKDIHTQTASWMFGLSAEAIDPLMRRAAKTINFGVLYGMSAFRLSQELGIPYEEAQAFIQKYFQSYPKVKAWIEKTLEEGRTRGYVETLFGRRRYVPDLNARVKSVREAAERMAFNMPVQGTAADLMKLAMVRLFPQLREVGARMLLQVHDELLLEAPKERAEEVAALAKEVMEGVWPLAVPLEVEVGIGEDWLAAKG

SEQ ID NO: 2555 - DNA, 2529 bp, synthetic construct
  misc_feature 1..2529: note = Variant of DNA polymerase I from Thermus sp. strain 2.9
  source 1..2529: mol_type = other DNA
atgcaccatcatcatcatcatggcggtagcggcgtgttaccggtgttcgagcctaaaggtcgcgtgcttctggttgatggccatcatctcgcgtatcgtaacttctttgccctgaaaggattaaccaccagccgtggcgagccggtacagggtgtctacggctttgcaaagtcgctcctgaaagctctgaaagaagacggtgatgtggtgattgttgtctttgatgcgaaagcgccaagttttcgccacgaagcgtacgaagcttacaaagccgggcgtgctccaacgccggaagactttcctcgccaattggcgcttatgaaggaattagtggatttgcttggcctcgaacgcttggaagttcccggtttcgaggcagacgacgtattagcgactctcgcaaagaaagccgaacgtgagggctatgaagtccagatcttgacagcagatcgcgatcttttccagcttttatctccgcgcatctcggtgttacacccggaagggcatcgtatcaccccggaatggctctgggagaaatatggtttgcgtcccgaacaatgggtggattttcgcgccttagcaggcgatccgagcgacaatattccgggagttaaaggtatcggcgagaagacggcgctcaagctccttaaagaatgggggtcgttggagaacttgcttaagaatttagatcaggtcaaaccagagtcagtgcgtgagaagattcttgcacacctcgaagacctcaaattaagccgcgaattgtcccgtgtacgcaccgatttgccgctcgaagttgatttccgtcgccgccgcgaacctgactgggagggtcttaaagcgtttttagagcgtcttgaatttggttcgctcttgcatgaattcggccttttagaaagcccgttaccagccgaagaagcaccttggccaccgcccgaaggcgcgtttttaggttaccgtttgagtcgcccggaaccgatgtgggccgaattattggctcttgcagcgtctgcccagggacgtgtgtatcgcgcggaagaccctcatggtgcgctccaaggcctcttcgaagtccgtggactccttgccaaagacttagctgttgttgcattgcgcgaaggtcttgatttacctccgactgatgatccaatgcttcttgcgtacctcttggacccgtcaaacacgacgcccgaaggcgtagcccgtcgttacggcggcgagtggaccgaagatgcagcgaaacgcgcgttattggccgaacgtttgcacgcgaatttattaggacgtttgcaaggcgaggaacgtctcctctggctttacgaagaagtggagaaaccattgagtcgcgtgctcgggcatatggaagctaccggtgtcaaattagacgtggcatatttggaggctctcagccttgaagttgctgccgaaatgcgccgcttggaggaagaagtattccgtttagcaggccgctcctttcgccttaattctcgcgatcagttagaacgtgtgttgttcgatgaacttggtctccctcctatcggcaagacagagaagaccggtaaacgtagcacttcagcggcggttttagaagctcttcgcgaagtccatcccattgtggacaagatcttggtgtaccgcgaactcgcgaaattgaaaggcacctatattgaccgtcttccggcattagtccacccgaaaacgggacgcctccatacccgcttcaaccaaacagccacggcgaccggtcgtttgtcctcctctgatccaaaccttcagaatattccagtacgtaccccattgggccagaagatccgccgtgcgtttgtagctgaggagggttggcgtttagtggccctcgattatagccaaattgaattacgtgtccttgcccatctttctggcgatgagaacctcatccgcgtgtttcaggaaggcaaagacattcacactcaaacggcaagctggatgtttggattatcagctgaagcgatcgatcctttgatgcgtcgtgcagcgaagaccatcaatttcggtgttctctacggtatgagtgcctttcgtttgtcgcaggaattaggcattccctatgaagaagctgcggcgttcattcagaaatactttcaaagctatcccaaagttaaagcatggatcgagaagactctccgtgaaggccgcacacgtggttacgtagagaccttatttggacgtcgccgctatgttcccgatttaaacgctcgcgtgaaatctgtccgtgaagccgccgaacgcatggcgttcaacatgcctgtacagggcacggcagctgacctcatgaaacttgcaatggtgcgcctttttccacaattgcgtgaagttggtgcccgcatgctcttgcaggtccacgatgaactcttgttagaagcgccaaaagagcgtgcggaagaggtggcagccctcgcgaaagaagttatggaaggcgtgtggcccttagcggtgcctcttgaagtcgaagttggtattggcgaggattggctggctgccaaaggataatga

SEQ ID NO: 2556 - protein, 841 aa, synthetic construct
  REGION 1..841: note = Variant of DNA polymerase I from Thermus sp. strain 2.9
MHHHHHHGGSGVLPVFEPKGRVLLVDGHHLAYRNFFALKGLTTSRGEPVQGVYGFAKSLLKALKEDGDVVIVVFDAKAPSFRHEAYEAYKAGRAPTPEDFPRQLALMKELVDLLGLERLEVPGFEADDVLATLAKKAEREGYEVQILTADRDLFQLLSPRISVLHPEGHRITPEWLWEKYGLRPEQWVDFRALAGDPSDNIPGVKGIGEKTALKLLKEWGSLENLLKNLDQVKPESVREKILAHLEDLKLSRELSRVRTDLPLEVDFRRRREPDWEGLKAFLERLEFGSLLHEFGLLESPLPAEEAPWPPPEGAFLGYRLSRPEPMWAELLALAASAQGRVYRAEDPHGALQGLFEVRGLLAKDLAVVALREGLDLPPTDDPMLLAYLLDPSNTTPEGVARRYGGEWTEDAAKRALLAERLHANLLGRLQGEERLLWLYEEVEKPLSRVLGHMEATGVKLDVAYLEALSLEVAAEMRRLEEEVFRLAGRSFRLNSRDQLERVLFDELGLPPIGKTEKTGKRSTSAAVLEALREVHPIVDKILVYRELAKLKGTYIDRLPALVHPKTGRLHTRFNQTATATGRLSSSDPNLQNIPVRTPLGQKIRRAFVAEEGWRLVALDYSQIELRVLAHLSGDENLIRVFQEGKDIHTQTASWMFGLSAEAIDPLMRRAAKTINFGVLYGMSAFRLSQELGIPYEEAAAFIQKYFQSYPKVKAWIEKTLREGRTRGYVETLFGRRRYVPDLNARVKSVREAAERMAFNMPVQGTAADLMKLAMVRLFPQLREVGARMLLQVHDELLLEAPKERAEEVAALAKEVMEGVWPLAVPLEVEVGIGEDWLAAKG

SEQ ID NO: 2557 - DNA, 2529 bp, synthetic construct
  misc_feature 1..2529: note = Variant of DNA polymerase I from Thermus sp. strain 2.9
  source 1..2529: mol_type = other DNA
atgcaccatcatcatcatcatggcggtagcggcgtgttaccggtgttcgagcctaaaggtcgcgtgcttctggttgatggccatcatctcgcgtatcgtaacttctttgccctgaaaggattaaccaccagccgtggcgagccggtacagggtgtctacggctttgcaaagtcgctcctgaaagctctgaaagaagacggtgatgtggtgattgttgtctttgatgcgaaagcgccaagttttcgccacgaagcgtacgaagcttacaaagccgggcgtgctccaacgccggaagactttcctcgccaattggcgcttatgaaggaattagtggatttgcttggcctcgaacgcttggaagttcccggtttcgaggcagacgacgtattagcgactctcgcaaagaaagccgaacgtgagggctatgaagtccagatcttgacagcagatcgcgatcttttccagcttttatctccgcgcatctcggtgttacacccggaagggcatcgtatcaccccggaatggctctgggagaaatatggtttgcgtcccgaacaatgggtggattttcgcgccttagcaggcgatccgagcgacaatattccgggagttaaaggtatcggcgagaagacggcgctcaagctccttaaagaatgggggtcgttggagaacttgcttaagaatttagatcaggtcaaaccagagtcagtgcgtgagaagattcttgcacacctcgaagacctcaaattaagccgcgaattgtcccgtgtacgcaccgatttgccgctcgaagttgatttccgtcgccgccgcgaacctgactgggagggtcttaaagcgtttttagagcgtcttgaatttggttcgctcttgcatgaattcggccttttagaaagcccgttaccagccgaagaagcaccttggccaccgcccgaaggcgcgtttttaggttaccgtttgagtcgcccggaaccgatgtgggccgaattattggctcttgcagcgtctgcccagggacgtgtgtatcgcgcggaagaccctcatggtgcgctccgcggcctcttcgaagtccgtggactccttgccaaagacttagctgttgttgcattgcgcgaaggtcttgatttacctccgactgatgatccaatgcttcttgcgtacctcttggacccgtcaaacacgacgcccgaaggcgtagcccgtcgttacggcggcgagtggaccgaagatgcagcgaaacgcgcgttattggccgaacgtttgcacgccaatttattaggacgtttgcaaggcgaggaacgtctcctctggctttacgaagaagtggagaaaccattgagtcgcgtgctcgcgcatatggaagctaccggtgtcaaattagacgtggcgtatttggaggctctcagccttgaagttgctgccgaaatgcgccgcttggaggaagaagtattccgtttagcaggccattcctttcgccttaattctcgcgatcagttagaacgtgtgttgttcgatgaacttggtctccctcctatcggcaagacagagaagaccggtaaacgtagcacttcagcggcggttttagaatggcttcgcgaagtccatcccattgtggacaagatcttgcagtaccgcgaactcgcgaaattgaaaggcacctatattgaccctcttccggcattagtccacccgaaaacgggacgcctccatacccgcttcaaccaaacagccacggcgaccggtcgtttgtcctcctctgatccaaaccttcagaatattccagtacgtaccccattgggccagaagatccgccgcgcgtttgtagctgaggagggttggcgtttagtggccctcgattatagccaaattgaattacgtgtccttgcccatctttctggcgatgagaacctcatccgcgtgtttcaggaaggcaaagacattcacactcaaacggcaagctggatgtttggattatcagctgaagcgatcgatcctttgatgcgtcgtgcagcgaagaccatcaatttcggtgttctctacggtatgagtgcctttcgtttgtcgcaggaattaggcattccctatgaagaagctgcggcgttcattcagaaatactttcaaagctatcccaaagttaaagcatggatcgagaagactctcgaagaaggccgcacacgtggttacgtagagaccttatttggacgtcgccgctatgttcccgatttaaacgctcgcgtgaaatctgtccgtgaagccgccgaacgcatggcgttcaacatgcctgtacagggcacggcagctgacctcatgaaacttgcaatggtgcgcctttttccacaattgcgtgaagttggtgcccgcatgctcttgcaggtccacgatgaactcttgttagaagcgccaaaagagcgtgcggaagaggtggcagccctcgcgaaagaggttatggaaggcgtgtggcccttagcggtgcctcttgaagtcgaagttggtattggcgaggattggctggctgccaaaggataatga

SEQ ID NO: 2558 - protein, 841 aa, synthetic construct
  REGION 1..841: note = Variant of DNA polymerase I from Thermus sp. strain 2.9
MHHHHHHGGSGVLPVFEPKGRVLLVDGHHLAYRNFFALKGLTTSRGEPVQGVYGFAKSLLKALKEDGDVVIVVFDAKAPSFRHEAYEAYKAGRAPTPEDFPRQLALMKELVDLLGLERLEVPGFEADDVLATLAKKAEREGYEVQILTADRDLFQLLSPRISVLHPEGHRITPEWLWEKYGLRPEQWVDFRALAGDPSDNIPGVKGIGEKTALKLLKEWGSLENLLKNLDQVKPESVREKILAHLEDLKLSRELSRVRTDLPLEVDFRRRREPDWEGLKAFLERLEFGSLLHEFGLLESPLPAEEAPWPPPEGAFLGYRLSRPEPMWAELLALAASAQGRVYRAEDPHGALRGLFEVRGLLAKDLAVVALREGLDLPPTDDPMLLAYLLDPSNTTPEGVARRYGGEWTEDAAKRALLAERLHANLLGRLQGEERLLWLYEEVEKPLSRVLAHMEATGVKLDVAYLEALSLEVAAEMRRLEEEVFRLAGHSFRLNSRDQLERVLFDELGLPPIGKTEKTGKRSTSAAVLEWLREVHPIVDKILQYRELAKLKGTYIDPLPALVHPKTGRLHTRFNQTATATGRLSSSDPNLQNIPVRTPLGQKIRRAFVAEEGWRLVALDYSQIELRVLAHLSGDENLIRVFQEGKDIHTQTASWMFGLSAEAIDPLMRRAAKTINFGVLYGMSAFRLSQELGIPYEEAAAFIQKYFQSYPKVKAWIEKTLEEGRTRGYVETLFGRRRYVPDLNARVKSVREAAERMAFNMPVQGTAADLMKLAMVRLFPQLREVGARMLLQVHDELLLEAPKERAEEVAALAKEVMEGVWPLAVPLEVEVGIGEDWLAAKG

SEQ ID NO: 2559 - DNA, 2529 bp, synthetic construct
  misc_feature 1..2529: note = Variant of DNA polymerase I from Thermus sp. strain 2.9
  source 1..2529: mol_type = other DNA
atgcaccatcatcatcatcatggcggtagcggcgtgttaccggtgttcgagcctaaaggtcgcgtgcttctggttgatggccatcatctcgcgtatcgtaacttctttgccctgaaaggattaaccaccagccgtggcgagccggtacagggtgtctacggctttgcaaagtcgctcctgaaagctctgaaagaagacggtgatgtggtgattgttgtctttgatgcgaaagcgccaagttttcgccacgaagcgtacgaagcttacaaagccgggcgtgctccaacgccggaagactttcctcgccaattggcgcttatgaaggaattagtggatttgcttggcctcgaaactttggaagttcccggtttcgaggcagacgacgtattagcgactctcgcaaagaaagccgaacgtgagggctatgaagtccagatcttgacagcagatcgcgatcttttccagcttttatctccgcgcatctcggtgttacacccggaagggcatcgtatcaccccggaatggctctgggagaaatatggtttgcgtcccgaacaatgggtggattttcgcgccttagcaggcgatccgagcgacaatattccgggagttaaaggtatcggcgagaagacggcgctcaagctccttaaagaatgggggtcgttggagaacttgcttaagaatttagatcaggtcaaaccagagtcagtgcgtgagaagattcttgcacacctcgaagacctcaaattaagccgcgaattgtcccgtgtacgcaccgatttgccgctcgaagttgatttccgtcgccgccgcgaacctgactgggagggtcttaaagcgtttttagagcgtcttgaatttggttcgctcttgcatgaattcggccttttagaaagcccgttaccagccgaagaagcaccttggccaccgcccgaaggcgcgtttttaggttaccgtttgagtcgcccggaaccgatgtgggccgaattattggctcttgcagcgtctgcccagggacgtgtgtatcgcgcggaagaccctcatggtgcgctccgcggcctcttcgaagtccgtggactccttgccaaagacttagctgttgttgcattgcgcgaaggtcttgatttacctccgactgatgatccaatgcttcttgcgtacctcttggacccgtcaaacacgacgcccgaaggcgtagcccgtcgttacggcggcgagtggaccgaagatgcagcgaaacgcgcgttattggccgaacgtttgcacgccaatttattaggacgtttgcaaggcgaggaacgtctcctctggctttacgaagaagtggagaaaccattgagtcgcgtgctcgcgcatatggaagctaccggtgtcaaattagacgtggcgtatttggaggctctcagccttgaagttgctgccgaaatgcgccgcttggaggaagaagtattccgtttagcaggccattcctttcgccttaattctcgcgatcagttagaacgtgtgttgttcgatgaacttggtctccctcctatcggcaagacagagaagaccggtaaacgtagcacttcagcggcggttttagaagctcttcgcgaagtccatcccattgtggacaagatcttgcagtaccgcgaactcgcgaaattgaaaggcacctatattgaccctcttccggcattagtccacccgaaaacgggacgcctccatacccgcttcaaccaaacagccacggcgaccggtcgtttgtcctcctctgatccaaaccttcagaatattccagtacgtaccccattgggccagaagatccgccgcgcgtttgtagctgaggagggttggcgtttagtggccctcgattatagccaaattgaattacgtgtccttgcccatctttctggcgatgagaacctcatccgcgtgtttcaggaaggcaaagacattcacactcaaacggcaagctggatgtttggattatcagctgaagcgatcgatcctttgatgcgtcgtgcagcgaagaccatcaatttcggtgttctctacggtatgagtgcctttcgtttgtcgcaggaattaggcattccctatgaagaagctgcggcgttcattcagaaatactttcaaagctatcccaaagttaaagcatggatcgagaagactctcgaagaaggccgcacacgtggttacgtagagaccttatttggacgtcgccgctatgttcccgatttaaacgctcgcgtgaaatctgtccgtgaagccgccgaacgcatggcgttcaacatgcctgtacagggcacggcagctgacctcatgaaacttgcaatggtgcgcctttttccacaattgcgtgaagttggtgcccgcatgctcttgcaggtccacgatgaactcttgttagaagcgccaaaagagcgtgcggaagaggtggcagccctcgcgaaagaggttatggaaggcgtgtggcccttagcggtgcctcttgaagtcgaagttggtattggcgaggattggctggctgccaaaggataatga

SEQ ID NO: 2560 - protein, 841 aa, synthetic construct
  REGION 1..841: note = Variant of DNA polymerase I from Thermus sp. strain 2.9
MHHHHHHGGSGVLPVFEPKGRVLLVDGHHLAYRNFFALKGLTTSRGEPVQGVYGFAKSLLKALKEDGDVVIVVFDAKAPSFRHEAYEAYKAGRAPTPEDFPRQLALMKELVDLLGLETLEVPGFEADDVLATLAKKAEREGYEVQILTADRDLFQLLSPRISVLHPEGHRITPEWLWEKYGLRPEQWVDFRALAGDPSDNIPGVKGIGEKTALKLLKEWGSLENLLKNLDQVKPESVREKILAHLEDLKLSRELSRVRTDLPLEVDFRRRREPDWEGLKAFLERLEFGSLLHEFGLLESPLPAEEAPWPPPEGAFLGYRLSRPEPMWAELLALAASAQGRVYRAEDPHGALRGLFEVRGLLAKDLAVVALREGLDLPPTDDPMLLAYLLDPSNTTPEGVARRYGGEWTEDAAKRALLAERLHANLLGRLQGEERLLWLYEEVEKPLSRVLAHMEATGVKLDVAYLEALSLEVAAEMRRLEEEVFRLAGHSFRLNSRDQLERVLFDELGLPPIGKTEKTGKRSTSAAVLEALREVHPIVDKILQYRELAKLKGTYIDPLPALVHPKTGRLHTRFNQTATATGRLSSSDPNLQNIPVRTPLGQKIRRAFVAEEGWRLVALDYSQIELRVLAHLSGDENLIRVFQEGKDIHTQTASWMFGLSAEAIDPLMRRAAKTINFGVLYGMSAFRLSQELGIPYEEAAAFIQKYFQSYPKVKAWIEKTLEEGRTRGYVETLFGRRRYVPDLNARVKSVREAAERMAFNMPVQGTAADLMKLAMVRLFPQLREVGARMLLQVHDELLLEAPKERAEEVAALAKEVMEGVWPLAVPLEVEVGIGEDWLAAKG

SEQ ID NO: 2561 - DNA, 2529 bp, synthetic construct
  misc_feature 1..2529: note = Variant of DNA polymerase I from Thermus sp. strain 2.9
  source 1..2529: mol_type = other DNA
atgcaccatcatcatcatcatggcggtagcggcgtgttaccggtgttcgagcctaaaggtcgcgtgcttctggttgatggccatcatctcgcgtatcgtaacttctttgccctgaaaggattaaccaccagccgtggcgagccggtacagggtgtctacggctttgcaaagtcgctcctgaaagctctgaaagaagacggtgatgtggtgattgttgtctttgatgcgaaagcgccaagttttcgccacgaagcgtacgaagcttacaaagccgggcgtgctccaacgccggaagactttcctcgccaattggcgcttatgaaggaattagtggatttgcttggcctcgaacgcttggaagttcccggtttcgaggcagacgacgtattagcgactctcgcaaagaaagccgaacgtgagggctatgaagtccagatcttgacagcagatcgcgatcttttccagcttttatctccgcgcatctcggtgttacacccggaagggcatcgtatcaccccggaatggctctgggagaaatatggtttgcgtcccgaacaatgggtggattttcgcgccttagcaggcgatccgagcgacaatattccgggagttaaaggtatcggcgagaagacggcgctcaagctccttaaagaatgggggtcgttggagaacttgcttaagaatttagatcaggtcaaaccagagtcagtgcgtgagaagattcttgcacacctcgaagacctcaaattaagccgcgaattgtcccgtgtacgcaccgatttgccgctcgaagttgatttccgtcgccgccgcgaacctgactgggagggtcttaaagcgtttttagagcgtcttgaatttggttcgctcttgcatgaattcggccttttagaaagcccgttaccagccgaagaagcaccttggccaccgcccgaaggcgcgtttttaggttaccgtttgagtcgcccggaaccgatgtgggccgaattattggctcttgcagcgtctgcccagggaacggtgtatcgcgcggaagaccctcatggtgcgctccgcggcctcttcgaagtccgtggactccttgccaaagacttagctgttgttgcattgcgcgaaggtcttgatttacctccgactgatgatccaatgcttcttgcgtacctcttggacccgtcaaacacgacgcccgaaggcgtagcccgtcgttacggcggcgagtggaccgaagatgcagcgaaacgcgcgttattggccgaacgtttgcacgccaatttattaggacgtttgcaaggcgaggaacgtctcctctggctttacgaagaagtggagaaaccattgagtcgcgtgctcgcgcatatggaagctaccggtgtcaaattagacgtggcgtatttggaggctctcagccttgaagttgctgccgaaatgcgccgcttggaggaagaagtattccgtttagcaggccattcctttcgccttaattctcgcgatcagttagaacgtgtgttgttcgatgaacttggtctccctcctatcggcaagacagagaagaccggtaaacgtagcacttcagcggcggttttagaagctcttcgcgaagtccatcccattgtggacaagatcttgcagtaccgcgaactcgcgaaattgaaaggcacctatattgaccctcttccggcattagtccacccgaaaacgggacgcctccatacccgcttcaaccaaacagccacggcgaccggtcgtttgtcctcctctgatccaaaccttcagaatattccagtacgtaccccattgggccagaagatccgccgcgcgtttgtagctgaggagggttggcgtttagtggccctcgattatagccaaattgaattacgtgtccttgcccatctttctggcgatgagaacctcatccgcgtgtttcaggaaggcaaagacattcacactcaaacggcaagctggatgtttggattatcagctgaagcgatcgatcctttgatgcgtcgtgcagcgaagaccatcaatttcggtgttctctacggtatgagtgcctttcgtttgtcgcaggaattaggcattccctatgaagaagctgcggcgttcattcagaaatactttcaaagctatcccaaagttaaagcatggatcgagaagactctcgaagaaggccgcacacgtggttacgtagagaccttatttggacgtcgccgctatgttcccgatttaaacgctcgcgtgaaatctgtccgtgaagccgccgaacgcatggcgttcaacatgcctgtacagggcacggcagctgacctcatgaaacttgcaatggtgcgcctttttccacaattgcgtgaagttggtgcccgcatgctcttgcaggtccacgatgaactcttgttagaagcgccaaaagagcgtgcggaagaggtggcagccctcgcgaaagaggttatggaaggcgtgtggcccttagcggtgcctcttgaagtcgaagttggtattggcgaggattggctggctgccaaaggataatga

SEQ ID NO: 2562 - protein, 841 aa, synthetic construct
  REGION 1..841: note = Variant of DNA polymerase I from Thermus sp. strain 2.9
MHHHHHHGGSGVLPVFEPKGRVLLVDGHHLAYRNFFALKGLTTSRGEPVQGVYGFAKSLLKALKEDGDVVIVVFDAKAPSFRHEAYEAYKAGRAPTPEDFPRQLALMKELVDLLGLERLEVPGFEADDVLATLAKKAEREGYEVQILTADRDLFQLLSPRISVLHPEGHRITPEWLWEKYGLRPEQWVDFRALAGDPSDNIPGVKGIGEKTALKLLKEWGSLENLLKNLDQVKPESVREKILAHLEDLKLSRELSRVRTDLPLEVDFRRRREPDWEGLKAFLERLEFGSLLHEFGLLESPLPAEEAPWPPPEGAFLGYRLSRPEPMWAELLALAASAQGTVYRAEDPHGALRGLFEVRGLLAKDLAVVALREGLDLPPTDDPMLLAYLLDPSNTTPEGVARRYGGEWTEDAAKRALLAERLHANLLGRLQGEERLLWLYEEVEKPLSRVLAHMEATGVKLDVAYLEALSLEVAAEMRRLEEEVFRLAGHSFRLNSRDQLERVLFDELGLPPIGKTEKTGKRSTSAAVLEALREVHPIVDKILQYRELAKLKGTYIDPLPALVHPKTGRLHTRFNQTATATGRLSSSDPNLQNIPVRTPLGQKIRRAFVAEEGWRLVALDYSQIELRVLAHLSGDENLIRVFQEGKDIHTQTASWMFGLSAEAIDPLMRRAAKTINFGVLYGMSAFRLSQELGIPYEEAAAFIQKYFQSYPKVKAWIEKTLEEGRTRGYVETLFGRRRYVPDLNARVKSVREAAERMAFNMPVQGTAADLMKLAMVRLFPQLREVGARMLLQVHDELLLEAPKERAEEVAALAKEVMEGVWPLAVPLEVEVGIGEDWLAAKG

SEQ ID NO: 2563 - DNA, 2529 bp, synthetic construct
  misc_feature 1..2529: note = Variant of DNA polymerase I from Thermus sp. strain 2.9
  source 1..2529: mol_type = other DNA
atgcaccatcatcatcatcatggcggtagcggcgtgttaccggtgttcgagcctaaaggtcgcgtgcttctggttgatggccatcatctcgcgtatcgtaacttctttgccctgaaaggattaaccaccagccgtggcgagccggtacagggtgtctacggctttgcaaagtcgctcctgaaagctctgaaagaagacggtgatgtggtgattgttgtctttgatgcgaaagcgccaagttttcgccacgaagcgtacgaagcttacaaagccgggcgtgctccaacgccggaagactttcctcgccaattggcgcttatgaaggaattagtggatttgcttggcctcgaacgcttggaagttcccggtttcgaggcagacgacgtattagcgactctcgcaaagaaagccgaacgtgagggctatgaagtccagatcttgacagcagatcgcgatcttttccagcttttatctccgcgcatctcggtgttacacccggaagggcatcgtatcaccccggaatggctctgggagaaatatggtttgcgtcccgaacaatgggtggattttcgcgccttagcaggcgatccgagcgacaatattccgggagttaaaggtatcggcgagaagacggcgctcaagctccttaaagaatgggggtcgttggagaacttgcttaagaatttagatcaggtcaaaccagagtcagtgcgtgagaagattcttgcacacctcgaagacctcaaattaagccgcgaattgtcccgtgtacgcaccgatttgccgctcgaagttgatttccgtcgccgccgcgaacctgactgggagggtcttaaagcgtttttagagcgtcttgaatttggttcgctcttgcatgaattcggccttttagaaagcccgttaccagccgaagaagcaccttggccaccgcccgaaggcgcgtttttaggttaccgtttgagtcgcccggaaccgatgtgggccgaattattggctcttgcagcgtctgcccagggagtggtgtatcgcgcggaagaccctcatggtgcgctccgcggcctcttcgaagtccgtggactccttgccaaagacttagctgttgttgcattgcgcgaaggtcttgatttacctccgactgatgatccaatgcttcttgcgtacctcttggacccgtcaaacacgacgcccgaaggcgtagcccgtcgttacggcggcgagtggaccgaagatgcagcgaaacgcgcgttattggccgaacgtttgcacgccaatttattaggacgtttgcaaggcgaggaacgtctcctctggctttacgaagaagtggagaaaccattgagtcgcgtgctcgcgcatatggaagctaccggtgtcaaattagacgtggcgtatttggaggctctcagccttgaagttgctgccgaaatgcgccgcttggaggaagaagtattccgtttagcaggccattcctttcgccttaattctcgcgatcagttagaacgtgtgttgttcgatgaacttggtctccctcctatcggcaagacagagaagaccggtaaacgtagcacttcagcggcggttttagaagctcttcgcgaagtccatcccattgtggacaagatcttgcagtaccgcgaactcgcgaaattgaaaggcacctatattgaccctcttccggcattagtccacccgaaaacgggacgcctccatacccgcttcaaccaaacagccacggcgaccggtcgtttgtcctcctctgatccaaaccttcagaatattccagtacgtaccccattgggccagaagatccgccgcgcgtttgtagctgaggagggttggcgtttagtggccctcgattatagccaaattgaattacgtgtccttgcccatctttctggcgatgagaacctcatccgcgtgtttcaggaaggcaaagacattcacactcaaacggcaagctggatgtttggattatcagctgaagcgatcgatcctttgatgcgtcgtgcagcgaagaccatcaatttcggtgttctctacggtatgagtgcctttcgtttgtcgcaggaattaggcattccctatgaagaagctgcggcgttcattcagaaatactttcaaagctatcccaaagttaaagcatggatcgagaagactctcgaagaaggccgcacacgtggttacgtagagaccttatttggacgtcgccgctatgttcccgatttaaacgctcgcgtgaaatctgtccgtgaagccgccgaacgcatggcgttcaacatgcctgtacagggcacggcagctgacctcatgaaacttgcaatggtgcgcctttttccacaattgcgtgaagttggtgcccgcatgctcttgcaggtccacgatgaactcttgttagaagcgccaaaagagcgtgcggaagaggtggcagccctcgcgaaagaggttatggaaggcgtgtggcccttagcggtgcctcttgaagtcgaagttggtattggcgaggattggctggctgccaaaggataatga

SEQ ID NO: 2564 - protein, 841 aa, synthetic construct
  REGION 1..841: note = Variant of DNA polymerase I from Thermus sp. strain 2.9
MHHHHHHGGSGVLPVFEPKGRVLLVDGHHLAYRNFFALKGLTTSRGEPVQGVYGFAKSLLKALKEDGDVVIVVFDAKAPSFRHEAYEAYKAGRAPTPEDFPRQLALMKELVDLLGLERLEVPGFEADDVLATLAKKAEREGYEVQILTADRDLFQLLSPRISVLHPEGHRITPEWLWEKYGLRPEQWVDFRALAGDPSDNIPGVKGIGEKTALKLLKEWGSLENLLKNLDQVKPESVREKILAHLEDLKLSRELSRVRTDLPLEVDFRRRREPDWEGLKAFLERLEFGSLLHEFGLLESPLPAEEAPWPPPEGAFLGYRLSRPEPMWAELLALAASAQGVVYRAEDPHGALRGLFEVRGLLAKDLAVVALREGLDLPPTDDPMLLAYLLDPSNTTPEGVARRYGGEWTEDAAKRALLAERLHANLLGRLQGEERLLWLYEEVEKPLSRVLAHMEATGVKLDVAYLEALSLEVAAEMRRLEEEVFRLAGHSFRLNSRDQLERVLFDELGLPPIGKTEKTGKRSTSAAVLEALREVHPIVDKILQYRELAKLKGTYIDPLPALVHPKTGRLHTRFNQTATATGRLSSSDPNLQNIPVRTPLGQKIRRAFVAEEGWRLVALDYSQIELRVLAHLSGDENLIRVFQEGKDIHTQTASWMFGLSAEAIDPLMRRAAKTINFGVLYGMSAFRLSQELGIPYEEAAAFIQKYFQSYPKVKAWIEKTLEEGRTRGYVETLFGRRRYVPDLNARVKSVREAAERMAFNMPVQGTAADLMKLAMVRLFPQLREVGARMLLQVHDELLLEAPKERAEEVAALAKEVMEGVWPLAVPLEVEVGIGEDWLAAKG

SEQ ID NO: 2565 - DNA, 2529 bp, synthetic construct
  misc_feature 1..2529: note = Variant of DNA polymerase I from Thermus sp. strain 2.9
  source 1..2529: mol_type = other DNA
atgcaccatcatcatcatcatggcggtagcggcgtgttaccggtgttcgagcctaaaggtcgcgtgcttctggttgatggccatcatctcgcgtatcgtaacttctttgccctgaaaggattaaccaccagccgtggcgagccggtacagggtgtctacggctttgcaaagtcgctcctgaaagctctgaaagaagacggtgatgtggtgattgttgtctttgatgcgaaagcgccaagttttcgccacgaagcgtacgaagcttacaaagccgggcgtgctccaacgccggaagactttcctcgccaattggcgcttatgaaggaattagtggatttgcttggcctcgaacgcttggaagttcccggtttcgaggcagacgacgtattagcgactctcgcaaagaaagccgaacgtgagggctatgaagtccagatcttgacagcagatcgcgatcttttccagcttttatctccgcgcatctcggtgttacacccggaagggcatcgtatcaccccggaatggctctgggagaaatatggtttgcgtcccgaacaatgggtggattttcgcgccttagcaggcgatccgagcgacaatattccgggagttaaaggtatcggcgagaagacggcgctcaagctccttaaagaatgggggtcgttggagaacttgcttaagaatttagatcaggtcaaaccagagtcagtgcgtgagaagattcttgcacacctcgaagacctcaaattaagccgcgaattgtcccgtgtacgcaccgatttgccgctcgaagttgatttccgtcgccgccgcgaacctgactgggagggtcttaaagcgtttttagagcgtcttgaatttggttcgctcttgcatgaattcggccttttagaaagcccgttaccagccgaagaagcaccttggccaccgcccgaaggcgcgtttttaggttaccgtttgagtcgcccggaaccgatgtgggccgaattattggctcttgcagcgtctgcccagggacgtgtgtatcgcgcggaagaccctcatggtgcgctccgcggcctcttcgaagtccgtggactccttgccaaagacttagctgttgttgcattgcgcgaaggtcttgatttacctccgactgatgatccaatgcttcttgcgtacctcttggacccgtcaaacacgacgcccgaaggcgtagcccgtcgttacggcggcgagtggaccgaagatgcagcgaaacgcgcgttattggccgaacgtttgcacgccaatttattaggacgtttgcaaggcgaggaacgtctcctctggctttacgaagaagtggagaaaccattgagtcgcgtgctcgcgcatatggaagctaccggtgtcaaattagacgtggcgtatttggaggctctcagccttgaagttgctgccgaaatgcgccgcttggaggaagaagtattccgtttagcaggccattcctttcgccttaattctcgcgatcagttagaacgtgtgttgttcgatgaacttggtctccctcctatcggcaagacagagaagaccggtaaacgtagcacttcagcggcggttttagaagctcttcgccctgtccatcccattgtggacaagatcttgcagtaccgcgaactcgcgaaattgaaaggcacctatattgaccctcttccggcattagtccacccgaaaacgggacgcctccatacccgcttcaaccaaacagccacggcgaccggtcgtttgtcctcctctgatccaaaccttcagaatattccagtacgtaccccattgggccagaagatccgccgcgcgtttgtagctgaggagggttggcgtttagtggccctcgattatagccaaattgaattacgtgtccttgcccatctttctggcgatgagaacctcatccgcgtgtttcaggaaggcaaagacattcacactcaaacggcaagctggatgtttggattatcagctgaagcgatcgatcctttgatgcgtcgtgcagcgaagaccatcaatttcggtgttctctacggtatgagtgcctttcgtttgtcgcaggaattaggcattccctatgaagaagctgcggcgttcattcagaaatactttcaaagctatcccaaagttaaagcatggatcgagaagactctcgaagaaggccgcacacgtggttacgtagagaccttatttggacgtcgccgctatgttcccgatttaaacgctcgcgtgaaatctgtccgtgaagccgccgaacgcatggcgttcaacatgcctgtacagggcacggcagctgacctcatgaaacttgcaatggtgcgcctttttccacaattgcgtgaagttggtgcccgcatgctcttgcaggtccacgatgaactcttgttagaagcgccaaaagagcgtgcggaagaggtggcagccctcgcgaaagaggttatggaaggcgtgtggcccttagcggtgcctcttgaagtcgaagttggtattggcgaggattggctggctgccaaaggataatga

SEQ ID NO: 2566 - protein, 841 aa, synthetic construct
  REGION 1..841: note = Variant of DNA polymerase I from Thermus sp. strain 2.9
MHHHHHHGGSGVLPVFEPKGRVLLVDGHHLAYRNFFALKGLTTSRGEPVQGVYGFAKSLLKALKEDGDVVIVVFDAKAPSFRHEAYEAYKAGRAPTPEDFPRQLALMKELVDLLGLERLEVPGFEADDVLATLAKKAEREGYEVQILTADRDLFQLLSPRISVLHPEGHRITPEWLWEKYGLRPEQWVDFRALAGDPSDNIPGVKGIGEKTALKLLKEWGSLENLLKNLDQVKPESVREKILAHLEDLKLSRELSRVRTDLPLEVDFRRRREPDWEGLKAFLERLEFGSLLHEFGLLESPLPAEEAPWPPPEGAFLGYRLSRPEPMWAELLALAASAQGRVYRAEDPHGALRGLFEVRGLLAKDLAVVALREGLDLPPTDDPMLLAYLLDPSNTTPEGVARRYGGEWTEDAAKRALLAERLHANLLGRLQGEERLLWLYEEVEKPLSRVLAHMEATGVKLDVAYLEALSLEVAAEMRRLEEEVFRLAGHSFRLNSRDQLERVLFDELGLPPIGKTEKTGKRSTSAAVLEALRPVHPIVDKILQYRELAKLKGTYIDPLPALVHPKTGRLHTRFNQTATATGRLSSSDPNLQNIPVRTPLGQKIRRAFVAEEGWRLVALDYSQIELRVLAHLSGDENLIRVFQEGKDIHTQTASWMFGLSAEAIDPLMRRAAKTINFGVLYGMSAFRLSQELGIPYEEAAAFIQKYFQSYPKVKAWIEKTLEEGRTRGYVETLFGRRRYVPDLNARVKSVREAAERMAFNMPVQGTAADLMKLAMVRLFPQLREVGARMLLQVHDELLLEAPKERAEEVAALAKEVMEGVWPLAVPLEVEVGIGEDWLAAKG

SEQ ID NO: 2567 - DNA, 2529 bp, synthetic construct
  misc_feature 1..2529: note = Variant of DNA polymerase I from Thermus sp. strain 2.9
  source 1..2529: mol_type = other DNA
atgcaccatcatcatcatcatggcggtagcggcgtgttaccggtgttcgagcctaaaggtcgcgtgcttctggttgatggccatcatctcgcgtatcgtaacttctttgccctgaaaggattaaccaccagccgtggcgagccggtacagggtgtctacggctttgcaaagtcgctcctgaaagctctgaaagaagacggtgatgtggtgattgttgtctttgatgcgaaagcgccaagttttcgccacgaagcgtacgaagcttacaaagccgggcgtgctccaacgccggaagactttcctcgccaattggcgcttatgaaggaattagtggatttgcttggcctcgaacgcttggaagttcccggtttcgaggcagacgacgtattagcgactctcgcaaagaaagccgaacgtgagggctatgaagtccagatcttgacagcagatcgcgatcttttccagcttttatctccgcgcatctcggtgttacacccggaagggcatcgtatcaccccggaatggctctgggagaaatatggtttgcgtcccgaacaatgggtggattttcgcgccttagcaggcgatccgagcgacaatattccgggagttaaaggtatcggcgagaagacggcgctcaagctccttaaagaatgggggtcgttggagaacttgcttaagaatttagatcaggtcaaaccagagtcagtgcgtgagaagattcttgcacacctcgaagacctcaaattaagccgcgaattgtcccgtgtacgcaccgatttgccgctcgaagttgatttcgagcgccgccgcgaacctgactgggagggtcttaaagcgtttttagagcgtcttgaatttggttcgctcttgcatgaattcggccttttagaaagcccgttaccagccgaagaagcaccttggccaccgcccgaaggcgcgtttttaggttaccgtttgagtcgcccggaaccgatgtgggccgaattattggctcttgcagcgtctgcccagggacgtgtgtatcgcgcggaagaccctcatggtgcgctccgcggcctcttcgaagtccgtggactccttgccaaagacttagctgttgttgcattgcgcgaaggtcttgatttacctccgactgatgatccaatgcttcttgcgtacctcttggacccgtcaaacacgacgcccgaaggcgtagcccgtcgttacggcggcgagtggaccgaagatgcagcgaaacgcgcgttattggccgaacgtttgcacgccaatttattaggacgtttgcaaggcgaggaacgtctcctctggctttacgaagaagtggagaaaccattgagtcgcgtgctcgcgcatatggaagctaccggtgtcaaattagacgtggcgtatttggaggctctcagccttgaagttgctgccgaaatgcgccgcttggaggaagaagtattccgtttagcaggccattcctttcgccttaattctcgcgatcagttagaacgtgtgttgttcgatgaacttggtctccctcctatcggcaagacagagaagaccggtaaacgtagcacttcagcggcggttttagaagctcttcgcgaagtccatcccattgtggacaagatcttgcagtaccgcgaactcgcgaaattgaaaggcacctatattgaccctcttccggcattagtccacccgaaaacgggacgcctccatacccgcttcaaccaaacagccacggcgaccggtcgtttgtcctcctctgatccaaaccttcagaatattccagtacgtaccccattgggccagaagatccgccgcgcgtttgtagctgaggagggttggcgtttagtggccctcgattatagccaaattgaattacgtgtccttgcccatctttctggcgatgagaacctcatccgcgtgtttcaggaaggcaaagacattcacactcaaacggcaagctggatgtttggattatcagctgaagcgatcgatcctttgatgcgtcgtgcagcgaagaccatcaatttcggtgttctctacggtatgagtgcctttcgtttgtcgcaggaattaggcattccctatgaagaagctgcggcgttcattcagaaatactttcaaagctatcccaaagttaaagcatggatcgagaagactctcgaagaaggccgcacacgtggttacgtagagaccttatttggacgtcgccgctatgttcccgatttaaacgctcgcgtgaaatctgtccgtgaagccgccgaacgcatggcgttcaacatgcctgtacagggcacggcagctgacctcatgaaacttgcaatggtgcgcctttttccacaattgcgtgaagttggtgcccgcatgctcttgcaggtccacgatgaactcttgttagaagcgccaaaagagcgtgcggaagaggtggcagccctcgcgaaagaggttatggaaggcgtgtggcccttagcggtgcctcttgaagtcgaagttggtattggcgaggattggctggctgccaaaggataatga

SEQ ID NO: 2568 - protein, 841 aa, synthetic construct
  REGION 1..841: note = Variant of DNA polymerase I from Thermus sp. strain 2.9
MHHHHHHGGSGVLPVFEPKGRVLLVDGHHLAYRNFFALKGLTTSRGEPVQGVYGFAKSLLKALKEDGDVVIVVFDAKAPSFRHEAYEAYKAGRAPTPEDFPRQLALMKELVDLLGLERLEVPGFEADDVLATLAKKAEREGYEVQILTADRDLFQLLSPRISVLHPEGHRITPEWLWEKYGLRPEQWVDFRALAGDPSDNIPGVKGIGEKTALKLLKEWGSLENLLKNLDQVKPESVREKILAHLEDLKLSRELSRVRTDLPLEVDFERRREPDWEGLKAFLERLEFGSLLHEFGLLESPLPAEEAPWPPPEGAFLGYRLSRPEPMWAELLALAASAQGRVYRAEDPHGALRGLFEVRGLLAKDLAVVALREGLDLPPTDDPMLLAYLLDPSNTTPEGVARRYGGEWTEDAAKRALLAERLHANLLGRLQGEERLLWLYEEVEKPLSRVLAHMEATGVKLDVAYLEALSLEVAAEMRRLEEEVFRLAGHSFRLNSRDQLERVLFDELGLPPIGKTEKTGKRSTSAAVLEALREVHPIVDKILQYRELAKLKGTYIDPLPALVHPKTGRLHTRFNQTATATGRLSSSDPNLQNIPVRTPLGQKIRRAFVAEEGWRLVALDYSQIELRVLAHLSGDENLIRVFQEGKDIHTQTASWMFGLSAEAIDPLMRRAAKTINFGVLYGMSAFRLSQELGIPYEEAAAFIQKYFQSYPKVKAWIEKTLEEGRTRGYVETLFGRRRYVPDLNARVKSVREAAERMAFNMPVQGTAADLMKLAMVRLFPQLREVGARMLLQVHDELLLEAPKERAEEVAALAKEVMEGVWPLAVPLEVEVGIGEDWLAAKG

SEQ ID NO: 2569 - DNA, 2529 bp, synthetic construct
  misc_feature 1..2529: note = Variant of DNA polymerase I from Thermus sp. strain 2.9
  source 1..2529: mol_type = other DNA
atgcaccatcatcatcatcatggcggtagcggcgtgttaccggtgttcgagcctaaaggtcgcgtgcttctggttgatggccatcatctcgcgtatcgtaacttctttgccctgaaaggattaaccaccagccgtggcgagccggtacagggtgtctacggctttgcaaagtcgctcctgaaagctctgaaagaagacggtgatgtggtgattgttgtctttgatgcgaaagcgccaagttttcgccacgaagcgtacgaagcttacaaagccgggcgtgctccaacgccggaagactttcctcgccaattggcgcttatgaaggaattagtggatttgcttggcctcgaacgcttggaagttcccggtttcgaggcagacgacgtattagcgactctcgcaaagaaagccgaacgtgagggctatgaagtccagatcttgacagcagatcgcgatcttttccagcttttatctccgcgcatctcggtgttacacccggaagggcatcgtatcaccccggaatggctctgggagaaatatggtttgcgtcccgaacaatgggtggattttcgcgccttagcaggcgatccgagcgacaatattccgggagttaaaggtatcggcgagaagacggcgctcaagctccttaaagaatgggggtcgttggagaacttgcttaagaatttagatcaggtcaaaccagagtcagtgcgtgagaagattcttgcacacctcgaagacctcaaattaagccgcgaattgtcccgtgtacgcaccgatttgccgctcgaagttgatttccgtcgccgccgcgaacctgactgggagggtcttaaagcgtttttagagcgtcttgaatttggttcgctcttgcatgaattcggccttttagaaagcccgttaccagccgaagaagcaccttggccaccgcccgaaggcgcgtttttaggttaccgtttgagtcgcccggaaccgatgtgggccgaattattggctcttgcagcgtctgcccagggacgtgtgtatcgcgcggaagaccctcatggtgcgctccgcggcctcttcgaagtccgtggactccttgccaaagacttagctgttgttgcattgcgcgaaggtcttgatttacctccgactgatgatccaatgcttcttgcgtacctcttggacccgtcaaacacgacgcccgaaggcgtagcccgtcgttacggcggcgagtggaccgaagatgcagcgaaacgcgcgttattggccgaacgtttgcacgccaatttattaggacgtttgcaaggcgaggaacgtctcctctggctttacgaagaagtggagaaaccattgagtcgcgtgctcgcgcatatggaagctaccggtgtcaaattagacgtggcgtatttggaggctctcagccttgaagttgctgccgaaatgcgccgcttggaggaagaagtattccgtttagcaggccattcctttcgccttaattctcgcgatcagttagaacgtgtgttgttcgatgaacttggtctccctcctatcggcaagacagagaagaccggtaaacgtagcacttcagcggcggttttagaagctcttcgcgaagtccatgggattgtggacaagatcttgcagtaccgcgaactcgcgaaattgaaaggcacctatattgaccctcttccggcattagtccacccgaaaacgggacgcctccatacccgcttcaaccaaacagccacggcgaccggtcgtttgtcctcctctgatccaaaccttcagaatattccagtacgtaccccattgggccagaagatccgccgcgcgtttgtagctgaggagggttggcgtttagtggccctcgattatagccaaattgaattacgtgtccttgcccatctttctggcgatgagaacctcatccgcgtgtttcaggaaggcaaagacattcacactcaaacggcaagctggatgtttggattatcagctgaagcgatcgatcctttgatgcgtcgtgcagcgaagaccatcaatttcggtgttctctacggtatgagtgcctttcgtttgtcgcaggaattaggcattccctatgaagaagctgcggcgttcattcagaaatactttcaaagctatcccaaagttaaagcatggatcgagaagactctcgaagaaggccgcacacgtggttacgtagagaccttatttggacgtcgccgctatgttcccgatttaaacgctcgcgtgaaatctgtccgtgaagccgccgaacgcatggcgttcaacatgcctgtacagggcacggcagctgacctcatgaaacttgcaatggtgcgcctttttccacaattgcgtgaagttggtgcccgcatgctcttgcaggtccacgatgaactcttgttagaagcgccaaaagagcgtgcggaagaggtggcagccctcgcgaaagaggttatggaaggcgtgtggcccttagcggtgcctcttgaagtcgaagttggtattggcgaggattggctggctgccaaaggataatga

SEQ ID NO: 2570 - protein, 841 aa, synthetic construct
  REGION 1..841: note = Variant of DNA polymerase I from Thermus sp. strain 2.9
MHHHHHHGGSGVLPVFEPKGRVLLVDGHHLAYRNFFALKGLTTSRGEPVQGVYGFAKSLLKALKEDGDVVIVVFDAKAPSFRHEAYEAYKAGRAPTPEDFPRQLALMKELVDLLGLERLEVPGFEADDVLATLAKKAEREGYEVQILTADRDLFQLLSPRISVLHPEGHRITPEWLWEKYGLRPEQWVDFRALAGDPSDNIPGVKGIGEKTALKLLKEWGSLENLLKNLDQVKPESVREKILAHLEDLKLSRELSRVRTDLPLEVDFRRRREPDWEGLKAFLERLEFGSLLHEFGLLESPLPAEEAPWPPPEGAFLGYRLSRPEPMWAELLALAASAQGRVYRAEDPHGALRGLFEVRGLLAKDLAVVALREGLDLPPTDDPMLLAYLLDPSNTTPEGVARRYGGEWTEDAAKRALLAERLHANLLGRLQGEERLLWLYEEVEKPLSRVLAHMEATGVKLDVAYLEALSLEVAAEMRRLEEEVFRLAGHSFRLNSRDQLERVLFDELGLPPIGKTEKTGKRSTSAAVLEALREVHGIVDKILQYRELAKLKGTYIDPLPALVHPKTGRLHTRFNQTATATGRLSSSDPNLQNIPVRTPLGQKIRRAFVAEEGWRLVALDYSQIELRVLAHLSGDENLIRVFQEGKDIHTQTASWMFGLSAEAIDPLMRRAAKTINFGVLYGMSAFRLSQELGIPYEEAAAFIQKYFQSYPKVKAWIEKTLEEGRTRGYVETLFGRRRYVPDLNARVKSVREAAERMAFNMPVQGTAADLMKLAMVRLFPQLREVGARMLLQVHDELLLEAPKERAEEVAALAKEVMEGVWPLAVPLEVEVGIGEDWLAAKG

SEQ ID NO: 2571 - DNA, 2529 bp, synthetic construct
  misc_feature 1..2529: note = Variant of DNA polymerase I from Thermus sp. strain 2.9
  source 1..2529: mol_type = other DNA
atgcaccatcatcatcatcatggcggtagcggcgtgttaccggtgttcgagcctaaaggtcgcgtgcttctggttgatggccatcatctcgcgtatcgtaacttctttgccctgaaaggattaaccaccagccgtggcgagccggtacagggtgtctacggctttgcaaagtcgctcctgaaagctctgaaagaagacggtgatgtggtgattgttgtctttgatgcgaaagcgccaagttttcgccacgaagcgtacgaagcttacaaagccgggcgtgctccaacgccggaagactttcctcgccaattggcgcttatgaaggaattagtggatttgcttggcctcgaacgcttggaagttcccggtttcgaggcagacgacgtattagcgactctcgcaaagaaagccgaacgtgagggctatgaagtccagatcttgacagcagatcgcgatcttttccagcttttatctccgcgcatctcggtgttacacccggaagggcatcgtatcaccccggaatggctctgggagaaatatggtttgcgtcccgaacaatgggtggattttcgcgccttagcaggcgatccgagcgacaatattccgggagttaaaggtatcggcgagaagacggcgctcaagctccttaaagaatgggggtcgttggagaacttgcttaagaatttagatcaggtcaaaccagagtcagtgcgtgagaagattcttgcacacctcgaagacctcaaattaagccgcgaattgtcccgtgtacgcaccgatttgccgctcgaagttgatttccgtcgccgccgcgaacctgactgggagggtcttaaagcgtttttagagcgtcttgaatttggttcgctcttgcatgaattcggccttttagaaagcccgttaccagccgaagaagcaccttggccaccgcccgaaggcgcgtttttaggttaccgtttgagtcgcccggaaccgatgtgggccgaattattggctcttgcagcgtctgcccagggacgtgtgtatcgcgcggaagaccctcatggtgcgctccgcggcctcttcgaagtccgtggactccttgccaaagacttagctgttgttgcattgcgcgaaggtcttgatttacctccgactgatgatccaatgcttcttgcgtacctcttggacccgtcaaacacgacgcccgaaggcgtagcccgtcgttacggcggcgagtggaccgaagatgcagcgaaacgcgcgttattggccgaacgtttgcacgccaatttattaggacgtttgcaaggcgaggaacgtctcctctggctttacgaagaagtggagaaaccattgagtcgcgtgctcgcgcatatggaagctaccggtgtcaaattagacgtggcgtatttggaggctctcagccttgaagttgctgccgaaatgcgccgcttggaggaagaagtattccgtttagcaggccattcctttcgccttaattctcgcgatcagttagaacgtgtgttgttcgatgaacttggtctccctcctatcggcaagacagagaagaccggtaaacgtagcacttcagcggcggttttagaagctcttcgcgaagtccatcccattgtggacaagatcttgcagtaccgcgaactcgcgaaattgaaaggcacctatattgaccctcttccggcattagtccacccgaaaacgggacgcctccatacccgcttcaaccaaacagccacggcgaccggtcgtttgtcctcctctgatccaaaccttcagaatattccagtacgtaccccattgggccagaagatccgccgcgcgtttgtagctgaggagggttggcgtttagtggccctcgattatagccaaattgaattacgtgtccttgcccatctttctggcgatgagaacctcatccgcgtgtttcaggaaggcaaagacattcacactcaaacggcaagctggatgtttggattatcagctgaagcgatcgatcctttgatgcgtcgtgcagcgaagaccatcaatttcggtgttctctacggtatgagtgcctttcgtttgtcgcaggaattaggcattccctatgaagaagctgcggcgttcattcagaaatactttcaaagctatcccaaagttaaagcatggatcgagaagactctcgaagtgggccgcacacgtggttacgtagagaccttatttggacgtcgccgctatgttcccgatttaaacgctcgcgtgaaatctgtccgtgaagccgccgaacgcatggcgttcaacatgcctgtacagggcacggcagctgacctcatgaaacttgcaatggtgcgcctttttccacaattgcgtgaagttggtgcccgcatgctcttgcaggtccacgatgaactcttgttagaagcgccaaaagagcgtgcggaagaggtggcagccctcgcgaaagaggttatggaaggcgtgtggcccttagcggtgcctcttgaagtcgaagttggtattggcgaggattggctggctgccaaaggataatga

SEQ ID NO: 2572 - protein, 841 aa, synthetic construct
  REGION 1..841: note = Variant of DNA polymerase I from Thermus sp. strain 2.9
MHHHHHHGGSGVLPVFEPKGRVLLVDGHHLAYRNFFALKGLTTSRGEPVQGVYGFAKSLLKALKEDGDVVIVVFDAKAPSFRHEAYEAYKAGRAPTPEDFPRQLALMKELVDLLGLERLEVPGFEADDVLATLAKKAEREGYEVQILTADRDLFQLLSPRISVLHPEGHRITPEWLWEKYGLRPEQWVDFRALAGDPSDNIPGVKGIGEKTALKLLKEWGSLENLLKNLDQVKPESVREKILAHLEDLKLSRELSRVRTDLPLEVDFRRRREPDWEGLKAFLERLEFGSLLHEFGLLESPLPAEEAPWPPPEGAFLGYRLSRPEPMWAELLALAASAQGRVYRAEDPHGALRGLFEVRGLLAKDLAVVALREGLDLPPTDDPMLLAYLLDPSNTTPEGVARRYGGEWTEDAAKRALLAERLHANLLGRLQGEERLLWLYEEVEKPLSRVLAHMEATGVKLDVAYLEALSLEVAAEMRRLEEEVFRLAGHSFRLNSRDQLERVLFDELGLPPIGKTEKTGKRSTSAAVLEALREVHPIVDKILQYRELAKLKGTYIDPLPALVHPKTGRLHTRFNQTATATGRLSSSDPNLQNIPVRTPLGQKIRRAFVAEEGWRLVALDYSQIELRVLAHLSGDENLIRVFQEGKDIHTQTASWMFGLSAEAIDPLMRRAAKTINFGVLYGMSAFRLSQELGIPYEEAAAFIQKYFQSYPKVKAWIEKTLEVGRTRGYVETLFGRRRYVPDLNARVKSVREAAERMAFNMPVQGTAADLMKLAMVRLFPQLREVGARMLLQVHDELLLEAPKERAEEVAALAKEVMEGVWPLAVPLEVEVGIGEDWLAAKG

SEQ ID NO: 2573 - DNA, 2529 bp, synthetic construct
  misc_feature 1..2529: note = Variant of DNA polymerase I from Thermus sp. strain 2.9
  source 1..2529: mol_type = other DNA
atgcaccatcatcatcatcatggcggtagcggcgtgttaccggtgttcgagcctaaaggtcgcgtgcttctggttgatggccatcatctcgcgtatcgtaacttctttgccctgaaaggattaaccaccagccgtggcgagccggtacagggtgtctacggctttgcaaagtcgctcctgaaagctctgaaagaagacggtgatgtggtgattgttgtctttgatgcgaaagcgccaagttttcgccacgaagcgtacgaagcttacaaagccgggcgtgctccaacgccggaagactttcctcgccaattggcgcttatgaaggaattagtggatttgcttggcctcgaacgcttggaagttcccggtttcgaggcagacgacgtattagcgactctcgcaaagaaagccgaacgtgagggctatgaagtccagatcttgacagcagatcgcgatcttttccagcttttatctccgcgcatctcggtgttacacccggaagggcatcgtatcaccccggaatggctctgggagaaatatggtttgcgtcccgaacaatgggtggattttcgcgccttagcaggcgatccgagcgacaatattccgggagttaaaggtatcggcgagaagacggcgctcaagctccttaaagaatgggggtcgttggagaacttgcttaagaatttagatcaggtcaaaccagagtcagtgcgtgagaagattcttgcacacctcgaagacctcaaattaagccgcgaattgtcccgtgtacgcaccgatttgccgctcgaagttgatttccgtcgccgccgcgaacctgactgggagggtcttaaagcgtttttagagggtcttgaatttggttcgctcttgcatgaattcggccttttagaaagcccgttaccagccgaagaagcaccttggccaccgcccgaaggcgcgtttttaggttaccgtttgagtcgcccggaaccgatgtgggccgaattattggctcttgcagcgtctgcccagggacgtgtgtatcgcgcggaagaccctcatggtgcgctccgcggcctcttcgaagtccgtggactccttgccaaagacttagctgttgttgcattgcgcgaaggtcttgatttacctccgactgatgatccaatgcttcttgcgtacctcttggacccgtcaaacacgacgcccgaaggcgtagcccgtcgttacggcggcgagtggaccgaagatgcagcgaaacgcgcgttattggccgaacgtttgcacgccaatttattaggacgtttgcaaggcgaggaacgtctcctctggctttacgaagaagtggagaaaccattgagtcgcgtgctcgcgcatatggaagctaccggtgtcaaattagacgtggcgtatttggaggctctcagccttgaagttgctgccgaaatgcgccgcttggaggaagaagtattccgtttagcaggccattcctttcgccttaattctcgcgatcagttagaacgtgtgttgttcgatgaacttggtctccctcctatcggcaagacagagaagaccggtaaacgtagcacttcagcggcggttttagaagctcttcgcgaagtccatcccattgtggacaagatcttgcagtaccgcgaactcgcgaaattgaaaggcacctatattgaccctcttccggcattagtccacccgaaaacgggacgcctccatacccgcttcaaccaaacagccacggcgaccggtcgtttgtcctcctctgatccaaaccttcagaatattccagtacgtaccccattgggccagaagatccgccgcgcgtttgtagctgaggagggttggcgtttagtggccctcgattatagccaaattgaattacgtgtccttgcccatctttctggcgatgagaacctcatccgcgtgtttcaggaaggcaaagacattcacactcaaacggcaagctggatgtttggattatcagctgaagcgatcgatcctttgatgcgtcgtgcagcgaagaccatcaatttcggtgttctctacggtatgagtgcctttcgtttgtcgcaggaattaggcattccctatgaagaagctgcggcgttcattcagaaatactttcaaagctatcccaaagttaaagcatggatcgagaagactctcgaagaaggccgcacacgtggttacgtagagaccttatttggacgtcgccgctatgttcccgatttaaacgctcgcgtgaaatctgtccgtgaagccgccgaacgcatggcgttcaacatgcctgtacagggcacggcagctgacctcatgaaacttgcaatggtgcgcctttttccacaattgcgtgaagttggtgcccgcatgctcttgcaggtccacgatgaactcttgttagaagcgccaaaagagcgtgcggaagaggtggcagccctcgcgaaagaggttatggaaggcgtgtggcccttagcggtgcctcttgaagtcgaagttggtattggcgaggattggctggctgccaaaggataatga

SEQ ID NO: 2574 - protein, 841 aa, synthetic construct
  REGION 1..841: note = Variant of DNA polymerase I from Thermus sp. strain 2.9
MHHHHHHGGSGVLPVFEPKGRVLLVDGHHLAYRNFFALKGLTTSRGEPVQGVYGFAKSLLKALKEDGDVVIVVFDAKAPSFRHEAYEAYKAGRAPTPEDFPRQLALMKELVDLLGLERLEVPGFEADDVLATLAKKAEREGYEVQILTADRDLFQLLSPRISVLHPEGHRITPEWLWEKYGLRPEQWVDFRALAGDPSDNIPGVKGIGEKTALKLLKEWGSLENLLKNLDQVKPESVREKILAHLEDLKLSRELSRVRTDLPLEVDFRRRREPDWEGLKAFLEGLEFGSLLHEFGLLESPLPAEEAPWPPPEGAFLGYRLSRPEPMWAELLALAASAQGRVYRAEDPHGALRGLFEVRGLLAKDLAVVALREGLDLPPTDDPMLLAYLLDPSNTTPEGVARRYGGEWTEDAAKRALLAERLHANLLGRLQGEERLLWLYEEVEKPLSRVLAHMEATGVKLDVAYLEALSLEVAAEMRRLEEEVFRLAGHSFRLNSRDQLERVLFDELGLPPIGKTEKTGKRSTSAAVLEALREVHPIVDKILQYRELAKLKGTYIDPLPALVHPKTGRLHTRFNQTATATGRLSSSDPNLQNIPVRTPLGQKIRRAFVAEEGWRLVALDYSQIELRVLAHLSGDENLIRVFQEGKDIHTQTASWMFGLSAEAIDPLMRRAAKTINFGVLYGMSAFRLSQELGIPYEEAAAFIQKYFQSYPKVKAWIEKTLEEGRTRGYVETLFGRRRYVPDLNARVKSVREAAERMAFNMPVQGTAADLMKLAMVRLFPQLREVGARMLLQVHDELLLEAPKERAEEVAALAKEVMEGVWPLAVPLEVEVGIGEDWLAAKG

SEQ ID NO: 2575 - DNA, 2529 bp, synthetic construct
  misc_feature 1..2529: note = Variant of DNA polymerase I from Thermus sp. strain 2.9
  source 1..2529: mol_type = other DNA
atgcaccatcatcatcatcatggcggtagcggcgtgttaccggtgttcgagcctaaaggtcgcgtgcttctggttgatggccatcatctcgcgtatcgtaacttctttgccctgaaaggattaaccaccagcatgggcgagccggtacagggtgtctacggctttgcaaagtcgctcctgaaagctctgaaagaagacggtgatgtggtgattgttgtctttgatgcgaaagcgccaagttttcgccacgaagcgtacgaagcttacaaagccgggcgtgctccaacgccggaagactttcctcgccaattggcgcttatgaaggaattagtggatttgcttggcctcgaacgcttggaagttcccggtttcgaggcagacgacgtattagcgactctcgcaaagaaagccgaacgtgagggctatgaagtccagatcttgacagcagatcgcgatcttttccagcttttatctccgcgcatctcggtgttacacccggaagggcatcgtatcaccccggaatggctctgggagaaatatggtttgcgtcccgaacaatgggtggattttcgcgccttagcaggcgatccgagcgacaatattccgggagttaaaggtatcggcgagaagacggcgctcaagctccttaaagaatgggggtcgttggagaacttgcttaagaatttagatcaggtcaaaccagagtcagtgcgtgagaagattcttgcacacctcgaagacctcaaattaagccgcgaattgtcccgtgtacgcaccgatttgccgctcgaagttgatttccgtcgccgccgcgaacctgactgggagggtcttaaagcgtttttagagcgtcttgaatttggttcgctcttgcatgaattcggccttttagaaagcccgttaccagccgaagaagcaccttggccaccgcccgaaggcgcgtttttaggttaccgtttgagtcgcccggaaccgatgtgggccgaattattggctcttgcagcgtctgcccagggacgtgtgtatcgcgcggaagaccctcatggtgcgctccgcggcctcttcgaagtccgtggactccttgccaaagacttagctgttgttgcattgcgcgaaggtcttgatttacctccgactgatgatccaatgcttcttgcgtacctcttggacccgtcaaacacgacgcccgaaggcgtagcccgtcgttacggcggcgagtggaccgaagatgcagcgaaacgcgcgttattggccgaacgtttgcacgccaatttattaggacgtttgcaaggcgaggaacgtctcctctggctttacgaagaagtggagaaaccattgagtcgcgtgctcgcgcatatggaagctaccggtgtcaaattagacgtggcgtatttggaggctctcagccttgaagttgctgccgaaatgcgccgcttggaggaagaagtattccgtttagcaggccattcctttcgccttaattctcgcgatcagttagaacgtgtgttgttcgatgaacttggtctccctcctatcggcaagacagagaagaccggtaaacgtagcacttcagcggcggttttagaagctcttcgcgaagtccatcccattgtggacaagatcttgcagtaccgcgaactcgcgaaattgaaaggcacctatattgaccctcttccggcattagtccacccgaaaacgggacgcctccatacccgcttcaaccaaacagccacggcgaccggtcgtttgtcctcctctgatccaaaccttcagaatattccagtacgtaccccattgggccagaagatccgccgcgcgtttgtagctgaggagggttggcgtttagtggccctcgattatagccaaattgaattacgtgtccttgcccatctttctggcgatgagaacctcatccgcgtgtttcaggaaggcaaagacattcacactcaaacggcaagctggatgtttggattatcagctgaagcgatcgatcctttgatgcgtcgtgcagcgaagaccatcaatttcggtgttctctacggtatgagtgcctttcgtttgtcgcaggaattaggcattccctatgaagaagctgcggcgttcattcagaaatactttcaaagctatcccaaagttaaagcatggatcgagaagactctcgaagaaggccgcacacgtggttacgtagagaccttatttggacgtcgccgctatgttcccgatttaaacgctcgcgtgaaatctgtccgtgaagccgccgaacgcatggcgttcaacatgcctgtacagggcacggcagctgacctcatgaaacttgcaatggtgcgcctttttccacaattgcgtgaagttggtgcccgcatgctcttgcaggtccacgatgaactcttgttagaagcgccaaaagagcgtgcggaagaggtggcagccctcgcgaaagaggttatggaaggcgtgtggcccttagcggtgcctcttgaagtcgaagttggtattggcgaggattggctggctgccaaaggataatga

SEQ ID NO: 2576 - protein, 841 aa, synthetic construct
  REGION 1..841: note = Variant of DNA polymerase I from Thermus sp. strain 2.9
MHHHHHHGGSGVLPVFEPKGRVLLVDGHHLAYRNFFALKGLTTSMGEPVQGVYGFAKSLLKALKEDGDVVIVVFDAKAPSFRHEAYEAYKAGRAPTPEDFPRQLALMKELVDLLGLERLEVPGFEADDVLATLAKKAEREGYEVQILTADRDLFQLLSPRISVLHPEGHRITPEWLWEKYGLRPEQWVDFRALAGDPSDNIPGVKGIGEKTALKLLKEWGSLENLLKNLDQVKPESVREKILAHLEDLKLSRELSRVRTDLPLEVDFRRRREPDWEGLKAFLERLEFGSLLHEFGLLESPLPAEEAPWPPPEGAFLGYRLSRPEPMWAELLALAASAQGRVYRAEDPHGALRGLFEVRGLLAKDLAVVALREGLDLPPTDDPMLLAYLLDPSNTTPEGVARRYGGEWTEDAAKRALLAERLHANLLGRLQGEERLLWLYEEVEKPLSRVLAHMEATGVKLDVAYLEALSLEVAAEMRRLEEEVFRLAGHSFRLNSRDQLERVLFDELGLPPIGKTEKTGKRSTSAAVLEALREVHPIVDKILQYRELAKLKGTYIDPLPALVHPKTGRLHTRFNQTATATGRLSSSDPNLQNIPVRTPLGQKIRRAFVAEEGWRLVALDYSQIELRVLAHLSGDENLIRVFQEGKDIHTQTASWMFGLSAEAIDPLMRRAAKTINFGVLYGMSAFRLSQELGIPYEEAAAFIQKYFQSYPKVKAWIEKTLEEGRTRGYVETLFGRRRYVPDLNARVKSVREAAERMAFNMPVQGTAADLMKLAMVRLFPQLREVGARMLLQVHDELLLEAPKERAEEVAALAKEVMEGVWPLAVPLEVEVGIGEDWLAAKG

SEQ ID NO: 2577 - DNA, 2529 bp, synthetic construct
  misc_feature 1..2529: note = Variant of DNA polymerase I from Thermus sp. strain 2.9
  source 1..2529: mol_type = other DNA
atgcaccatcatcatcatcatggcggtagcggcgtgttaccggtgttcgagcctaaaggtcgcgtgcttctggttgatggccatcatctcgcgtatcgtaacttctttgccctgaaaggattaaccaccagccgtggcgagccggtacagggtgtctacggctttgcaaagtcgctcctgaaagctctgaaagaagacggtgatgtggtgattgttgtctttgatgcgaaagcgccaagttttcgccacgaagcgtacgaagcttacaaagccgggcgtgctccaacgccggaagactttcctcgccaattggcgcttatgaaggaattagtggatttgcttggcctcgaacgcttggaagttcccggtttcgaggcagacgacgtattagcgactctcgcaaagaaagccgaacgtgagggctatgaagtccagatcttgacagcagatcgcgatcttttccagcttttatctccgcgcatctcggtgttacacccggaagggcatcgtatcaccccggaatggctctgggagaaatatggtttgcgtcccgaacaatgggtggattttcgcgccttagcaggcgatccgagcgacaatattccgggagttaaaggtatcggcgagaagacggcgctcaagctccttaaagaatgggggtcgttggagaacttgcttaagaatttagatcaggtcaaaccagagtcagtgcgtgagaagattcttgcacacctcgaagacctcaaattaagccgcgaattgtcccgtgtacgcaccgatttgccgctcgaagttgatttccgtcgccgccgcgaacctgactgggagggtcttaaagcgtttttagagcgtcttgaatttggttcgctcttgcatgaattcggccttttagaaagcccgttaccagccgaagaagcaccttggccaccgcccgaaggcgcgtttttaggttaccgtttgagtcgcccggaaccgatgtgggccgaattattggctcttgcagcgtctgcccagggacgtgtgtatcgcgcggaagaccctcatggtgcgctccgcggcctcttcgaagtccgtggactccttgccaaagacttagctgttgttgcattgcgcgaaggtcttgatttacctccgactgatgatccaatgcttcttgcgtacctcttggacccgtcaaacacgacgcccgaaggcgtagcccgtcgttacggcggcgagtggaccgaagatgcagcgaaacgcgcgttattggccgaacgtttgcacgccaatttattaggacgtttgcaaggcgaggaacgtctcctctggctttacgaagaagtggagaaaccattgagtcgcgtgctcgcgcatatggaagctaccggtgtcaaattagacgtggcgtatttggaggctctcagccttgaagttgctgccgaaatgcgccgcttggaggaagaagtattccgtttagcaggccattcctttcgccttaggtctcgcgatcagttagaacgtgtgttgttcgatgaacttggtctccctcctatcggcaagacagagaagaccggtaaacgtagcacttcagcggcggttttagaagctcttcgcgaagtccatcccattgtggacaagatcttgcagtaccgcgaactcgcgaaattgaaaggcacctatattgaccctcttccggcattagtccacccgaaaacgggacgcctccatacccgcttcaaccaaacagccacggcgaccggtcgtttgtcctcctctgatccaaaccttcagaatattccagtacgtaccccattgggccagaagatccgccgcgcgtttgtagctgaggagggttggcgtttagtggccctcgattatagccaaattgaattacgtgtccttgcccatctttctggcgatgagaacctcatccgcgtgtttcaggaaggcaaagacattcacactcaaacggcaagctggatgtttggattatcagctgaagcgatcgatcctttgatgcgtcgtgcagcgaagaccatcaatttcggtgttctctacggtatgagtgcctttcgtttgtcgcaggaattaggcattccctatgaagaagctgcggcgttcattcagaaatactttcaaagctatcccaaagttaaagcatggatcgagaagactctcgaagaaggccgcacacgtggttacgtagagaccttatttggacgtcgccgctatgttcccgatttaaacgctcgcgtgaaatctgtccgtgaagccgccgaacgcatggcgttcaacatgcctgtacagggcacggcagctgacctcatgaaacttgcaatggtgcgcctttttccacaattgcgtgaagttggtgcccgcatgctcttgcaggtccacgatgaactcttgttagaagcgccaaaagagcgtgcggaagaggtggcagccctcgcgaaagaggttatggaaggcgtgtggcccttagcggtgcctcttgaagtcgaagttggtattggcgaggattggctggctgccaaaggataatga

SEQ ID NO: 2578 - protein, 841 aa, synthetic construct
  REGION 1..841: note = Variant of DNA polymerase I from Thermus sp. strain 2.9
MHHHHHHGGSGVLPVFEPKGRVLLVDGHHLAYRNFFALKGLTTSRGEPVQGVYGFAKSLLKALKEDGDVVIVVFDAKAPSFRHEAYEAYKAGRAPTPEDFPRQLALMKELVDLLGLERLEVPGFEADDVLATLAKKAEREGYEVQILTADRDLFQLLSPRISVLHPEGHRITPEWLWEKYGLRPEQWVDFRALAGDPSDNIPGVKGIGEKTALKLLKEWGSLENLLKNLDQVKPESVREKILAHLEDLKLSRELSRVRTDLPLEVDFRRRREPDWEGLKAFLERLEFGSLLHEFGLLESPLPAEEAPWPPPEGAFLGYRLSRPEPMWAELLALAASAQGRVYRAEDPHGALRGLFEVRGLLAKDLAVVALREGLDLPPTDDPMLLAYLLDPSNTTPEGVARRYGGEWTEDAAKRALLAERLHANLLGRLQGEERLLWLYEEVEKPLSRVLAHMEATGVKLDVAYLEALSLEVAAEMRRLEEEVFRLAGHSFRLRSRDQLERVLFDELGLPPIGKTEKTGKRSTSAAVLEALREVHPIVDKILQYRELAKLKGTYIDPLPALVHPKTGRLHTRFNQTATATGRLSSSDPNLQNIPVRTPLGQKIRRAFVAEEGWRLVALDYSQIELRVLAHLSGDENLIRVFQEGKDIHTQTASWMFGLSAEAIDPLMRRAAKTINFGVLYGMSAFRLSQELGIPYEEAAAFIQKYFQSYPKVKAWIEKTLEEGRTRGYVETLFGRRRYVPDLNARVKSVREAAERMAFNMPVQGTAADLMKLAMVRLFPQLREVGARMLLQVHDELLLEAPKERAEEVAALAKEVMEGVWPLAVPLEVEVGIGEDWLAAKG

SEQ ID NO: 2579 - DNA, 2529 bp, synthetic construct
  misc_feature 1..2529: note = Variant of DNA polymerase I from Thermus sp. strain 2.9
  source 1..2529: mol_type = other DNA
atgcaccatcatcatcatcatggcggtagcggcgtgttaccggtgttcgagcctaaaggtcgcgtgcttctggttgatggccatcatctcgcgtatcgtaacttctttgccctgaaaggattaaccaccagccgtggcgagccggtacagggtgtctacggctttgcaaagtcgctcctgaaagctctgaaagaagacggtgatgtggtgattgttgtctttgatgcgaaagcgccaagttttcgccacgaagcgtacgaagcttacaaagccgggcgtgctccaacgccggaagactttcctcgccaattggcgcttatgaaggaattagtggatttgcttggcctcgaacgcttggaagttcccggtttcgaggcagacgacgtattagcgactctcgcaaagaaagccgaacgtgagggctatgaagtccagatcttgacagcagatcgcgatcttttccagcttttatctccgcgcatctcggtgttacacccggaagggcatcgtatcaccccggaatggctctgggagaaatatggtttgcgtcccgaacaatgggtggattttcgcgccttagcaggcgatccgagcgacaatattccgggagttaaaggtatcggcgagaagacggcgctcaagctccttaaagaatgggggtcgttggagaacttgcttaagaatttagatcaggtcaaaccagagtcagtgcgtgagaagattcttgcacacctcgaagacctcaaattaagccgcgaattgtcccgtgtacgcaccgatttgccgctcgaagttgatttccgtcgccgccgcgaacctgactgggagggtcttaaagcgtttttagagcgtcttgaatttggttcgctcttgcatgaattcggccttttagaaagcccgttaccagccgaagaagcaccttggccaccgcccgaaggcgcgtttttaggttaccgtttgagtcgcccggaaccgatgtgggccgaattattggctcttgcagcgtctgcccagggacgtgtgtatcgcgcggaagaccctcatggtgcgctccgcggcctcttcgaagtccgtggactccttgccaaagacttagctgttgttgcattgcgcgaaggtcttgatttacctccgactgatgatccaatgcttcttgcgtacctcttggacccgtcaaacacgacgcccgaaggcgtagcccgtcgttacggcggcgagtggaccgaagatgcagcgaaacgcgcgttattggccgaacgtttgcacgccaatttattaggacgtttgcaaggcgaggaacgtctcctctggctttacgaagaagtggagaaaccattgagtcgcgtgctcgcgcatatggaagctaccggtgtcaaattagacgtggcgtatttggaggctctcagccttgaagttgctgccgaaatgcgccgcttggaggaagaagtattccgtttagcaggccattcctttcgccttaattctcgcgatcagttagaacgtgtgttgttcgatgaacttggtctccctcctatcggcaagacagagaagaccggtaaacgtagcacttcagcggcggttttagaagctcttcgcgaagtccatcccattgtggacaagatcttgcagtaccgcgaactcgcgaaattgaaaggcacctatattgaccctcttccggcattagtccacccgaaaacgggacgcctccatacccgcttcaaccaaacagccacggcgaccggtcgtttgtcctcctctgatccaaaccttcagaatattccagtacgtaccccattgggccagaagatccgccgcgcgtttgtagctgaggagggttggcgtttagtggccctcgattatagccaaattgaattacgtgtccttgcccatctttctggcgatgagaacctcatccgcgtgtttcaggaaggcaaagacattcacactcaaacggcaagctggatgtttggattatcagctgaagcgatcgatcctttgatgcgtcgtgcagcgaagaccatcaatttcggtgttctctacggtatgagtgcctttcgtttgtcgcaggaattaggcattccctatgaagaagctgcggcgttcattcagaaatactttcaaagctatcccaaagttaaagcatggatcgagaagactctcgaagaaggccgcacacgtggttacgtagagaccttatttggacgtcgccgctatgttcccgatttaaacgctcgcgtgaaatctactcgtgaagccgccgaacgcatggcgttcaacatgcctgtacagggcacggcagctgacctcatgaaacttgcaatggtgcgcctttttccacaattgcgtgaagttggtgcccgcatgctcttgcaggtccacgatgaactcttgttagaagcgccaaaagagcgtgcggaagaggtggcagccctcgcgaaagaggttatggaaggcgtgtggcccttagcggtgcctcttgaagtcgaagttggtattggcgaggattggctggctgccaaaggataatga

SEQ ID NO: 2580 - protein, 841 aa, synthetic construct
  REGION 1..841: note = Variant of DNA polymerase I from Thermus sp. strain 2.9
MHHHHHHGGSGVLPVFEPKGRVLLVDGHHLAYRNFFALKGLTTSRGEPVQGVYGFAKSLLKALKEDGDVVIVVFDAKAPSFRHEAYEAYKAGRAPTPEDFPRQLALMKELVDLLGLERLEVPGFEADDVLATLAKKAEREGYEVQILTADRDLFQLLSPRISVLHPEGHRITPEWLWEKYGLRPEQWVDFRALAGDPSDNIPGVKGIGEKTALKLLKEWGSLENLLKNLDQVKPESVREKILAHLEDLKLSRELSRVRTDLPLEVDFRRRREPDWEGLKAFLERLEFGSLLHEFGLLESPLPAEEAPWPPPEGAFLGYRLSRPEPMWAELLALAASAQGRVYRAEDPHGALRGLFEVRGLLAKDLAVVALREGLDLPPTDDPMLLAYLLDPSNTTPEGVARRYGGEWTEDAAKRALLAERLHANLLGRLQGEERLLWLYEEVEKPLSRVLAHMEATGVKLDVAYLEALSLEVAAEMRRLEEEVFRLAGHSFRLNSRDQLERVLFDELGLPPIGKTEKTGKRSTSAAVLEALREVHPIVDKILQYRELAKLKGTYIDPLPALVHPKTGRLHTRFNQTATATGRLSSSDPNLQNIPVRTPLGQKIRRAFVAEEGWRLVALDYSQIELRVLAHLSGDENLIRVFQEGKDIHTQTASWMFGLSAEAIDPLMRRAAKTINFGVLYGMSAFRLSQELGIPYEEAAAFIQKYFQSYPKVKAWIEKTLEEGRTRGYVETLFGRRRYVPDLNARVKSTREAAERMAFNMPVQGTAADLMKLAMVRLFPQLREVGARMLLQVHDELLLEAPKERAEEVAALAKEVMEGVWPLAVPLEVEVGIGEDWLAAKG

SEQ ID NO: 2581 - DNA, 2529 bp, synthetic construct
  misc_feature 1..2529: note = Variant of DNA polymerase I from Thermus sp. strain 2.9
  source 1..2529: mol_type = other DNA
atgcaccatcatcatcatcatggcggtagcggcgtgttaccggtgttcgagcctaaaggtcgcgtgcttctggttgatggccatcatctcgcgtatcgtaacttctttgccctgaaaggattaaccaccagccgtggcgagccggtacagggtgtctacggctttgcaaagtcgctcctgaaagctctgaaagaagacggtgatgtggtgattgttgtctttgatgcgaaagcgccaagttttcgccacgaagcgtacgaagcttacaaagccgggcgtgctccaacgccggaagactttcctcgccaattggcgcttatgaaggaattagtggatttgcttggcctcgaacgcttggaagttcccggtttcgaggcagacgacgtattagcgactctcgcaaagaaagccgaacgtgagggctatgaagtccagatcttgacagcagatcgcgatcttttccagcttttatctccgcgcatctcggtgttacacccggaagggcatcgtatcaccccggaatggctctgggagaaatatggtttgcgtcccgaacaatgggtggattttcgcgccttagcaggcgatccgagcgacaatattccgggagttaaaggtatcggcgagaagacggcgctcaagctccttaaagaatgggggtcgttggagaacttgcttaagaatttagatcaggtcaaaccagagtcagtgcgtgagaagattcttgcacacctcgaagacctcaaattaagccgcgaattgtcccgtgtacgcaccgatttgccgctcgaagttgatttccgtcgccgccgcgaacctgactgggagggtcttaaagcgtttttagagcgtcttgaatttggttcgctcttgcatgaattcggccttttagaaagcccgttaccagccgaagaagcaccttggccaccgcccgaaggcgcgtttttaggttaccgtttgagtcgcccggaaccgatgtgggccgaattactggctcttgcagcgtctgcccagggacgtgtgtatcgcgcggaagaccctcatggtgcgctccgcggcctcttcgaagtccgtggactccttgccaaagacttagctgttgttgcattgcgcgaaggtcttgatttacctccgactgatgatccaatgcttcttgcgtacctcttggacccgtcaaacacgacgcccgaaggcgtagcccgtcgttacggcggcgagtggaccgaagatgcagcgaaacgcgcgttattggccgaacgtttgcacgccaatttattaggacgtttgcaaggcgaggaacgtctcctctggctttacgaagaagtggagaaaccattgagtcgcgtgctcgcgcatatggaagctaccggtgtcaaattagacgtggcgtatttggaggctctcagccttgaagttgctgccgaaatgcgccgcttggaggaagaagtattccgtttagcaggccgctcctttcgccttaattctcgcgatcagttagaacgtgtgttgttcgatgaacttggtctccctcctatcggcaagacagagaagaccggtaaacgtagcacttcagcggcggttttagaagctcttcgcgaagtccatcccattgtggacaagatcttgcagtaccgcgaactcgcgaaattgaaaggcacctatattgaccctcttccggcattagtccacccgaaaacgggacgcctccatacccgcttcaaccaaacagccacggcgaccggtcgtttgtcctcctctgatccaaaccttcagaatattccagtacgtaccccattgggccagaagatccgccgcgcgtttgtagctgaggagggttggcgtttagtggccctcgattatagccaaattgaattacgtgtccttgcccatctttctggcgatgagaacctcatccgcgtgtttcaggaaggcaaagacattcacactcaaacggcaagctggatgtttggagaatcagctgaagcgatcgatcctttgatgcgtcgtgcagcgaagaccatcaatttcggtgttctctacggtatgagtgcctttcgtttgtcgcaggaattaggcattccctatgaagaagctgcggcgttcattcagaaatactttcaaagctatcccaaagttaaagcatggatcgaaaagactctcgaagaaggccgcacacgtggttacgtagagaccttatttggacgtcgccgctatgttcccgatttaaacgctcgcgtgaaatctgtccgtgaagccgccgaacgcatggcgttcaacatgcctgtacagggcacggcagctgacctcatgaaacttgcaatggtgcgcctttttccacaattgcgtgaagttggtgcccgcatgctcttgcaggtccacgatgaactcttgttagaagcgccaaaagagcgtgcggaagaggtggcagccctcgcgaaagaggttatggaaggcgtgtggcccttagcggtgcctcttgaagtcgaagttggtattggcgaggattggctggctgccaaaggataatga

SEQ ID NO: 2582 - protein, 841 aa, synthetic construct
  REGION 1..841: note = Variant of DNA polymerase I from Thermus sp. strain 2.9
MHHHHHHGGSGVLPVFEPKGRVLLVDGHHLAYRNFFALKGLTTSRGEPVQGVYGFAKSLLKALKEDGDVVIVVFDAKAPSFRHEAYEAYKAGRAPTPEDFPRQLALMKELVDLLGLERLEVPGFEADDVLATLAKKAEREGYEVQILTADRDLFQLLSPRISVLHPEGHRITPEWLWEKYGLRPEQWVDFRALAGDPSDNIPGVKGIGEKTALKLLKEWGSLENLLKNLDQVKPESVREKILAHLEDLKLSRELSRVRTDLPLEVDFRRRREPDWEGLKAFLERLEFGSLLHEFGLLESPLPAEEAPWPPPEGAFLGYRLSRPEPMWAELLALAASAQGRVYRAEDPHGALRGLFEVRGLLAKDLAVVALREGLDLPPTDDPMLLAYLLDPSNTTPEGVARRYGGEWTEDAAKRALLAERLHANLLGRLQGEERLLWLYEEVEKPLSRVLAHMEATGVKLDVAYLEALSLEVAAEMRRLEEEVFRLAGRSFRLNSRDQLERVLFDELGLPPIGKTEKTGKRSTSAAVLEALREVHPIVDKILQYRELAKLKGTYIDPLPALVHPKTGRLHTRFNQTATATGRLSSSDPNLQNIPVRTPLGQKIRRAFVAEEGWRLVALDYSQIELRVLAHLSGDENLIRVFQEGKDIHTQTASWMFGESAEAIDPLMRRAAKTINFGVLYGMSAFRLSQELGIPYEEAAAFIQKYFQSYPKVKAWIEKTLEEGRTRGYVETLFGRRRYVPDLNARVKSVREAAERMAFNMPVQGTAADLMKLAMVRLFPQLREVGARMLLQVHDELLLEAPKERAEEVAALAKEVMEGVWPLAVPLEVEVGIGEDWLAAKG

SEQ ID NO: 2583 - DNA, 2529 bp, synthetic construct
  misc_feature 1..2529: note = Variant of DNA polymerase I from Thermus sp. strain 2.9
  source 1..2529: mol_type = other DNA
atgcaccatcatcatcatcatggcggtagcggcgtgttaccggtgttcgagcctaaaggtcgcgtgcttctggttgatggccatcatctcgcgtatcgtaacttctttgccctgaaaggattaaccaccagccgtggcgagccggtacagggtgtctacggctttgcaaagtcgctcctgaaagctctgaaagaagacggtgatgtggtgattgttgtctttgatgcgaaagcgccaagttttcgccacgaagcgtacgaagcttacaaagccgggcgtgctccaacgccggaagactttcctcgccaattggcgcttatgaaggaattagtggatttgcttggcctcgaacgcttggaagttcccggtttcgaggcagacgacgtattagcgactctcgcaaagaaagccgaacgtgagggctatgaagtccagatcttgacagcagatcgcgatcttttccagcttttatctccgcgcatctcggtgttacacccggaagggcatcgtatcaccccggaatggctctgggagaaatatggtttgcgtcccgaacaatgggtggattttcgcgccttagcaggcgatccgagcgacaatattccgggagttaaaggtatcggcgagaagacggcgctcaagctccttaaagaatgggggtcgttggagaacttgcttaagaatttagatcaggtcaaaccagagtcagtgcgtgagaagattcttgcacacctcgaagacctcaaattaagccgcgaattgtcccgtgtacgcaccgatttgccgctcgaagttgatttccgtcgccgccgcgaacctgactgggagggtcttaaagcgtttttagagcgtcttgaatttggttcgctcttgcatgaattcggccttttagaaagcccgttaccagccgaagaagcaccttggccaccgcccgaaggcgcgtttttaggttaccgtttgagtcgcccggaaccgatgtgggccgaattattggctcttgcagcgtctgcccagggactggtgtatcgcgcggaagaccctcatggtgcgctccgcggcctcttcgaagtccgtggactccttgccaaagacttagctgttgttgcattgcgcgaaggtcttgatttacctccgactgatgatccaatgcttcttgcgtacctcttggacccgtcaaacacgacgcccgaaggcgtagcccgtcgttacggcggcgagtggaccgaagatgcagcgaaacgcgcgttattggccgaacgtttgcacgccaatttattaggacgtttgcaaggcgaggaacgtctcctctggctttacgaagaagtggagaaaccattgagtcgcgtgctcgcgcatatggaagctaccggtgtcaaattagacgtggcgtatttggaggctctcagccttgaagttgctgccgaaatgcgccgcttggaggaagaagtattccgtttagcaggccattcctttcgccttaattctcgcgatcagttagaacgtgtgttgttcgatgaacttggtctccctcctatcggcaagacagagaagaccggtaaacgtagcacttcagcggcggttttagaagctcttcgcgaagtccatcccattgtggacaagatcttgcagtaccgcgaactcgcgaaattgaaaggcacctatattgaccctcttccggcattagtccacccgaaaacgggacgcctccatacccgcttcaaccaaacagccacggcgaccggtcgtttgtcctcctctgatccaaaccttcagaatattccagtacgtaccccattgggccagaagatccgccgcgcgtttgtagctgaggagggttggcgtttagtggccctcgattatagccaaattgaattacgtgtccttgcccatctttctggcgatgagaacctcatccgcgtgtttcaggaaggcaaagacattcacactcaaacggcaagctggatgtttggattatcagctgaagcgatcgatcctttgatgcgtcgtgcagcgaagaccatcaatttcggtgttctctacggtatgagtgcctttcgtttgtcgcaggaattaggcattccctatgaagaagctgcggcgttcattcagaaatactttcaaagctatcccaaagttaaagcatggatcgagaagactctcgaagaaggccgcacacgtggttacgtagagaccttatttggacgtcgccgctatgttcccgatttaaacgctcgcgtgaaatctgtccgtgaagccgccgaacgcatggcgttcaacatgcctgtacagggcacggcagctgacctcatgaaacttgcaatggtgcgcctttttccacaattgcgtgaagttggtgcccgcatgctcttgcaggtccacgatgaactcttgttagaagcgccaaaagagcgtgcggaagaggtggcagccctcgcgaaagaggttatggaaggcgtgtggcccttagcggtgcctcttgaagtcgaagttggtattggcgaggattggctggctgccaaaggataatga

SEQ ID NO: 2584 - protein, 841 aa, synthetic construct
  REGION 1..841: note = Variant of DNA polymerase I from Thermus sp. strain 2.9
MHHHHHHGGSGVLPVFEPKGRVLLVDGHHLAYRNFFALKGLTTSRGEPVQGVYGFAKSLLKALKEDGDVVIVVFDAKAPSFRHEAYEAYKAGRAPTPEDFPRQLALMKELVDLLGLERLEVPGFEADDVLATLAKKAEREGYEVQILTADRDLFQLLSPRISVLHPEGHRITPEWLWEKYGLRPEQWVDFRALAGDPSDNIPGVKGIGEKTALKLLKEWGSLENLLKNLDQVKPESVREKILAHLEDLKLSRELSRVRTDLPLEVDFRRRREPDWEGLKAFLERLEFGSLLHEFGLLESPLPAEEAPWPPPEGAFLGYRLSRPEPMWAELLALAASAQGLVYRAEDPHGALRGLFEVRGLLAKDLAVVALREGLDLPPTDDPMLLAYLLDPSNTTPEGVARRYGGEWTEDAAKRALLAERLHANLLGRLQGEERLLWLYEEVEKPLSRVLAHMEATGVKLDVAYLEALSLEVAAEMRRLEEEVFRLAGHSFRLNSRDQLERVLFDELGLPPIGKTEKTGKRSTSAAVLEALREVHPIVDKILQYRELAKLKGTYIDPLPALVHPKTGRLHTRFNQTATATGRLSSSDPNLQNIPVRTPLGQKIRRAFVAEEGWRLVALDYSQIELRVLAHLSGDENLIRVFQEGKDIHTQTASWMFGLSAEAIDPLMRRAAKTINFGVLYGMSAFRLSQELGIPYEEAAAFIQKYFQSYPKVKAWIEKTLEEGRTRGYVETLFGRRRYVPDLNARVKSVREAAERMAFNMPVQGTAADLMKLAMVRLFPQLREVGARMLLQVHDELLLEAPKERAEEVAALAKEVMEGVWPLAVPLEVEVGIGEDWLAAKG

SEQ ID NO: 2585 - DNA, 2529 bp, synthetic construct
  misc_feature 1..2529: note = Variant of DNA polymerase I from Thermus sp. strain 2.9
  source 1..2529: mol_type = other DNA
atgcaccatcatcatcatcatggcggtagcggcgtgttaccggtgttcgagcctaaaggtcgcgtgcttctggttgatggccatcatctcgcgtatcgtaacttctttgccctgaaaggattaaccaccagccgtggcgagccggtacagggtgtctacggctttgcaaagtcgctcctgggggctctgaaagaagacggtgatgtggtgattgttgtctttgatgcgaaagcgccaagttttcgccacgaagcgtacgaagcttacaaagccgggcgtgctccaacgccggaagactttcctcgccaattggcgcttatgaaggaattagtggatttgcttggcctcgaacgcttggaagttcccggtttcgaggcagacgacgtattagcgactctcgcaaagaaagccgaacgtgagggctatgaagtccagatcttgacagcagatcgcgatcttttccagcttttatctccgcgcatctcggtgttacacccggaagggcatcgtatcaccccggaatggctctgggagaaatatggtttgcgtcccgaacaatgggtggattttcgcgccttagcaggcgatccgagcgacaatattccgggagttaaaggtatcggcgagaagacggcgctcaagctccttaaagaatgggggtcgttggagaacttgcttaagaatttagatcaggtcaaaccagagtcagtgcgtgagaagattcttgcacacctcgaagacctcaaattaagccgcgaattgtcccgtgtacgcaccgatttgccgctcgaagttgatttccgtcgccgccgcgaacctgactgggagggtcttaaagcgtttttagagcgtcttgaatttggttcgctcttgcatgaattcggccttttagaaagcccgttaccagccgaagaagcaccttggccaccgcccgaaggcgcgtttttaggttaccgtttgagtcgcccggaaccgatgtgggccgaattattggctcttgcagcgtctgcccagggacgtgtgtatcgcgcggaagaccctcatggtgcgctccgcggcctcttcgaagtccgtggactccttgccaaagacttagctgttgttgcattgcgcgaaggtcttgatttacctccgactgatgatccaatgcttcttgcgtacctcttggacccgtcaaacacgacgcccgaaggcgtagcccgtcgttacggcggcgagtggaccgaagatgcagcgaaacgcgcgttattggccgaacgtttgcacgccaatttattaggacgtttgcaaggcgaggaacgtctcctctggctttacgaagaagtggagaaaccattgagtcgcgtgctcgcgcatatggaagctaccggtgtcaaattagacgtggcgtatttggaggctctcagccttgaagttgctgccgaaatgcgccgcttggaggaagaagtattccgtttagcaggccattcctttcgccttaattctcgcgatcagttagaacgtgtgttgttcgatgaacttggtctccctcctatcggcaagacagagaagaccggtaaacgtagcacttcagcggcggttttagaagctcttcgcgaagtccatcccattgtggacaagatcttgcagtaccgcgaactcgcgaaattgaaaggcacctatattgaccctcttccggcattagtccacccgaaaacgggacgcctccatacccgcttcaaccaaacagccacggcgaccggtcgtttgtcctcctctgatccaaaccttcagaatattccagtacgtaccccattgggccagaagatccgccgcgcgtttgtagctgaggagggttggcgtttagtggccctcgattatagccaaattgaattacgtgtccttgcccatctttctggcgatgagaacctcatccgcgtgtttcaggaaggcaaagacattcacactcaaacggcaagctggatgtttggattatcagctgaagcgatcgatcctttgatgcgtcgtgcagcgaagaccatcaatttcggtgttctctacggtatgagtgcctttcgtttgtcgcaggaattaggcattccctatgaagaagctgcggcgttcattcagaaatactttcaaagctatcccaaagttaaagcatggatcgagaagactctcgaagaaggccgcacacgtggttacgtagagaccttatttggacgtcgccgctatgttcccgatttaaacgctcgcgtgaaatctgtccgtgaagccgccgaacgcatggcgttcaacatgcctgtacagggcacggcagctgacctcatgaaacttgcaatggtgcgcctttttccacaattgcgtgaagttggtgcccgcatgctcttgcaggtccacgatgaactcttgttagaagcgccaaaagagcgtgcggaagaggtggcagccctcgcgaaagaggttatggaaggcgtgtggcccttagcggtgcctcttgaagtcgaagttggtattggcgaggattggctggctgccaaaggataatga

SEQ ID NO: 2586 - protein, 841 aa, synthetic construct
  REGION 1..841: note = Variant of DNA polymerase I from Thermus sp. strain 2.9
MHHHHHHGGSGVLPVFEPKGRVLLVDGHHLAYRNFFALKGLTTSRGEPVQGVYGFAKSLLGALKEDGDVVIVVFDAKAPSFRHEAYEAYKAGRAPTPEDFPRQLALMKELVDLLGLERLEVPGFEADDVLATLAKKAEREGYEVQILTADRDLFQLLSPRISVLHPEGHRITPEWLWEKYGLRPEQWVDFRALAGDPSDNIPGVKGIGEKTALKLLKEWGSLENLLKNLDQVKPESVREKILAHLEDLKLSRELSRVRTDLPLEVDFRRRREPDWEGLKAFLERLEFGSLLHEFGLLESPLPAEEAPWPPPEGAFLGYRLSRPEPMWAELLALAASAQGRVYRAEDPHGALRGLFEVRGLLAKDLAVVALREGLDLPPTDDPMLLAYLLDPSNTTPEGVARRYGGEWTEDAAKRALLAERLHANLLGRLQGEERLLWLYEEVEKPLSRVLAHMEATGVKLDVAYLEALSLEVAAEMRRLEEEVFRLAGHSFRLNSRDQLERVLFDELGLPPIGKTEKTGKRSTSAAVLEALREVHPIVDKILQYRELAKLKGTYIDPLPALVHPKTGRLHTRFNQTATATGRLSSSDPNLQNIPVRTPLGQKIRRAFVAEEGWRLVALDYSQIELRVLAHLSGDENLIRVFQEGKDIHTQTASWMFGLSAEAIDPLMRRAAKTINFGVLYGMSAFRLSQELGIPYEEAAAFIQKYFQSYPKVKAWIEKTLEEGRTRGYVETLFGRRRYVPDLNARVKSVREAAERMAFNMPVQGTAADLMKLAMVRLFPQLREVGARMLLQVHDELLLEAPKERAEEVAALAKEVMEGVWPLAVPLEVEVGIGEDWLAAKG

SEQ ID NO: 2587 - DNA, 2529 bp, synthetic construct
  misc_feature 1..2529: note = Variant of DNA polymerase I from Thermus sp. strain 2.9
  source 1..2529: mol_type = other DNA
atgcaccatcatcatcatcatggcggtagcggcgtgttaccggtgttcgagcctaaaggtcgcgtgcttctggttgatggccatcatctcgcgtatcgtaacttctttgccctgaaaggattaaccaccagccgtggcgagccggtacagggtgtctacggctttgcaaagtcgctcctgaaagctctgaaagaagacggtgatgtggtgattgttgtctttgatgcgaaagcgccaagttttcgccacgaagcgtacgaagcttacaaagccgggcgtgctccaacgccggaagactttcctcgccaattggcgcttatgaaggaattagtggatttgcttggcctcgaacgcttggaagttcccggtttcgaggcagacgacgtattagcgactctcgcaaagaaagccgaacgtgagggctatgaagtccagatcttgacagcagatcgcgatcttttccagcttttatctccgcgcatctcggtgttacacccggaagggcatcgtatcaccccggaatggctctgggagaaatatggtttgcgtcccgaacaatgggtggattttcgcgccttagcaggcgatccgagcgacaatattccgggagttaaaggtatcggcgagaagacggcgctcaagctccttaaagaatgggggtcgttggagaacttgcttaagaatttagatcaggtcaaaccagagtcagtgcgtgagaagattcttaatcacctcgaagacctcaaattaagccgcgaattgtcccgtgtacgcaccgatttgccgctcgaagttgatttccgtcgccgccgcgaacctgactgggagggtcttaaagcgtttttagagcgtcttgaatttggttcgctcttgcatgaattcggccttttagaaagcccgttaccagccgaagaagcaccttggccaccgcccgaaggcgcgtttttaggttaccgtttgagtcgcccggaaccgatgtgggccgaattattggctcttgcagcgtctgcccagggacgtgtgtatcgcgcggaagaccctcatggtgcgctccgcggcctcttcgaagtccgtggactccttgccaaagacttagctgttgttgcattgcgcgaaggtcttgatttacctccgactgatgatccaatgcttcttgcgtacctcttggacccgtcaaacacgacgcccgaaggcgtagcccgtcgttacggcggcgagtggaccgaagatgcagcgaaacgcgcgttattggccgaacgtttgcacgccaatttattaggacgtttgcaaggcgaggaacgtctcctctggctttacgaagaagtggagaaaccattgagtcgcgtgctcgcgcatatggaagctaccggtgtcaaattagacgtggcgtatttggaggctctcagccttgaagttgctgccgaaatgcgccgcttggaggaagaagtattccgtttagcaggccattcctttcgccttaattctcgcgatcagttagaacgtgtgttgttcgatgaacttggtctccctcctatcggcaagacagagaagaccggtaaacgtagcacttcagcggcggttttagaagctcttcgcgaagtccatcccattgtggacaagatcttgcagtaccgcgaactcgcgaaattgaaaggcacctatattgaccctcttccggcattagtccacccgaaaacgggacgcctccatacccgcttcaaccaaacagccacggcgaccggtcgtttgtcctcctctgatccaaaccttcagaatattccagtacgtaccccattgggccagaagatccgccgcgcgtttgtagctgaggagggttggcgtttagtggccctcgattatagccaaattgaattacgtgtccttgcccatctttctggcgatgagaacctcatccgcgtgtttcaggaaggcaaagacattcacactcaaacggcaagctggatgtttggattatcagctgaagcgatcgatcctttgatgcgtcgtgcagcgaagaccatcaatttcggtgttctctacggtatgagtgcctttcgtttgtcgcaggaattaggcattccctatgaagaagctgcggcgttcattcagaaatactttcaaagctatcccaaagttaaagcatggatcgagaagactctcgaagaaggccgcacacgtggttacgtagagaccttatttggacgtcgccgctatgttcccgatttaaacgctcgcgtgaaatctgtccgtgaagccgccgaacgcatggcgttcaacatgcctgtacagggcacggcagctgacctcatgaaacttgcaatggtgcgcctttttccacaattgcgtgaagttggtgcccgcatgctcttgcaggtccacgatgaactcttgttagaagcgccaaaagagcgtgcggaagaggtggcagccctcgcgaaagaggttatggaaggcgtgtggcccttagcggtgcctcttgaagtcgaagttggtattggcgaggattggctggctgccaaaggataatga

SEQ ID NO: 2588 - protein, 841 aa, synthetic construct
  REGION 1..841: note = Variant of DNA polymerase I from Thermus sp. strain 2.9
MHHHHHHGGSGVLPVFEPKGRVLLVDGHHLAYRNFFALKGLTTSRGEPVQGVYGFAKSLLKALKEDGDVVIVVFDAKAPSFRHEAYEAYKAGRAPTPEDFPRQLALMKELVDLLGLERLEVPGFEADDVLATLAKKAEREGYEVQILTADRDLFQLLSPRISVLHPEGHRITPEWLWEKYGLRPEQWVDFRALAGDPSDNIPGVKGIGEKTALKLLKEWGSLENLLKNLDQVKPESVREKILNHLEDLKLSRELSRVRTDLPLEVDFRRRREPDWEGLKAFLERLEFGSLLHEFGLLESPLPAEEAPWPPPEGAFLGYRLSRPEPMWAELLALAASAQGRVYRAEDPHGALRGLFEVRGLLAKDLAVVALREGLDLPPTDDPMLLAYLLDPSNTTPEGVARRYGGEWTEDAAKRALLAERLHANLLGRLQGEERLLWLYEEVEKPLSRVLAHMEATGVKLDVAYLEALSLEVAAEMRRLEEEVFRLAGHSFRLNSRDQLERVLFDELGLPPIGKTEKTGKRSTSAAVLEALREVHPIVDKILQYRELAKLKGTYIDPLPALVHPKTGRLHTRFNQTATATGRLSSSDPNLQNIPVRTPLGQKIRRAFVAEEGWRLVALDYSQIELRVLAHLSGDENLIRVFQEGKDIHTQTASWMFGLSAEAIDPLMRRAAKTINFGVLYGMSAFRLSQELGIPYEEAAAFIQKYFQSYPKVKAWIEKTLEEGRTRGYVETLFGRRRYVPDLNARVKSVREAAERMAFNMPVQGTAADLMKLAMVRLFPQLREVGARMLLQVHDELLLEAPKERAEEVAALAKEVMEGVWPLAVPLEVEVGIGEDWLAAKG

SEQ ID NO: 2589 - DNA, 2529 bp, synthetic construct
  misc_feature 1..2529: note = Variant of DNA polymerase I from Thermus sp. strain 2.9
  source 1..2529: mol_type = other DNA
atgcaccatcatcatcatcatggcggtagcggcgtgttaccggtgttcgagcctaaaggtcgcgtgcttctggttgatggccatcatctcgcgtatcgtaacttctttgccctgaaaggattaaccaccagccgtggcgagccggtacagggtgtctacggctttgcaaagtcgctcctgaaagctctgaaagaagacggtgatgtggtgattgttgtctttgatgcgaaagcgccaagttttcgccacgaagcgtacgaagcttacaaagccgggcgtgctccaacgccggaagactttcctcgccaattggcgcttatgaaggaattagtggatttgcttggcctcgaacgcttggaagttcccggtttcgaggcagacgacgtattagcgactctcgcaaagaaagccgaacgtgagggctatgaagtccagatcttgacagcagatcgcgatcttttccagcttttatctccgcgcatctcggtgttacacccggaagggcatcgtatcaccccggaatggctctgggagaaatatggtttgcgtcccgaacaatgggtggattttcgcgccttagcaggcgatccgagcgacaatattccgggagttaaaggtatcggcgagaagacggcgctcaagctccttaaagaatgggggtcgttggagaacttgcttaagaatttagatcaggtcaaaccagagtcagtgcgtgagaagattcttgcacacctcgaagacctcaaattaagccgcgaattgtcccgtgtacgcaccgatttgccgctcgaagttgatttccgtcgccgccgcgaacctgactgggagggtcttaaagcgtttttagagcgtcttgaatttggttcgctcttgcatgaattcggccttttagaaagcccgttaccagccgaagaagcaccttggccaccgcccgaaggcgcgtttttaggttaccgtttgagtcgcccggaaccgatgtgggccgaattattggctcttgcagcgtctgcccagggacgtgtgtatcgcgcggaagaccctcatggtgcgctccgcggcctcttcgaagtccgtggactccttgccaaagacttagctgttgttgcattgcgcgaaggtcttgatttacctccgactgatgatccaatgcttcttgcgtacctcttggacccgtcaaacacgacgcccgaaggcgtagcccgtcgttacggcggcgagtggaccgaagatgcagcgaaacgcgcgttattggccgaacgtttgcacgccaatttattaggacgtttgcaaggcgaggaacgtctcctctggctttacgaagaagtggagaaaccattgagtcgcgtgctcgcgcatatggaagctaccggtgtcaaattagacgtggcgtatttggaggctctcagccttgaagttgctgccgaaatgcgccgcttggaggaagaagtattccgtttagcaggccattcctttcgccttaattctcgcgatcagttagaacgtgtgttgttcgatgaacttggtctccctcctatcggcaagacagagaagaccggtaaacgtagcacttcagcggcggttttagaagctcttcgcgaagtccatcccattgtggacaagatcttgcagtaccgcgaactcgcgaaattgaaaggcacctatattgaccctcttccggcattagtccacccgaaaacgggacgcctccatacccgcttcaaccaaacagccacggcgaccggtcgtttgtcctcctctgatccaaaccttcagaatattccagtacgtaccccattgggccagaagatccgccgcgcgtttgtagctgaggagggttggcgtttagtggccctcgattatagccaaattgaattacgtgtccttgcccatctttctggcgatgagaacctcatccgcgtgtttcaggaaggcaaagacattcacactcaaacggcaagctggatgtttggattatcagctgaagcgatcgatcctttgatgcgtcgtgcagcgaagaccatcaatttcggtgttctctacggtatgagtgcctttcgtttgtcgcaggaattaggcattccctatgaagaagctgcggcgttcattcagaaatactttcaaagctatcccaaagttaaagcatggatcgagaagactctcgaagaaggccgcacacgtggttacgtagagaccttatttggacgtcgccgctatgttcccgatttaaacgctcgcgtgaaatctggtcgtgaagccgccgaacgcatggcgttcaacatgcctgtacagggcacggcagctgacctcatgaaacttgcaatggtgcgcctttttccacaattgcgtgaagttggtgcccgcatgctcttgcaggtccacgatgaactcttgttagaagcgccaaaagagcgtgcggaagaggtggcagccctcgcgaaagaggttatggaaggcgtgtggcccttagcggtgcctcttgaagtcgaagttggtattggcgaggattggctggctgccaaaggataatga

SEQ ID NO: 2590 - protein, 841 aa, synthetic construct
  REGION 1..841: note = Variant of DNA polymerase I from Thermus sp. strain 2.9
MHHHHHHGGSGVLPVFEPKGRVLLVDGHHLAYRNFFALKGLTTSRGEPVQGVYGFAKSLLKALKEDGDVVIVVFDAKAPSFRHEAYEAYKAGRAPTPEDFPRQLALMKELVDLLGLERLEVPGFEADDVLATLAKKAEREGYEVQILTADRDLFQLLSPRISVLHPEGHRITPEWLWEKYGLRPEQWVDFRALAGDPSDNIPGVKGIGEKTALKLLKEWGSLENLLKNLDQVKPESVREKILAHLEDLKLSRELSRVRTDLPLEVDFRRRREPDWEGLKAFLERLEFGSLLHEFGLLESPLPAEEAPWPPPEGAFLGYRLSRPEPMWAELLALAASAQGRVYRAEDPHGALRGLFEVRGLLAKDLAVVALREGLDLPPTDDPMLLAYLLDPSNTTPEGVARRYGGEWTEDAAKRALLAERLHANLLGRLQGEERLLWLYEEVEKPLSRVLAHMEATGVKLDVAYLEALSLEVAAEMRRLEEEVFRLAGHSFRLNSRDQLERVLFDELGLPPIGKTEKTGKRSTSAAVLEALREVHPIVDKILQYRELAKLKGTYIDPLPALVHPKTGRLHTRFNQTATATGRLSSSDPNLQNIPVRTPLGQKIRRAFVAEEGWRLVALDYSQIELRVLAHLSGDENLIRVFQEGKDIHTQTASWMFGLSAEAIDPLMRRAAKTINFGVLYGMSAFRLSQELGIPYEEAAAFIQKYFQSYPKVKAWIEKTLEEGRTRGYVETLFGRRRYVPDLNARVKSGREAAERMAFNMPVQGTAADLMKLAMVRLFPQLREVGARMLLQVHDELLLEAPKERAEEVAALAKEVMEGVWPLAVPLEVEVGIGEDWLAAKG

SEQ ID NO: 2591 - DNA, 2529 bp, synthetic construct
  misc_feature 1..2529: note = Variant of DNA polymerase I from Thermus sp. strain 2.9
  source 1..2529: mol_type = other DNA
atgcaccatcatcatcatcatggcggtagcggcgtgttaccggtgttcgagcctaaaggtcgcgtgcttctggttgatggccatcatctcgcgtatcgtaacttctttgccctgaaaggattaaccaccagccgtggcgagccggtacagggtgtctacggctttgcaaagtcgctcctgaaagctctgaaagaagacggtgatgtggtgattgttgtctttgatgcgaaagcgccaagttttcgccacgaagcgtacgaagcttacaaagccgggcgtgctccaacgccggaagactttcctcgccaattggcgcttatgaaggaattagtggatttgcttggcctcgaacgcttggaagttcccggtttcgaggcagacgacgtattagcgactctcgcaaagaaagccgaacgtgagggctatgaagtccagatcttgacagcagatcgcgatcttttccagcttttatctccgcgcatctcggtgttacacccggaagggcatcgtatcaccccggaatggctctgggagaaatatggtttgcgtcccgaacaatgggtggattttcgcgccttagcaggcgatccgagcgacaatattccgggagttaaaggtatcggcgagaagacggcgctcaagctccttaaagaatgggggtcgttggagaacttgcttaagaatttagatcaggtcaaaccagagtcagtgcgtgagaagattcttgcacacctcgaagacctcaaattaagccgcgaattgtcccgtgtacgcaccgatttgccgctcgaagttgatttccgtcgccgccgcgaacctgactgggagggtcttaaagcgtttttagagcgtcttgaatttggttcgctcttgcatgaattcggccttttagaaagcccgttaccagccgaagaagcaccttggccaccgcccgaaggcgcgtttttaggttaccgtttgagtcgcccggaaccgatgtgggccgaattattggctcttgcagcgtctgcccagggacgtgtgtatcgcgcggaagaccctcatggtgcgctccgcggcctcttcgaagtccgtggactccttgccaaagacttagctgttgttgcattgcgcgaaggtcttgatttacctccgactgatgatccaatgcttcttgcgtacctcttggacccgtcaaacacgacgcccgaaggcgtagcccgtcgttacggcggcgagtggaccgaagatgcagcgaaacgcgcgttattggccgaacgtttgcacgccaatttattaggacgtttgcaaggcgaggaacgtctcctctggctttacgaagaagtggagaaaccattgagtcgcgtgctcgcgcatatggaagctaccggtgtcaaattagacgtggcgtatttggaggctctcagccttgaagttgctgccgaaatgcgccgcttggaggaagaagtattccgtttagcaggccattcctttcgccttaattctcgcgatcagttagaacgtgtgttgttcgatgaacttggtctccctcctatcggcaagacagagaagaccggtaaacgtagcacttcagcggcggttttagaagctcttcgcgaagtccatcccattgtggacaagatcttgcagtaccgcgaactcgcgaaattgaaaggcacctatattgaccctcttccggcattagtccacccgaaaacgggacgcctccatacccgcttcaaccaaacagccacggcgaccggtcgtttgtcctcctctgatccaaaccttcagaatattccagtacgtaccccattgggccagaagatccgccgcgcgtttgtagctgaggagggttggcgtttagtggccctcgattatagccaaattgaattacgtgtccttgcccatctttctggcgatgagaacctcatccgcgtgtttcaggaaggcaaagacattcacactcaaacggcaagctggatgtttggattagcggctgaagcgatcgatcctttgatgcgtcgtgcagcgaagaccatcaatttcggtgttctctacggtatgagtgcctttcgtttgtcgcaggaattaggcattccctatgaagaagctgcggcgttcattcagaaatactttcaaagctatcccaaagttaaagcatggatcgagaagactctcgaagaaggccgcacacgtggttacgtagagaccttatttggacgtcgccgctatgttcccgatttaaacgctcgcgtgaaatctgtccgtgaagccgccgaacgcatggcgttcaacatgcctgtacagggcacggcagctgacctcatgaaacttgcaatggtgcgcctttttccacaattgcgtgaagttggtgcccgcatgctcttgcaggtccacgatgaactcttgttagaagcgccaaaagagcgtgcggaagaggtggcagccctcgcgaaagaggttatggaaggcgtgtggcccttagcggtgcctcttgaagtcgaagttggtattggcgaggattggctggctgccaaaggataatga

SEQ ID NO: 2592 - protein, 841 aa, synthetic construct
  REGION 1..841: note = Variant of DNA polymerase I from Thermus sp. strain 2.9
MHHHHHHGGSGVLPVFEPKGRVLLVDGHHLAYRNFFALKGLTTSRGEPVQGVYGFAKSLLKALKEDGDVVIVVFDAKAPSFRHEAYEAYKAGRAPTPEDFPRQLALMKELVDLLGLERLEVPGFEADDVLATLAKKAEREGYEVQILTADRDLFQLLSPRISVLHPEGHRITPEWLWEKYGLRPEQWVDFRALAGDPSDNIPGVKGIGEKTALKLLKEWGSLENLLKNLDQVKPESVREKILAHLEDLKLSRELSRVRTDLPLEVDFRRRREPDWEGLKAFLERLEFGSLLHEFGLLESPLPAEEAPWPPPEGAFLGYRLSRPEPMWAELLALAASAQGRVYRAEDPHGALRGLFEVRGLLAKDLAVVALREGLDLPPTDDPMLLAYLLDPSNTTPEGVARRYGGEWTEDAAKRALLAERLHANLLGRLQGEERLLWLYEEVEKPLSRVLAHMEATGVKLDVAYLEALSLEVAAEMRRLEEEVFRLAGHSFRLNSRDQLERVLFDELGLPPIGKTEKTGKRSTSAAVLEALREVHPIVDKILQYRELAKLKGTYIDPLPALVHPKTGRLHTRFNQTATATGRLSSSDPNLQNIPVRTPLGQKIRRAFVAEEGWRLVALDYSQIELRVLAHLSGDENLIRVFQEGKDIHTQTASWMFGLAAEAIDPLMRRAAKTINFGVLYGMSAFRLSQELGIPYEEAAAFIQKYFQSYPKVKAWIEKTLEEGRTRGYVETLFGRRRYVPDLNARVKSVREAAERMAFNMPVQGTAADLMKLAMVRLFPQLREVGARMLLQVHDELLLEAPKERAEEVAALAKEVMEGVWPLAVPLEVEVGIGEDWLAAKG

SEQ ID NO: 2593 - DNA, 2529 bp, synthetic construct
  misc_feature 1..2529: note = Variant of DNA polymerase I from Thermus sp. strain 2.9
  source 1..2529: mol_type = other DNA
atgcaccatcatcatcatcatggcggtagcggcgtgttaccggtgttcgagcctaaaggtcgcgtgcttctggttgatggccatcatctcgcgtatcgtaacttctttgccctgaaaggattaaccaccagccgtggcgagccggtacagggtgtctacggctttgcaaagtcgctcctgaaagctctgaaagaagacggtgatgtggtgattgttgtctttgatgcgaaagcgccaagttttcgccacgaagcgtacgaagcttacaaagccgggcgtgctccaacgccggaagactttcctcgccaattggcgcttatgaagcatttagtggatttgcttggcctcgaacgcttggaagttcccggtttcgaggcagacgacgtattagcgactctcgcaaagaaagccgaacgtgagggctatgaagtccagatcttgacagcagatcgcgatcttttccagcttttatctccgcgcatctcggtgttacacccggaagggcatcgtatcaccccggaatggctctgggagaaatatggtttgcgtcccgaacaatgggtggattttcgcgccttagcaggcgatccgagcgacaatattccgggagttaaaggtatcggcgagaagacggcgctcaagctccttaaagaatgggggtcgttggagaacttgcttaagaatttagatcaggtcaaaccagagtcagtgcgtgagaagattcttgcacacctcgaagacctcaaattaagccgcgaattgtcccgtgtacgcaccgatttgccgctcgaagttgatttccgtcgccgccgcgaacctgactgggagggtcttaaagcgtttttagagcgtcttgaatttggttcgctcttgcatgaattcggccttttagaaagcccgttaccagccgaagaagcaccttggccaccgcccgaaggcgcgtttttaggttaccgtttgagtcgcccggaaccgatgtgggccgaattattggctcttgcagcgtctgcccagggacgtgtgtatcgcgcggaagaccctcatggtgcgctccgcggcctcttcgaagtccgtggactccttgccaaagacttagctgttgttgcattgcgcgaaggtcttgatttacctccgactgatgatccaatgcttcttgcgtacctcttggacccgtcaaacacgacgcccgaaggcgtagcccgtcgttacggcggcgagtggaccgaagatgcagcgaaacgcgcgttattggccgaacgtttgcacgccaatttattaggacgtttgcaaggcgaggaacgtctcctctggctttacgaagaagtggagaaaccattgagtcgcgtgctcgcgcatatggaagctaccggtgtcaaattagacgtggcgtatttggaggctctcagccttgaagttgctgccgaaatgcgccgcttggaggaagaagtattccgtttagcaggccattcctttcgccttaattctcgcgatcagttagaacgtgtgttgttcgatgaacttggtctccctcctatcggcaagacagagaagaccggtaaacgtagcacttcagcggcggttttagaagctcttcgcgaagtccatcccattgtggacaagatcttgcagtaccgcgaactcgcgaaattgaaaggcacctatattgaccctcttccggcattagtccacccgaaaacgggacgcctccatacccgcttcaaccaaacagccacggcgaccggtcgtttgtcctcctctgatccaaaccttcagaatattccagtacgtaccccattgggccagaagatccgccgcgcgtttgtagctgaggagggttggcgtttagtggccctcgattatagccaaattgaattacgtgtccttgcccatctttctggcgatgagaacctcatccgcgtgtttcaggaaggcaaagacattcacactcaaacggcaagctggatgtttggattatcagctgaagcgatcgatcctttgatgcgtcgtgcagcgaagaccatcaatttcggtgttctctacggtatgagtgcctttcgtttgtcgcaggaattaggcattccctatgaagaagctgcggcgttcattcagaaatactttcaaagctatcccaaagttaaagcatggatcgagaagactctcgaagaaggccgcacacgtggttacgtagagaccttatttggacgtcgccgctatgttcccgatttaaacgctcgcgtgaaatctgtccgtgaagccgccgaacgcatggcgttcaacatgcctgtacagggcacggcagctgacctcatgaaacttgcaatggtgcgcctttttccacaattgcgtgaagttggtgcccgcatgctcttgcaggtccacgatgaactcttgttagaagcgccaaaagagcgtgcggaagaggtggcagccctcgcgaaagaggttatggaaggcgtgtggcccttagcggtgcctcttgaagtcgaagttggtattggcgaggattggctggctgccaaaggataatga

SEQ ID NO: 2594 - protein, 841 aa, synthetic construct
  REGION 1..841: note = Variant of DNA polymerase I from Thermus sp. strain 2.9
MHHHHHHGGSGVLPVFEPKGRVLLVDGHHLAYRNFFALKGLTTSRGEPVQGVYGFAKSLLKALKEDGDVVIVVFDAKAPSFRHEAYEAYKAGRAPTPEDFPRQLALMKHLVDLLGLERLEVPGFEADDVLATLAKKAEREGYEVQILTADRDLFQLLSPRISVLHPEGHRITPEWLWEKYGLRPEQWVDFRALAGDPSDNIPGVKGIGEKTALKLLKEWGSLENLLKNLDQVKPESVREKILAHLEDLKLSRELSRVRTDLPLEVDFRRRREPDWEGLKAFLERLEFGSLLHEFGLLESPLPAEEAPWPPPEGAFLGYRLSRPEPMWAELLALAASAQGRVYRAEDPHGALRGLFEVRGLLAKDLAVVALREGLDLPPTDDPMLLAYLLDPSNTTPEGVARRYGGEWTEDAAKRALLAERLHANLLGRLQGEERLLWLYEEVEKPLSRVLAHMEATGVKLDVAYLEALSLEVAAEMRRLEEEVFRLAGHSFRLNSRDQLERVLFDELGLPPIGKTEKTGKRSTSAAVLEALREVHPIVDKILQYRELAKLKGTYIDPLPALVHPKTGRLHTRFNQTATATGRLSSSDPNLQNIPVRTPLGQKIRRAFVAEEGWRLVALDYSQIELRVLAHLSGDENLIRVFQEGKDIHTQTASWMFGLSAEAIDPLMRRAAKTINFGVLYGMSAFRLSQELGIPYEEAAAFIQKYFQSYPKVKAWIEKTLEEGRTRGYVETLFGRRRYVPDLNARVKSVREAAERMAFNMPVQGTAADLMKLAMVRLFPQLREVGARMLLQVHDELLLEAPKERAEEVAALAKEVMEGVWPLAVPLEVEVGIGEDWLAAKG

SEQ ID NO: 2595 - DNA, 2529 bp, synthetic construct
  misc_feature 1..2529: note = Variant of DNA polymerase I from Thermus sp. strain 2.9
  source 1..2529: mol_type = other DNA
atgcaccatcatcatcatcatggcggtagcggcgtgttaccggtgttcgagcctaaaggtcgcgtgcttctggttgatggccatcatctcgcgtatcgtaacttctttgccctgaaaggattaaccaccagccgtggcgagccggtacagggtgtctacggctttgcaaagtcgctcctgaaagctctgaaagaagacggtgatgtggtgattgttgtctttgatgcgaaagcgccaagttttcgccacgaagcgtacgaagcttacaaagccgggcgtgctccaacgccggaagactttcctcgccaattggcgcttatgaaggaattagtggatttgcttggcctcgaacgcttggaagttcccggtttcgaggcagacgacgtattagcgactctcgcaaagaaagccgaacgtgagggctatgaagtccagatcttgacagcagatcgcgatcttttccagcttttatctccgcgcatctcggtgttacacccggaagggcatcgtatcaccccggaatggctctgggagaaatatggtttgcgtcccgaacaatgggtggattttcgcgccttagcaggcgatccgagcgacaatattccgggagttaaaggtatcggcgagaagacggcgctcaagctccttaaagaatgggggtcgttggagaacttgcttaagaatttagatcaggtcaaaccagagtcagtgcgtgagaagattcttgcacacctcgaagacctcaaattaagccgcgaattgtcccgtgtacgcaccgatttgccgctcgaagttgatttccgtcgccgccgcgaacctgactgggagggtcttaaagcgtttttagagcgtcttgaatttggttcgctcttgcatgaattcggccttttagaaagcccgttaccagccgaagaagcaccttggccaccgcccgaaggcgcgtttttaggttaccgtttgagtcgcccggaaccgatgtgggccgaattattggctcttgcagcgtctgcccagggacgtgtgtatcgcgcggaagaccctcatggtgcgctccgcggcctcttcgaagtccgtggactccttgccaaagacttagctgttgttgcattgcgcgaaggtcttgatttacctccgactgatgatccaatgcttcttgcgtacctcttggacccgtcaaacacgacgcccgaaggcgtagcccgtcgttacggcggcgagtggaccgaagatgcagcgaaacgcgcgttattggccgaacgtttgcacgccaatttattaggacgtttgcaaggcgaggaacgtctcctctggctttacgaagaagtggagaaaccattgagtcgcgtgctcgcgcatatggaagctaccggtgtcaaattagacgtggcgtatttggaggctctcagccttgaagttgctgccgaaatgcgccgcttggagagtgaagtattccgtttagcaggccattcctttcgccttaattctcgcgatcagttagaacgtgtgttgttcgatgaacttggtctccctcctatcggcaagacagagaagaccggtaaacgtagcacttcagcggcggttttagaagctcttcgcgaagtccatcccattgtggacaagatcttgcagtaccgcgaactcgcgaaattgaaaggcacctatattgaccctcttccggcattagtccacccgaaaacgggacgcctccatacccgcttcaaccaaacagccacggcgaccggtcgtttgtcctcctctgatccaaaccttcagaatattccagtacgtaccccattgggccagaagatccgccgcgcgtttgtagctgaggagggttggcgtttagtggccctcgattatagccaaattgaattacgtgtccttgcccatctttctggcgatgagaacctcatccgcgtgtttcaggaaggcaaagacattcacactcaaacggcaagctggatgtttggattatcagctgaagcgatcgatcctttgatgcgtcgtgcagcgaagaccatcaatttcggtgttctctacggtatgagtgcctttcgtttgtcgcaggaattaggcattccctatgaagaagctgcggcgttcattcagaaatactttcaaagctatcccaaagttaaagcatggatcgagaagactctcgaagaaggccgcacacgtggttacgtagagaccttatttggacgtcgccgctatgttcccgatttaaacgctcgcgtgaaatctgtccgtgaagccgccgaacgcatggcgttcaacatgcctgtacagggcacggcagctgacctcatgaaacttgcaatggtgcgcctttttccacaattgcgtgaagttggtgcccgcatgctcttgcaggtccacgatgaactcttgttagaagcgccaaaagagcgtgcggaagaggtggcagccctcgcgaaagaggttatggaaggcgtgtggcccttagcggtgcctcttgaagtcgaagttggtattggcgaggattggctggctgccaaaggataatga

SEQ ID NO: 2596 - protein, 841 aa, synthetic construct
  REGION 1..841: note = Variant of DNA polymerase I from Thermus sp. strain 2.9
MHHHHHHGGSGVLPVFEPKGRVLLVDGHHLAYRNFFALKGLTTSRGEPVQGVYGFAKSLLKALKEDGDVVIVVFDAKAPSFRHEAYEAYKAGRAPTPEDFPRQLALMKELVDLLGLERLEVPGFEADDVLATLAKKAEREGYEVQILTADRDLFQLLSPRISVLHPEGHRITPEWLWEKYGLRPEQWVDFRALAGDPSDNIPGVKGIGEKTALKLLKEWGSLENLLKNLDQVKPESVREKILAHLEDLKLSRELSRVRTDLPLEVDFRRRREPDWEGLKAFLERLEFGSLLHEFGLLESPLPAEEAPWPPPEGAFLGYRLSRPEPMWAELLALAASAQGRVYRAEDPHGALRGLFEVRGLLAKDLAVVALREGLDLPPTDDPMLLAYLLDPSNTTPEGVARRYGGEWTEDAAKRALLAERLHANLLGRLQGEERLLWLYEEVEKPLSRVLAHMEATGVKLDVAYLEALSLEVAAEMRRLESEVFRLAGHSFRLNSRDQLERVLFDELGLPPIGKTEKTGKRSTSAAVLEALREVHPIVDKILQYRELAKLKGTYIDPLPALVHPKTGRLHTRFNQTATATGRLSSSDPNLQNIPVRTPLGQKIRRAFVAEEGWRLVALDYSQIELRVLAHLSGDENLIRVFQEGKDIHTQTASWMFGLSAEAIDPLMRRAAKTINFGVLYGMSAFRLSQELGIPYEEAAAFIQKYFQSYPKVKAWIEKTLEEGRTRGYVETLFGRRRYVPDLNARVKSVREAAERMAFNMPVQGTAADLMKLAMVRLFPQLREVGARMLLQVHDELLLEAPKERAEEVAALAKEVMEGVWPLAVPLEVEVGIGEDWLAAKG

SEQ ID NO: 2597 - DNA, 2529 bp, synthetic construct
  misc_feature 1..2529: note = Variant of DNA polymerase I from Thermus sp. strain 2.9
  source 1..2529: mol_type = other DNA
atgcaccatcatcatcatcatggcggtagcggcgtgttaccggtgttcgagcctaaaggtcgcgtgcttctggttgatggccatcatctcgcgtatcgtaacttctttgccctgaaaggattaaccaccagccgtggcgagccggtacagggtgtctacggctttgcaaagtcgctcctgaaagctctgaaagaagacggtgatgtggtgattgttgtctttgatgcgaaagcgccaagttttcgccacgaagcgtacgaagcttacaaagccgggcgtgctccaacgccggaagactttcctcgccaattggcgcttatgaaggaattagtggatttgcttggcctcgaacgcttggaagttcccggtttcgaggcagacgacgtattagcgactctcgcaaagaaagccgaacgtgagggctatgaagtctttatcttgacagcagatcgcgatcttttccagcttttatctccgcgcatctcggtgttacacccggaagggcatcgtatcaccccggaatggctctgggagaaatatggtttgcgtcccgaacaatgggtggattttcgcgccttagcaggcgatccgagcgacaatattccgggagttaaaggtatcggcgagaagacggcgctcaagctccttaaagaatgggggtcgttggagaacttgcttaagaatttagatcaggtcaaaccagagtcagtgcgtgagaagattcttgcacacctcgaagacctcaaattaagccgcgaattgtcccgtgtacgcaccgatttgccgctcgaagttgatttccgtcgccgccgcgaacctgactgggagggtcttaaagcgtttttagagcgtcttgaatttggttcgctcttgcatgaattcggccttttagaaagcccgttaccagccgaagaagcaccttggccaccgcccgaaggcgcgtttttaggttaccgtttgagtcgcccggaaccgatgtgggccgaattattggctcttgcagcgtctgcccagggacgtgtgtatcgcgcggaagaccctcatggtgcgctccgcggcctcttcgaagtccgtggactccttgccaaagacttagctgttgttgcattgcgcgaaggtcttgatttacctccgactgatgatccaatgcttcttgcgtacctcttggacccgtcaaacacgacgcccgaaggcgtagcccgtcgttacggcggcgagtggaccgaagatgcagcgaaacgcgcgttattggccgaacgtttgcacgccaatttattaggacgtttgcaaggcgaggaacgtctcctctggctttacgaagaagtggagaaaccattgagtcgcgtgctcgcgcatatggaagctaccggtgtcaaattagacgtggcgtatttggaggctctcagccttgaagttgctgccgaaatgcgccgcttggaggaagaagtattccgtttagcaggccattcctttcgccttaattctcgcgatcagttagaacgtgtgttgttcgatgaacttggtctccctcctatcggcaagacagagaagaccggtaaacgtagcacttcagcggcggttttagaagctcttcgcgaagtccatcccattgtggacaagatcttgcagtaccgcgaactcgcgaaattgaaaggcacctatattgaccctcttccggcattagtccacccgaaaacgggacgcctccatacccgcttcaaccaaacagccacggcgaccggtcgtttgtcctcctctgatccaaaccttcagaatattccagtacgtaccccattgggccagaagatccgccgcgcgtttgtagctgaggagggttggcgtttagtggccctcgattatagccaaattgaattacgtgtccttgcccatctttctggcgatgagaacctcatccgcgtgtttcaggaaggcaaagacattcacactcaaacggcaagctggatgtttggattatcagctgaagcgatcgatcctttgatgcgtcgtgcagcgaagaccatcaatttcggtgttctctacggtatgagtgcctttcgtttgtcgcaggaattaggcattccctatgaagaagctgcggcgttcattcagaaatactttcaaagctatcccaaagttaaagcatggatcgagaagactctcgaagaaggccgcacacgtggttacgtagagaccttatttggacgtcgccgctatgttcccgatttaaacgctcgcgtgaaatctgtccgtgaagccgccgaacgcatggcgttcaacatgcctgtacagggcacggcagctgacctcatgaaacttgcaatggtgcgcctttttccacaattgcgtgaagttggtgcccgcatgctcttgcaggtccacgatgaactcttgttagaagcgccaaaagagcgtgcggaagaggtggcagccctcgcgaaagaggttatggaaggcgtgtggcccttagcggtgcctcttgaagtcgaagttggtattggcgaggattggctggctgccaaaggataatga

SEQ ID NO: 2598 - protein, 841 aa, synthetic construct
  REGION 1..841: note = Variant of DNA polymerase I from Thermus sp. strain 2.9
MHHHHHHGGSGVLPVFEPKGRVLLVDGHHLAYRNFFALKGLTTSRGEPVQGVYGFAKSLLKALKEDGDVVIVVFDAKAPSFRHEAYEAYKAGRAPTPEDFPRQLALMKELVDLLGLERLEVPGFEADDVLATLAKKAEREGYEVFILTADRDLFQLLSPRISVLHPEGHRITPEWLWEKYGLRPEQWVDFRALAGDPSDNIPGVKGIGEKTALKLLKEWGSLENLLKNLDQVKPESVREKILAHLEDLKLSRELSRVRTDLPLEVDFRRRREPDWEGLKAFLERLEFGSLLHEFGLLESPLPAEEAPWPPPEGAFLGYRLSRPEPMWAELLALAASAQGRVYRAEDPHGALRGLFEVRGLLAKDLAVVALREGLDLPPTDDPMLLAYLLDPSNTTPEGVARRYGGEWTEDAAKRALLAERLHANLLGRLQGEERLLWLYEEVEKPLSRVLAHMEATGVKLDVAYLEALSLEVAAEMRRLEEEVFRLAGHSFRLNSRDQLERVLFDELGLPPIGKTEKTGKRSTSAAVLEALREVHPIVDKILQYRELAKLKGTYIDPLPALVHPKTGRLHTRFNQTATATGRLSSSDPNLQNIPVRTPLGQKIRRAFVAEEGWRLVALDYSQIELRVLAHLSGDENLIRVFQEGKDIHTQTASWMFGLSAEAIDPLMRRAAKTINFGVLYGMSAFRLSQELGIPYEEAAAFIQKYFQSYPKVKAWIEKTLEEGRTRGYVETLFGRRRYVPDLNARVKSVREAAERMAFNMPVQGTAADLMKLAMVRLFPQLREVGARMLLQVHDELLLEAPKERAEEVAALAKEVMEGVWPLAVPLEVEVGIGEDWLAAKG

SEQ ID NO: 2599 - DNA, 2529 bp, synthetic construct
  misc_feature 1..2529: note = Variant of DNA polymerase I from Thermus sp. strain 2.9
  source 1..2529: mol_type = other DNA
atgcaccatcatcatcatcatggcggtagcggcgtgttaccggtgttcgagcctaaaggtcgcgtgcttctggttgatggccatcatctcgcgtatcgtaacttctttgccctgaaaggattaaccaccagccgtggcgagccggtacagggtgtctacggctttgcaaagtcgctcctgaaagctctgaaagaagacggtgatgtggtgattgttgtctttgatgcgaaagcgccaagttttcgccacgaagcgtacgaagcttacaaagccgggcgtgctccaacgccggaagactttcctcgccaattggcgcttatgaaggaattagtggatttgcttggcctcgaacgcttggaagttcccggtttcgaggcagacgacgtattagcgactctcgcaaagaaagccgaacgtgagggctatgaagtccagatcttgacagcagatcgcgatcttttccagcttttatctccgcgcatctcggtgttacacccggaagggcatcgtatcaccccggaatggctctgggagaaatatggtttgcgtcccgaacaatgggtggattttcgcgccttagcaggcgatccgagcgacaatattccgggagttaaaggtatcggcgagaagacggcgctcaagctccttaaagaatgggggtcgttggagaacttgcttaagaatttagatcaggtcaaaccagagtcagtgcgtgagaagattcttgcacacctcgaagacctcaaattaagccgcgaattgtcccgtgtacgcaccgatttgccgctcgaagttgatttccgtcgccgccgcgaacctgactgggagggtcttaaagcgtttttagagcgtcttgaatttggttcgctcttgcatgaattcggccttttagaaagcccgttaccagccgaagaagcaccttggccaccgcccgaaggcgcgtttttaggttaccgtttgagtcgcccggaaccgatgtgggccgaattattggctcttgcagcgtctgcccagggacgtgtgtatcgcgcggaagaccctcatggtgcgctccgcggcctcttcgaagtccgtggactccttgccaaagacttagctgttgttgcattgcgcgaaggtcttgatttacctccgactgatgatccaatgcttcttgcgtacctcttggacccgtcaaacacgacgcccgaaggcgtagcccgtcgttacggcggcgagtggaccgaagatgcagcgaaacgcgcgttattggccgaacgtttgcacgccaatttattaggacgtttgcaaggcgaggaacgtctcctctggctttacgaagaagtggagaaaccattgagtcgcgtgctcgcgcatatggaagctaccggtgtcaaattagacgtggcgtatttggaggctctcagccttgaagttgctgccgaaatgcgccgcttggaggaagaagtattccgtttagcaggccattcctttcgccttaattctcgcgatcagttagaacgtgtgttgttcgatgaacttggtctccctcctatcggcaagacagagaagaccggtaaacgtagcacttcagcggcggttttagaagctcttcgcgaagtccatcccattgtggacaagatcttgcagtaccgcgaactcgcgaaattgaaaggcacctatattgaccctcttccggcattagtccacccgaaaacgggacgcctccatacccgcttcaaccaaacagccacggcgaccggtcgtttgtcctcctctgatccaaaccttcagaatattccagtacgtaccccattgggccagaagatccgccgcgcgtttgtagctgaggagggttggcgtttagtggccctcgattatagccaaattgaattacgtgtccttgcccatctttctggcgatgagaacctcatccgcgtgtttcaggaaggcaaagacattcacactcaaacggcaagctggatgtttggattatcagctgaagcgatcgatcctttgatgcgtcgtgcagcgaagaccatcaatttcggtgttctctacggtatgagtgcctttcgtttgtcgcaggaattacgtattccctatgaagaagctgcggcgttcattcagaaatactttcaaagctatcccaaagttaaagcatggatcgagaagactctcgaagaaggccgcacacgtggttacgtagagaccttatttggacgtcgccgctatgttcccgatttaaacgctcgcgtgaaatctgtccgtgaagccgccgaacgcatggcgttcaacatgcctgtacagggcacggcagctgacctcatgaaacttgcaatggtgcgcctttttccacaattgcgtgaagttggtgcccgcatgctcttgcaggtccacgatgaactcttgttagaagcgccaaaagagcgtgcggaagaggtggcagccctcgcgaaagaggttatggaaggcgtgtggcccttagcggtgcctcttgaagtcgaagttggtattggcgaggattggctggctgccaaaggataatga

SEQ ID NO: 2600 - protein, 841 aa, synthetic construct
  REGION 1..841: note = Variant of DNA polymerase I from Thermus sp. strain 2.9
MHHHHHHGGSGVLPVFEPKGRVLLVDGHHLAYRNFFALKGLTTSRGEPVQGVYGFAKSLLKALKEDGDVVIVVFDAKAPSFRHEAYEAYKAGRAPTPEDFPRQLALMKELVDLLGLERLEVPGFEADDVLATLAKKAEREGYEVQILTADRDLFQLLSPRISVLHPEGHRITPEWLWEKYGLRPEQWVDFRALAGDPSDNIPGVKGIGEKTALKLLKEWGSLENLLKNLDQVKPESVREKILAHLEDLKLSRELSRVRTDLPLEVDFRRRREPDWEGLKAFLERLEFGSLLHEFGLLESPLPAEEAPWPPPEGAFLGYRLSRPEPMWAELLALAASAQGRVYRAEDPHGALRGLFEVRGLLAKDLAVVALREGLDLPPTDDPMLLAYLLDPSNTTPEGVARRYGGEWTEDAAKRALLAERLHANLLGRLQGEERLLWLYEEVEKPLSRVLAHMEATGVKLDVAYLEALSLEVAAEMRRLEEEVFRLAGHSFRLNSRDQLERVLFDELGLPPIGKTEKTGKRSTSAAVLEALREVHPIVDKILQYRELAKLKGTYIDPLPALVHPKTGRLHTRFNQTATATGRLSSSDPNLQNIPVRTPLGQKIRRAFVAEEGWRLVALDYSQIELRVLAHLSGDENLIRVFQEGKDIHTQTASWMFGLSAEAIDPLMRRAAKTINFGVLYGMSAFRLSQELRIPYEEAAAFIQKYFQSYPKVKAWIEKTLEEGRTRGYVETLFGRRRYVPDLNARVKSVREAAERMAFNMPVQGTAADLMKLAMVRLFPQLREVGARMLLQVHDELLLEAPKERAEEVAALAKEVMEGVWPLAVPLEVEVGIGEDWLAAKG

SEQ ID NO: 2601 - DNA, 2529 bp, synthetic construct
  misc_feature 1..2529: note = Variant of DNA polymerase I from Thermus sp. strain 2.9
  source 1..2529: mol_type = other DNA
atgcaccatcatcatcatcatggcggtagcggcgtgttaccggtgttcgagcctaaaggtcgcgtgcttctggttgatggccatcatctcgcgtatcgtaacttctttgccctgaaaggattaaccaccagccgtggcgagccggtacagggtgtctacggctttgcaaagtcgctcctgaaagctctgaaagaagacggtgatgtggtgattgttgtctttgatgcgaaagcgccaagttttcgccacgaagcgtacgaagcttacaaagccgggcgtgctccaacgccggaagactttcctcgccaattggcgcttatgaaggaattagtggatttgcttggcctcgaacgcttggaagttcccggtttcgaggcagacgacgtattagcgactctcgcaaagaaagccgaacgtgagggctatgaagtccagatcttgacagcagatcgcgatcttttccagcttttatctccgcgcatctcggtgttacacccggaagggcatcgtatcaccccggaatggctctgggagaaatatggtttgcgtcccgaacaatgggtggattttcgcgccttagcaggcgatccgagcgacaatattccgggagttaaaggtatcggcgagaagacggcgctcaagctccttaaagaatgggggtcgttggagaacttgcttaagaatttagatcaggtcaaaccagagtcagtgcgtgagaagattcttgcacacctcgaagacctcaaattaagccgcgaattgtcccgtgtacgcaccgatttgccgctcgaagttgatttccgtcgccgccgcgaacctgactgggagggtcttaaagcgtttttagagcgtcttgaatttggttcgctcttgcatgaattcggccttttagaaagcccgttaccagccgaagaagcaccttggccaccgcccgaaggcgcgtttttaggttaccgtttgagtcgcccggaaccgatgtgggccgaattattggctcttgcagcgtctgcccagggacgtgtgtatcgcgcggaagaccctcatggtgcgctccgcggcctcttcgaagtccgtggactccttgccaaagacttagctgttgttgcattgcgcgaaggtcttgatttacctccgactgatgatccaatgcttcttgcgtacctcttggacccgtcaaacacgacgcccgaaggcgtagcccgtcgttacggcggcgagtggaccgaagatgcagcgaaacgcgcgttattggccgaacgtttgcacgccaatttattaggacgtttgcaaggcgaggaacgtctcctctggctttacgaagaagtggagaaaccattgagtcgcgtgctcgcgcatatggaagctaccggtgtcaaattagacgtggcgtatttggaggctctcagccttgaagttgctgccgaaatgcgccgcttggaggaagaagtattccgtttagcaggccattcctttcgccttaattctcgcgatcagttagaacgtgtgttgttcgatgaacttggtctccctcctatcggcaagacagagaagaccggtaaacgtagcacttcagcggcggttttagaagatcttcgcgaagtccatcccattgtggacaagatcttgcagtaccgcgaactcgcgaaattgaaaggcacctatattgaccctcttccggcattagtccacccgaaaacgggacgcctccatacccgcttcaaccaaacagccacggcgaccggtcgtttgtcctcctctgatccaaaccttcagaatattccagtacgtaccccattgggccagaagatccgccgcgcgtttgtagctgaggagggttggcgtttagtggccctcgattatagccaaattgaattacgtgtccttgcccatctttctggcgatgagaacctcatccgcgtgtttcaggaaggcaaagacattcacactcaaacggcaagctggatgtttggattatcagctgaagcgatcgatcctttgatgcgtcgtgcagcgaagaccatcaatttcggtgttctctacggtatgagtgcctttcgtttgtcgcaggaattaggcattccctatgaagaagctgcggcgttcattcagaaatactttcaaagctatcccaaagttaaagcatggatcgagaagactctcgaagaaggccgcacacgtggttacgtagagaccttatttggacgtcgccgctatgttcccgatttaaacgctcgcgtgaaatctgtccgtgaagccgccgaacgcatggcgttcaacatgcctgtacagggcacggcagctgacctcatgaaacttgcaatggtgcgcctttttccacaattgcgtgaagttggtgcccgcatgctcttgcaggtccacgatgaactcttgttagaagcgccaaaagagcgtgcggaagaggtggcagccctcgcgaaagaggttatggaaggcgtgtggcccttagcggtgcctcttgaagtcgaagttggtattggcgaggattggctggctgccaaaggataatga

SEQ ID NO: 2602 - protein, 841 aa, synthetic construct
  REGION 1..841: note = Variant of DNA polymerase I from Thermus sp. strain 2.9
MHHHHHHGGSGVLPVFEPKGRVLLVDGHHLAYRNFFALKGLTTSRGEPVQGVYGFAKSLLKALKEDGDVVIVVFDAKAPSFRHEAYEAYKAGRAPTPEDFPRQLALMKELVDLLGLERLEVPGFEADDVLATLAKKAEREGYEVQILTADRDLFQLLSPRISVLHPEGHRITPEWLWEKYGLRPEQWVDFRALAGDPSDNIPGVKGIGEKTALKLLKEWGSLENLLKNLDQVKPESVREKILAHLEDLKLSRELSRVRTDLPLEVDFRRRREPDWEGLKAFLERLEFGSLLHEFGLLESPLPAEEAPWPPPEGAFLGYRLSRPEPMWAELLALAASAQGRVYRAEDPHGALRGLFEVRGLLAKDLAVVALREGLDLPPTDDPMLLAYLLDPSNTTPEGVARRYGGEWTEDAAKRALLAERLHANLLGRLQGEERLLWLYEEVEKPLSRVLAHMEATGVKLDVAYLEALSLEVAAEMRRLEEEVFRLAGHSFRLNSRDQLERVLFDELGLPPIGKTEKTGKRSTSAAVLEDLREVHPIVDKILQYRELAKLKGTYIDPLPALVHPKTGRLHTRFNQTATATGRLSSSDPNLQNIPVRTPLGQKIRRAFVAEEGWRLVALDYSQIELRVLAHLSGDENLIRVFQEGKDIHTQTASWMFGLSAEAIDPLMRRAAKTINFGVLYGMSAFRLSQELGIPYEEAAAFIQKYFQSYPKVKAWIEKTLEEGRTRGYVETLFGRRRYVPDLNARVKSVREAAERMAFNMPVQGTAADLMKLAMVRLFPQLREVGARMLLQVHDELLLEAPKERAEEVAALAKEVMEGVWPLAVPLEVEVGIGEDWLAAKG

SEQ ID NO: 2603 - DNA, 2529 bp, synthetic construct
  misc_feature 1..2529: note = Variant of DNA polymerase I from Thermus sp. strain 2.9
  source 1..2529: mol_type = other DNA
atgcaccatcatcatcatcatggcggtagcggcgtgttaccggtgttcgagcctaaaggtcgcgtgcttctggttgatggccatcatctcgcgtatcgtaacttctttgccctgaaaggattaaccaccagccgtggcgagccggtacagggtgtctacggctttgcaaagtcgctcctgaaagctctgaaagaagacggtgatgtggtgattgttgtctttgatgcgaaagcgccaagttttcgccacgaagcgtacgaagcttacaaagccgggcgtgctccaacgccggaagactttcctcgccaattggcgcttatgaaggaattagtggatttgcttggcctcgaacgcttggaagttcccggtttcgaggcagacgacgtattagcgactctcgcaaagaaagccgaacgtgagggctatgaagtccagatcttgacagcagatcgcgatcttttccagcttttatctccgcgcatctcggtgttacacccggaagggcatcgtatcaccccggaatggctctgggagaaatatggtttgcgtcccgaacaatgggtggattttcgcgccttagcaggcgatccgagcgacaatattccgggagttaaaggtatcggcgagaagacggcgctcaagctccttaaagaatgggggtcgttggagaacttgcttaagaatttagatcaggtcaaaccagagtcagtgcgtgagaagattcttgcacacctcgaagacctcaaattaagccgcgaattgtcccgtgtacgcaccgatttgccgctcgaagttgatttccgtcgccgccgcgaacctgactgggagggtcttaaagcgtttttagagcgtcttgaatttggttcgctcttgatggaattcggccttttagaaagcccgttaccagccgaagaagcaccttggccaccgcccgaaggcgcgtttttaggttaccgtttgagtcgcccggaaccgatgtgggccgaattattggctcttgcagcgtctgcccagggacgtgtgtatcgcgcggaagaccctcatggtgcgctccgcggcctcttcgaagtccgtggactccttgccaaagacttagctgttgttgcattgcgcgaaggtcttgatttacctccgactgatgatccaatgcttcttgcgtacctcttggacccgtcaaacacgacgcccgaaggcgtagcccgtcgttacggcggcgagtggaccgaagatgcagcgaaacgcgcgttattggccgaacgtttgcacgccaatttattaggacgtttgcaaggcgaggaacgtctcctctggctttacgaagaagtggagaaaccattgagtcgcgtgctcgcgcatatggaagctaccggtgtcaaattagacgtggcgtatttggaggctctcagccttgaagttgctgccgaaatgcgccgcttggaggaagaagtattccgtttagcaggccattcctttcgccttaattctcgcgatcagttagaacgtgtgttgttcgatgaacttggtctccctcctatcggcaagacagagaagaccggtaaacgtagcacttcagcggcggttttagaagctcttcgcgaagtccatcccattgtggacaagatcttgcagtaccgcgaactcgcgaaattgaaaggcacctatattgaccctcttccggcattagtccacccgaaaacgggacgcctccatacccgcttcaaccaaacagccacggcgaccggtcgtttgtcctcctctgatccaaaccttcagaatattccagtacgtaccccattgggccagaagatccgccgcgcgtttgtagctgaggagggttggcgtttagtggccctcgattatagccaaattgaattacgtgtccttgcccatctttctggcgatgagaacctcatccgcgtgtttcaggaaggcaaagacattcacactcaaacggcaagctggatgtttggattatcagctgaagcgatcgatcctttgatgcgtcgtgcagcgaagaccatcaatttcggtgttctctacggtatgagtgcctttcgtttgtcgcaggaattaggcattccctatgaagaagctgcggcgttcattcagaaatactttcaaagctatcccaaagttaaagcatggatcgagaagactctcgaagaaggccgcacacgtggttacgtagagaccttatttggacgtcgccgctatgttcccgatttaaacgctcgcgtgaaatctgtccgtgaagccgccgaacgcatggcgttcaacatgcctgtacagggcacggcagctgacctcatgaaacttgcaatggtgcgcctttttccacaattgcgtgaagttggtgcccgcatgctcttgcaggtccacgatgaactcttgttagaagcgccaaaagagcgtgcggaagaggtggcagccctcgcgaaagaggttatggaaggcgtgtggcccttagcggtgcctcttgaagtcgaagttggtattggcgaggattggctggctgccaaaggataatga

SEQ ID NO: 2604 - protein, 841 aa, synthetic construct
  REGION 1..841: note = Variant of DNA polymerase I from Thermus sp. strain 2.9
MHHHHHHGGSGVLPVFEPKGRVLLVDGHHLAYRNFFALKGLTTSRGEPVQGVYGFAKSLLKALKEDGDVVIVVFDAKAPSFRHEAYEAYKAGRAPTPEDFPRQLALMKELVDLLGLERLEVPGFEADDVLATLAKKAEREGYEVQILTADRDLFQLLSPRISVLHPEGHRITPEWLWEKYGLRPEQWVDFRALAGDPSDNIPGVKGIGEKTALKLLKEWGSLENLLKNLDQVKPESVREKILAHLEDLKLSRELSRVRTDLPLEVDFRRRREPDWEGLKAFLERLEFGSLLMEFGLLESPLPAEEAPWPPPEGAFLGYRLSRPEPMWAELLALAASAQGRVYRAEDPHGALRGLFEVRGLLAKDLAVVALREGLDLPPTDDPMLLAYLLDPSNTTPEGVARRYGGEWTEDAAKRALLAERLHANLLGRLQGEERLLWLYEEVEKPLSRVLAHMEATGVKLDVAYLEALSLEVAAEMRRLEEEVFRLAGHSFRLNSRDQLERVLFDELGLPPIGKTEKTGKRSTSAAVLEALREVHPIVDKILQYRELAKLKGTYIDPLPALVHPKTGRLHTRFNQTATATGRLSSSDPNLQNIPVRTPLGQKIRRAFVAEEGWRLVALDYSQIELRVLAHLSGDENLIRVFQEGKDIHTQTASWMFGLSAEAIDPLMRRAAKTINFGVLYGMSAFRLSQELGIPYEEAAAFIQKYFQSYPKVKAWIEKTLEEGRTRGYVETLFGRRRYVPDLNARVKSVREAAERMAFNMPVQGTAADLMKLAMVRLFPQLREVGARMLLQVHDELLLEAPKERAEEVAALAKEVMEGVWPLAVPLEVEVGIGEDWLAAKG

SEQ ID NO: 2605 - DNA, 2529 bp, synthetic construct
  misc_feature 1..2529: note = Variant of DNA polymerase I from Thermus sp. strain 2.9
  source 1..2529: mol_type = other DNA
atgcaccatcatcatcatcatggcggtagcggcgtgttaccggtgttcgagcctaaaggtcgcgtgcttctggttgatggccatcatctcgcgtatcgtaacttctttgccctgaaaggattaaccaccagccgtggcgagccggtacagggtgtctacggctttgcaaagtcgctcctgaaagctctgaaagaagacggtgatgtggtgattgttgtctttgatgcgaaagcgccaagttttcgccacgaagcgtacgaagcttacaaagccgggcgtgctccaacgccggaagactttcctcgccaattggcgcttatgaaggaattagtggatttgcttggcctcgaacgcttggaagttcccggtttcgaggcagacgacgtattagcgactctcgcaaagaaagccgaacgtgagggctatgaagtccagatcttgacagcagatcgcgatcttttccagcttttatctccgcgcatctcggtgttacacccggaagggcatcgtatcaccccggaatggctctgggagaaatatggtttgcgtcccgaacaatgggtggattttcgcgccttagcaggcgatccgagcgacaatattccgggagttaaaggtatcggcgagaagacggcgctcaagctccttaaagaatgggggtcgttggagaacttgcttaagaatttagatcaggtcaaaccagagtcagtgcgtgagaagattcttgcacacctcgaagacctcaaattaagccgcgaattgtcccgtgtacgcaccgatttgccgctcgaagttgatttccgtcgccgccgcgaacctgactgggagggtcttaaagcgtttttagagcgtcttgaatttggttcgctcttgcatgaattcggccttttagaaagcccgttaccagccgaagaagcaccttggccaccgcccgatggcgcgtttttaggttaccgtttgagtcgcccggaaccgatgtgggccgaattattggctcttgcagcgtctgcccagggacgtgtgtatcgcgcggaagaccctcatggtgcgctccgcggcctcttcgaagtccgtggactccttgccaaagacttagctgttgttgcattgcgcgaaggtcttgatttacctccgactgatgatccaatgcttcttgcgtacctcttggacccgtcaaacacgacgcccgaaggcgtagcccgtcgttacggcggcgagtggaccgaagatgcagcgaaacgcgcgttattggccgaacgtttgcacgccaatttattaggacgtttgcaaggcgaggaacgtctcctctggctttacgaagaagtggagaaaccattgagtcgcgtgctcgcgcatatggaagctaccggtgtcaaattagacgtggcgtatttggaggctctcagccttgaagttgctgccgaaatgcgccgcttggaggaagaagtattccgtttagcaggccattcctttcgccttaattctcgcgatcagttagaacgtgtgttgttcgatgaacttggtctccctcctatcggcaagacagagaagaccggtaaacgtagcacttcagcggcggttttagaagctcttcgcgaagtccatcccattgtggacaagatcttgcagtaccgcgaactcgcgaaattgaaaggcacctatattgaccctcttccggcattagtccacccgaaaacgggacgcctccatacccgcttcaaccaaacagccacggcgaccggtcgtttgtcctcctctgatccaaaccttcagaatattccagtacgtaccccattgggccagaagatccgccgcgcgtttgtagctgaggagggttggcgtttagtggccctcgattatagccaaattgaattacgtgtccttgcccatctttctggcgatgagaacctcatccgcgtgtttcaggaaggcaaagacattcacactcaaacggcaagctggatgtttggattatcagctgaagcgatcgatcctttgatgcgtcgtgcagcgaagaccatcaatttcggtgttctctacggtatgagtgcctttcgtttgtcgcaggaattaggcattccctatgaagaagctgcggcgttcattcagaaatactttcaaagctatcccaaagttaaagcatggatcgagaagactctcgaagaaggccgcacacgtggttacgtagagaccttatttggacgtcgccgctatgttcccgatttaaacgctcgcgtgaaatctgtccgtgaagccgccgaacgcatggcgttcaacatgcctgtacagggcacggcagctgacctcatgaaacttgcaatggtgcgcctttttccacaattgcgtgaagttggtgcccgcatgctcttgcaggtccacgatgaactcttgttagaagcgccaaaagagcgtgcggaagaggtggcagccctcgcgaaagaggttatggaaggcgtgtggcccttagcggtgcctcttgaagtcgaagttggtattggcgaggattggctggctgccaaaggataatga

SEQ ID NO: 2606 - protein, 841 aa, synthetic construct
  REGION 1..841: note = Variant of DNA polymerase I from Thermus sp. strain 2.9
MHHHHHHGGSGVLPVFEPKGRVLLVDGHHLAYRNFFALKGLTTSRGEPVQGVYGFAKSLLKALKEDGDVVIVVFDAKAPSFRHEAYEAYKAGRAPTPEDFPRQLALMKELVDLLGLERLEVPGFEADDVLATLAKKAEREGYEVQILTADRDLFQLLSPRISVLHPEGHRITPEWLWEKYGLRPEQWVDFRALAGDPSDNIPGVKGIGEKTALKLLKEWGSLENLLKNLDQVKPESVREKILAHLEDLKLSRELSRVRTDLPLEVDFRRRREPDWEGLKAFLERLEFGSLLHEFGLLESPLPAEEAPWPPPDGAFLGYRLSRPEPMWAELLALAASAQGRVYRAEDPHGALRGLFEVRGLLAKDLAVVALREGLDLPPTDDPMLLAYLLDPSNTTPEGVARRYGGEWTEDAAKRALLAERLHANLLGRLQGEERLLWLYEEVEKPLSRVLAHMEATGVKLDVAYLEALSLEVAAEMRRLEEEVFRLAGHSFRLNSRDQLERVLFDELGLPPIGKTEKTGKRSTSAAVLEALREVHPIVDKILQYRELAKLKGTYIDPLPALVHPKTGRLHTRFNQTATATGRLSSSDPNLQNIPVRTPLGQKIRRAFVAEEGWRLVALDYSQIELRVLAHLSGDENLIRVFQEGKDIHTQTASWMFGLSAEAIDPLMRRAAKTINFGVLYGMSAFRLSQELGIPYEEAAAFIQKYFQSYPKVKAWIEKTLEEGRTRGYVETLFGRRRYVPDLNARVKSVREAAERMAFNMPVQGTAADLMKLAMVRLFPQLREVGARMLLQVHDELLLEAPKERAEEVAALAKEVMEGVWPLAVPLEVEVGIGEDWLAAKG

SEQ ID NO: 2607 - DNA, 2529 bp, synthetic construct
  misc_feature 1..2529: note = Variant of DNA polymerase I from Thermus sp. strain 2.9
  source 1..2529: mol_type = other DNA
atgcaccatcatcatcatcatggcggtagcggcgtgttaccggtgttcgagcctaaaggtcgcgtgcttctggttgatggccatcatctcgcgtatcgtaacttctttgccctgaaaggattaaccaccagccgtggcgagccggtacagggtgtctacggctttgcaaagtcgctcctgaaagctctgaaagaagacggtgatgtggtgattgttgtctttgatgcgaaagcgccaagttttcgccacgaagcgtacgaagcttacaaagccgggcgtgctccaacgccggaagactttcctcgccaattggcgcttatgaaggaattagtggatttgcttggcctcgaacgcttggaagttcccggtttcgaggcagacgacgtattagcgactctcgcaaagaaagccgaacgtgagggctatgaagtccagatcttgacagcagatcgcgatcttttccagcttttatctccgcgcatctcggtgttacacccggaagggcatcgtatcaccccggaatggctctgggagaaatatggtttgcgtcccgaacaatgggtggattttcgcgccttagcaggcgatccgagcgacaatattccgggagttaaaggtatcggcgagaagacggcgctcaagctccttaaagaatgggggtcgttggagaacttgcttaagaatttagatcaggtcaaaccagagtcagtgcgtgagaagattcttgcacacctcgaagacctcaaattaagccgcgaattgtcccgtgtacgcaccgatttgccgctcgaagttgatttccgtcgccgccgcgaacctgactgggagggtcttaaagcgtttttagagcgtcttgaatttggttcgctcttgcatgaattcggccttttagaaagcccgttaccagccgaagaagcaccttggccaccgcccgaaggcgcgtttttaggttaccgtttgagtcgcccggaaccgatgtgggccgttttattggctcttgcagcgtctgcccagggacgtgtgtatcgcgcggaagaccctcatggtgcgctccgcggcctcttcgaagtccgtggactccttgccaaagacttagctgttgttgcattgcgcgaaggtcttgatttacctccgactgatgatccaatgcttcttgcgtacctcttggacccgtcaaacacgacgcccgaaggcgtagcccgtcgttacggcggcgagtggaccgaagatgcagcgaaacgcgcgttattggccgaacgtttgcacgccaatttattaggacgtttgcaaggcgaggaacgtctcctctggctttacgaagaagtggagaaaccattgagtcgcgtgctcgcgcatatggaagctaccggtgtcaaattagacgtggcgtatttggaggctctcagccttgaagttgctgccgaaatgcgccgcttggaggaagaagtattccgtttagcaggccattcctttcgccttaattctcgcgatcagttagaacgtgtgttgttcgatgaacttggtctccctcctatcggcaagacagagaagaccggtaaacgtagcacttcagcggcggttttagaagctcttcgcgaagtccatcccattgtggacaagatcttgcagtaccgcgaactcgcgaaattgaaaggcacctatattgaccctcttccggcattagtccacccgaaaacgggacgcctccatacccgcttcaaccaaacagccacggcgaccggtcgtttgtcctcctctgatccaaaccttcagaatattccagtacgtaccccattgggccagaagatccgccgcgcgtttgtagctgaggagggttggcgtttagtggccctcgattatagccaaattgaattacgtgtccttgcccatctttctggcgatgagaacctcatccgcgtgtttcaggaaggcaaagacattcacactcaaacggcaagctggatgtttggattatcagctgaagcgatcgatcctttgatgcgtcgtgcagcgaagaccatcaatttcggtgttctctacggtatgagtgcctttcgtttgtcgcaggaattaggcattccctatgaagaagctgcggcgttcattcagaaatactttcaaagctatcccaaagttaaagcatggatcgagaagactctcgaagaaggccgcacacgtggttacgtagagaccttatttggacgtcgccgctatgttcccgatttaaacgctcgcgtgaaatctgtccgtgaagccgccgaacgcatggcgttcaacatgcctgtacagggcacggcagctgacctcatgaaacttgcaatggtgcgcctttttccacaattgcgtgaagttggtgcccgcatgctcttgcaggtccacgatgaactcttgttagaagcgccaaaagagcgtgcggaagaggtggcagccctcgcgaaagaggttatggaaggcgtgtggcccttagcggtgcctcttgaagtcgaagttggtattggcgaggattggctggctgccaaaggataatga

SEQ ID NO: 2608 - protein, 841 aa, synthetic construct
  REGION 1..841: note = Variant of DNA polymerase I from Thermus sp. strain 2.9
MHHHHHHGGSGVLPVFEPKGRVLLVDGHHLAYRNFFALKGLTTSRGEPVQGVYGFAKSLLKALKEDGDVVIVVFDAKAPSFRHEAYEAYKAGRAPTPEDFPRQLALMKELVDLLGLERLEVPGFEADDVLATLAKKAEREGYEVQILTADRDLFQLLSPRISVLHPEGHRITPEWLWEKYGLRPEQWVDFRALAGDPSDNIPGVKGIGEKTALKLLKEWGSLENLLKNLDQVKPESVREKILAHLEDLKLSRELSRVRTDLPLEVDFRRRREPDWEGLKAFLERLEFGSLLHEFGLLESPLPAEEAPWPPPEGAFLGYRLSRPEPMWAVLLALAASAQGRVYRAEDPHGALRGLFEVRGLLAKDLAVVALREGLDLPPTDDPMLLAYLLDPSNTTPEGVARRYGGEWTEDAAKRALLAERLHANLLGRLQGEERLLWLYEEVEKPLSRVLAHMEATGVKLDVAYLEALSLEVAAEMRRLEEEVFRLAGHSFRLNSRDQLERVLFDELGLPPIGKTEKTGKRSTSAAVLEALREVHPIVDKILQYRELAKLKGTYIDPLPALVHPKTGRLHTRFNQTATATGRLSSSDPNLQNIPVRTPLGQKIRRAFVAEEGWRLVALDYSQIELRVLAHLSGDENLIRVFQEGKDIHTQTASWMFGLSAEAIDPLMRRAAKTINFGVLYGMSAFRLSQELGIPYEEAAAFIQKYFQSYPKVKAWIEKTLEEGRTRGYVETLFGRRRYVPDLNARVKSVREAAERMAFNMPVQGTAADLMKLAMVRLFPQLREVGARMLLQVHDELLLEAPKERAEEVAALAKEVMEGVWPLAVPLEVEVGIGEDWLAAKG

SEQ ID NO: 2609 - DNA, 2529 bp, synthetic construct
  misc_feature 1..2529: note = Variant of DNA polymerase I from Thermus sp. strain 2.9
  source 1..2529: mol_type = other DNA
atgcaccatcatcatcatcatggcggtagcggcgtgttaccggtgttcgagcctaaaggtcgcgtgcttctggttgatggccatcatctcgcgtatcgtaacttctttgccctgaaaggattaaccaccagccgtggcgagccggtacagggtgtctacggctttgcaaagtcgctcctgaaagctctgaaagaagacggtgatgtggtgattgttgtctttgatgcgaaagcgccaagttttcgccacgaagcgtacgaagcttacaaagccgggcgtgctccaacgccggaagactttcctcgccaattggcgcttatgaaggaattagtggatttgcttggcctcgaacgcttggaagttcccggtttcgaggcagacgacgtattagcgactctcgcaaagaaagccgaacgtgagggctatgaagtccagatcttgacagcagatcgcgatcttttccagcttttatctccgcgcatctcggtgttacacccggaagggcatcgtatcaccccggaatggctctgggagaaatatggtttgcgtcccgaacaatgggtggattttcgcgccttagcaggcgatccgagcgacaatattccgggagttaaaggtatcggcgagaagacggcgctcaagctccttaaagaatgggggtcgttggagaacttgcttaagaatttagatcaggtcaaaccagagtcagtgcgtgagaagattcttgcacacctcgaagacctcaaattaagccgcgaattgtcccgtgtacgcaccgatttgccgctcgaagttgatttccgtcgccgccgcgaacctgactgggagggtcttaaagcgtttttagagcgtcttgaatttggttcgctcttgcatgaattcggccttttagaaagcccgttaccagccgaagaagcaccttggccaccgcccgaaggcgcgtttttaggttaccgtttgagtcgcccggaaccgatgtgggccgaattattggctcttgcagcgtctgcccagggacgtgtgtatcgcgcggaagaccctcatggtgcgctccgcggcctcttcgaagtccgtggactccttgccaaagacttagctgttgttgcattgcgcgaaggtcttgatttacctccgactgatgatccaatgcttcttgcgtacctcttggacccgtcaaacacgacgcccgaaggcgtagcccgtcgttacggcggcgagtggaccgaagatgcagcgaaacgcgcgttattggccgaacgtttgcacgccaatttattaggacgtttgcaaggcgaggaacgtctcctctggctttacgaagaagtggagaaaccattgagtcgcgtgctcgcgcatatggaagctaccggtgtcaaattagacgtggcgtatttggaggctctcagccttgaagttgctgccgaaatgcgccgcttggaggaagaagtattccgtttagcaggccattcctttcgccttaattctcgcgatcagttagaacgtgtgttgttcgatgaacttggtctccctcctatcggcaagacagagaagaccggtaaacgtagcacttcagcggcggttttagaagctcttcgcgaagtccatcccattgtggacaagatcttgcagtaccgcgaactcgcgaaattgaaaggcacctatattgaccctcttccggcattagtccacccgaaaacgggacgcctccatacccgcttcaaccaaacagccacggcgaccggtcgtttgtcctcctctgatccaaaccttcagaatattccagtacgtaccccattgggccagaagatccgccgcgcgtttgtagctgaggagggttggcgtttagtggccctcgattatggtcaaattgaattacgtgtccttgcccatctttctggcgatgagaacctcatccgcgtgtttcaggaaggcaaagacattcacactcaaacggcaagctggatgtttggattatcagctgaagcgatcgatcctttgatgcgtcgtgcagcgaagaccatcaatttcggtgttctctacggtatgagtgcctttcgtttgtcgcaggaattaggcattccctatgaagaagctgcggcgttcattcagaaatactttcaaagctatcccaaagttaaagcatggatcgagaagactctcgaagaaggccgcacacgtggttacgtagagaccttatttggacgtcgccgctatgttcccgatttaaacgctcgcgtgaaatctgtccgtgaagccgccgaacgcatggcgttcaacatgcctgtacagggcacggcagctgacctcatgaaacttgcaatggtgcgcctttttccacaattgcgtgaagttggtgcccgcatgctcttgcaggtccacgatgaactcttgttagaagcgccaaaagagcgtgcggaagaggtggcagccctcgcgaaagaggttatggaaggcgtgtggcccttagcggtgcctcttgaagtcgaagttggtattggcgaggattggctggctgccaaaggataatga

SEQ ID NO: 2610 - protein, 841 aa, synthetic construct
  REGION 1..841: note = Variant of DNA polymerase I from Thermus sp. strain 2.9
MHHHHHHGGSGVLPVFEPKGRVLLVDGHHLAYRNFFALKGLTTSRGEPVQGVYGFAKSLLKALKEDGDVVIVVFDAKAPSFRHEAYEAYKAGRAPTPEDFPRQLALMKELVDLLGLERLEVPGFEADDVLATLAKKAEREGYEVQILTADRDLFQLLSPRISVLHPEGHRITPEWLWEKYGLRPEQWVDFRALAGDPSDNIPGVKGIGEKTALKLLKEWGSLENLLKNLDQVKPESVREKILAHLEDLKLSRELSRVRTDLPLEVDFRRRREPDWEGLKAFLERLEFGSLLHEFGLLESPLPAEEAPWPPPEGAFLGYRLSRPEPMWAELLALAASAQGRVYRAEDPHGALRGLFEVRGLLAKDLAVVALREGLDLPPTDDPMLLAYLLDPSNTTPEGVARRYGGEWTEDAAKRALLAERLHANLLGRLQGEERLLWLYEEVEKPLSRVLAHMEATGVKLDVAYLEALSLEVAAEMRRLEEEVFRLAGHSFRLNSRDQLERVLFDELGLPPIGKTEKTGKRSTSAAVLEALREVHPIVDKILQYRELAKLKGTYIDPLPALVHPKTGRLHTRFNQTATATGRLSSSDPNLQNIPVRTPLGQKIRRAFVAEEGWRLVALDYGQIELRVLAHLSGDENLIRVFQEGKDIHTQTASWMFGLSAEAIDPLMRRAAKTINFGVLYGMSAFRLSQELGIPYEEAAAFIQKYFQSYPKVKAWIEKTLEEGRTRGYVETLFGRRRYVPDLNARVKSVREAAERMAFNMPVQGTAADLMKLAMVRLFPQLREVGARMLLQVHDELLLEAPKERAEEVAALAKEVMEGVWPLAVPLEVEVGIGEDWLAAKG

SEQ ID NO: 2611 - DNA, 2529 bp, synthetic construct
  misc_feature 1..2529: note = Variant of DNA polymerase I from Thermus sp. strain 2.9
  source 1..2529: mol_type = other DNA
atgcaccatcatcatcatcatggcggtagcggcgtgttaccggtgttcgagcctaaaggtcgcgtgcttctggttgatggccatcatctcgcgtatcgtaacttctttgccctgaaaggattaaccaccagccgtggcgagccggtacagggtgtctacggctttgcaaagtcgctcctgaaagctctgaaagaagacggtgatgtggtgattgttgtctttgatgcgaaagcgccaagttttcgccacgaagcgtacgaagcttacaaagccgggcgtgctccaacgccggaagactttcctcgccaattggcgcttatgaaggaattagtggatttgcttggcctcgaacgcttggaagttcccggtttcgaggcagacgacgtattagcgactctcgcaaagaaagccgaacgtgagggctatgaagtccagatcttgacagcagatcgcgatcttttccagcttttatctccgcgcatctcggtgttacacccggaagggcatcgtatcaccccggaatggctctgggagaaatatggtttgcgtcccgaacaatgggtggattttcgcgccttagcaggcgatccgagcgacaatattccgggagttaaaggtatcggcgagaagacggcgctcaagctccttaaagaatgggggtcgttggagaacttgcttaagaatttagatcaggtcaaaccagagtcagtgcgtgagaagattcttgcacacctcgaagacctcaaattaagccgcgaattgtcccgtgtacgcaccgatttgccgctcgaagttgatttccgtcgccgccgcgaacctgactgggagggtcttaaagcgtttttagagcgtcttgaatttggttcgctcttgcatgaattcggccttttagaaagcccgttaccagccgaagaagcaccttggccaccgcccgaaggcgcgtttttaggttaccgtttgagtcgcccggaaccgatgtgggccgaattattggctcttgcagcgtctgcccagggagcggtgtatcgcgcggaagaccctcatggtgcgctccgcggcctcttcgaagtccgtggactccttgccaaagacttagctgttgttgcattgcgcgaaggtcttgatttacctccgactgatgatccaatgcttcttgcgtacctcttggacccgtcaaacacgacgcccgaaggcgtagcccgtcgttacggcggcgagtggaccgaagatgcagcgaaacgcgcgttattggccgaacgtttgcacgccaatttattaggacgtttgcaaggcgaggaacgtctcctctggctttacgaagaagtggagaaaccattgagtcgcgtgctcgcgcatatggaagctaccggtgtcaaattagacgtggcgtatttggaggctctcagccttgaagttgctgccgaaatgcgccgcttggaggaagaagtattccgtttagcaggccattcctttcgccttaattctcgcgatcagttagaacgtgtgttgttcgatgaacttggtctccctcctatcggcaagacagagaagaccggtaaacgtagcacttcagcggcggttttagaagctcttcgcgaagtccatcccattgtggacaagatcttgcagtaccgcgaactcgcgaaattgaaaggcacctatattgaccctcttccggcattagtccacccgaaaacgggacgcctccatacccgcttcaaccaaacagccacggcgaccggtcgtttgtcctcctctgatccaaaccttcagaatattccagtacgtaccccattgggccagaagatccgccgcgcgtttgtagctgaggagggttggcgtttagtggccctcgattatagccaaattgaattacgtgtccttgcccatctttctggcgatgagaacctcatccgcgtgtttcaggaaggcaaagacattcacactcaaacggcaagctggatgtttggattatcagctgaagcgatcgatcctttgatgcgtcgtgcagcgaagaccatcaatttcggtgttctctacggtatgagtgcctttcgtttgtcgcaggaattaggcattccctatgaagaagctgcggcgttcattcagaaatactttcaaagctatcccaaagttaaagcatggatcgagaagactctcgaagaaggccgcacacgtggttacgtagagaccttatttggacgtcgccgctatgttcccgatttaaacgctcgcgtgaaatctgtccgtgaagccgccgaacgcatggcgttcaacatgcctgtacagggcacggcagctgacctcatgaaacttgcaatggtgcgcctttttccacaattgcgtgaagttggtgcccgcatgctcttgcaggtccacgatgaactcttgttagaagcgccaaaagagcgtgcggaagaggtggcagccctcgcgaaagaggttatggaaggcgtgtggcccttagcggtgcctcttgaagtcgaagttggtattggcgaggattggctggctgccaaaggataatga

SEQ ID NO: 2612 - protein, 841 aa, synthetic construct
  REGION 1..841: note = Variant of DNA polymerase I from Thermus sp. strain 2.9
MHHHHHHGGSGVLPVFEPKGRVLLVDGHHLAYRNFFALKGLTTSRGEPVQGVYGFAKSLLKALKEDGDVVIVVFDAKAPSFRHEAYEAYKAGRAPTPEDFPRQLALMKELVDLLGLERLEVPGFEADDVLATLAKKAEREGYEVQILTADRDLFQLLSPRISVLHPEGHRITPEWLWEKYGLRPEQWVDFRALAGDPSDNIPGVKGIGEKTALKLLKEWGSLENLLKNLDQVKPESVREKILAHLEDLKLSRELSRVRTDLPLEVDFRRRREPDWEGLKAFLERLEFGSLLHEFGLLESPLPAEEAPWPPPEGAFLGYRLSRPEPMWAELLALAASAQGAVYRAEDPHGALRGLFEVRGLLAKDLAVVALREGLDLPPTDDPMLLAYLLDPSNTTPEGVARRYGGEWTEDAAKRALLAERLHANLLGRLQGEERLLWLYEEVEKPLSRVLAHMEATGVKLDVAYLEALSLEVAAEMRRLEEEVFRLAGHSFRLNSRDQLERVLFDELGLPPIGKTEKTGKRSTSAAVLEALREVHPIVDKILQYRELAKLKGTYIDPLPALVHPKTGRLHTRFNQTATATGRLSSSDPNLQNIPVRTPLGQKIRRAFVAEEGWRLVALDYSQIELRVLAHLSGDENLIRVFQEGKDIHTQTASWMFGLSAEAIDPLMRRAAKTINFGVLYGMSAFRLSQELGIPYEEAAAFIQKYFQSYPKVKAWIEKTLEEGRTRGYVETLFGRRRYVPDLNARVKSVREAAERMAFNMPVQGTAADLMKLAMVRLFPQLREVGARMLLQVHDELLLEAPKERAEEVAALAKEVMEGVWPLAVPLEVEVGIGEDWLAAKG

SEQ ID NO: 2613 - DNA, 2529 bp, synthetic construct
  misc_feature 1..2529: note = Variant of DNA polymerase I from Thermus sp. strain 2.9
  source 1..2529: mol_type = other DNA
atgcaccatcatcatcatcatggcggtagcggcgtgttaccggtgttcgagcctaaaggtcgcgtgcttctggttgatggccatcatctcgcgtatcgtaacttctttgccctgaaaggattaaccaccagccgtggcgagccggtacagggtgtctacggctttgcaaagtcgctcctgaaagctctgaaagaagacggtgatgtggtgattgttgtctttgatgcgaaagcgccaagttttcgccacgaagcgtacgaagcttacaaagccgggcgtgctccaacgccggaagactttcctcgccaattggcgcttatgaaggaattagtggatttgcttggcctcgaacgcttggaagttcccggtttcgaggcagacgacgtattagcgactctcgcaaagaaagccgaacgtgagggctatgaagtccagatcttgacagcagatcgcgatcttttccagcttttatctccgcgcatctcggtgttacacccggaagggcatcgtatcaccccggaatggctctgggagaaatatggtttgcgtcccgaacaatgggtggattttcgcgccttagcaggcgatccgagcgacaatattccgggagttaaaggtatcggcgagaagacggcgctcaagctccttaaagaatgggggtcgttggagaacttgcttaagaatttagatcaggtcaaaccagagtcagtgcgtgagaagattcttgcacacctcgaagacctcaaattaagccgcgaattgtcccgtgtacgcaccgatttgccgctcgaagttgatttccgtcgccgccgcgaacctgactgggagggtcttaaagcgtttttagagcgtcttgaatttggttcgctcttgcatgaattcggccttttagaaagcccgttaccagccgaagaagcaccttggccaccgcccgaaggcgcgtttttaggttaccgtttgagtcgcccggaaccgatgtgggccgaattattggctcttgcagcgtctgcccagggacgtgtgtatcgcgcggaagaccctcatggtgcgctccgcggcctcttcgaagtccgtggactccttgccaaagacttagctgttgttgcattgcgcgaaggtcttgatttacctccgactgatgatccaatgcttcttgcgtacctcttggacccgtcaaacacgacgcccgaaggcgtagcccgtcgttacggcggcgagtggaccgaagatgcagcgaaacgcgcgttattggccgaacgtttgcacgccaatttattaggacgtttgcaaggcgaggaacgtctcctctggctttacgaagaagtggagaaaccattgagtcgcgtgctcgcgcatatggaagctaccggtgtcaaattagacgtggcgtatttggaggctctcagccttgaagttgctgccgaaatgcgccgcttggaggaagaagtattccgtttagcaggccattcctttcgccttaattctcgcgatcagttagaacgtgtgttgttcgatgaacttggtctcttgcctatcggcaagacagagaagaccggtaaacgtagcacttcagcggcggttttagaagctcttcgcgaagtccatcccattgtggacaagatcttgcagtaccgcgaactcgcgaaattgaaaggcacctatattgaccctcttccggcattagtccacccgaaaacgggacgcctccatacccgcttcaaccaaacagccacggcgaccggtcgtttgtcctcctctgatccaaaccttcagaatattccagtacgtaccccattgggccagaagatccgccgcgcgtttgtagctgaggagggttggcgtttagtggccctcgattatagccaaattgaattacgtgtccttgcccatctttctggcgatgagaacctcatccgcgtgtttcaggaaggcaaagacattcacactcaaacggcaagctggatgtttggattatcagctgaagcgatcgatcctttgatgcgtcgtgcagcgaagaccatcaatttcggtgttctctacggtatgagtgcctttcgtttgtcgcaggaattaggcattccctatgaagaagctgcggcgttcattcagaaatactttcaaagctatcccaaagttaaagcatggatcgagaagactctcgaagaaggccgcacacgtggttacgtagagaccttatttggacgtcgccgctatgttcccgatttaaacgctcgcgtgaaatctgtccgtgaagccgccgaacgcatggcgttcaacatgcctgtacagggcacggcagctgacctcatgaaacttgcaatggtgcgcctttttccacaattgcgtgaagttggtgcccgcatgctcttgcaggtccacgatgaactcttgttagaagcgccaaaagagcgtgcggaagaggtggcagccctcgcgaaagaggttatggaaggcgtgtggcccttagcggtgcctcttgaagtcgaagttggtattggcgaggattggctggctgccaaaggataatga

SEQ ID NO: 2614 - protein, 841 aa, synthetic construct
  REGION 1..841: note = Variant of DNA polymerase I from Thermus sp. strain 2.9
MHHHHHHGGSGVLPVFEPKGRVLLVDGHHLAYRNFFALKGLTTSRGEPVQGVYGFAKSLLKALKEDGDVVIVVFDAKAPSFRHEAYEAYKAGRAPTPEDFPRQLALMKELVDLLGLERLEVPGFEADDVLATLAKKAEREGYEVQILTADRDLFQLLSPRISVLHPEGHRITPEWLWEKYGLRPEQWVDFRALAGDPSDNIPGVKGIGEKTALKLLKEWGSLENLLKNLDQVKPESVREKILAHLEDLKLSRELSRVRTDLPLEVDFRRRREPDWEGLKAFLERLEFGSLLHEFGLLESPLPAEEAPWPPPEGAFLGYRLSRPEPMWAELLALAASAQGRVYRAEDPHGALRGLFEVRGLLAKDLAVVALREGLDLPPTDDPMLLAYLLDPSNTTPEGVARRYGGEWTEDAAKRALLAERLHANLLGRLQGEERLLWLYEEVEKPLSRVLAHMEATGVKLDVAYLEALSLEVAAEMRRLEEEVFRLAGHSFRLNSRDQLERVLFDELGLLPIGKTEKTGKRSTSAAVLEALREVHPIVDKILQYRELAKLKGTYIDPLPALVHPKTGRLHTRFNQTATATGRLSSSDPNLQNIPVRTPLGQKIRRAFVAEEGWRLVALDYSQIELRVLAHLSGDENLIRVFQEGKDIHTQTASWMFGLSAEAIDPLMRRAAKTINFGVLYGMSAFRLSQELGIPYEEAAAFIQKYFQSYPKVKAWIEKTLEEGRTRGYVETLFGRRRYVPDLNARVKSVREAAERMAFNMPVQGTAADLMKLAMVRLFPQLREVGARMLLQVHDELLLEAPKERAEEVAALAKEVMEGVWPLAVPLEVEVGIGEDWLAAKG

SEQ ID NO: 2615 - DNA, 2529 bp, synthetic construct
  misc_feature 1..2529: note = Variant of DNA polymerase I from Thermus sp. strain 2.9
  source 1..2529: mol_type = other DNA
atgcaccatcatcatcatcatggcggtagcggcgtgttaccggtgttcgagcctaaaggtcgcgtgcttctggttgatggccatcatctcgcgtatcgtaacttctttgccctgaaaggattaaccaccagccgtggcgagccggtacagggtgtctacggctttgcaaagtcgctcctgaaagctctgaaagaagacggtgatgtggtgattgttgtctttgatgcgaaagcgccaagttttcgccacgaagcgtacgaagcttacaaagccgggcgtgctccaacgccggaagactttcctcgccaattggcgcttatgaaggaattagtggatttgcttggcctcgaacgcttggaagttcccggtttcgaggcagacgacgtattagcgactctcgcaaagaaagccgaacgtgagggctatgaagtccagatcttgacagcagatcgcgatcttttccagcttttatctccgcgcatctcggtgttacacccggaagggcatcgtatcaccccggaatggctctgggagaaatatggtttgcgtcccgaacaatgggtggattttcgcgccttagcaggcgatccgagcgacaatattccgggagttaaaggtatcggcgagaagacggcgctcaagctccttaaagaatgggggtcgttggagaacttgcttaagaatttagatcaggtcaaaccagagtcagtgcgtgagaagattcttgcacacctcgaagacctcaaattaagccgcgaattgtcccgtgtacgcaccgatttgccgctcgaagttgatttccgtcgccgccgcgaacctgactgggagggtcttaaagcgtttttagagcgtcttgaatttggttcgctcttgcatgaattcggccttttagaaagcccgttaccagccgaagaagcaccttggccaccgcccgaaggcgcgtttttaggttaccgtttgagtcgcccggaaccgatgtgggccgaattattggctcttgcagcgtctgcccagggacgtgtgtatcgcgcggaagaccctcatggtgcgctccgcggcctcttcgaagtccgtggactccttgccaaagacttagctgttgttgcattgcgcgaaggtcttgatttacctccgactgatgatccaatgcttcttgcgtacctcttggacccgtcaaacacgacgcccgaaggcgtagcccgtcgttacggcggcgagtggaccgaagatgcagcgaaacgcgcgttattggccgaacgtttgcacgccaatttattaggacgtttgcaaggcgaggaacgtctcctctggctttacgaagaagtggagaaaccattgagtcgcgtgctcgcgcatatggaagctaccggtgtcaaattagacgtggcgtatttggaggctctcagccttgaagttgctgccgaaatgcgccgcttggaggaagaagtattccgtttagcaggccattcctttcgccttaattctcgcgatcagttagaacgtgtgttgttcgatgaacttggtctccctcctatcggcaagacagagaagaccggtaaacgtagcacttcagcggcggttttagaagctcttcgcgaagtccatcccattgtggacaagatcttgcagtaccgcgaactcgcgaaattgaaaggcacctatattgaccctcttccggcattagtccacccgaaaacgggacgcctccatacccgcttcaaccaaacagccacggcgaccggtcgtttgtcctcctctgatccaaaccttcagaatattccagtacgtaccccattgggccagaagatccgccgcgcgtttgtagctgaggagggttggcgtttagtggccctcgattatgatcaaattgaattacgtgtccttgcccatctttctggcgatgagaacctcatccgcgtgtttcaggaaggcaaagacattcacactcaaacggcaagctggatgtttggattatcagctgaagcgatcgatcctttgatgcgtcgtgcagcgaagaccatcaatttcggtgttctctacggtatgagtgcctttcgtttgtcgcaggaattaggcattccctatgaagaagctgcggcgttcattcagaaatactttcaaagctatcccaaagttaaagcatggatcgagaagactctcgaagaaggccgcacacgtggttacgtagagaccttatttggacgtcgccgctatgttcccgatttaaacgctcgcgtgaaatctgtccgtgaagccgccgaacgcatggcgttcaacatgcctgtacagggcacggcagctgacctcatgaaacttgcaatggtgcgcctttttccacaattgcgtgaagttggtgcccgcatgctcttgcaggtccacgatgaactcttgttagaagcgccaaaagagcgtgcggaagaggtggcagccctcgcgaaagaggttatggaaggcgtgtggcccttagcggtgcctcttgaagtcgaagttggtattggcgaggattggctggctgccaaaggataatga

SEQ ID NO: 2616 - protein, 841 aa, synthetic construct
  REGION 1..841: note = Variant of DNA polymerase I from Thermus sp. strain 2.9
MHHHHHHGGSGVLPVFEPKGRVLLVDGHHLAYRNFFALKGLTTSRGEPVQGVYGFAKSLLKALKEDGDVVIVVFDAKAPSFRHEAYEAYKAGRAPTPEDFPRQLALMKELVDLLGLERLEVPGFEADDVLATLAKKAEREGYEVQILTADRDLFQLLSPRISVLHPEGHRITPEWLWEKYGLRPEQWVDFRALAGDPSDNIPGVKGIGEKTALKLLKEWGSLENLLKNLDQVKPESVREKILAHLEDLKLSRELSRVRTDLPLEVDFRRRREPDWEGLKAFLERLEFGSLLHEFGLLESPLPAEEAPWPPPEGAFLGYRLSRPEPMWAELLALAASAQGRVYRAEDPHGALRGLFEVRGLLAKDLAVVALREGLDLPPTDDPMLLAYLLDPSNTTPEGVARRYGGEWTEDAAKRALLAERLHANLLGRLQGEERLLWLYEEVEKPLSRVLAHMEATGVKLDVAYLEALSLEVAAEMRRLEEEVFRLAGHSFRLNSRDQLERVLFDELGLPPIGKTEKTGKRSTSAAVLEALREVHPIVDKILQYRELAKLKGTYIDPLPALVHPKTGRLHTRFNQTATATGRLSSSDPNLQNIPVRTPLGQKIRRAFVAEEGWRLVALDYDQIELRVLAHLSGDENLIRVFQEGKDIHTQTASWMFGLSAEAIDPLMRRAAKTINFGVLYGMSAFRLSQELGIPYEEAAAFIQKYFQSYPKVKAWIEKTLEEGRTRGYVETLFGRRRYVPDLNARVKSVREAAERMAFNMPVQGTAADLMKLAMVRLFPQLREVGARMLLQVHDELLLEAPKERAEEVAALAKEVMEGVWPLAVPLEVEVGIGEDWLAAKG

SEQ ID NO: 2617 - DNA, 2529 bp, synthetic construct
  misc_feature 1..2529: note = Variant of DNA polymerase I from Thermus sp. strain 2.9
  source 1..2529: mol_type = other DNA
atgcaccatcatcatcatcatggcggtagcggcgtgttaccggtgttcgagcctaaaggtcgcgtgcttctggttgatggccatcatctcgcgtatcgtaacttctttgccctgaaaggattaaccaccagccgtggcgagccggtacagggtgtctacggctttgcaaagtcgctcctgaaagctctgaaagaagacggtgatgtggtgattgttgtctttgatgcgaaagcgccaagttttcgccacgaagcgtacgaagcttacaaagccgggcgtgctccaacgccggaagactttcctcgccaattggcgcttatgaaggaattagtggatttgcttggcctcgaacgcttggaagttcccggtttcgaggcagacgacgtattagcgactctcgcaaagaaagccgaacgtgagggctatgaagtccagatcttgacagcagatcgcgatcttttccagcttttatctccgcgcatctcggtgttacacccggaagggcatcgtatcaccccggaatggctctgggagaaatatggtttgcgtcccgaacaatgggtggattttcgcgccttagcaggcgatccgagcgacaatattccgggagttaaaggtatcggcgagaagacggcgctcaagctccttaaagaatgggggtcgttggagaacttgcttaagaatttagatcaggtcaaaccagagtcagtgcgtgagaagattcttgcacacctcgaagacctcaaattaagccgcgaattgtcccgtgtacgcaccgatttgccgctcgaagttgatttccgtcgccgccgcgaacctgactgggagggtcttaaagcgtttttagagcgtcttgaatttggttcgctcttgcatgaattcggccttttagaaagcccgttaccagccgaagaagcaccttggccaccgcccgaaggcgcgtttttaggttaccgtttgagtcgcccggaaccgatgtgggccgaattattggctcttgcagcgtctgcccagggacgtgtgtatcgcgcggaagaccctcatggtgcgctccgcggcctcttcgaagtccgtggactccttgccaaagacttagctgttgttgcattgcgcgaaggtcttgatttacctccgactgatgatccaatgcttcttgcgtacctcttggacccgtcaaacacgacgcccgaaggcgtagcccgtcgttacggcggcgagtggaccgaagatgcagcgaaacgcgcgttattggccgaacgtttgcacgccaatttattaggacgtttgcaaggcgaggaacgtctcctctggctttacgaagaagtggagaaaccattgagtcgcgtgctcgcgcatatggaagctaccggtgtcaaattagacgtggcgtatttggaggctctcagccttgaagttgctgccgaaatgcgccgcttggaggaagaagtattccgtttagcaggccattcctttcgccttaattctcgcgatcagttagaacgtgtgttgttcgatgaacttggtctccctcctatcggcaagacagagaagaccggtaaacgtagcacttcagcggcggttttagaagctcttcgcgaagtccatcccattgtggacaagatcttgcagtaccgcgaactcgcgaaattgaaaggcacctatattgaccctcttccggcattagtccacccgaaaacgggacgcctccatacccgcttcaaccaaacagccacggcgaccggtcgtttgtcctcctctgatccaaaccttcagaatattccagtacgtaccccattgggccagaagatccgccgcgcgtttgtagctgaggagggttggcgtttagtggccctcgattatagccaaattgaattacgtgtccttgcccatctttctggcgatgagaacctcatccgcgtgtttcaggaaggcaaagacattcacactcaaacggcaagctggatgtttggattaacggctgaagcgatcgatcctttgatgcgtcgtgcagcgaagaccatcaatttcggtgttctctacggtatgagtgcctttcgtttgtcgcaggaattaggcattccctatgaagaagctgcggcgttcattcagaaatactttcaaagctatcccaaagttaaagcatggatcgagaagactctcgaagaaggccgcacacgtggttacgtagagaccttatttggacgtcgccgctatgttcccgatttaaacgctcgcgtgaaatctgtccgtgaagccgccgaacgcatggcgttcaacatgcctgtacagggcacggcagctgacctcatgaaacttgcaatggtgcgcctttttccacaattgcgtgaagttggtgcccgcatgctcttgcaggtccacgatgaactcttgttagaagcgccaaaagagcgtgcggaagaggtggcagccctcgcgaaagaggttatggaaggcgtgtggcccttagcggtgcctcttgaagtcgaagttggtattggcgaggattggctggctgccaaaggataatga

SEQ ID NO: 2618 - protein, 841 aa, synthetic construct
  REGION 1..841: note = Variant of DNA polymerase I from Thermus sp. strain 2.9
MHHHHHHGGSGVLPVFEPKGRVLLVDGHHLAYRNFFALKGLTTSRGEPVQGVYGFAKSLLKALKEDGDVVIVVFDAKAPSFRHEAYEAYKAGRAPTPEDFPRQLALMKELVDLLGLERLEVPGFEADDVLATLAKKAEREGYEVQILTADRDLFQLLSPRISVLHPEGHRITPEWLWEKYGLRPEQWVDFRALAGDPSDNIPGVKGIGEKTALKLLKEWGSLENLLKNLDQVKPESVREKILAHLEDLKLSRELSRVRTDLPLEVDFRRRREPDWEGLKAFLERLEFGSLLHEFGLLESPLPAEEAPWPPPEGAFLGYRLSRPEPMWAELLALAASAQGRVYRAEDPHGALRGLFEVRGLLAKDLAVVALREGLDLPPTDDPMLLAYLLDPSNTTPEGVARRYGGEWTEDAAKRALLAERLHANLLGRLQGEERLLWLYEEVEKPLSRVLAHMEATGVKLDVAYLEALSLEVAAEMRRLEEEVFRLAGHSFRLNSRDQLERVLFDELGLPPIGKTEKTGKRSTSAAVLEALREVHPIVDKILQYRELAKLKGTYIDPLPALVHPKTGRLHTRFNQTATATGRLSSSDPNLQNIPVRTPLGQKIRRAFVAEEGWRLVALDYSQIELRVLAHLSGDENLIRVFQEGKDIHTQTASWMFGLTAEAIDPLMRRAAKTINFGVLYGMSAFRLSQELGIPYEEAAAFIQKYFQSYPKVKAWIEKTLEEGRTRGYVETLFGRRRYVPDLNARVKSVREAAERMAFNMPVQGTAADLMKLAMVRLFPQLREVGARMLLQVHDELLLEAPKERAEEVAALAKEVMEGVWPLAVPLEVEVGIGEDWLAAKG

SEQ ID NO: 2619 - DNA, 2529 bp, synthetic construct
  misc_feature 1..2529: note = Variant of DNA polymerase I from Thermus sp. strain 2.9
  source 1..2529: mol_type = other DNA
atgcaccatcatcatcatcatggcggtagcggcgtgttaccggtgttcgagcctaaaggtcgcgtgcttctggttgatggccatcatctcgcgtatcgtaacttctttgccctgaaatgtttaaccaccagccgtggcgagccggtacagggtgtctacggctttgcaaagtcgctcctgaaagctctgaaagaagacggtgatgtggtgattgttgtctttgatgcgaaagcgccaagttttcgccacgaagcgtacgaagcttacaaagccgggcgtgctccaacgccggaagactttcctcgccaattggcgcttatgaaggaattagtggatttgcttggcctcgaacgcttggaagttcccggtttcgaggcagacgacgtattagcgactctcgcaaagaaagccgaacgtgagggctatgaagtccagatcttgacagcagatcgcgatcttttccagcttttatctccgcgcatctcggtgttacacccggaagggcatcgtatcaccccggaatggctctgggagaaatatggtttgcgtcccgaacaatgggtggattttcgcgccttagcaggcgatccgagcgacaatattccgggagttaaaggtatcggcgagaagacggcgctcaagctccttaaagaatgggggtcgttggagaacttgcttaagaatttagatcaggtcaaaccagagtcagtgcgtgagaagattcttgcacacctcgaagacctcaaattaagccgcgaattgtcccgtgtacgcaccgatttgccgctcgaagttgatttccgtcgccgccgcgaacctgactgggagggtcttaaagcgtttttagagcgtcttgaatttggttcgctcttgcatgaattcggccttttagaaagcccgttaccagccgaagaagcaccttggccaccgcccgaaggcgcgtttttaggttaccgtttgagtcgcccggaaccgatgtgggccgaattattggctcttgcagcgtctgcccagggacgtgtgtatcgcgcggaagaccctcatggtgcgctccgcggcctcttcgaagtccgtggactccttgccaaagacttagctgttgttgcattgcgcgaaggtcttgatttacctccgactgatgatccaatgcttcttgcgtacctcttggacccgtcaaacacgacgcccgaaggcgtagcccgtcgttacggcggcgagtggaccgaagatgcagcgaaacgcgcgttattggccgaacgtttgcacgccaatttattaggacgtttgcaaggcgaggaacgtctcctctggctttacgaagaagtggagaaaccattgagtcgcgtgctcgcgcatatggaagctaccggtgtcaaattagacgtggcgtatttggaggctctcagccttgaagttgctgccgaaatgcgccgcttggaggaagaagtattccgtttagcaggccattcctttcgccttaattctcgcgatcagttagaacgtgtgttgttcgatgaacttggtctccctcctatcggcaagacagagaagaccggtaaacgtagcacttcagcggcggttttagaagctcttcgcgaagtccatcccattgtggacaagatcttgcagtaccgcgaactcgcgaaattgaaaggcacctatattgaccctcttccggcattagtccacccgaaaacgggacgcctccatacccgcttcaaccaaacagccacggcgaccggtcgtttgtcctcctctgatccaaaccttcagaatattccagtacgtaccccattgggccagaagatccgccgcgcgtttgtagctgaggagggttggcgtttagtggccctcgattatagccaaattgaattacgtgtccttgcccatctttctggcgatgagaacctcatccgcgtgtttcaggaaggcaaagacattcacactcaaacggcaagctggatgtttggattatcagctgaagcgatcgatcctttgatgcgtcgtgcagcgaagaccatcaatttcggtgttctctacggtatgagtgcctttcgtttgtcgcaggaattaggcattccctatgaagaagctgcggcgttcattcagaaatactttcaaagctatcccaaagttaaagcatggatcgagaagactctcgaagaaggccgcacacgtggttacgtagagaccttatttggacgtcgccgctatgttcccgatttaaacgctcgcgtgaaatctgtccgtgaagccgccgaacgcatggcgttcaacatgcctgtacagggcacggcagctgacctcatgaaacttgcaatggtgcgcctttttccacaattgcgtgaagttggtgcccgcatgctcttgcaggtccacgatgaactcttgttagaagcgccaaaagagcgtgcggaagaggtggcagccctcgcgaaagaggttatggaaggcgtgtggcccttagcggtgcctcttgaagtcgaagttggtattggcgaggattggctggctgccaaaggataatga

SEQ ID NO: 2620 - protein, 841 aa, synthetic construct
  REGION 1..841: note = Variant of DNA polymerase I from Thermus sp. strain 2.9
MHHHHHHGGSGVLPVFEPKGRVLLVDGHHLAYRNFFALKCLTTSRGEPVQGVYGFAKSLLKALKEDGDVVIVVFDAKAPSFRHEAYEAYKAGRAPTPEDFPRQLALMKELVDLLGLERLEVPGFEADDVLATLAKKAEREGYEVQILTADRDLFQLLSPRISVLHPEGHRITPEWLWEKYGLRPEQWVDFRALAGDPSDNIPGVKGIGEKTALKLLKEWGSLENLLKNLDQVKPESVREKILAHLEDLKLSRELSRVRTDLPLEVDFRRRREPDWEGLKAFLERLEFGSLLHEFGLLESPLPAEEAPWPPPEGAFLGYRLSRPEPMWAELLALAASAQGRVYRAEDPHGALRGLFEVRGLLAKDLAVVALREGLDLPPTDDPMLLAYLLDPSNTTPEGVARRYGGEWTEDAAKRALLAERLHANLLGRLQGEERLLWLYEEVEKPLSRVLAHMEATGVKLDVAYLEALSLEVAAEMRRLEEEVFRLAGHSFRLNSRDQLERVLFDELGLPPIGKTEKTGKRSTSAAVLEALREVHPIVDKILQYRELAKLKGTYIDPLPALVHPKTGRLHTRFNQTATATGRLSSSDPNLQNIPVRTPLGQKIRRAFVAEEGWRLVALDYSQIELRVLAHLSGDENLIRVFQEGKDIHTQTASWMFGLSAEAIDPLMRRAAKTINFGVLYGMSAFRLSQELGIPYEEAAAFIQKYFQSYPKVKAWIEKTLEEGRTRGYVETLFGRRRYVPDLNARVKSVREAAERMAFNMPVQGTAADLMKLAMVRLFPQLREVGARMLLQVHDELLLEAPKERAEEVAALAKEVMEGVWPLAVPLEVEVGIGEDWLAAKG

SEQ ID NO: 2621 - DNA, 2529 bp, synthetic construct
  misc_feature 1..2529: note = Variant of DNA polymerase I from Thermus sp. strain 2.9
  source 1..2529: mol_type = other DNA
atgcaccatcatcatcatcatggcggtagcggcgtgttaccggtgttcgagcctaaaggtcgcgtgcttctggttgatggccatcatctcgcgtatcgtaacttctttgccctgaaaggattaaccaccagccgtggcgagccggtacagggtgtctacggctttgcaaagtcgctcctgaaagctctgaaagaagacggtgatgtggtgattgttgtctttgatgcgaaagcgccaagttttcgccacgaagcgtacgaagcttacaaagccgggcgtgctccaacgccggaagactttcctcgccaattggcgcttatgaaggaattagtggatttgcttggcctcgaacgcttggaagttcccggtttcgaggcagacgacgtattagcgactctcgcaaagaaagccgaacgtgagggctatgaagtccagatcttgacagcagatcgcgatcttttccagcttttatctccgcgcatctcggtgttacacccggaagggcatcgtatcaccccggaatggctctgggagaaatatggtttgcgtcccgaacaatgggtggattttcgcgccttagcaggcgatccgagcgacaatattccgggagttaaaggtatcggcgagaagacggcgctcaagctccttaaagaatgggggtcgttggagaacttgcttaagaatttagatcaggtcaaaccagagtcagtgcgtgagaagattcttgcacacctcgaagacctcaaattaagccgcgaattgtcccgtgtacgcaccgatttgccgctcgaagttgatttccgtcgccgccgcgaacctgactgggagggtcttaaagcgtttttagagcgtcttgaatttggttcgctcttgcatgaattcggccttttagaaagcccgttaccagccgaagaagcaccttggccaccgcccgaaggcgcgtttttaggttaccgtttgagtcgcccggaaccgatgtgggccgaattattggctcttgcagcgtctgcccagggacgtgtgtatcgcgcggaagaccctcatggtggtctccgcggcctcttcgaagtccgtggactccttgccaaagacttagctgttgttgcattgcgcgaaggtcttgatttacctccgactgatgatccaatgcttcttgcgtacctcttggacccgtcaaacacgacgcccgaaggcgtagcccgtcgttacggcggcgagtggaccgaagatgcagcgaaacgcgcgttattggccgaacgtttgcacgccaatttattaggacgtttgcaaggcgaggaacgtctcctctggctttacgaagaagtggagaaaccattgagtcgcgtgctcgcgcatatggaagctaccggtgtcaaattagacgtggcgtatttggaggctctcagccttgaagttgctgccgaaatgcgccgcttggaggaagaagtattccgtttagcaggccattcctttcgccttaattctcgcgatcagttagaacgtgtgttgttcgatgaacttggtctccctcctatcggcaagacagagaagaccggtaaacgtagcacttcagcggcggttttagaagctcttcgcgaagtccatcccattgtggacaagatcttgcagtaccgcgaactcgcgaaattgaaaggcacctatattgaccctcttccggcattagtccacccgaaaacgggacgcctccatacccgcttcaaccaaacagccacggcgaccggtcgtttgtcctcctctgatccaaaccttcagaatattccagtacgtaccccattgggccagaagatccgccgcgcgtttgtagctgaggagggttggcgtttagtggccctcgattatagccaaattgaattacgtgtccttgcccatctttctggcgatgagaacctcatccgcgtgtttcaggaaggcaaagacattcacactcaaacggcaagctggatgtttggattatcagctgaagcgatcgatcctttgatgcgtcgtgcagcgaagaccatcaatttcggtgttctctacggtatgagtgcctttcgtttgtcgcaggaattaggcattccctatgaagaagctgcggcgttcattcagaaatactttcaaagctatcccaaagttaaagcatggatcgagaagactctcgaagaaggccgcacacgtggttacgtagagaccttatttggacgtcgccgctatgttcccgatttaaacgctcgcgtgaaatctgtccgtgaagccgccgaacgcatggcgttcaacatgcctgtacagggcacggcagctgacctcatgaaacttgcaatggtgcgcctttttccacaattgcgtgaagttggtgcccgcatgctcttgcaggtccacgatgaactcttgttagaagcgccaaaagagcgtgcggaagaggtggcagccctcgcgaaagaggttatggaaggcgtgtggcccttagcggtgcctcttgaagtcgaagttggtattggcgaggattggctggctgccaaaggataatga

SEQ ID NO: 2622 - protein, 841 aa, synthetic construct
  REGION 1..841: note = Variant of DNA polymerase I from Thermus sp. strain 2.9
MHHHHHHGGSGVLPVFEPKGRVLLVDGHHLAYRNFFALKGLTTSRGEPVQGVYGFAKSLLKALKEDGDVVIVVFDAKAPSFRHEAYEAYKAGRAPTPEDFPRQLALMKELVDLLGLERLEVPGFEADDVLATLAKKAEREGYEVQILTADRDLFQLLSPRISVLHPEGHRITPEWLWEKYGLRPEQWVDFRALAGDPSDNIPGVKGIGEKTALKLLKEWGSLENLLKNLDQVKPESVREKILAHLEDLKLSRELSRVRTDLPLEVDFRRRREPDWEGLKAFLERLEFGSLLHEFGLLESPLPAEEAPWPPPEGAFLGYRLSRPEPMWAELLALAASAQGRVYRAEDPHGGLRGLFEVRGLLAKDLAVVALREGLDLPPTDDPMLLAYLLDPSNTTPEGVARRYGGEWTEDAAKRALLAERLHANLLGRLQGEERLLWLYEEVEKPLSRVLAHMEATGVKLDVAYLEALSLEVAAEMRRLEEEVFRLAGHSFRLNSRDQLERVLFDELGLPPIGKTEKTGKRSTSAAVLEALREVHPIVDKILQYRELAKLKGTYIDPLPALVHPKTGRLHTRFNQTATATGRLSSSDPNLQNIPVRTPLGQKIRRAFVAEEGWRLVALDYSQIELRVLAHLSGDENLIRVFQEGKDIHTQTASWMFGLSAEAIDPLMRRAAKTINFGVLYGMSAFRLSQELGIPYEEAAAFIQKYFQSYPKVKAWIEKTLEEGRTRGYVETLFGRRRYVPDLNARVKSVREAAERMAFNMPVQGTAADLMKLAMVRLFPQLREVGARMLLQVHDELLLEAPKERAEEVAALAKEVMEGVWPLAVPLEVEVGIGEDWLAAKG

SEQ ID NO: 2623 - DNA, 2529 bp, synthetic construct
  misc_feature 1..2529: note = Variant of DNA polymerase I from Thermus sp. strain 2.9
  source 1..2529: mol_type = other DNA
atgcaccatcatcatcatcatggcggtagcggcgtgttaccggtgttcgagcctaaaggtcgcgtgcttctggttgatggccatcatctcgcgtatcgtaacttctttgccctgaaaggattaaccaccagccgtggcgagccggtacagggtgtctacggctttgcaaagtcgctcctgaaagctctgaaagaagacggtgatgtggtgattgttgtctttgatgcgaaagcgccaagttttcgccacgaagcgtacgaagcttacaaagccgggcgtgctccaacgccggaagactttcctcgccaattggcgcttatgaaggaattagtggatttgcttggcctcgaacgcttggaagttcccggtttcgaggcagacgacgtattagcgactctcgcaaagaaagccgaacgtgagggctatgaagtccagatcttgacagcagatcgcgatcttttccagcttttatctccgcgcatctcggtgttacacccggaagggcatcgtatcaccccggaatggctctgggagaaatatggtttgcgtcccgaacaatgggtggattttcgcgccttagcaggcgatccgagcgacaatattccgggagttaaaggtatcggcgagaagacggcgctcaagctccttaaagaatgggggtcgttggagaacttgcttaagaatttagatcaggtcaaaccagagtcagtgcgtgagaagattcttgcacacctcgaagacctcaaattaagccgcgaattgtcccgtgtacgcaccgatttgccgctcgaagttgatttccgtcgccgccgcgaacctgactgggagggtcttaaagcgtttttagagcgtcttgaatttggttcgctcttgcatgaattcggccttttagaaagcccgttaccagccgaagaagcaccttggccaccgcccgaaggcgcgtttttaggttaccgtttgagtcgcccggaaccgatgtgggccgaattattggctcttgcagcgtctgcccagggacgtgtgtatcgcgcggaagaccctcatggtgcgctccgcggcctcttcgaagtccgtggactccttgccaaagacttagctgttgttgcattgcgcgaaggtcttgatttacctccgactgatgatccaatgcttcttgcgtacctcttggacccgtcaaacacgacgcccgaaggcgtagcccgtcgttacggcggcgagtggaccgaagatgcagcgaaacgcgcgttattggccgaacgtttgcacgccaatttattaggacgtttgcaaggcgaggaacgtctcctctggctttacgaagaagtggagaaaccattgagtcgcgtgctcgcgcatatggaagctaccggtgtcaaattagacgtggcgtatttggaggctctcagccttgaagttgctgccgaaatgcgccgcttggaggaagaagtattccgtttagcaggccattcctttcgccttaattctcgcgatcagttagaacgtgtgttgttcgatgaacttggtctccctcctatcggcaagacagagaagaccggtaaacgtagcacttcagcggcggttttagaaacgcttcgcgaagtccatcccattgtggacaagatcttgcagtaccgcgaactcgcgaaattgaaaggcacctatattgaccctcttccggcattagtccacccgaaaacgggacgcctccatacccgcttcaaccaaacagccacggcgaccggtcgtttgtcctcctctgatccaaaccttcagaatattccagtacgtaccccattgggccagaagatccgccgcgcgtttgtagctgaggagggttggcgtttagtggccctcgattatagccaaattgaattacgtgtccttgcccatctttctggcgatgagaacctcatccgcgtgtttcaggaaggcaaagacattcacactcaaacggcaagctggatgtttggattatcagctgaagcgatcgatcctttgatgcgtcgtgcagcgaagaccatcaatttcggtgttctctacggtatgagtgcctttcgtttgtcgcaggaattaggcattccctatgaagaagctgcggcgttcattcagaaatactttcaaagctatcccaaagttaaagcatggatcgagaagactctcgaagaaggccgcacacgtggttacgtagagaccttatttggacgtcgccgctatgttcccgatttaaacgctcgcgtgaaatctgtccgtgaagccgccgaacgcatggcgttcaacatgcctgtacagggcacggcagctgacctcatgaaacttgcaatggtgcgcctttttccacaattgcgtgaagttggtgcccgcatgctcttgcaggtccacgatgaactcttgttagaagcgccaaaagagcgtgcggaagaggtggcagccctcgcgaaagaggttatggaaggcgtgtggcccttagcggtgcctcttgaagtcgaagttggtattggcgaggattggctggctgccaaaggataatga

SEQ ID NO: 2624 - protein, 841 aa, synthetic construct
  REGION 1..841: note = Variant of DNA polymerase I from Thermus sp. strain 2.9
MHHHHHHGGSGVLPVFEPKGRVLLVDGHHLAYRNFFALKGLTTSRGEPVQGVYGFAKSLLKALKEDGDVVIVVFDAKAPSFRHEAYEAYKAGRAPTPEDFPRQLALMKELVDLLGLERLEVPGFEADDVLATLAKKAEREGYEVQILTADRDLFQLLSPRISVLHPEGHRITPEWLWEKYGLRPEQWVDFRALAGDPSDNIPGVKGIGEKTALKLLKEWGSLENLLKNLDQVKPESVREKILAHLEDLKLSRELSRVRTDLPLEVDFRRRREPDWEGLKAFLERLEFGSLLHEFGLLESPLPAEEAPWPPPEGAFLGYRLSRPEPMWAELLALAASAQGRVYRAEDPHGALRGLFEVRGLLAKDLAVVALREGLDLPPTDDPMLLAYLLDPSNTTPEGVARRYGGEWTEDAAKRALLAERLHANLLGRLQGEERLLWLYEEVEKPLSRVLAHMEATGVKLDVAYLEALSLEVAAEMRRLEEEVFRLAGHSFRLNSRDQLERVLFDELGLPPIGKTEKTGKRSTSAAVLETLREVHPIVDKILQYRELAKLKGTYIDPLPALVHPKTGRLHTRFNQTATATGRLSSSDPNLQNIPVRTPLGQKIRRAFVAEEGWRLVALDYSQIELRVLAHLSGDENLIRVFQEGKDIHTQTASWMFGLSAEAIDPLMRRAAKTINFGVLYGMSAFRLSQELGIPYEEAAAFIQKYFQSYPKVKAWIEKTLEEGRTRGYVETLFGRRRYVPDLNARVKSVREAAERMAFNMPVQGTAADLMKLAMVRLFPQLREVGARMLLQVHDELLLEAPKERAEEVAALAKEVMEGVWPLAVPLEVEVGIGEDWLAAKG

SEQ ID NO: 2625 - DNA, 2529 bp, synthetic construct
  misc_feature 1..2529: note = Variant of DNA polymerase I from Thermus sp. strain 2.9
  source 1..2529: mol_type = other DNA
atgcaccatcatcatcatcatggcggtagcggcgtgttaccggtgttcgagcctaaaggtcgcgtgcttctggttgatggccatcatctcgcgtatcgtaacttctttgccctgaaaggattaaccaccagccgtggcgagccggtacagggtgtctacggctttgcaaagtcgctcctgaaagctctgaaagaagacggtgatgtggtgattgttgtctttgatgcgaaagcgccaagttttcgccacgaagcgtacgaagcttacaaagccgggcgtgctccaacgccggaagactttcctcgccaattggcgcttatgaaggaattagtggatttgcttggcctcgaacgcttggaagttcccggtttcgaggcagacgacgtattagcgactctcgcaaagaaagccgaacgtgagggctatgaagtccagatcttgacagcagatcgcgatcttttccagcttttatctccgcgcatctcggtgttacacccggaagggcatcgtatcaccccggaatggctctgggagaaatatggtttgcgtcccgaacaatgggtggattttcgcgccttagcaggcgatccgagcgacaatattccgggagttaaaggtatcggcgagaagacggcgctcaagctccttaaagaatgggggtcgttggagaacttgcttaagaatttagatcaggtcaaaccagagtcagtgcgtgagaagattcttgcacacctcgaagacctcaaattaagccgcgaattgtcccgtgtacgcaccgatttgccgctcgaagttgatttccgtcgccgccgcgaacctgactgggagggtcttaaagcgtttttagagcgtcttgaatttggttcgctcttgcatgaattcggccttttagaaagcccgttaccagccgaagaagcaccttggccaccgcccgaaggcgcgtttttaggttaccgtttgagtcgcccggaaccgatgtgggccgaattattggctcttgcagcgtctgcccagggacgtgtgtatcgcgcggaagaccctcatggtgcgctccgcggcctcttcgaagtccgtggactccttgccaaagacttagctgttgttgcattgcgcgaaggtcttgatttacctccgactgatgatccaatgcttcttgcgtacctcttggacccgtcaaacacgacgcccgaaggcgtagcccgtcgttacggcggcgagtggaccgaagatgcagcgaaacgcgcgttattggccgaacgtttgcacgccaatttattaggacgtttgcaaggcgaggaacgtctcctctggctttacgaagaagtggagaaaccattgagtcgcgtgctcgcgcatatggaagctaccggtgtcaaattagacgtggcgtatttggaggctctcagccttgaagttgctgccgaaatgcgccgcttggaggaagaagtattccgtttagcaggccattcctttcgccttaattctcgcgatcagttagaacgtgtgttgttcgatgaacttggtctccctcctatcggcaagacagagaagaccggtaaacgtagcacttcagcggcggttttagaagctcttcgcgaagtccatcccattgtggacaagatcttgcagtaccgcgaactcgcgaaattgaaaggccagtatattgaccctcttccggcattagtccacccgaaaacgggacgcctccatacccgcttcaaccaaacagccacggcgaccggtcgtttgtcctcctctgatccaaaccttcagaatattccagtacgtaccccattgggccagaagatccgccgcgcgtttgtagctgaggagggttggcgtttagtggccctcgattatagccaaattgaattacgtgtccttgcccatctttctggcgatgagaacctcatccgcgtgtttcaggaaggcaaagacattcacactcaaacggcaagctggatgtttggattatcagctgaagcgatcgatcctttgatgcgtcgtgcagcgaagaccatcaatttcggtgttctctacggtatgagtgcctttcgtttgtcgcaggaattaggcattccctatgaagaagctgcggcgttcattcagaaatactttcaaagctatcccaaagttaaagcatggatcgagaagactctcgaagaaggccgcacacgtggttacgtagagaccttatttggacgtcgccgctatgttcccgatttaaacgctcgcgtgaaatctgtccgtgaagccgccgaacgcatggcgttcaacatgcctgtacagggcacggcagctgacctcatgaaacttgcaatggtgcgcctttttccacaattgcgtgaagttggtgcccgcatgctcttgcaggtccacgatgaactcttgttagaagcgccaaaagagcgtgcggaagaggtggcagccctcgcgaaagaggttatggaaggcgtgtggcccttagcggtgcctcttgaagtcgaagttggtattggcgaggattggctggctgccaaaggataatga

SEQ ID NO: 2626 - protein, 841 aa, synthetic construct
  REGION 1..841: note = Variant of DNA polymerase I from Thermus sp. strain 2.9
MHHHHHHGGSGVLPVFEPKGRVLLVDGHHLAYRNFFALKGLTTSRGEPVQGVYGFAKSLLKALKEDGDVVIVVFDAKAPSFRHEAYEAYKAGRAPTPEDFPRQLALMKELVDLLGLERLEVPGFEADDVLATLAKKAEREGYEVQILTADRDLFQLLSPRISVLHPEGHRITPEWLWEKYGLRPEQWVDFRALAGDPSDNIPGVKGIGEKTALKLLKEWGSLENLLKNLDQVKPESVREKILAHLEDLKLSRELSRVRTDLPLEVDFRRRREPDWEGLKAFLERLEFGSLLHEFGLLESPLPAEEAPWPPPEGAFLGYRLSRPEPMWAELLALAASAQGRVYRAEDPHGALRGLFEVRGLLAKDLAVVALREGLDLPPTDDPMLLAYLLDPSNTTPEGVARRYGGEWTEDAAKRALLAERLHANLLGRLQGEERLLWLYEEVEKPLSRVLAHMEATGVKLDVAYLEALSLEVAAEMRRLEEEVFRLAGHSFRLNSRDQLERVLFDELGLPPIGKTEKTGKRSTSAAVLEALREVHPIVDKILQYRELAKLKGQYIDPLPALVHPKTGRLHTRFNQTATATGRLSSSDPNLQNIPVRTPLGQKIRRAFVAEEGWRLVALDYSQIELRVLAHLSGDENLIRVFQEGKDIHTQTASWMFGLSAEAIDPLMRRAAKTINFGVLYGMSAFRLSQELGIPYEEAAAFIQKYFQSYPKVKAWIEKTLEEGRTRGYVETLFGRRRYVPDLNARVKSVREAAERMAFNMPVQGTAADLMKLAMVRLFPQLREVGARMLLQVHDELLLEAPKERAEEVAALAKEVMEGVWPLAVPLEVEVGIGEDWLAAKG

SEQ ID NO: 2627 - DNA, 2529 bp, synthetic construct
  misc_feature 1..2529: note = Variant of DNA polymerase I from Thermus sp. strain 2.9
  source 1..2529: mol_type = other DNA
atgcaccatcatcatcatcatggcggtagcggcgtgttaccggtgttcgagcctaaaggtcgcgtgcttctggttgatggccatcatctcgcgtatcgtaacttctttgccctgaaaggattaaccaccagccgtggcgagccggtacagggtgtctacggctttgcaaagtcgctcctgaaagctctgaaagaagacggtgatgtggtgattgttgtctttgatgcgaaagcgccaagttttcgccacgaagcgtacgaagcttacaaagccgggcgtgctccaacgccggaagactttcctcgccaattggcgcttatgaaggaattagtggatttgcttggcctcgaacgcttggaagttcccggtttcgaggcagacgacgtattagcgactctcgcaaagaaagccgaacgtgagggctatgaagtccagatcttgacagcagatcgcgatcttttccagcttttatctccgcgcatctcggtgttacacccggaagggcatcgtatcaccccggaatggctctgggagaaatatggtttgcgtcccgaacaatgggtggattttcgcgccttagcaggcgatccgagcgacaatattccgggagttaaaggtatcggcgagaagacggcgctcaagctccttaaagaatgggggacgttggagaacttgcttaagaatttagatcaggtcaaaccagagtcagtgcgtgagaagattcttgcacacctcgaagacctcaaattaagccgcgaattgtcccgtgtacgcaccgatttgccgctcgaagttgatttccgtcgccgccgcgaacctgactgggagggtcttaaagcgtttttagagcgtcttgaatttggttcgctcttgcatgaattcggccttttagaaagcccgttaccagccgaagaagcaccttggccaccgcccgaaggcgcgtttttaggttaccgtttgagtcgcccggaaccgatgtgggccgaattattggctcttgcagcgtctgcccagggacgtgtgtatcgcgcggaagaccctcatggtgcgctccgcggcctcttcgaagtccgtggactccttgccaaagacttagctgttgttgcattgcgcgaaggtcttgatttacctccgactgatgatccaatgcttcttgcgtacctcttggacccgtcaaacacgacgcccgaaggcgtagcccgtcgttacggcggcgagtggaccgaagatgcagcgaaacgcgcgttattggccgaacgtttgcacgccaatttattaggacgtttgcaaggcgaggaacgtctcctctggctttacgaagaagtggagaaaccattgagtcgcgtgctcgcgcatatggaagctaccggtgtcaaattagacgtggcgtatttggaggctctcagccttgaagttgctgccgaaatgcgccgcttggaggaagaagtattccgtttagcaggccattcctttcgccttaattctcgcgatcagttagaacgtgtgttgttcgatgaacttggtctccctcctatcggcaagacagagaagaccggtaaacgtagcacttcagcggcggttttagaagctcttcgcgaagtccatcccattgtggacaagatcttgcagtaccgcgaactcgcgaaattgaaaggcacctatattgaccctcttccggcattagtccacccgaaaacgggacgcctccatacccgcttcaaccaaacagccacggcgaccggtcgtttgtcctcctctgatccaaaccttcagaatattccagtacgtaccccattgggccagaagatccgccgcgcgtttgtagctgaggagggttggcgtttagtggccctcgattatagccaaattgaattacgtgtccttgcccatctttctggcgatgagaacctcatccgcgtgtttcaggaaggcaaagacattcacactcaaacggcaagctggatgtttggattatcagctgaagcgatcgatcctttgatgcgtcgtgcagcgaagaccatcaatttcggtgttctctacggtatgagtgcctttcgtttgtcgcaggaattaggcattccctatgaagaagctgcggcgttcattcagaaatactttcaaagctatcccaaagttaaagcatggatcgagaagactctcgaagaaggccgcacacgtggttacgtagagaccttatttggacgtcgccgctatgttcccgatttaaacgctcgcgtgaaatctgtccgtgaagccgccgaacgcatggcgttcaacatgcctgtacagggcacggcagctgacctcatgaaacttgcaatggtgcgcctttttccacaattgcgtgaagttggtgcccgcatgctcttgcaggtccacgatgaactcttgttagaagcgccaaaagagcgtgcggaagaggtggcagccctcgcgaaagaggttatggaaggcgtgtggcccttagcggtgcctcttgaagtcgaagttggtattggcgaggattggctggctgccaaaggataatga

SEQ ID NO: 2628 - protein, 841 aa, synthetic construct
  REGION 1..841: note = Variant of DNA polymerase I from Thermus sp. strain 2.9
MHHHHHHGGSGVLPVFEPKGRVLLVDGHHLAYRNFFALKGLTTSRGEPVQGVYGFAKSLLKALKEDGDVVIVVFDAKAPSFRHEAYEAYKAGRAPTPEDFPRQLALMKELVDLLGLERLEVPGFEADDVLATLAKKAEREGYEVQILTADRDLFQLLSPRISVLHPEGHRITPEWLWEKYGLRPEQWVDFRALAGDPSDNIPGVKGIGEKTALKLLKEWGTLENLLKNLDQVKPESVREKILAHLEDLKLSRELSRVRTDLPLEVDFRRRREPDWEGLKAFLERLEFGSLLHEFGLLESPLPAEEAPWPPPEGAFLGYRLSRPEPMWAELLALAASAQGRVYRAEDPHGALRGLFEVRGLLAKDLAVVALREGLDLPPTDDPMLLAYLLDPSNTTPEGVARRYGGEWTEDAAKRALLAERLHANLLGRLQGEERLLWLYEEVEKPLSRVLAHMEATGVKLDVAYLEALSLEVAAEMRRLEEEVFRLAGHSFRLNSRDQLERVLFDELGLPPIGKTEKTGKRSTSAAVLEALREVHPIVDKILQYRELAKLKGTYIDPLPALVHPKTGRLHTRFNQTATATGRLSSSDPNLQNIPVRTPLGQKIRRAFVAEEGWRLVALDYSQIELRVLAHLSGDENLIRVFQEGKDIHTQTASWMFGLSAEAIDPLMRRAAKTINFGVLYGMSAFRLSQELGIPYEEAAAFIQKYFQSYPKVKAWIEKTLEEGRTRGYVETLFGRRRYVPDLNARVKSVREAAERMAFNMPVQGTAADLMKLAMVRLFPQLREVGARMLLQVHDELLLEAPKERAEEVAALAKEVMEGVWPLAVPLEVEVGIGEDWLAAKG

SEQ ID NO: 2629 - DNA, 2529 bp, synthetic construct
  misc_feature 1..2529: note = Variant of DNA polymerase I from Thermus sp. strain 2.9
  source 1..2529: mol_type = other DNA
atgcaccatcatcatcatcatggcggtagcggcgtgttaccggtgttcgagcctaaaggtcgcgtgcttctggttgatggccatcatctcgcgtatcgtaacttctttgccctgaaaggattaaccaccagccgtggcgagccggtacagggtgtctacggctttgcaaagtcgctcctgaaagctctgaaaaaagacggtgatgtggtgattgttgtctttgatgcgaaagcgccaagttttcgccacgaagcgtacgaagcttacaaagccgggcgtgctccaacgccggaagactttcctcgccaattggcgcttatgaaggaattagtggatttgcttggcctcgaacgcttggaagttcccggtttcgaggcagacgacgtattagcgactctcgcaaagaaagccgaacgtgagggctatgaagtccagatcttgacagcagatcgcgatcttttccagcttttatctccgcgcatctcggtgttacacccggaagggcatcgtatcaccccggaatggctctgggagaaatatggtttgcgtcccgaacaatgggtggattttcgcgccttagcaggcgatccgagcgacaatattccgggagttaaaggtatcggcgagaagacggcgctcaagctccttaaagaatgggggtcgttggagaacttgcttaagaatttagatcaggtcaaaccagagtcagtgcgtgagaagattcttgcacacctcgaagacctcaaattaagccgcgaattgtcccgtgtacgcaccgatttgccgctcgaagttgatttccgtcgccgccgcgaacctgactgggagggtcttaaagcgtttttagagcgtcttgaatttggttcgctcttgcatgaattcggccttttagaaagcccgttaccagccgaagaagcaccttggccaccgcccgaaggcgcgtttttaggttaccgtttgagtcgcccggaaccgatgtgggccgaattattggctcttgcagcgtctgcccagggacgtgtgtatcgcgcggaagaccctcatggtgcgctccgcggcctcttcgaagtccgtggactccttgccaaagacttagctgttgttgcattgcgcgaaggtcttgatttacctccgactgatgatccaatgcttcttgcgtacctcttggacccgtcaaacacgacgcccgaaggcgtagcccgtcgttacggcggcgagtggaccgaagatgcagcgaaacgcgcgttattggccgaacgtttgcacgccaatttattaggacgtttgcaaggcgaggaacgtctcctctggctttacgaagaagtggagaaaccattgagtcgcgtgctcgcgcatatggaagctaccggtgtcaaattagacgtggcgtatttggaggctctcagccttgaagttgctgccgaaatgcgccgcttggaggaagaagtattccgtttagcaggccgctcctttcgccttaattctcgcgatcagttagaacgtgtgttgttcgatgaacttggtctccctcctatcggcaagacagagaagaccggtaaacgtagcacttcagcggcggttttagaagctcttcgcgaagtccatcccattgtggacaagatcttggcgtaccgcgaactcgcgaaattgaaaggcacctatattgaccctcttccggcattagtccacccgaaaacgggacgcctccatacccgcttcaaccaaacagccacggcgaccggtcgtttgtcctcctctgatccaaaccttcagaatattccagtacgtaccccattgggccagaagatccgccgcgcgtttgtagctgaggagggttggcgtttagtggccctcgattatagccaaattgaattacgtgtccttgcccatctttctggcgatgagaacctcatccgcgtgtttcaggaaggcaaagacattcacactcaaacggcaagctggatgtttggactgtcagctgaagcgatcgatcctttgatgcgtcgtgcagcgaagaccatcaatttcggtgttctctacggtatgagtgcctttcgtttgtcgcaggaattaggcattccctatgaagaagctgcggcgttcattcagaaatactttcaaagctatcccaaagttaaagcatggatcgagaagactctcgaagaaggccgcacacgtggttacgtagagaccttatttggacgtcgccgctatgttcccgatttaaacgctcgcgtgaaatctgtccgtgaagccgccgaacgcatggcgttcaacatgcctgtacagggcacggcagctgacctcatgaaacttgcaatggtgcgcctttttccacaattgcgtgaagttggtgcccgcatgctcttgcaggtccacgatgaactcttgttagaagcgccaaaagagcgtgcggaagaggtggcagccctcgcgaaagaggttatggaaggcgtgtggcccttagcggtgcctcttgaagtcgaagttggtattggcgaggattggctggctgccaaaggataatga

SEQ ID NO: 2630 - protein, 841 aa, synthetic construct
  REGION 1..841: note = Variant of DNA polymerase I from Thermus sp. strain 2.9
MHHHHHHGGSGVLPVFEPKGRVLLVDGHHLAYRNFFALKGLTTSRGEPVQGVYGFAKSLLKALKKDGDVVIVVFDAKAPSFRHEAYEAYKAGRAPTPEDFPRQLALMKELVDLLGLERLEVPGFEADDVLATLAKKAEREGYEVQILTADRDLFQLLSPRISVLHPEGHRITPEWLWEKYGLRPEQWVDFRALAGDPSDNIPGVKGIGEKTALKLLKEWGSLENLLKNLDQVKPESVREKILAHLEDLKLSRELSRVRTDLPLEVDFRRRREPDWEGLKAFLERLEFGSLLHEFGLLESPLPAEEAPWPPPEGAFLGYRLSRPEPMWAELLALAASAQGRVYRAEDPHGALRGLFEVRGLLAKDLAVVALREGLDLPPTDDPMLLAYLLDPSNTTPEGVARRYGGEWTEDAAKRALLAERLHANLLGRLQGEERLLWLYEEVEKPLSRVLAHMEATGVKLDVAYLEALSLEVAAEMRRLEEEVFRLAGRSFRLNSRDQLERVLFDELGLPPIGKTEKTGKRSTSAAVLEALREVHPIVDKILAYRELAKLKGTYIDPLPALVHPKTGRLHTRFNQTATATGRLSSSDPNLQNIPVRTPLGQKIRRAFVAEEGWRLVALDYSQIELRVLAHLSGDENLIRVFQEGKDIHTQTASWMFGLSAEAIDPLMRRAAKTINFGVLYGMSAFRLSQELGIPYEEAAAFIQKYFQSYPKVKAWIEKTLEEGRTRGYVETLFGRRRYVPDLNARVKSVREAAERMAFNMPVQGTAADLMKLAMVRLFPQLREVGARMLLQVHDELLLEAPKERAEEVAALAKEVMEGVWPLAVPLEVEVGIGEDWLAAKG

SEQ ID NO: 2631 - DNA, 2529 bp, synthetic construct
  misc_feature 1..2529: note = Variant of DNA polymerase I from Thermus sp. strain 2.9
  source 1..2529: mol_type = other DNA
atgcaccatcatcatcatcatggcggtagcggcgtgttaccggtgttcgagcctaaaggtcgcgtgcttctggttgatggccatcatctcgcgtatcgtaacttctttgccctgaaaggattaaccaccagccgtggcgagccggtacagggtgtctacggctttgcaaagtcgctcctgaaagctctgaaagaagacggtgatgtggtgattgttgtctttgatgcgaaagcgccaagttttcgccacgaagcgtacgaagcttacaaagccgggcgtgctccaacgccggaagactttcctcgccaattggcgcttatgaaggaattagtggatttgcttggcctcgaacgcttggaagttcccggtttcgaggcagacgacgtattagcgactctcgcaaagaaagccgaacgtgagggctatgaagtccagatcttgacagcagatcgcgatcttttccagcttttatctccgcgcatctcggtgttacacccggaagggcatcgtatcaccccggaatggctctgggagaaatatggtttgcgtcccgaacaatgggtggattttcgcgccttagcaggcgatccgagcgacaatattccgggagttaaaggtatcggcgagaagacggcgctcaagctccttaaagaatgggggtcgttggagaacttgcttaagaatttagatcaggtcaaaccagagtcagtgcgtgagaagattcttgcacacctcgaagacctcaaattaagccgcgaattgtcccgtgtacgcaccgatttgccgctcgaagttgatttccgtggccgccgcgaacctgactgggagggtcttaaagcgtttttagagcgtcttgaatttggttcgctcttgcatgaattcggccttttagaaagcccgttaccagccgaagaagcaccttggccaccgcccgaaggcgcgtttttaggttaccgtttgagtcgcccggaaccgatgtgggccgaattactggctcttgcagcgtctgcccagggacgtgtgtatcgcgcggaagaccctcatggtgcgctccgcggcctcttcgaagtccgtggactccttgccaaagacttagctgttgttgcattgcgcgaaggtcttgatttacctccgactgatgatccaatgcttcttgcgtacctcttggacccgtcaaacacgacgcccgaaggcgtagcccgtcgttacggcggcgagtggaccgaagatgcagcgaaacgcgcgttattggccgaacgtttgcacgccaatttattaggacgtttgcaaggcgaggaacgtctcctctggctttacgaagaagtggagaaaccattgagtcgcgtgctcgcgcatatggaagctaccggtgtcaaattagacgtggcgtatttggaggctctcagccttgaagttgctgccgaaatgcgccgcttggaggaagaagtattccgtttagcaggccattcctttcgccttaattctcgcgatcagttagaacgtgtgttgttcgatgaacttggtctccctcctatcggcaagacagagaagaccggtaaacgtagcacttcagcggcggttttagaagctcttcgcgaagtccatcccattgtggacaagatcttgcaataccgcgaactcgcgaaattgaaaggcacctatattgaccctcttccggcattagtccacccgaaaacgggacgcctccatacccgcttcaaccaaacagccacggcgaccggtcgtttgtcctcctctgatccaaaccttcagaatattccagtacgtaccccattgggccagaagatccgccgcgcgtttgtagctgaggagggttggcgtttagtggccctcgattatagccaaattgaattacgtgtccttgcccatctttctggcgatgagaacctcatccgcgtgtttcaggaaggcaaagacattcacactcaaacggcaagctggatgtttggattatcagctgaagcgatcgatcctttgatgcgtcgtgcagcgaagaccatcaatttcggtgttctctacggtatgagtgcctttcgtttgtcgcaggaattaggcattccctatgaagaagctgcggcgttcattcagaaatactttcaaagctatcccaaagttaaagcatggatcgagaagactctcgaagaaggccgcacacgtggttacgtagagaccttatttggacgtcgccgctatgttcccgatttaaacgctcgcgtgaaatctgtccgtgaagccgccgaacgcatggcgttcaacatgcctgtacagggcacggcagctgacctcatgaaacttgcaatggtgcgcctttttccacaattgcgtgaagttggtgcccgcatgctcttgcaggtccacgatgaactcttgttagaagcgccaaaagagcgtgcggaagaggtggcagccctcgcgaaagaggttatggaaggcgtgtggcccttagcggtgcctcttgaagtcgaagttggtattggcgaggattggctggctgccaaaggataatga

SEQ ID NO: 2632 - protein, 841 aa, synthetic construct
  REGION 1..841: note = Variant of DNA polymerase I from Thermus sp. strain 2.9
MHHHHHHGGSGVLPVFEPKGRVLLVDGHHLAYRNFFALKGLTTSRGEPVQGVYGFAKSLLKALKEDGDVVIVVFDAKAPSFRHEAYEAYKAGRAPTPEDFPRQLALMKELVDLLGLERLEVPGFEADDVLATLAKKAEREGYEVQILTADRDLFQLLSPRISVLHPEGHRITPEWLWEKYGLRPEQWVDFRALAGDPSDNIPGVKGIGEKTALKLLKEWGSLENLLKNLDQVKPESVREKILAHLEDLKLSRELSRVRTDLPLEVDFRGRREPDWEGLKAFLERLEFGSLLHEFGLLESPLPAEEAPWPPPEGAFLGYRLSRPEPMWAELLALAASAQGRVYRAEDPHGALRGLFEVRGLLAKDLAVVALREGLDLPPTDDPMLLAYLLDPSNTTPEGVARRYGGEWTEDAAKRALLAERLHANLLGRLQGEERLLWLYEEVEKPLSRVLAHMEATGVKLDVAYLEALSLEVAAEMRRLEEEVFRLAGHSFRLNSRDQLERVLFDELGLPPIGKTEKTGKRSTSAAVLEALREVHPIVDKILQYRELAKLKGTYIDPLPALVHPKTGRLHTRFNQTATATGRLSSSDPNLQNIPVRTPLGQKIRRAFVAEEGWRLVALDYSQIELRVLAHLSGDENLIRVFQEGKDIHTQTASWMFGLSAEAIDPLMRRAAKTINFGVLYGMSAFRLSQELGIPYEEAAAFIQKYFQSYPKVKAWIEKTLEEGRTRGYVETLFGRRRYVPDLNARVKSVREAAERMAFNMPVQGTAADLMKLAMVRLFPQLREVGARMLLQVHDELLLEAPKERAEEVAALAKEVMEGVWPLAVPLEVEVGIGEDWLAAKG

SEQ ID NO: 2633 - DNA, 2529 bp, synthetic construct
  misc_feature 1..2529: note = Variant of DNA polymerase I from Thermus sp. strain 2.9
  source 1..2529: mol_type = other DNA
atgcaccatcatcatcatcatggcggtagcggcgtgttaccggtgttcgagcctaaaggtcgcgtgcttctggttgatggccatcatctcgcgtatcgtaacttctttgccctgaaaggattaaccaccagccgtggcgagccggtacagggtgtctacggctttgcaaagtcgctcctgaaagctctgaaagaagacggtgatgtggtgattgttgtctttgatgcgaaagcgccaagttttcgccacgaagcgtacgaagcttacaaagccgggcgtgctccaacgccggaagactttcctcgccaattggcgcttatgaaggaattagtggatttgcttggcctcgaacgcttggaagttcccggtttcgaggcagacgacgtattagcgactctcgcaaagaaagccgaacgtgagggctatgaagtccagatcttgacagcagatcgcgatcttttccagcttttatctccgcgcatctcggtgttacacccggaagggcatcgtatcaccccggaatggctctgggagaaatatggtttgcgtcccgaacaatgggtggattttcgcgccttagcaggcgatccgagcgacaatattccgggagttaaaggtatcggcgagaagacggcgctcaagctccttaaagaatgggggtcgttggagaacttgcttaagaatttagatcaggtcaaaccagagtcagtgcgtgagaagattcttgcacacctcgaagacctcaaattaagccgcgaattgtcccgtgtacgcaccgatttgccgctcgaagttgatttccgtcgccgccgcgaacctgactgggagggtcttaaagcgtttttagagcgtcttgaatttggttcgctcttgcatgaattcggccttttagaaagcccgttaccagccgaagaagcaccttggccaccgcccgaaggcgcgtttttaggttaccgtttgagtcgcccggaaccgatgtgggccgaattattggctcttgcagcgtctgcccagggacgtgtgtatcgcgcggaagaccctcatggtgcgctccgcggcctctgtgaagtccgtggactccttgccaaagacttagctgttgttgcattgcgcgaaggtcttgatttacctccgactgatgatccaatgcttcttgcgtacctcttggacccgtcaaacacgacgcccgaaggcgtagcccgtcgttacggcggcgagtggaccgaagatgcagcgaaacgcgcgttattggccgaacgtttgcacgccaatttattaggacgtttgcaaggcgaggaacgtctcctctggctttacgaagaagtggagaaaccattgagtcgcgtgctcgcgcatatggaagctaccggtgtcaaattagacgtggcgtatttggaggctctcagccttgaagttgctgccgaaatgcgccgcttggaggaagaagtattccgtttagcaggccattcctttcgccttaattctcgcgatcagttagaacgtgtgttgttcgatgaacttggtctccctcctatcggcaagacagagaagaccggtaaacgtagcacttcagcggcggttttagaagctcttcgcgaagtccatcccattgtggacaagatcttgcagtaccgcgaactcgcgaaattgaaaggcacctatattgaccctcttccggcattagtccacccgaaaacgggacgcctccatacccgcttcaaccaaacagccacggcgaccggtcgtttgtcctcctctgatccaaaccttcagaatattccagtacgtaccccattgggccagaagatccgccgcgcgtttgtagctgaggagggttggcgtttagtggccctcgattatagccaaattgaattacgtgtccttgcccatctttctggcgatgagaacctcatccgcgtgtttcaggaaggcaaagacattcacactcaaacggcaagctggatgtttggattatcagctgaagcgatcgatcctttgatgcgtcgtgcagcgaagaccatcaatttcggtgttctctacggtatgagtgcctttcgtttgtcgcaggaattaggcattccctatgaagaagctgcggcgttcattcagaaatactttcaaagctatcccaaagttaaagcatggatcgagaagactctcgaagaaggccgcacacgtggttacgtagagaccttatttggacgtcgccgctatgttcccgatttaaacgctcgcgtgaaatctgtccgtgaagccgccgaacgcatggcgttcaacatgcctgtacagggcacggcagctgacctcatgaaacttgcaatggtgcgcctttttccacaattgcgtgaagttggtgcccgcatgctcttgcaggtccacgatgaactcttgttagaagcgccaaaagagcgtgcggaagaggtggcagccctcgcgaaagaggttatggaaggcgtgtggcccttagcggtgcctcttgaagtcgaagttggtattggcgaggattggctggctgccaaaggataatga

SEQ ID NO: 2634 - protein, 841 aa, synthetic construct
  REGION 1..841: note = Variant of DNA polymerase I from Thermus sp. strain 2.9
MHHHHHHGGSGVLPVFEPKGRVLLVDGHHLAYRNFFALKGLTTSRGEPVQGVYGFAKSLLKALKEDGDVVIVVFDAKAPSFRHEAYEAYKAGRAPTPEDFPRQLALMKELVDLLGLERLEVPGFEADDVLATLAKKAEREGYEVQILTADRDLFQLLSPRISVLHPEGHRITPEWLWEKYGLRPEQWVDFRALAGDPSDNIPGVKGIGEKTALKLLKEWGSLENLLKNLDQVKPESVREKILAHLEDLKLSRELSRVRTDLPLEVDFRRRREPDWEGLKAFLERLEFGSLLHEFGLLESPLPAEEAPWPPPEGAFLGYRLSRPEPMWAELLALAASAQGRVYRAEDPHGALRGLCEVRGLLAKDLAVVALREGLDLPPTDDPMLLAYLLDPSNTTPEGVARRYGGEWTEDAAKRALLAERLHANLLGRLQGEERLLWLYEEVEKPLSRVLAHMEATGVKLDVAYLEALSLEVAAEMRRLEEEVFRLAGHSFRLNSRDQLERVLFDELGLPPIGKTEKTGKRSTSAAVLEALREVHPIVDKILQYRELAKLKGTYIDPLPALVHPKTGRLHTRFNQTATATGRLSSSDPNLQNIPVRTPLGQKIRRAFVAEEGWRLVALDYSQIELRVLAHLSGDENLIRVFQEGKDIHTQTASWMFGLSAEAIDPLMRRAAKTINFGVLYGMSAFRLSQELGIPYEEAAAFIQKYFQSYPKVKAWIEKTLEEGRTRGYVETLFGRRRYVPDLNARVKSVREAAERMAFNMPVQGTAADLMKLAMVRLFPQLREVGARMLLQVHDELLLEAPKERAEEVAALAKEVMEGVWPLAVPLEVEVGIGEDWLAAKG

SEQ ID NO: 2635 - DNA, 2529 bp, synthetic construct
  misc_feature 1..2529: note = Variant of DNA polymerase I from Thermus sp. strain 2.9
  source 1..2529: mol_type = other DNA
atgcaccatcatcatcatcatggcggtagcggcgtgttaccggtgttcgagcctaaaggtcgcgtgcttctggttgatggccatcatctcgcgtatcgtaacttctttgccctgaaaggattaaccaccagccgtggcgagccggtacagggtgtctacggctttgcaaagtcgctcctgaaagctctgaaagaagacggtgatgtggtgattgttgtctttgatgcgaaagcgccaagttttcgccacgaagcgtacgaagcttacaaagccgggcgtgctccaacgccggaagactttcctcgccaattggcgcttatgaaggaattagtggatttgcttggcctcgaacgcttggaagttcccggtttcgaggcagacgacgtattagcgactctcgcaaagaaagccgaacgtgagggctatgaagtccagatcttgacagcagatcgcgatcttttccagcttttatctccgcgcatctcggtgttacacccggaagggcatcgtatcaccccggaatggctctgggagaaatatggtttgcgtcccgaacaatgggtggattttcgcgccttagcaggcgatccgagcgacaatattccgggagttaaaggtatcggcgagaagacggcgctcaagctccttaaagaatgggggtcgttggagaacttgcttaagaatttagatcaggtcaaaccagagtcagtgcgtgagaagattcttgcacacctcgaagacctcaaattaagccgcgaattgtcccgtgtacgcaccgatttgccgctcgaagttgatttccgtcgccgccgcgaacctgactgggagggtcttaaagcgtttttagagcgtcttgaatttggttcgctcttgcatgaattcggccttttagaaagcccgttaccagccgaagaagcaccttggccaccgcccgaaggcgcgtttttaggttaccgtttgagtcgcccggaaccgatgtgggccgaattattggctcttgcagcgtctgcccagggacgtgtgtatcgcgcggaagaccctcatggtgcgctccgcggcctcttcgaagtccgtggactccttgccaaagacttagctgttgttgcattgcgcgaaggtcttgatttacctccgactgatgatccaatgcttcttgcgtacctcttggacccgtcaaacacgacgcccgaaggcgtagcccgtcgttacggcggcgagtggaccgaagatgcagcgaaacgcgcgttattggccgaacgtttgcacgccaatttattaggacgtttgcaaggcgaggaacgtctcctctggctttacgaagaagtggagaaaccattgagtcgcgtgctcgcgcatatggaagctaccggtgtcaaattagacgtggcgtatttggaggctctcagccttgaagttgctgccgaaatgcgccgcttggaggaagaagtattccgtttagcaggccattcctttcgccttaattctcgcgatcagttagaacgtgtgttgttcgatgaacttggtctccctcctatcggcaagacagagaagaccggtaaacgtagcacttcagcggcggttttagaagctcttcgcgaagtccatcccattgtggacaagatcttgcagtaccgcgaactcgcgaaattgaaaggcacctatattgaccctcttccggcattagtccacccgaaaacgggacgcctccatacccgcttcaaccaaacagccacggcgaccggtcgtttgtcctcctctgatccaaaccttcagaatattccagtacgtaccccattgggccagaagatccgccgcgcgtttgtagctgaggagggttggcgtttagtggccctcgattatagccaaattgaattacgtgtccttgcccatctttctggcgatgagaacctcatccgcgtgtttcaggaaggcaaagacattcacactcaaacggcaagctggatgtttggattatcagctgaagcgatcgatcctttgatgcgtcgtgcagcgaagaccatcaatttcggtgttctctacggtatgagtgcctttcgtttgtcgcaggaattaggcattccctatgaagaagctgcggcgttcattcagaaatactttcaaagctatcccaaagttaaagcatggatcgagaagactctcgaagaaggccgcacacgtggttacgtagagaccttatttggacgtcgccgctatgttcccgatttaaacgctcgcgtgaaatctaagcgtgaagccgccgaacgcatggcgttcaacatgcctgtacagggcacggcagctgacctcatgaaacttgcaatggtgcgcctttttccacaattgcgtgaagttggtgcccgcatgctcttgcaggtccacgatgaactcttgttagaagcgccaaaagagcgtgcggaagaggtggcagccctcgcgaaagaggttatggaaggcgtgtggcccttagcggtgcctcttgaagtcgaagttggtattggcgaggattggctggctgccaaaggataatga

SEQ ID NO: 2636 - protein, 841 aa, synthetic construct
  REGION 1..841: note = Variant of DNA polymerase I from Thermus sp. strain 2.9
MHHHHHHGGSGVLPVFEPKGRVLLVDGHHLAYRNFFALKGLTTSRGEPVQGVYGFAKSLLKALKEDGDVVIVVFDAKAPSFRHEAYEAYKAGRAPTPEDFPRQLALMKELVDLLGLERLEVPGFEADDVLATLAKKAEREGYEVQILTADRDLFQLLSPRISVLHPEGHRITPEWLWEKYGLRPEQWVDFRALAGDPSDNIPGVKGIGEKTALKLLKEWGSLENLLKNLDQVKPESVREKILAHLEDLKLSRELSRVRTDLPLEVDFRRRREPDWEGLKAFLERLEFGSLLHEFGLLESPLPAEEAPWPPPEGAFLGYRLSRPEPMWAELLALAASAQGRVYRAEDPHGALRGLFEVRGLLAKDLAVVALREGLDLPPTDDPMLLAYLLDPSNTTPEGVARRYGGEWTEDAAKRALLAERLHANLLGRLQGEERLLWLYEEVEKPLSRVLAHMEATGVKLDVAYLEALSLEVAAEMRRLEEEVFRLAGHSFRLNSRDQLERVLFDELGLPPIGKTEKTGKRSTSAAVLEALREVHPIVDKILQYRELAKLKGTYIDPLPALVHPKTGRLHTRFNQTATATGRLSSSDPNLQNIPVRTPLGQKIRRAFVAEEGWRLVALDYSQIELRVLAHLSGDENLIRVFQEGKDIHTQTASWMFGLSAEAIDPLMRRAAKTINFGVLYGMSAFRLSQELGIPYEEAAAFIQKYFQSYPKVKAWIEKTLEEGRTRGYVETLFGRRRYVPDLNARVKSKREAAERMAFNMPVQGTAADLMKLAMVRLFPQLREVGARMLLQVHDELLLEAPKERAEEVAALAKEVMEGVWPLAVPLEVEVGIGEDWLAAKG

SEQ ID NO: 2637 - DNA, 2529 bp, synthetic construct
  misc_feature 1..2529: note = Variant of DNA polymerase I from Thermus sp. strain 2.9
  source 1..2529: mol_type = other DNA
atgcaccatcatcatcatcatggcggtagcggcgtgttaccggtgttcgagcctaaaggtcgcgtgcttctggttgatggccatcatctcgcgtatcgtaacttctttgccctgaaaggattaaccaccagccgtggcgagccggtacagggtgtctacggctttgcaaagtcgctcctgaaagctctgaaagaagacggtgatgtggtgattgttgtctttgatgcgaaagcgccaagttttcgccacgaagcgtacgaagcttacaaagccgggcgtcgtccaacgccggaagactttcctcgccaattggcgcttatgaaggaattagtggatttgcttggcctcgaacgcttggaagttcccggtttcgaggcagacgacgtattagcgactctcgcaaagaaagccgaacgtgagggctatgaagtccagatcttgacagcagatcgcgatcttttccagcttttatctccgcgcatctcggtgttacacccggaagggcatcgtatcaccccggaatggctctgggagaaatatggtttgcgtcccgaacaatgggtggattttcgcgccttagcaggcgatccgagcgacaatattccgggagttaaaggtatcggcgagaagacggcgctcaagctccttaaagaatgggggtcgttggagaacttgcttaagaatttagatcaggtcaaaccagagtcagtgcgtgagaagattcttgcacacctcgaagacctcaaattaagccgcgaattgtcccgtgtacgcaccgatttgccgctcgaagttgatttccgtcgccgccgcgaacctgactgggagggtcttaaagcgtttttagagcgtcttgaatttggttcgctcttgcatgaattcggccttttagaaagcccgttaccagccgaagaagcaccttggccaccgcccgaaggcgcgtttttaggttaccgtttgagtcgcccggaaccgatgtgggccgaattattggctcttgcagcgtctgcccagggacgtgtgtatcgcgcggaagaccctcatggtgcgctccgcggcctcttcgaagtccgtggactccttgccaaagacttagctgttgttgcattgcgcgaaggtcttgatttacctccgactgatgatccaatgcttcttgcgtacctcttggacccgtcaaacacgacgcccgaaggcgtagcccgtcgttacggcggcgagtggaccgaagatgcagcgaaacgcgcgttattggccgaacgtttgcacgccaatttattaggacgtttgcaaggcgaggaacgtctcctctggctttacgaagaagtggagaaaccattgagtcgcgtgctcgcgcatatggaagctaccggtgtcaaattagacgtggcgtatttggaggctctcagccttgaagttgctgccgaaatgcgccgcttggaggaagaagtattccgtttagcaggccattcctttcgccttaattctcgcgatcagttagaacgtgtgttgttcgatgaacttggtctccctcctatcggcaagacagagaagaccggtaaacgtagcacttcagcggcggttttagaagctcttcgcgaagtccatcccattgtggacaagatcttgcagtaccgcgaactcgcgaaattgaaaggcacctatattgaccctcttccggcattagtccacccgaaaacgggacgcctccatacccgcttcaaccaaacagccacggcgaccggtcgtttgtcctcctctgatccaaaccttcagaatattccagtacgtaccccattgggccagaagatccgccgcgcgtttgtagctgaggagggttggcgtttagtggccctcgattatagccaaattgaattacgtgtccttgcccatctttctggcgatgagaacctcatccgcgtgtttcaggaaggcaaagacattcacactcaaacggcaagctggatgtttggattatcagctgaagcgatcgatcctttgatgcgtcgtgcagcgaagaccatcaatttcggtgttctctacggtatgagtgcctttcgtttgtcgcaggaattaggcattccctatgaagaagctgcggcgttcattcagaaatactttcaaagctatcccaaagttaaagcatggatcgagaagactctcgaagaaggccgcacacgtggttacgtagagaccttatttggacgtcgccgctatgttcccgatttaaacgctcgcgtgaaatctgtccgtgaagccgccgaacgcatggcgttcaacatgcctgtacagggcacggcagctgacctcatgaaacttgcaatggtgcgcctttttccacaattgcgtgaagttggtgcccgcatgctcttgcaggtccacgatgaactcttgttagaagcgccaaaagagcgtgcggaagaggtggcagccctcgcgaaagaggttatggaaggcgtgtggcccttagcggtgcctcttgaagtcgaagttggtattggcgaggattggctggctgccaaaggataatga

SEQ ID NO: 2638 - protein, 841 aa, synthetic construct
  REGION 1..841: note = Variant of DNA polymerase I from Thermus sp. strain 2.9
MHHHHHHGGSGVLPVFEPKGRVLLVDGHHLAYRNFFALKGLTTSRGEPVQGVYGFAKSLLKALKEDGDVVIVVFDAKAPSFRHEAYEAYKAGRRPTPEDFPRQLALMKELVDLLGLERLEVPGFEADDVLATLAKKAEREGYEVQILTADRDLFQLLSPRISVLHPEGHRITPEWLWEKYGLRPEQWVDFRALAGDPSDNIPGVKGIGEKTALKLLKEWGSLENLLKNLDQVKPESVREKILAHLEDLKLSRELSRVRTDLPLEVDFRRRREPDWEGLKAFLERLEFGSLLHEFGLLESPLPAEEAPWPPPEGAFLGYRLSRPEPMWAELLALAASAQGRVYRAEDPHGALRGLFEVRGLLAKDLAVVALREGLDLPPTDDPMLLAYLLDPSNTTPEGVARRYGGEWTEDAAKRALLAERLHANLLGRLQGEERLLWLYEEVEKPLSRVLAHMEATGVKLDVAYLEALSLEVAAEMRRLEEEVFRLAGHSFRLNSRDQLERVLFDELGLPPIGKTEKTGKRSTSAAVLEALREVHPIVDKILQYRELAKLKGTYIDPLPALVHPKTGRLHTRFNQTATATGRLSSSDPNLQNIPVRTPLGQKIRRAFVAEEGWRLVALDYSQIELRVLAHLSGDENLIRVFQEGKDIHTQTASWMFGLSAEAIDPLMRRAAKTINFGVLYGMSAFRLSQELGIPYEEAAAFIQKYFQSYPKVKAWIEKTLEEGRTRGYVETLFGRRRYVPDLNARVKSVREAAERMAFNMPVQGTAADLMKLAMVRLFPQLREVGARMLLQVHDELLLEAPKERAEEVAALAKEVMEGVWPLAVPLEVEVGIGEDWLAAKG

SEQ ID NO: 2639 - DNA, 2529 bp, synthetic construct
  misc_feature 1..2529: note = Variant of DNA polymerase I from Thermus sp. strain 2.9
  source 1..2529: mol_type = other DNA
atgcaccatcatcatcatcatggcggtagcggcgtgttaccggtgttcgagcctaaaggtcgcgtgcttctggttgatggccatcatctcgcgtatcgtaacttctttgccctgaaaggattaaccaccagccgtggcgagccggtacagggtgtctacggctttgcaaagtcgctcctgaaagctctgaaagaagacggtgatgtggtgattgttgtctttgatgcgaaagcgccaagttttcgccacgaagcgtacgaagcttacaaagccgggcgtgctccaacgccggaagactttcctcgccaattggcgcttatgaaggaattagtggatttgcttggcctcgaacgcttggaagttcccggtttcgaggcagacgacgtattagcgactctcgcaaagaaagccgaacgtgagggctatgaagtccagatcttgacagcagatcgcgatcttttccagcttttatctccgcgcatctcggtgttacacccggaagggcatcgtatcaccccggaatggctctgggagaaatatggtttgcgtcccgaacaatgggtggattttcgcgccttagcaggcgatccgagcgacaatattccgggagttaaaggtatcggcgagaagacggcgctcaagctccttaaagaatggggggatttggagaacttgcttaagaatttagatcaggtcaaaccagagtcagtgcgtgagaagattcttgcacacctcgaagacctcaaattaagccgcgaattgtcccgtgtacgcaccgatttgccgctcgaagttgatttccgtcgccgccgcgaacctgactgggagggtcttaaagcgtttttagagcgtcttgaatttggttcgctcttgcatgaattcggccttttagaaagcccgttaccagccgaagaagcaccttggccaccgcccgaaggcgcgtttttaggttaccgtttgagtcgcccggaaccgatgtgggccgaattattggctcttgcagcgtctgcccagggacgtgtgtatcgcgcggaagaccctcatggtgcgctccgcggcctcttcgaagtccgtggactccttgccaaagacttagctgttgttgcattgcgcgaaggtcttgatttacctccgactgatgatccaatgcttcttgcgtacctcttggacccgtcaaacacgacgcccgaaggcgtagcccgtcgttacggcggcgagtggaccgaagatgcagcgaaacgcgcgttattggccgaacgtttgcacgccaatttattaggacgtttgcaaggcgaggaacgtctcctctggctttacgaagaagtggagaaaccattgagtcgcgtgctcgcgcatatggaagctaccggtgtcaaattagacgtggcgtatttggaggctctcagccttgaagttgctgccgaaatgcgccgcttggaggaagaagtattccgtttagcaggccattcctttcgccttaattctcgcgatcagttagaacgtgtgttgttcgatgaacttggtctccctcctatcggcaagacagagaagaccggtaaacgtagcacttcagcggcggttttagaagctcttcgcgaagtccatcccattgtggacaagatcttgcagtaccgcgaactcgcgaaattgaaaggcacctatattgaccctcttccggcattagtccacccgaaaacgggacgcctccatacccgcttcaaccaaacagccacggcgaccggtcgtttgtcctcctctgatccaaaccttcagaatattccagtacgtaccccattgggccagaagatccgccgcgcgtttgtagctgaggagggttggcgtttagtggccctcgattatagccaaattgaattacgtgtccttgcccatctttctggcgatgagaacctcatccgcgtgtttcaggaaggcaaagacattcacactcaaacggcaagctggatgtttggattatcagctgaagcgatcgatcctttgatgcgtcgtgcagcgaagaccatcaatttcggtgttctctacggtatgagtgcctttcgtttgtcgcaggaattaggcattccctatgaagaagctgcggcgttcattcagaaatactttcaaagctatcccaaagttaaagcatggatcgagaagactctcgaagaaggccgcacacgtggttacgtagagaccttatttggacgtcgccgctatgttcccgatttaaacgctcgcgtgaaatctgtccgtgaagccgccgaacgcatggcgttcaacatgcctgtacagggcacggcagctgacctcatgaaacttgcaatggtgcgcctttttccacaattgcgtgaagttggtgcccgcatgctcttgcaggtccacgatgaactcttgttagaagcgccaaaagagcgtgcggaagaggtggcagccctcgcgaaagaggttatggaaggcgtgtggcccttagcggtgcctcttgaagtcgaagttggtattggcgaggattggctggctgccaaaggataatga

SEQ ID NO: 2640 - protein, 841 aa, synthetic construct
  REGION 1..841: note = Variant of DNA polymerase I from Thermus sp. strain 2.9
MHHHHHHGGSGVLPVFEPKGRVLLVDGHHLAYRNFFALKGLTTSRGEPVQGVYGFAKSLLKALKEDGDVVIVVFDAKAPSFRHEAYEAYKAGRAPTPEDFPRQLALMKELVDLLGLERLEVPGFEADDVLATLAKKAEREGYEVQILTADRDLFQLLSPRISVLHPEGHRITPEWLWEKYGLRPEQWVDFRALAGDPSDNIPGVKGIGEKTALKLLKEWGDLENLLKNLDQVKPESVREKILAHLEDLKLSRELSRVRTDLPLEVDFRRRREPDWEGLKAFLERLEFGSLLHEFGLLESPLPAEEAPWPPPEGAFLGYRLSRPEPMWAELLALAASAQGRVYRAEDPHGALRGLFEVRGLLAKDLAVVALREGLDLPPTDDPMLLAYLLDPSNTTPEGVARRYGGEWTEDAAKRALLAERLHANLLGRLQGEERLLWLYEEVEKPLSRVLAHMEATGVKLDVAYLEALSLEVAAEMRRLEEEVFRLAGHSFRLNSRDQLERVLFDELGLPPIGKTEKTGKRSTSAAVLEALREVHPIVDKILQYRELAKLKGTYIDPLPALVHPKTGRLHTRFNQTATATGRLSSSDPNLQNIPVRTPLGQKIRRAFVAEEGWRLVALDYSQIELRVLAHLSGDENLIRVFQEGKDIHTQTASWMFGLSAEAIDPLMRRAAKTINFGVLYGMSAFRLSQELGIPYEEAAAFIQKYFQSYPKVKAWIEKTLEEGRTRGYVETLFGRRRYVPDLNARVKSVREAAERMAFNMPVQGTAADLMKLAMVRLFPQLREVGARMLLQVHDELLLEAPKERAEEVAALAKEVMEGVWPLAVPLEVEVGIGEDWLAAKG

SEQ ID NO: 2641 - DNA, 2529 bp, synthetic construct
  misc_feature 1..2529: note = Variant of DNA polymerase I from Thermus sp. strain 2.9
  source 1..2529: mol_type = other DNA
atgcaccatcatcatcatcatggcggtagcggcgtgttaccggtgttcgagcctaaaggtcgcgtgcttctggttgatggccatcatctcgcgtatcgtaacttctttgccctgaaaggattaaccaccagccgtggcgagccggtacagggtgtctacggctttgcaaagtcgctcctgaaagctctgaaagaagacggtgatgtggtgattgttgtctttgatgcgaaagcgccaagttttcgccacgaagcgtacgaagcttacaaagccgggcgtgctccaacgccggaagactttcctcgccaattggcgcttatgaaggaattagtggatttgcttggcctcgaacgcttggaagttcccggtttcgaggcagacgacgtattagcgactctcgcaaagaaagccgaacgtgagggctatgaagtccagatcttgacagcagatcgcgatcttttccagcttttatctccgcgcatctcggtgttacacccggaagggcatcgtatcaccccggaatggctctgggagaaatatggtttgcgtcccgaacaatgggtggattttcgcgccttagcaggcgatccgagcgacaatattccgggagttaaaggtatcggcgagaagacggcgctcaagctccttaaagaatgggggtcgttggagaacttgcttaagaatttagatcaggtcaaaccagagtcagtgcgtgagaagattcttgcacacctcgaagacctcaaattaagccgcgaattgtcccgtgtacgcaccgatttgccgctcgaagttgatttccgtcgccgccgcgaacctgactgggagggtcttaaagcgtttttagagcgtcttgaatttggttcgctcttgcatgaattcggccttttagaaagcccgttaccagccgaagaagcaccttggccaccgcccgaaggcgcgtttttaggttaccgtttgagtcgcccggaaccgatgtgggccgaattattggctcttgcagcgtctgcccagggacgtgtgtatcgcgcggaagaccctcatggtgcgctccgcggcctcttcgaagtccgtggactccttgccaaagacttagctgttgttgcattgcgcgaaggtcttgatttacctccgactgatgatccaatgcttcttgcgtacctcttggacccgtcaaacacgacgcccgaaggcgtagcccgtcgttacggcggcgagtggaccgaagatgcagcgaaacgcgcgttattggccgaacgtttgcacgccaatttattaggacgtttgcaaggcgaggaacgtctcctctggctttacgaagaagtggagaaaccattgagtcgcgtgctcgcgcatatggaagctaccggtgtcaaattagacgtggcgtatttggaggctctcagccttgaagttgctgccgaaatgcgccgcttggaggaagaagtattccgtttagcaggccattcctttcgccttaattctcgcgatcagttagaacgtgtgttgttcgatgaacttggtctccctcctatcggcaagacagagaagaccggtaaacgtagcacttcagcggcggttttagaagctcttcgcgaagtccatcccattgtggacaagatcttgcagtaccgcgaactcgcgaaattgaaaggcacctatattgaccctcttccggcattagtccacccgaaaacgggacgcctccatacccgcttcaaccaaacagccacggcgaccggtcgtttgtcctcctctgatccaaaccttcagaatattccagtacgtaccccattgggccagaagatccgccgcgcgtttgtagctgaggagggttggcgtttagtggccctcgattatagccaaattgaattacgtgtccttgcccatctttctggcgatgagaacctcatccgcgtgtttcaggaaggcaaagacattcacactcaaacggcaagctggatgtttggattatcagctgaagcgatcgatcctttgatgcgtcgtgcagcgaagaccatcaatttcggtgttctctacggtatgagtgcctttcgtttgtcgcaggaattaggcattccctatgaagaagctgcggcgttcattcagaaatactttcaaagctatcccaaagttaaagcatggatcgagaagactctcgaagaaggccgcacacgtggttacgtagagaccttatttggacgtcgccgctatgttcccgatttaaacgctcgcgtgaaatctgtccgtgaagccgccgaacgcatggcgttcaacatgcctgtacagggcacggcagctgacctcatgaaacttgcaatggtgcgcctttttccacaattgcgtgaagttggtgcccgcatgctcttgcaggtccacgatgaactcttgttagaagcgccaagggagcgtgcggaagaggtggcagccctcgcgaaagaggttatggaaggcgtgtggcccttagcggtgcctcttgaagtcgaagttggtattggcgaggattggctggctgccaaaggataatga

SEQ ID NO: 2642 - protein, 841 aa, synthetic construct
  REGION 1..841: note = Variant of DNA polymerase I from Thermus sp. strain 2.9
MHHHHHHGGSGVLPVFEPKGRVLLVDGHHLAYRNFFALKGLTTSRGEPVQGVYGFAKSLLKALKEDGDVVIVVFDAKAPSFRHEAYEAYKAGRAPTPEDFPRQLALMKELVDLLGLERLEVPGFEADDVLATLAKKAEREGYEVQILTADRDLFQLLSPRISVLHPEGHRITPEWLWEKYGLRPEQWVDFRALAGDPSDNIPGVKGIGEKTALKLLKEWGSLENLLKNLDQVKPESVREKILAHLEDLKLSRELSRVRTDLPLEVDFRRRREPDWEGLKAFLERLEFGSLLHEFGLLESPLPAEEAPWPPPEGAFLGYRLSRPEPMWAELLALAASAQGRVYRAEDPHGALRGLFEVRGLLAKDLAVVALREGLDLPPTDDPMLLAYLLDPSNTTPEGVARRYGGEWTEDAAKRALLAERLHANLLGRLQGEERLLWLYEEVEKPLSRVLAHMEATGVKLDVAYLEALSLEVAAEMRRLEEEVFRLAGHSFRLNSRDQLERVLFDELGLPPIGKTEKTGKRSTSAAVLEALREVHPIVDKILQYRELAKLKGTYIDPLPALVHPKTGRLHTRFNQTATATGRLSSSDPNLQNIPVRTPLGQKIRRAFVAEEGWRLVALDYSQIELRVLAHLSGDENLIRVFQEGKDIHTQTASWMFGLSAEAIDPLMRRAAKTINFGVLYGMSAFRLSQELGIPYEEAAAFIQKYFQSYPKVKAWIEKTLEEGRTRGYVETLFGRRRYVPDLNARVKSVREAAERMAFNMPVQGTAADLMKLAMVRLFPQLREVGARMLLQVHDELLLEAPRERAEEVAALAKEVMEGVWPLAVPLEVEVGIGEDWLAAKG

SEQ ID NO: 2643 - DNA, 2529 bp, synthetic construct
  misc_feature 1..2529: note = Variant of DNA polymerase I from Thermus sp. strain 2.9
  source 1..2529: mol_type = other DNA
atgcaccatcatcatcatcatggcggtagcggcgtgttaccggtgttcgagcctaaaggtcgcgtgcttctggttgatggccatcatctcgcgtatcgtaacttctttgccctgaaaggattaaccaccagccgtggcgagccggtacagggtgtctacggctttgcaaagtcgctcctgaaagctctgaaagaagacggtgatgtggtgattgttgtctttgatgcgaaagcgccaagttttcgccacgaagcgtacgaagcttacaaagccgggcgtgctccaacgccggaagactttcctcgccaattggcgcttatgaaggaattagtggatttgcttggcctcgaacgcttggaagttcccggtgctgaggcagacgacgtattagcgactctcgcaaagaaagccgaacgtgagggctatgaagtccagatcttgacagcagatcgcgatcttttccagcttttatctccgcgcatctcggtgttacacccggaagggcatcgtatcaccccggaatggctctgggagaaatatggtttgcgtcccgaacaatgggtggattttcgcgccttagcaggcgatccgagcgacaatattccgggagttaaaggtatcggcgagaagacggcgctcaagctccttaaagaatgggggtcgttggagaacttgcttaagaatttagatcaggtcaaaccagagtcagtgcgtgagaagattcttgcacacctcgaagacctcaaattaagccgcgaattgtcccgtgtacgcaccgatttgccgctcgaagttgatttccgtcgccgccgcgaacctgactgggagggtcttaaagcgtttttagagcgtcttgaatttggttcgctcttgcatgaattcggccttttagaaagcccgttaccagccgaagaagcaccttggccaccgcccgaaggcgcgtttttaggttaccgtttgagtcgcccggaaccgatgtgggccgaattattggctcttgcagcgtctgcccagggacgtgtgtatcgcgcggaagaccctcatggtgcgctccgcggcctcttcgaagtccgtggactccttgccaaagacttagctgttgttgcattgcgcgaaggtcttgatttacctccgactgatgatccaatgcttcttgcgtacctcttggacccgtcaaacacgacgcccgaaggcgtagcccgtcgttacggcggcgagtggaccgaagatgcagcgaaacgcgcgttattggccgaacgtttgcacgccaatttattaggacgtttgcaaggcgaggaacgtctcctctggctttacgaagaagtggagaaaccattgagtcgcgtgctcgcgcatatggaagctaccggtgtcaaattagacgtggcgtatttggaggctctcagccttgaagttgctgccgaaatgcgccgcttggaggaagaagtattccgtttagcaggccattcctttcgccttaattctcgcgatcagttagaacgtgtgttgttcgatgaacttggtctccctcctatcggcaagacagagaagaccggtaaacgtagcacttcagcggcggttttagaagctcttcgcgaagtccatcccattgtggacaagatcttgcagtaccgcgaactcgcgaaattgaaaggcacctatattgaccctcttccggcattagtccacccgaaaacgggacgcctccatacccgcttcaaccaaacagccacggcgaccggtcgtttgtcctcctctgatccaaaccttcagaatattccagtacgtaccccattgggccagaagatccgccgcgcgtttgtagctgaggagggttggcgtttagtggccctcgattatagccaaattgaattacgtgtccttgcccatctttctggcgatgagaacctcatccgcgtgtttcaggaaggcaaagacattcacactcaaacggcaagctggatgtttggattatcagctgaagcgatcgatcctttgatgcgtcgtgcagcgaagaccatcaatttcggtgttctctacggtatgagtgcctttcgtttgtcgcaggaattaggcattccctatgaagaagctgcggcgttcattcagaaatactttcaaagctatcccaaagttaaagcatggatcgagaagactctcgaagaaggccgcacacgtggttacgtagagaccttatttggacgtcgccgctatgttcccgatttaaacgctcgcgtgaaatctgtccgtgaagccgccgaacgcatggcgttcaacatgcctgtacagggcacggcagctgacctcatgaaacttgcaatggtgcgcctttttccacaattgcgtgaagttggtgcccgcatgctcttgcaggtccacgatgaactcttgttagaagcgccaaaagagcgtgcggaagaggtggcagccctcgcgaaagaggttatggaaggcgtgtggcccttagcggtgcctcttgaagtcgaagttggtattggcgaggattggctggctgccaaaggataatga

SEQ ID NO: 2644 - protein, 841 aa, synthetic construct
  REGION 1..841: note = Variant of DNA polymerase I from Thermus sp. strain 2.9
MHHHHHHGGSGVLPVFEPKGRVLLVDGHHLAYRNFFALKGLTTSRGEPVQGVYGFAKSLLKALKEDGDVVIVVFDAKAPSFRHEAYEAYKAGRAPTPEDFPRQLALMKELVDLLGLERLEVPGAEADDVLATLAKKAEREGYEVQILTADRDLFQLLSPRISVLHPEGHRITPEWLWEKYGLRPEQWVDFRALAGDPSDNIPGVKGIGEKTALKLLKEWGSLENLLKNLDQVKPESVREKILAHLEDLKLSRELSRVRTDLPLEVDFRRRREPDWEGLKAFLERLEFGSLLHEFGLLESPLPAEEAPWPPPEGAFLGYRLSRPEPMWAELLALAASAQGRVYRAEDPHGALRGLFEVRGLLAKDLAVVALREGLDLPPTDDPMLLAYLLDPSNTTPEGVARRYGGEWTEDAAKRALLAERLHANLLGRLQGEERLLWLYEEVEKPLSRVLAHMEATGVKLDVAYLEALSLEVAAEMRRLEEEVFRLAGHSFRLNSRDQLERVLFDELGLPPIGKTEKTGKRSTSAAVLEALREVHPIVDKILQYRELAKLKGTYIDPLPALVHPKTGRLHTRFNQTATATGRLSSSDPNLQNIPVRTPLGQKIRRAFVAEEGWRLVALDYSQIELRVLAHLSGDENLIRVFQEGKDIHTQTASWMFGLSAEAIDPLMRRAAKTINFGVLYGMSAFRLSQELGIPYEEAAAFIQKYFQSYPKVKAWIEKTLEEGRTRGYVETLFGRRRYVPDLNARVKSVREAAERMAFNMPVQGTAADLMKLAMVRLFPQLREVGARMLLQVHDELLLEAPKERAEEVAALAKEVMEGVWPLAVPLEVEVGIGEDWLAAKG

SEQ ID NO: 2645 - DNA, 2529 bp, synthetic construct
  misc_feature 1..2529: note = Variant of DNA polymerase I from Thermus sp. strain 2.9
  source 1..2529: mol_type = other DNA
atgcaccatcatcatcatcatggcggtagcggcgtgttaccggtgttcgagcctaaaggtcgcgtgcttctggttgatggccatcatctcgcgtatcgtaacttctttgccctgaaaggattaaccaccagccgtggcgagccggtacagggtgtctacggctttgcaaagtcgctcctgaaagctctgaaagaagacggtgatgtggtgattgttgtctttgatgcgaaagcgccaagttttcgccacgaagcgtacgaagcttacaaagccgggcgtgctccaacgccggaagactttcctcgccaattggcgcttatgaaggaattagtggatttgcttggcctcgaacgcttggaagttcccggtttcgaggcagacgacgtattagcgactctcgcaaagaaagccgaacgtgagggctatgaagtccagatcttgacagcagatcgcgatcttttccagcttttatctccgcgcatctcggtgttacacccggaagggcatcgtatcaccccggaatggctctgggagaaatatggtttgcgtcccgaacaatgggtggattttcgcgccttagcaggcgatccgagcgacaatattccgggagttaaaggtatcggcgagaagacggcgctcaagctccttaaagaatgggggtcgttggagaacttgcttaagaatttagatcaggtcaaaccagagtcagtgcgtgagaagattcttgcacacctcgaagacctcaaattaagccgcgaattgtcccgtgtacgcaccgatttgccgctcgaagttgatttccgtcgccgccgcgaacctgactgggagggtcttaaagcgtttttagagcgtcttgaatttggttcgctcttgcatgaattcggccttttagaaagcccgttaccagccgaagaagcaccttggccaccgcccgaaggcgcgtttttaggttaccgtttgagtcgcccggaaccgatgtgggccgaattattggctcttgcagcgtctgcccagggacgtgtgtatcgcgcggaagaccctcatggtgcgctccgcggcctcttcgaagtccgtggactccttgccaaagacttagctgttgttgcattgcgcgaaggtcttgatttacctccgactgatgatccaatgcttcttgcgtacctcttggacccgtcaaacacgacgcccgaaggcgtagcccgtcgttacggcggcgagtggaccgaagatgcagcgaaacgcgcgttattggccgaacgtttgcacgccaatttattaggacgtttgcaaggcgaggaacgtctcctctggctttacgaagaagtggagaaaccattgagtcgcgtgctcgcgcatatggaagctaccggtgtcaaattagacgtggcgtatttggaggctctcagccttgaagttgctgccgaaatgcgccgcttggaggaagaagtattccgtttagcaggccattcctttcgccttaattctcgcgatcagttagaacgtgtgttgttcgatgaacttggtctccctcctatcggcaagacagagaagaccggtaaacgtagcacttcagcggcggttttagaagctcttcgcgaagtccatcccattgtggacaagatcttgcagtaccgcgaactcgcgaaattgaaaggcacctatattgaccctcttccggcattagtccacccgaaaacgggacgcctccatacccgcttcaaccaaacagccacggcgaccggtcgtttgtcctcctctgatccaaaccttcagaatattccagtacgtaccccattgggccagaagatccgccgcgcgtttgtagctgaggagggttggcgtttagtggccctcgattatagccaaattgaattacgtgtccttgcccatctttctggcgatgagaacctcatcaaggtgtttcaggaaggcaaagacattcacactcaaacggcaagctggatgtttggattatcagctgaagcgatcgatcctttgatgcgtcgtgcagcgaagaccatcaatttcggtgttctctacggtatgagtgcctttcgtttgtcgcaggaattaggcattccctatgaagaagctgcggcgttcattcagaaatactttcaaagctatcccaaagttaaagcatggatcgagaagactctcgaagaaggccgcacacgtggttacgtagagaccttatttggacgtcgccgctatgttcccgatttaaacgctcgcgtgaaatctgtccgtgaagccgccgaacgcatggcgttcaacatgcctgtacagggcacggcagctgacctcatgaaacttgcaatggtgcgcctttttccacaattgcgtgaagttggtgcccgcatgctcttgcaggtccacgatgaactcttgttagaagcgccaaaagagcgtgcggaagaggtggcagccctcgcgaaagaggttatggaaggcgtgtggcccttagcggtgcctcttgaagtcgaagttggtattggcgaggattggctggctgccaaaggataatga

SEQ ID NO: 2646 - protein, 841 aa, synthetic construct
  REGION 1..841: note = Variant of DNA polymerase I from Thermus sp. strain 2.9
MHHHHHHGGSGVLPVFEPKGRVLLVDGHHLAYRNFFALKGLTTSRGEPVQGVYGFAKSLLKALKEDGDVVIVVFDAKAPSFRHEAYEAYKAGRAPTPEDFPRQLALMKELVDLLGLERLEVPGFEADDVLATLAKKAEREGYEVQILTADRDLFQLLSPRISVLHPEGHRITPEWLWEKYGLRPEQWVDFRALAGDPSDNIPGVKGIGEKTALKLLKEWGSLENLLKNLDQVKPESVREKILAHLEDLKLSRELSRVRTDLPLEVDFRRRREPDWEGLKAFLERLEFGSLLHEFGLLESPLPAEEAPWPPPEGAFLGYRLSRPEPMWAELLALAASAQGRVYRAEDPHGALRGLFEVRGLLAKDLAVVALREGLDLPPTDDPMLLAYLLDPSNTTPEGVARRYGGEWTEDAAKRALLAERLHANLLGRLQGEERLLWLYEEVEKPLSRVLAHMEATGVKLDVAYLEALSLEVAAEMRRLEEEVFRLAGHSFRLNSRDQLERVLFDELGLPPIGKTEKTGKRSTSAAVLEALREVHPIVDKILQYRELAKLKGTYIDPLPALVHPKTGRLHTRFNQTATATGRLSSSDPNLQNIPVRTPLGQKIRRAFVAEEGWRLVALDYSQIELRVLAHLSGDENLIKVFQEGKDIHTQTASWMFGLSAEAIDPLMRRAAKTINFGVLYGMSAFRLSQELGIPYEEAAAFIQKYFQSYPKVKAWIEKTLEEGRTRGYVETLFGRRRYVPDLNARVKSVREAAERMAFNMPVQGTAADLMKLAMVRLFPQLREVGARMLLQVHDELLLEAPKERAEEVAALAKEVMEGVWPLAVPLEVEVGIGEDWLAAKG

SEQ ID NO: 2647 - DNA, 2529 bp, synthetic construct
  misc_feature 1..2529: note = Variant of DNA polymerase I from Thermus sp. strain 2.9
  source 1..2529: mol_type = other DNA
atgcaccatcatcatcatcatggcggtagcggcgtgttaccggtgttcgagcctaaaggtcgcgtgcttctggttgatggccatcatctcgcgtatcgtaacttctttgccctgaaaggattaaccaccagccgtggcgagccggtacagggtgtctacggctttgcaaagtcgctcctgaaagctctgaaagaagacggtgatgtggtgattgttgtctttgatgcgaaagcgccaagttttcgccacgaagcgtacgaagcttacaaagccgggcgtgctccaacgccggaagactttcctcgccaattggcgcttatgaagacgttagtggatttgcttggcctcgaacgcttggaagttcccggtttcgaggcagacgacgtattagcgactctcgcaaagaaagccgaacgtgagggctatgaagtccagatcttgacagcagatcgcgatcttttccagcttttatctccgcgcatctcggtgttacacccggaagggcatcgtatcaccccggaatggctctgggagaaatatggtttgcgtcccgaacaatgggtggattttcgcgccttagcaggcgatccgagcgacaatattccgggagttaaaggtatcggcgagaagacggcgctcaagctccttaaagaatgggggtcgttggagaacttgcttaagaatttagatcaggtcaaaccagagtcagtgcgtgagaagattcttgcacacctcgaagacctcaaattaagccgcgaattgtcccgtgtacgcaccgatttgccgctcgaagttgatttccgtcgccgccgcgaacctgactgggagggtcttaaagcgtttttagagcgtcttgaatttggttcgctcttgcatgaattcggccttttagaaagcccgttaccagccgaagaagcaccttggccaccgcccgaaggcgcgtttttaggttaccgtttgagtcgcccggaaccgatgtgggccgaattattggctcttgcagcgtctgcccagggacgtgtgtatcgcgcggaagaccctcatggtgcgctccgcggcctcttcgaagtccgtggactccttgccaaagacttagctgttgttgcattgcgcgaaggtcttgatttacctccgactgatgatccaatgcttcttgcgtacctcttggacccgtcaaacacgacgcccgaaggcgtagcccgtcgttacggcggcgagtggaccgaagatgcagcgaaacgcgcgttattggccgaacgtttgcacgccaatttattaggacgtttgcaaggcgaggaacgtctcctctggctttacgaagaagtggagaaaccattgagtcgcgtgctcgcgcatatggaagctaccggtgtcaaattagacgtggcgtatttggaggctctcagccttgaagttgctgccgaaatgcgccgcttggaggaagaagtattccgtttagcaggccattcctttcgccttaattctcgcgatcagttagaacgtgtgttgttcgatgaacttggtctccctcctatcggcaagacagagaagaccggtaaacgtagcacttcagcggcggttttagaagctcttcgcgaagtccatcccattgtggacaagatcttgcagtaccgcgaactcgcgaaattgaaaggcacctatattgaccctcttccggcattagtccacccgaaaacgggacgcctccatacccgcttcaaccaaacagccacggcgaccggtcgtttgtcctcctctgatccaaaccttcagaatattccagtacgtaccccattgggccagaagatccgccgcgcgtttgtagctgaggagggttggcgtttagtggccctcgattatagccaaattgaattacgtgtccttgcccatctttctggcgatgagaacctcatccgcgtgtttcaggaaggcaaagacattcacactcaaacggcaagctggatgtttggattatcagctgaagcgatcgatcctttgatgcgtcgtgcagcgaagaccatcaatttcggtgttctctacggtatgagtgcctttcgtttgtcgcaggaattaggcattccctatgaagaagctgcggcgttcattcagaaatactttcaaagctatcccaaagttaaagcatggatcgagaagactctcgaagaaggccgcacacgtggttacgtagagaccttatttggacgtcgccgctatgttcccgatttaaacgctcgcgtgaaatctgtccgtgaagccgccgaacgcatggcgttcaacatgcctgtacagggcacggcagctgacctcatgaaacttgcaatggtgcgcctttttccacaattgcgtgaagttggtgcccgcatgctcttgcaggtccacgatgaactcttgttagaagcgccaaaagagcgtgcggaagaggtggcagccctcgcgaaagaggttatggaaggcgtgtggcccttagcggtgcctcttgaagtcgaagttggtattggcgaggattggctggctgccaaaggataatga

SEQ ID NO: 2648 - protein, 841 aa, synthetic construct
  REGION 1..841: note = Variant of DNA polymerase I from Thermus sp. strain 2.9
MHHHHHHGGSGVLPVFEPKGRVLLVDGHHLAYRNFFALKGLTTSRGEPVQGVYGFAKSLLKALKEDGDVVIVVFDAKAPSFRHEAYEAYKAGRAPTPEDFPRQLALMKTLVDLLGLERLEVPGFEADDVLATLAKKAEREGYEVQILTADRDLFQLLSPRISVLHPEGHRITPEWLWEKYGLRPEQWVDFRALAGDPSDNIPGVKGIGEKTALKLLKEWGSLENLLKNLDQVKPESVREKILAHLEDLKLSRELSRVRTDLPLEVDFRRRREPDWEGLKAFLERLEFGSLLHEFGLLESPLPAEEAPWPPPEGAFLGYRLSRPEPMWAELLALAASAQGRVYRAEDPHGALRGLFEVRGLLAKDLAVVALREGLDLPPTDDPMLLAYLLDPSNTTPEGVARRYGGEWTEDAAKRALLAERLHANLLGRLQGEERLLWLYEEVEKPLSRVLAHMEATGVKLDVAYLEALSLEVAAEMRRLEEEVFRLAGHSFRLNSRDQLERVLFDELGLPPIGKTEKTGKRSTSAAVLEALREVHPIVDKILQYRELAKLKGTYIDPLPALVHPKTGRLHTRFNQTATATGRLSSSDPNLQNIPVRTPLGQKIRRAFVAEEGWRLVALDYSQIELRVLAHLSGDENLIRVFQEGKDIHTQTASWMFGLSAEAIDPLMRRAAKTINFGVLYGMSAFRLSQELGIPYEEAAAFIQKYFQSYPKVKAWIEKTLEEGRTRGYVETLFGRRRYVPDLNARVKSVREAAERMAFNMPVQGTAADLMKLAMVRLFPQLREVGARMLLQVHDELLLEAPKERAEEVAALAKEVMEGVWPLAVPLEVEVGIGEDWLAAKG

SEQ ID NO: 2649 - DNA, 2529 bp, synthetic construct
  misc_feature 1..2529: note = Variant of DNA polymerase I from Thermus sp. strain 2.9
  source 1..2529: mol_type = other DNA
atgcaccatcatcatcatcatggcggtagcggcgtgttaccggtgttcgagcctaaaggtcgcgtgcttctggttgatggccatcatctcgcgtatcgtaacttctttgccctgaaaggattaaccaccagccgtggcgagccggtacagggtgtctacggctttgcaaagtcgctcctgaaagctctgaaagaagacggtgatgtggtgattgttgtctttgatgcgaaagcgccaagttttcgccacgaagcgtacgaagcttacaaagccgggcgtgctccaacgccggaagactttcctcgccaattggcgcttatgaaggaattagtggatttgcttggcctcgaacgcttggaagttcccggtttcgaggcagacgacgtattagcgactctcgcaaagaaagccgaacgtgagggctatgaagtccagatcttgacagcagatcgcgatcttttccagcttttatctccgcgcatctcggtgttacacccggaagggcatcgtatcaccccggaatggctctgggagaaatatggtttgcgtcccgaacaatgggtggattttcgcgccttagcaggcgatccgagcgacaatattccgggagttaaaggtatcggcgagaagttggcgctcaagctccttaaagaatgggggtcgttggagaacttgcttaagaatttagatcaggtcaaaccagagtcagtgcgtgagaagattcttgcacacctcgaagacctcaaattaagccgcgaattgtcccgtgtacgcaccgatttgccgctcgaagttgatttccgtcgccgccgcgaacctgactgggagggtcttaaagcgtttttagagcgtcttgaatttggttcgctcttgcatgaattcggccttttagaaagcccgttaccagccgaagaagcaccttggccaccgcccgaaggcgcgtttttaggttaccgtttgagtcgcccggaaccgatgtgggccgaattattggctcttgcagcgtctgcccagggacgtgtgtatcgcgcggaagaccctcatggtgcgctccgcggcctcttcgaagtccgtggactccttgccaaagacttagctgttgttgcattgcgcgaaggtcttgatttacctccgactgatgatccaatgcttcttgcgtacctcttggacccgtcaaacacgacgcccgaaggcgtagcccgtcgttacggcggcgagtggaccgaagatgcagcgaaacgcgcgttattggccgaacgtttgcacgccaatttattaggacgtttgcaaggcgaggaacgtctcctctggctttacgaagaagtggagaaaccattgagtcgcgtgctcgcgcatatggaagctaccggtgtcaaattagacgtggcgtatttggaggctctcagccttgaagttgctgccgaaatgcgccgcttggaggaagaagtattccgtttagcaggccattcctttcgccttaattctcgcgatcagttagaacgtgtgttgttcgatgaacttggtctccctcctatcggcaagacagagaagaccggtaaacgtagcacttcagcggcggttttagaagctcttcgcgaagtccatcccattgtggacaagatcttgcagtaccgcgaactcgcgaaattgaaaggcacctatattgaccctcttccggcattagtccacccgaaaacgggacgcctccatacccgcttcaaccaaacagccacggcgaccggtcgtttgtcctcctctgatccaaaccttcagaatattccagtacgtaccccattgggccagaagatccgccgcgcgtttgtagctgaggagggttggcgtttagtggccctcgattatagccaaattgaattacgtgtccttgcccatctttctggcgatgagaacctcatccgcgtgtttcaggaaggcaaagacattcacactcaaacggcaagctggatgtttggattatcagctgaagcgatcgatcctttgatgcgtcgtgcagcgaagaccatcaatttcggtgttctctacggtatgagtgcctttcgtttgtcgcaggaattaggcattccctatgaagaagctgcggcgttcattcagaaatactttcaaagctatcccaaagttaaagcatggatcgagaagactctcgaagaaggccgcacacgtggttacgtagagaccttatttggacgtcgccgctatgttcccgatttaaacgctcgcgtgaaatctgtccgtgaagccgccgaacgcatggcgttcaacatgcctgtacagggcacggcagctgacctcatgaaacttgcaatggtgcgcctttttccacaattgcgtgaagttggtgcccgcatgctcttgcaggtccacgatgaactcttgttagaagcgccaaaagagcgtgcggaagaggtggcagccctcgcgaaagaggttatggaaggcgtgtggcccttagcggtgcctcttgaagtcgaagttggtattggcgaggattggctggctgccaaaggataatga

SEQ ID NO: 2650 - protein, 841 aa, synthetic construct
  REGION 1..841: note = Variant of DNA polymerase I from Thermus sp. strain 2.9
MHHHHHHGGSGVLPVFEPKGRVLLVDGHHLAYRNFFALKGLTTSRGEPVQGVYGFAKSLLKALKEDGDVVIVVFDAKAPSFRHEAYEAYKAGRAPTPEDFPRQLALMKELVDLLGLERLEVPGFEADDVLATLAKKAEREGYEVQILTADRDLFQLLSPRISVLHPEGHRITPEWLWEKYGLRPEQWVDFRALAGDPSDNIPGVKGIGEKLALKLLKEWGSLENLLKNLDQVKPESVREKILAHLEDLKLSRELSRVRTDLPLEVDFRRRREPDWEGLKAFLERLEFGSLLHEFGLLESPLPAEEAPWPPPEGAFLGYRLSRPEPMWAELLALAASAQGRVYRAEDPHGALRGLFEVRGLLAKDLAVVALREGLDLPPTDDPMLLAYLLDPSNTTPEGVARRYGGEWTEDAAKRALLAERLHANLLGRLQGEERLLWLYEEVEKPLSRVLAHMEATGVKLDVAYLEALSLEVAAEMRRLEEEVFRLAGHSFRLNSRDQLERVLFDELGLPPIGKTEKTGKRSTSAAVLEALREVHPIVDKILQYRELAKLKGTYIDPLPALVHPKTGRLHTRFNQTATATGRLSSSDPNLQNIPVRTPLGQKIRRAFVAEEGWRLVALDYSQIELRVLAHLSGDENLIRVFQEGKDIHTQTASWMFGLSAEAIDPLMRRAAKTINFGVLYGMSAFRLSQELGIPYEEAAAFIQKYFQSYPKVKAWIEKTLEEGRTRGYVETLFGRRRYVPDLNARVKSVREAAERMAFNMPVQGTAADLMKLAMVRLFPQLREVGARMLLQVHDELLLEAPKERAEEVAALAKEVMEGVWPLAVPLEVEVGIGEDWLAAKG

SEQ ID NO: 2651 - DNA, 2529 bp, synthetic construct
  misc_feature 1..2529: note = Variant of DNA polymerase I from Thermus sp. strain 2.9
  source 1..2529: mol_type = other DNA
atgcaccatcatcatcatcatggcggtagcggcgtgttaccggtgttcgagcctaaaggtcgcgtgcttctggttgatggccatcatctcgcgtatcgtaacttctttgccctgaaaggattaaccaccagccgtggcgagccggtacagggtgtctacggctttgcaaagtcgctcctgaaagctctgaaagaagacggtgatgtggtgattgttgtctttgatgcgaaagcgccaagttttcgccacgaagcgtacgaagcttacaaagccgggcgtgctccaacgccggaagactttcctcgccaattggcgcttatgaaggaattagtggatttgcttggcctcgaacgcttggaagttcccggtttcgaggcagacgacgtattagcgactctcgcaaagaaagccgaacgtgagggctatgaagtccagatcttgacagcagatcgcgatcttttccagcttttatctccgcgcatctcggtgttacacccggaagggcatcgtatcaccccggaatggctctgggagaaatatggtttgcgtcccgaacaatgggtggattttcgcgccttagcaggcgatccgagcgacaatattccgggagttaaaggtatcggcgagaagacggcgctcaagctccttaaagaatgggggtcgttggagaacttgcttaagaatttagatcaggtcaaaccagagtcagtgcgtgagaagattcttgcacacctcgaagacctcaaattaagccgcgaattgtcccgtgtacgcaccgatttgccgctcgaagttgatttccgtcgccgccgcgaacctgactgggagggtcttaaagcgtttttagagcgtcttgaatttggttcgctcttgcatgaattcggccttttagaaagcccgttaccagccgaagaagcaccttggccaccgcccgaaggcgcgtttttaggttaccgtttgagtcgcccggaaccgatgtgggccgaattattggctcttgcagcgtctgcccagggacgtgtgtatcgcgcggaagaccctcatggtgcgctccgcggcctcttcgaagtccgtggactccttgccaaagacttagctgttgttgcattgcgcgaaggtcttgatttacctccgactgatgatccaatgcttcttgcgtacctcttggacccgtcaaacacgacgcccgaaggcgtagcccgtcgttacggcggcgagtggaccgaagatgcagcgaaacgcgcgttattggccgaacgtttgcacgccaatttattaggacgtttgcaaggcgaggaacgtctcctctggctttacgaagaagtggagaaaccattgagtcgcgtgctcgcgcatatggaagctaccggtgtcaaattagacgtggcgtatttggaggctctcagccttgaagttgctgccgaaatgcgccgcttggaggaagaagtattccgtttagcaggccattcctttcgccttaattctcgcgatcagttagaacgtgtgttgttcgatgaacttggtctccctcctatcggcaagacagagaagaccggtaaatggagcacttcagcggcggttttagaagctcttcgcgaagtccatcccattgtggacaagatcttgcagtaccgcgaactcgcgaaattgaaaggcacctatattgaccctcttccggcattagtccacccgaaaacgggacgcctccatacccgcttcaaccaaacagccacggcgaccggtcgtttgtcctcctctgatccaaaccttcagaatattccagtacgtaccccattgggccagaagatccgccgcgcgtttgtagctgaggagggttggcgtttagtggccctcgattatagccaaattgaattacgtgtccttgcccatctttctggcgatgagaacctcatccgcgtgtttcaggaaggcaaagacattcacactcaaacggcaagctggatgtttggattatcagctgaagcgatcgatcctttgatgcgtcgtgcagcgaagaccatcaatttcggtgttctctacggtatgagtgcctttcgtttgtcgcaggaattaggcattccctatgaagaagctgcggcgttcattcagaaatactttcaaagctatcccaaagttaaagcatggatcgagaagactctcgaagaaggccgcacacgtggttacgtagagaccttatttggacgtcgccgctatgttcccgatttaaacgctcgcgtgaaatctgtccgtgaagccgccgaacgcatggcgttcaacatgcctgtacagggcacggcagctgacctcatgaaacttgcaatggtgcgcctttttccacaattgcgtgaagttggtgcccgcatgctcttgcaggtccacgatgaactcttgttagaagcgccaaaagagcgtgcggaagaggtggcagccctcgcgaaagaggttatggaaggcgtgtggcccttagcggtgcctcttgaagtcgaagttggtattggcgaggattggctggctgccaaaggataatga

SEQ ID NO: 2652 - protein, 841 aa, synthetic construct
  REGION 1..841: note = Variant of DNA polymerase I from Thermus sp. strain 2.9
MHHHHHHGGSGVLPVFEPKGRVLLVDGHHLAYRNFFALKGLTTSRGEPVQGVYGFAKSLLKALKEDGDVVIVVFDAKAPSFRHEAYEAYKAGRAPTPEDFPRQLALMKELVDLLGLERLEVPGFEADDVLATLAKKAEREGYEVQILTADRDLFQLLSPRISVLHPEGHRITPEWLWEKYGLRPEQWVDFRALAGDPSDNIPGVKGIGEKTALKLLKEWGSLENLLKNLDQVKPESVREKILAHLEDLKLSRELSRVRTDLPLEVDFRRRREPDWEGLKAFLERLEFGSLLHEFGLLESPLPAEEAPWPPPEGAFLGYRLSRPEPMWAELLALAASAQGRVYRAEDPHGALRGLFEVRGLLAKDLAVVALREGLDLPPTDDPMLLAYLLDPSNTTPEGVARRYGGEWTEDAAKRALLAERLHANLLGRLQGEERLLWLYEEVEKPLSRVLAHMEATGVKLDVAYLEALSLEVAAEMRRLEEEVFRLAGHSFRLNSRDQLERVLFDELGLPPIGKTEKTGKWSTSAAVLEALREVHPIVDKILQYRELAKLKGTYIDPLPALVHPKTGRLHTRFNQTATATGRLSSSDPNLQNIPVRTPLGQKIRRAFVAEEGWRLVALDYSQIELRVLAHLSGDENLIRVFQEGKDIHTQTASWMFGLSAEAIDPLMRRAAKTINFGVLYGMSAFRLSQELGIPYEEAAAFIQKYFQSYPKVKAWIEKTLEEGRTRGYVETLFGRRRYVPDLNARVKSVREAAERMAFNMPVQGTAADLMKLAMVRLFPQLREVGARMLLQVHDELLLEAPKERAEEVAALAKEVMEGVWPLAVPLEVEVGIGEDWLAAKG

SEQ ID NO: 2653 - DNA, 2529 bp, synthetic construct
  misc_feature 1..2529: note = Variant of DNA polymerase I from Thermus sp. strain 2.9
  source 1..2529: mol_type = other DNA
atgcaccatcatcatcatcatggcggtagcggcgtgttaccggtgttcgagcctaaaggtcgcgtgcttctggttgatggccatcatctcgcgtatcgtaacttctttgccctgaaaggattaaccaccagccgtggcgagccggtacagggtgtctacggctttgcaaagtcgctcctgaaagctctgaaagaagacggtgatgtggtgattgttgtctttgatgcgaaagcgccaagttttcgccacgaagcgtacgaagcttacaaagccgggcgtgctccaacgccggaagactttcctcgccaattggcgcttatgaaggaattagtggatttgcttggcctcgaacgcttggaagttcccggtttcgaggcagacgacgtattagcgactctcgcaaagaaagccgaacgtgagggctatgaagtccagatcttgacagcagatcgcgatcttttccagcttttatctccgcgcatctcggtgttacacccggaagggcatcgtatcaccccggaatggctctgggagaaatatggtttgcgtcccgaacaatgggtggattttcgcgccttagcaggcgatccgagcgacaatattccgggagttaaaggtatcggcgagaagacggcgctcaagctccttaaagaatgggggtcgttggagaacttgcttaagaatttagatcaggtcaaaccagagtcagtgcgtgagaagattcttgcacacctcgaagacctcaaattaagccgcgaattgtcccgtgtacgcaccgatttgccgctcgaagttgatttccgtcgccgccgcgaacctgactgggagggtcttaaagcgtttttagagcgtcttgaatttggttcgctcttgcatgaattcggccttttagaaagcccgttaccagccgaagaagcaccttggccaccgcccgaaggcgcgtttttaggttaccgtttgagtcgcccggaaccgatgtgggccgaattattggctcttgcagcgtctgcccagggacgtgtgtatcgcgcggaagaccctcatggtgcgctccgcggcctcttcgaagtccgtggactccttgccaaagacttagctgttgttgcattgcgcgaaggtcttgatttacctccgactgatgatccaatgcttcttgcgtacctcttggacccgtcaaacacgacgcccgaaggcgtagcccgtcgttacggcggcgagtggaccgaagatgcagcgaaacgcgcgttattggccgaacgtttgcacgccaatttattaggacgtttgcaaggcgaggaacgtctcctctggctttacgaagaagtggagaaaccattgagtcgcgtgctcgcgcatatggaagctaccggtgtcaaattagacgtggcgtatttggaggctctcagccttgaagttgctgccgaaatgcgccgcttggaggaagaagtattccgtttagcaggccattcctttcgccttaattctcgcgatcagttagaacgtgtgttgttcgatgaacttggtctccctcctatcggcaagacagagaagaccggtaaacgtagcacttcagcggcggttttagaagctcttcgcgaagtccatcccattgtggacaagatcttgcagtaccgcgaactcgcgaaattgaaaggcacctatattgaccctcttccggcattagtccacccgaaaacgggacgcctccatacccgcttcaaccaaacagccacggcgaccggtcgtttgtcctcctctgatccaaaccttcagaatattccagtacgtgtgccattgggccagaagatccgccgcgcgtttgtagctgaggagggttggcgtttagtggccctcgattatagccaaattgaattacgtgtccttgcccatctttctggcgatgagaacctcatccgcgtgtttcaggaaggcaaagacattcacactcaaacggcaagctggatgtttggattatcagctgaagcgatcgatcctttgatgcgtcgtgcagcgaagaccatcaatttcggtgttctctacggtatgagtgcctttcgtttgtcgcaggaattaggcattccctatgaagaagctgcggcgttcattcagaaatactttcaaagctatcccaaagttaaagcatggatcgagaagactctcgaagaaggccgcacacgtggttacgtagagaccttatttggacgtcgccgctatgttcccgatttaaacgctcgcgtgaaatctgtccgtgaagccgccgaacgcatggcgttcaacatgcctgtacagggcacggcagctgacctcatgaaacttgcaatggtgcgcctttttccacaattgcgtgaagttggtgcccgcatgctcttgcaggtccacgatgaactcttgttagaagcgccaaaagagcgtgcggaagaggtggcagccctcgcgaaagaggttatggaaggcgtgtggcccttagcggtgcctcttgaagtcgaagttggtattggcgaggattggctggctgccaaaggataatga

SEQ ID NO: 2654 - protein, 841 aa, synthetic construct
  REGION 1..841: note = Variant of DNA polymerase I from Thermus sp. strain 2.9
MHHHHHHGGSGVLPVFEPKGRVLLVDGHHLAYRNFFALKGLTTSRGEPVQGVYGFAKSLLKALKEDGDVVIVVFDAKAPSFRHEAYEAYKAGRAPTPEDFPRQLALMKELVDLLGLERLEVPGFEADDVLATLAKKAEREGYEVQILTADRDLFQLLSPRISVLHPEGHRITPEWLWEKYGLRPEQWVDFRALAGDPSDNIPGVKGIGEKTALKLLKEWGSLENLLKNLDQVKPESVREKILAHLEDLKLSRELSRVRTDLPLEVDFRRRREPDWEGLKAFLERLEFGSLLHEFGLLESPLPAEEAPWPPPEGAFLGYRLSRPEPMWAELLALAASAQGRVYRAEDPHGALRGLFEVRGLLAKDLAVVALREGLDLPPTDDPMLLAYLLDPSNTTPEGVARRYGGEWTEDAAKRALLAERLHANLLGRLQGEERLLWLYEEVEKPLSRVLAHMEATGVKLDVAYLEALSLEVAAEMRRLEEEVFRLAGHSFRLNSRDQLERVLFDELGLPPIGKTEKTGKRSTSAAVLEALREVHPIVDKILQYRELAKLKGTYIDPLPALVHPKTGRLHTRFNQTATATGRLSSSDPNLQNIPVRVPLGQKIRRAFVAEEGWRLVALDYSQIELRVLAHLSGDENLIRVFQEGKDIHTQTASWMFGLSAEAIDPLMRRAAKTINFGVLYGMSAFRLSQELGIPYEEAAAFIQKYFQSYPKVKAWIEKTLEEGRTRGYVETLFGRRRYVPDLNARVKSVREAAERMAFNMPVQGTAADLMKLAMVRLFPQLREVGARMLLQVHDELLLEAPKERAEEVAALAKEVMEGVWPLAVPLEVEVGIGEDWLAAKG

SEQ ID NO: 2655 - DNA, 2529 bp, synthetic construct
  misc_feature 1..2529: note = Variant of DNA polymerase I from Thermus sp. strain 2.9
  source 1..2529: mol_type = other DNA
atgcaccatcatcatcatcatggcggtagcggcgtgttaccggtgttcgagcctaaaggtcgcgtgcttctggttgatggccatcatctcgcgtatcgtaacttctttgccctgaaaggattaaccaccagccgtggcgagccggtacagggtgtctacggctttgcaaagtcgctcctgaaagctctgaaagaagacggtgatgtggtgattgttgtctttgatgcgaaagcgccaagttttcgccacgaagcgtacgaagcttacaaagccgggcgtgctccaacgccggaagactttcctcgccaattggcgcttatgaaggaattagtggatttgcttggcctcgaacgcttggaagttcccggtttcgaggcagacgacgtattagcgactctcgcaaagaaagccgaacgtgagggctatgaagtccagatcttgacagcagatcgcgatcttttccagcttttatctccgcgcatctcggtgttacacccggaagggcatcgtatcaccccggaatggctctgggagaaatatggtttgcgtcccgaacaatgggtggattttcgcgccttagcaggcgatccgagcgacaatattccgggagttaaaggtatcggcgagaagacggcgctcaagctccttaaagaatgggggtcgttggagaacttgcttaagaatttagatcaggtcaaaccagagtcagtgcgtgagaagattcttgcacacctcgaagacctcaaattaagccgcgaattgtcccgtgtacgcaccgatttgccgctcgaagttgatttccgtcgccgccgcgaacctgactgggagggtcttaaagcgtttttagagcgtcttgaatttggttcgctcttgcatgaattcggccttttagaaagcccgttaccagccgaagaagcaccttggccaccgcccgaaggcgcgtttttaggttaccgtttgagtcgcccggaaccgatgtgggccgaattattggctcttgcagcgtctgcccagggacgtgtgtatcgcgcggaagaccctcatggtgcgctccgcggcctcttcgaagtccgtggactccttgccaaagacttagctgttgttgcattgcgcgaaggtcttgatttacctccgactgatgatccaatgcttcttgcgtacctcttggacccgtcaaacacgacgcccgaaggcgtagcccgtcgttacggcggcgagtggaccgaagatgcagcgaaacgcgcgttattggccgaacgtttgcacgccaatttattaggacgtttgcaaggcgaggaacgtctcctctggctttacgaagaagtggagaaaccattgagtcgcgtgctcgcgcatatggaagctaccggtgtcaaattagacgtggcgtatttggaggctctcagccttgaagttgctgccgaaatgcgccgcttggaggaagaagtattccgtttagcaggccattcctttcgccttaattctcgcgatcagttagaacgtgtgttgttcgatgaacttggtctccctcctatcggcaagacagagaagaccggtaaacgtagcacttcagcggcggttttagaagctcttcgcgaagtccatcccattgtggacaagatcttgcagtaccgcgaactcgcgaaattgaaaggcacctatattgaccctcttccggcattagtccacccgaaaacgggacgcctccatacccgcttcaaccaaacagccacggcgaccggtcgtttgtcctcctctgatccaaaccttcagaatattccagtacgtaccccattgggccagaagatccgccgcgcgtttgtagctgaggagggttggcgtttagtggccctcgattatagccaaattgaattacgtgtccttgcccatctttctggcgatgagaacctcatccgcgtgtttcaggaaggcaaagacattcacactcaaacggcaagctggatgtttggattatcagctgaagcgatcgatcctttgatgcgtcgtgcagcgaagaccatcaatttcggtgttctctacggtatgagtgcctttcgtttgtcgcaggaattaggcattccctatgaagaagctgcggcgttcattcagaaatactttcaaagctatcccaaagttaaagcatggatcgagaagactctcgaagaaggccgcacacgtggttacgtagagaccttatttggacgtcgccgctatgttcccgatttaaacgctcgcgtgaaatctgtccgtgaagccgccgaacgcatggcgttcaacatgcctgtacagggcacggcagctgacctcatgaaacttgcaatggtgcgcctttttccacaattgcgtgaagttggtgcccgcatgctcttgcaggtccacgatgaactcttgttagaagcgccaaaagagcgtgcggaagaggtggcagccctcgcgaaaagggttatggaaggcgtgtggcccttagcggtgcctcttgaagtcgaagttggtattggcgaggattggctggctgccaaaggataatga

SEQ ID NO: 2656 - protein, 841 aa, synthetic construct
  REGION 1..841: note = Variant of DNA polymerase I from Thermus sp. strain 2.9
MHHHHHHGGSGVLPVFEPKGRVLLVDGHHLAYRNFFALKGLTTSRGEPVQGVYGFAKSLLKALKEDGDVVIVVFDAKAPSFRHEAYEAYKAGRAPTPEDFPRQLALMKELVDLLGLERLEVPGFEADDVLATLAKKAEREGYEVQILTADRDLFQLLSPRISVLHPEGHRITPEWLWEKYGLRPEQWVDFRALAGDPSDNIPGVKGIGEKTALKLLKEWGSLENLLKNLDQVKPESVREKILAHLEDLKLSRELSRVRTDLPLEVDFRRRREPDWEGLKAFLERLEFGSLLHEFGLLESPLPAEEAPWPPPEGAFLGYRLSRPEPMWAELLALAASAQGRVYRAEDPHGALRGLFEVRGLLAKDLAVVALREGLDLPPTDDPMLLAYLLDPSNTTPEGVARRYGGEWTEDAAKRALLAERLHANLLGRLQGEERLLWLYEEVEKPLSRVLAHMEATGVKLDVAYLEALSLEVAAEMRRLEEEVFRLAGHSFRLNSRDQLERVLFDELGLPPIGKTEKTGKRSTSAAVLEALREVHPIVDKILQYRELAKLKGTYIDPLPALVHPKTGRLHTRFNQTATATGRLSSSDPNLQNIPVRTPLGQKIRRAFVAEEGWRLVALDYSQIELRVLAHLSGDENLIRVFQEGKDIHTQTASWMFGLSAEAIDPLMRRAAKTINFGVLYGMSAFRLSQELGIPYEEAAAFIQKYFQSYPKVKAWIEKTLEEGRTRGYVETLFGRRRYVPDLNARVKSVREAAERMAFNMPVQGTAADLMKLAMVRLFPQLREVGARMLLQVHDELLLEAPKERAEEVAALAKRVMEGVWPLAVPLEVEVGIGEDWLAAKG

SEQ ID NO: 2657 - DNA, 2529 bp, synthetic construct
  misc_feature 1..2529: note = Variant of DNA polymerase I from Thermus sp. strain 2.9
  source 1..2529: mol_type = other DNA
atgcaccatcatcatcatcatggcggtagcggcgtgttaccggtgttcgagcctaaaggtcgcgtgcttctggttgatggccatcatctcgcgtatcgtaacttctttgccctgaaaggattaaccaccagccgtggcgagccggtacagggtgtctacggctttgcaaagtcgctcctgaaagctctgaaagaagacggtgatgtggtgattgttgtctttgatgcgaaagcgccaagttttcgccacgaagcgtacgaagcttacaaagccgggcgtgctccaacgccggaagactttcctcgccaattggcgcttatgaaggaattagtggatttgcttggcctcgaacgcttggaagttcccggtttcgaggcagacgacgtattagcgactctcgcaaagaaagccgaacgtgagggctatgaagtccagatcttgacagcagatcgcgatcttttccagcttttatctccgcgcatctcggtgttacacccggaagggcatcgtatcaccccggaatggctctgggagaaatatggtttgcgtcccgaacaatgggtggattttcgcgccttagcaggcgatccgagcgacaatattccgggagttaaaggtatcggcgagaagacggcgctcaagctccttaaagaatgggggtcgttggagaacttgcttaagaatttagatcaggtcaaaccagagtcagtgcgtgagaagattcttgcacacctcgaagacctcaaattaagccgcgaattgtcccgtgtacgcaccgatttgccgctcgaagttgatttccgtcgccgccgcgaacctgactgggagggtcttaaagcgtttttagagcgtcttgaatttggttcgctcttgcatgaattcggccttttagaaagcccgttaccagccgaagaagcaccttggccaccgcccgaaggcgcgtttttaggttaccgtttgagtcgcccggaaccgatgtgggccgaattattggctcttgcagcgtctgcccagggacgtgtgtatcgcgcggaagaccctcatggtgcgctccgcggcctcttcgaagtccgtggactccttgccaaagacttagctgttgttgcattgcgcgaaggtcttgatttacctccgactgatgatccaatgcttcttgcgtacctcttggacccgtcaaacacgacgcccgaaggcgtagcccgtcgttacggcggcgagtggaccgaagatgcagcgaaacgcgcgttattggccgaacgtttgcacgccaatttattaggacgtttgcaaggcgaggaacgtctcctctggctttacgaagaagtggagaaaccattgagtcgcgtgctcgcgcatatggaagctaccggtgtcaaattagacgtggcgtatttggaggctctcagccttgaagttgctgccgaaatgcgccgcttggaggaagaagtattccgtttagcaggccattcctttcgccttaattctcgcgatcagttagaacgtgtgttgttcgatgaacttggtctccctcctatcggcaagacagagaagaccggtaaacgtagcacttcagcggcggttttagaagctcttcgcgaagtccatcccattgtggacaagatcttgcagtaccgcgaactcgcgaaattgaaaggcacctatattgaccctcttccggcattagtccacccgaaaacgggacgcctccatacccgcttcaaccaaacagccacggcgaccggtcgtttgtcctcctctgatccaaaccttcagaatattccagtacgtaccccattgggccagaagatccgccgcgcgtttgtagctgaggagggttggcgtttagtggccctcgattatagccaaattgaattacgtgtccttgcccatctttctggcgatgagaacctcatccgcgtgtttcaggaaggcaaagacattcacactcaaacggcaagctggatgtttggattatcagctgaagcgatcgatcctttgatgcgtcgtgcagcgaagaccatcaatttcggtgttctctacggtatgagtgcctttcgtttgtcgcaggaattaggcattccctatgaagaagctgcggcgttcattcagaaatactttcaaagctatcccaaagttaaagcatggatcgagaagactctcgaagaaggccgcacacgtggttacgtagagaccttatttggacgtcgccgctatgttcccgatttaaacgctcgcgtgaaatctgtccgtgaagccgccgaacgcatggcgttcaacatgcctgtacagggcacggcagctgacctcatgaaacttgcaatggtgcgcctttttccacaattgcgtgaagttggtgcccgcatgctcttgcaggtccacgatgaactcttgttagaagcgccaaaagaggctgcggaagaggtggcagccctcgcgaaagaggttatggaaggcgtgtggcccttagcggtgcctcttgaagtcgaagttggtattggcgaggattggctggctgccaaaggataatga

SEQ ID NO: 2658 - protein, 841 aa, synthetic construct
  REGION 1..841: note = Variant of DNA polymerase I from Thermus sp. strain 2.9
MHHHHHHGGSGVLPVFEPKGRVLLVDGHHLAYRNFFALKGLTTSRGEPVQGVYGFAKSLLKALKEDGDVVIVVFDAKAPSFRHEAYEAYKAGRAPTPEDFPRQLALMKELVDLLGLERLEVPGFEADDVLATLAKKAEREGYEVQILTADRDLFQLLSPRISVLHPEGHRITPEWLWEKYGLRPEQWVDFRALAGDPSDNIPGVKGIGEKTALKLLKEWGSLENLLKNLDQVKPESVREKILAHLEDLKLSRELSRVRTDLPLEVDFRRRREPDWEGLKAFLERLEFGSLLHEFGLLESPLPAEEAPWPPPEGAFLGYRLSRPEPMWAELLALAASAQGRVYRAEDPHGALRGLFEVRGLLAKDLAVVALREGLDLPPTDDPMLLAYLLDPSNTTPEGVARRYGGEWTEDAAKRALLAERLHANLLGRLQGEERLLWLYEEVEKPLSRVLAHMEATGVKLDVAYLEALSLEVAAEMRRLEEEVFRLAGHSFRLNSRDQLERVLFDELGLPPIGKTEKTGKRSTSAAVLEALREVHPIVDKILQYRELAKLKGTYIDPLPALVHPKTGRLHTRFNQTATATGRLSSSDPNLQNIPVRTPLGQKIRRAFVAEEGWRLVALDYSQIELRVLAHLSGDENLIRVFQEGKDIHTQTASWMFGLSAEAIDPLMRRAAKTINFGVLYGMSAFRLSQELGIPYEEAAAFIQKYFQSYPKVKAWIEKTLEEGRTRGYVETLFGRRRYVPDLNARVKSVREAAERMAFNMPVQGTAADLMKLAMVRLFPQLREVGARMLLQVHDELLLEAPKEAAEEVAALAKEVMEGVWPLAVPLEVEVGIGEDWLAAKG

SEQ ID NO: 2659 - DNA, 2529 bp, synthetic construct
  misc_feature 1..2529: note = Variant of DNA polymerase I from Thermus sp. strain 2.9
  source 1..2529: mol_type = other DNA
atgcaccatcatcatcatcatggcggtagcggcgtgttaccggtgttcgagcctaaaggtcgcgtgcttctggttgatggccatcatctcgcgtatcgtaacttctttgccctgaaatcgttaaccaccagccgtggcgagccggtacagggtgtctacggctttgcaaagtcgctcctgaaagctctgaaagaagacggtgatgtggtgattgttgtctttgatgcgaaagcgccaagttttcgccacgaagcgtacgaagcttacaaagccgggcgtgctccaacgccggaagactttcctcgccaattggcgcttatgaaggaattagtggatttgcttggcctcgaacgcttggaagttcccggtttcgaggcagacgacgtattagcgactctcgcaaagaaagccgaacgtgagggctatgaagtccagatcttgacagcagatcgcgatcttttccagcttttatctccgcgcatctcggtgttacacccggaagggcatcgtatcaccccggaatggctctgggagaaatatggtttgcgtcccgaacaatgggtggattttcgcgccttagcaggcgatccgagcgacaatattccgggagttaaaggtatcggcgagaagacggcgctcaagctccttaaagaatgggggtcgttggagaacttgcttaagaatttagatcaggtcaaaccagagtcagtgcgtgagaagattcttgcacacctcgaagacctcaaattaagccgcgaattgtcccgtgtacgcaccgatttgccgctcgaagttgatttccgtcgccgccgcgaacctgactgggagggtcttaaagcgtttttagagcgtcttgaatttggttcgctcttgcatgaattcggccttttagaaagcccgttaccagccgaagaagcaccttggccaccgcccgaaggcgcgtttttaggttaccgtttgagtcgcccggaaccgatgtgggccgaattattggctcttgcagcgtctgcccagggacgtgtgtatcgcgcggaagaccctcatggtgcgctccgcggcctcttcgaagtccgtggactccttgccaaagacttagctgttgttgcattgcgcgaaggtcttgatttacctccgactgatgatccaatgcttcttgcgtacctcttggacccgtcaaacacgacgcccgaaggcgtagcccgtcgttacggcggcgagtggaccgaagatgcagcgaaacgcgcgttattggccgaacgtttgcacgccaatttattaggacgtttgcaaggcgaggaacgtctcctctggctttacgaagaagtggagaaaccattgagtcgcgtgctcgcgcatatggaagctaccggtgtcaaattagacgtggcgtatttggaggctctcagccttgaagttgctgccgaaatgcgccgcttggaggaagaagtattccgtttagcaggccattcctttcgccttaattctcgcgatcagttagaacgtgtgttgttcgatgaacttggtctccctcctatcggcaagacagagaagaccggtaaacgtagcacttcagcggcggttttagaagctcttcgcgaagtccatcccattgtggacaagatcttgcagtaccgcgaactcgcgaaattgaaaggcacctatattgaccctcttccggcattagtccacccgaaaacgggacgcctccatacccgcttcaaccaaacagccacggcgaccggtcgtttgtcctcctctgatccaaaccttcagaatattccagtacgtaccccattgggccagaagatccgccgcgcgtttgtagctgaggagggttggcgtttagtggccctcgattatagccaaattgaattacgtgtccttgcccatctttctggcgatgagaacctcatccgcgtgtttcaggaaggcaaagacattcacactcaaacggcaagctggatgtttggattatcagctgaagcgatcgatcctttgatgcgtcgtgcagcgaagaccatcaatttcggtgttctctacggtatgagtgcctttcgtttgtcgcaggaattaggcattccctatgaagaagctgcggcgttcattcagaaatactttcaaagctatcccaaagttaaagcatggatcgagaagactctcgaagaaggccgcacacgtggttacgtagagaccttatttggacgtcgccgctatgttcccgatttaaacgctcgcgtgaaatctgtccgtgaagccgccgaacgcatggcgttcaacatgcctgtacagggcacggcagctgacctcatgaaacttgcaatggtgcgcctttttccacaattgcgtgaagttggtgcccgcatgctcttgcaggtccacgatgaactcttgttagaagcgccaaaagagcgtgcggaagaggtggcagccctcgcgaaagaggttatggaaggcgtgtggcccttagcggtgcctcttgaagtcgaagttggtattggcgaggattggctggctgccaaaggataatga

SEQ ID NO: 2660 - protein, 841 aa, synthetic construct
  REGION 1..841: note = Variant of DNA polymerase I from Thermus sp. strain 2.9
MHHHHHHGGSGVLPVFEPKGRVLLVDGHHLAYRNFFALKSLTTSRGEPVQGVYGFAKSLLKALKEDGDVVIVVFDAKAPSFRHEAYEAYKAGRAPTPEDFPRQLALMKELVDLLGLERLEVPGFEADDVLATLAKKAEREGYEVQILTADRDLFQLLSPRISVLHPEGHRITPEWLWEKYGLRPEQWVDFRALAGDPSDNIPGVKGIGEKTALKLLKEWGSLENLLKNLDQVKPESVREKILAHLEDLKLSRELSRVRTDLPLEVDFRRRREPDWEGLKAFLERLEFGSLLHEFGLLESPLPAEEAPWPPPEGAFLGYRLSRPEPMWAELLALAASAQGRVYRAEDPHGALRGLFEVRGLLAKDLAVVALREGLDLPPTDDPMLLAYLLDPSNTTPEGVARRYGGEWTEDAAKRALLAERLHANLLGRLQGEERLLWLYEEVEKPLSRVLAHMEATGVKLDVAYLEALSLEVAAEMRRLEEEVFRLAGHSFRLNSRDQLERVLFDELGLPPIGKTEKTGKRSTSAAVLEALREVHPIVDKILQYRELAKLKGTYIDPLPALVHPKTGRLHTRFNQTATATGRLSSSDPNLQNIPVRTPLGQKIRRAFVAEEGWRLVALDYSQIELRVLAHLSGDENLIRVFQEGKDIHTQTASWMFGLSAEAIDPLMRRAAKTINFGVLYGMSAFRLSQELGIPYEEAAAFIQKYFQSYPKVKAWIEKTLEEGRTRGYVETLFGRRRYVPDLNARVKSVREAAERMAFNMPVQGTAADLMKLAMVRLFPQLREVGARMLLQVHDELLLEAPKERAEEVAALAKEVMEGVWPLAVPLEVEVGIGEDWLAAKG

SEQ ID NO: 2661 - DNA, 2529 bp, synthetic construct
  misc_feature 1..2529: note = Variant of DNA polymerase I from Thermus sp. strain 2.9
  source 1..2529: mol_type = other DNA
atgcaccatcatcatcatcatggcggtagcggcgtgttaccggtgttcgagcctaaaggtcgcgtgcttctggttgatggccatcatctcgcgtatcgtaacttctttgccctgaaaggattaaccaccagccgtggcgagccggtacagggtgtctacggctttgcaaagtcgctcctgaaagctctgaaagaagacggtgatgtggtgattgttgtctttgatgcgaaagcgccaagttttcgccacgaagcgtacgaagcttacaaagccgggcgtgctccaacgccggaagactttcctcgccaattggcgcttatgaaggaattagtggatttgcttggcctcgaacgcttggaagttcccggtttcgaggcagacgacgtattagcgactctcgcaaagaaagccgaacgtgagggctatgaagtccagatcttgacagcagatcgcgatcttttccagcttttatctccgcgcatctcggtgttacacccggaagggcatcgtatcaccccggaatggctctgggagaaatatggtttgcgtcccgaacaatgggtggattttcgcgccttagcaggcgatccgagcgacaatattccgggagttaaaggtatcggcgagaagacggcgctcaagctccttaaagaatgggggtcgttggagaacttgcttaagaatttagatcaggtcaaaccagagtcagtgcgtgagaagattcttgcacacctcgaagacctcaaattaagccgcgaattgtcccgtgtacgcaccgatttgccgctcgaagttgatttccgtcgccgccgcgaacctgactgggagggtcttaaagcgtttttagagcgtcttgaatttggttcgctcttgcatgaattcggccttttagaaagcccgttaccagccgaagaagcaccttggccaccgcccgaaggcgcgtttttaggttaccgtttgagtcgcccggaaccgatgtgggccgaattattggctcttgcagcgtctgcccagggacgtgtgtatcgcgcggaagaccctcatggtgcgctccgcggcctcttcgaagtccgtggactccttgccaaagacttagctgttgttgcattgcgcgaaggtcttgatttacctccgactgatgatccaatgcttcttgcgtacctcttggacccgtcaaacacgacgcccgaaggcgtagcccgtcgttacggcggcgagtggaccgaagatgcagcgaaacgcgcgttattggccgaacgtttgcacgccaatttattaggacgtttgcaaggcgaggaacgtctcctctggctttacgaagaagtggagaaaccattgagtcgcgtgctcgcgcatatggaagctaccggtgtcaaattagacgtggcgtatttggaggctctcagccttgaagttgctgccgaaatgcgccgcttggaggaagaagtattccgtttagcaggccattcctttcgccttaattctcgcgatcagttagaacgtgtgttgttcgatgaacttggtctccctcctatcggcaagacagagaagaccggtaaacgtagcacttcagcggcggttttagaagctcttcgcgaagtccatcccattgtggacaagatcttgcagtaccgcgaactcgcgaaattgaaaggcacctatattgaccctcttccggcattagtccacccgaaaacgggacgcctccatacccgcttcaaccaaacagccacggcgaccggtcgtttgtcctcctctgatccaaaccttcagaatattccagtacgtaccccattgggccagaagatccgccgcgcgtttgtagctgaggagggttggcgtttagtggccctcgattatacgcaaattgaattacgtgtccttgcccatctttctggcgatgagaacctcatccgcgtgtttcaggaaggcaaagacattcacactcaaacggcaagctggatgtttggattatcagctgaagcgatcgatcctttgatgcgtcgtgcagcgaagaccatcaatttcggtgttctctacggtatgagtgcctttcgtttgtcgcaggaattaggcattccctatgaagaagctgcggcgttcattcagaaatactttcaaagctatcccaaagttaaagcatggatcgagaagactctcgaagaaggccgcacacgtggttacgtagagaccttatttggacgtcgccgctatgttcccgatttaaacgctcgcgtgaaatctgtccgtgaagccgccgaacgcatggcgttcaacatgcctgtacagggcacggcagctgacctcatgaaacttgcaatggtgcgcctttttccacaattgcgtgaagttggtgcccgcatgctcttgcaggtccacgatgaactcttgttagaagcgccaaaagagcgtgcggaagaggtggcagccctcgcgaaagaggttatggaaggcgtgtggcccttagcggtgcctcttgaagtcgaagttggtattggcgaggattggctggctgccaaaggataatga

SEQ ID NO: 2662 - protein, 841 aa, synthetic construct
  REGION 1..841: note = Variant of DNA polymerase I from Thermus sp. strain 2.9
MHHHHHHGGSGVLPVFEPKGRVLLVDGHHLAYRNFFALKGLTTSRGEPVQGVYGFAKSLLKALKEDGDVVIVVFDAKAPSFRHEAYEAYKAGRAPTPEDFPRQLALMKELVDLLGLERLEVPGFEADDVLATLAKKAEREGYEVQILTADRDLFQLLSPRISVLHPEGHRITPEWLWEKYGLRPEQWVDFRALAGDPSDNIPGVKGIGEKTALKLLKEWGSLENLLKNLDQVKPESVREKILAHLEDLKLSRELSRVRTDLPLEVDFRRRREPDWEGLKAFLERLEFGSLLHEFGLLESPLPAEEAPWPPPEGAFLGYRLSRPEPMWAELLALAASAQGRVYRAEDPHGALRGLFEVRGLLAKDLAVVALREGLDLPPTDDPMLLAYLLDPSNTTPEGVARRYGGEWTEDAAKRALLAERLHANLLGRLQGEERLLWLYEEVEKPLSRVLAHMEATGVKLDVAYLEALSLEVAAEMRRLEEEVFRLAGHSFRLNSRDQLERVLFDELGLPPIGKTEKTGKRSTSAAVLEALREVHPIVDKILQYRELAKLKGTYIDPLPALVHPKTGRLHTRFNQTATATGRLSSSDPNLQNIPVRTPLGQKIRRAFVAEEGWRLVALDYTQIELRVLAHLSGDENLIRVFQEGKDIHTQTASWMFGLSAEAIDPLMRRAAKTINFGVLYGMSAFRLSQELGIPYEEAAAFIQKYFQSYPKVKAWIEKTLEEGRTRGYVETLFGRRRYVPDLNARVKSVREAAERMAFNMPVQGTAADLMKLAMVRLFPQLREVGARMLLQVHDELLLEAPKERAEEVAALAKEVMEGVWPLAVPLEVEVGIGEDWLAAKG

SEQ ID NO: 2663 - DNA, 2529 bp, synthetic construct
  misc_feature 1..2529: note = Variant of DNA polymerase I from Thermus sp. strain 2.9
  source 1..2529: mol_type = other DNA
atgcaccatcatcatcatcatggcggtagcggcgtgttaccggtgttcgagcctaaaggtcgcgtgcttctggttgatggccatcatctcgcgtatcgtaacttctttgccctgaaaggattaaccaccagccgtggcgagccggtacagggtgtctacggctttgcaaagtcgctcctgaaagctctgaaagaagacggtgatgtggtgattgttgtctttgatgcgaaagcgccaagttttcgccacgaagcgtacgaagcttacaaagccgggcgtgctccaacgccggaagactttcctcgccaattggcgcttatgaaggaattagtggatttgcttggcctcgaacgcttggaagttcccggtttcgaggcagacgacgtattagcgactctcgcaaagaaagccgaacgtgagggctatgaagtccagatcttgacagcagatcgcgatcttttccagcttttatctccgcgcatctcggtgttacacccggaagggcatcgtatcaccccggaatggctctgggagaaatatggtttgcgtcccgaacaatgggtggattttcgcgccttagcaggcgatccgagcgacaatattccgggagttaaaggtatcggcgagaagacggcgctcaagctccttaaagaatgggggtcgttggagaacttgcttaagaatttagatcaggtctcgccagagtcagtgcgtgagaagattcttgcacacctcgaagacctcaaattaagccgcgaattgtcccgtgtacgcaccgatttgccgctcgaagttgatttccgtcgccgccgcgaacctgactgggagggtcttaaagcgtttttagagcgtcttgaatttggttcgctcttgcatgaattcggccttttagaaagcccgttaccagccgaagaagcaccttggccaccgcccgaaggcgcgtttttaggttaccgtttgagtcgcccggaaccgatgtgggccgaattattggctcttgcagcgtctgcccagggacgtgtgtatcgcgcggaagaccctcatggtgcgctccgcggcctcttcgaagtccgtggactccttgccaaagacttagctgttgttgcattgcgcgaaggtcttgatttacctccgactgatgatccaatgcttcttgcgtacctcttggacccgtcaaacacgacgcccgaaggcgtagcccgtcgttacggcggcgagtggaccgaagatgcagcgaaacgcgcgttattggccgaacgtttgcacgccaatttattaggacgtttgcaaggcgaggaacgtctcctctggctttacgaagaagtggagaaaccattgagtcgcgtgctcgcgcatatggaagctaccggtgtcaaattagacgtggcgtatttggaggctctcagccttgaagttgctgccgaaatgcgccgcttggaggaagaagtattccgtttagcaggccattcctttcgccttaattctcgcgatcagttagaacgtgtgttgttcgatgaacttggtctccctcctatcggcaagacagagaagaccggtaaacgtagcacttcagcggcggttttagaagctcttcgcgaagtccatcccattgtggacaagatcttgcagtaccgcgaactcgcgaaattgaaaggcacctatattgaccctcttccggcattagtccacccgaaaacgggacgcctccatacccgcttcaaccaaacagccacggcgaccggtcgtttgtcctcctctgatccaaaccttcagaatattccagtacgtaccccattgggccagaagatccgccgcgcgtttgtagctgaggagggttggcgtttagtggccctcgattatagccaaattgaattacgtgtccttgcccatctttctggcgatgagaacctcatccgcgtgtttcaggaaggcaaagacattcacactcaaacggcaagctggatgtttggattatcagctgaagcgatcgatcctttgatgcgtcgtgcagcgaagaccatcaatttcggtgttctctacggtatgagtgcctttcgtttgtcgcaggaattaggcattccctatgaagaagctgcggcgttcattcagaaatactttcaaagctatcccaaagttaaagcatggatcgagaagactctcgaagaaggccgcacacgtggttacgtagagaccttatttggacgtcgccgctatgttcccgatttaaacgctcgcgtgaaatctgtccgtgaagccgccgaacgcatggcgttcaacatgcctgtacagggcacggcagctgacctcatgaaacttgcaatggtgcgcctttttccacaattgcgtgaagttggtgcccgcatgctcttgcaggtccacgatgaactcttgttagaagcgccaaaagagcgtgcggaagaggtggcagccctcgcgaaagaggttatggaaggcgtgtggcccttagcggtgcctcttgaagtcgaagttggtattggcgaggattggctggctgccaaaggataatga

SEQ ID NO: 2664 - protein, 841 aa, synthetic construct
  REGION 1..841: note = Variant of DNA polymerase I from Thermus sp. strain 2.9
MHHHHHHGGSGVLPVFEPKGRVLLVDGHHLAYRNFFALKGLTTSRGEPVQGVYGFAKSLLKALKEDGDVVIVVFDAKAPSFRHEAYEAYKAGRAPTPEDFPRQLALMKELVDLLGLERLEVPGFEADDVLATLAKKAEREGYEVQILTADRDLFQLLSPRISVLHPEGHRITPEWLWEKYGLRPEQWVDFRALAGDPSDNIPGVKGIGEKTALKLLKEWGSLENLLKNLDQVSPESVREKILAHLEDLKLSRELSRVRTDLPLEVDFRRRREPDWEGLKAFLERLEFGSLLHEFGLLESPLPAEEAPWPPPEGAFLGYRLSRPEPMWAELLALAASAQGRVYRAEDPHGALRGLFEVRGLLAKDLAVVALREGLDLPPTDDPMLLAYLLDPSNTTPEGVARRYGGEWTEDAAKRALLAERLHANLLGRLQGEERLLWLYEEVEKPLSRVLAHMEATGVKLDVAYLEALSLEVAAEMRRLEEEVFRLAGHSFRLNSRDQLERVLFDELGLPPIGKTEKTGKRSTSAAVLEALREVHPIVDKILQYRELAKLKGTYIDPLPALVHPKTGRLHTRFNQTATATGRLSSSDPNLQNIPVRTPLGQKIRRAFVAEEGWRLVALDYSQIELRVLAHLSGDENLIRVFQEGKDIHTQTASWMFGLSAEAIDPLMRRAAKTINFGVLYGMSAFRLSQELGIPYEEAAAFIQKYFQSYPKVKAWIEKTLEEGRTRGYVETLFGRRRYVPDLNARVKSVREAAERMAFNMPVQGTAADLMKLAMVRLFPQLREVGARMLLQVHDELLLEAPKERAEEVAALAKEVMEGVWPLAVPLEVEVGIGEDWLAAKG

SEQ ID NO: 2665 - DNA, 2529 bp, synthetic construct
  misc_feature 1..2529: note = Variant of DNA polymerase I from Thermus sp. strain 2.9
  source 1..2529: mol_type = other DNA
atgcaccatcatcatcatcatggcggtagcggcgtgttaccggtgttcgagcctaaaggtcgcgtgcttctggttgatggccatcatctcgcgtatcgtaacttctttgccctgaaaggattaaccaccagccgtggcgagccggtacagggtgtctacggctttgcaaagtcgctcctgaaagctctgaaagaagacggtgatgtggtgattgttgtctttgatgcgaaagcgccaagttttcgccacgaagcgtacgaagcttacaaagccgggcgtgctccaacgccggaagactttcctgatcaattggcgcttatgaaggaattagtggatttgcttggcctcgaacgcttggaagttcccggtttcgaggcagacgacgtattagcgactctcgcaaagaaagccgaacgtgagggctatgaagtccagatcttgacagcagatcgcgatcttttccagcttttatctccgcgcatctcggtgttacacccggaagggcatcgtatcaccccggaatggctctgggagaaatatggtttgcgtcccgaacaatgggtggattttcgcgccttagcaggcgatccgagcgacaatattccgggagttaaaggtatcggcgagaagacggcgctcaagctccttaaagaatgggggtcgttggagaacttgcttaagaatttagatcaggtcaaaccagagtcagtgcgtgagaagattcttgcacacctcgaagacctcaaattaagccgcgaattgtcccgtgtacgcaccgatttgccgctcgaagttgatttccgtcgccgccgcgaacctgactgggagggtcttaaagcgtttttagagcgtcttgaatttggttcgctcttgcatgaattcggccttttagaaagcccgttaccagccgaagaagcaccttggccaccgcccgaaggcgcgtttttaggttaccgtttgagtcgcccggaaccgatgtgggccgaattattggctcttgcagcgtctgcccagggacgtgtgtatcgcgcggaagaccctcatggtgcgctccgcggcctcttcgaagtccgtggactccttgccaaagacttagctgttgttgcattgcgcgaaggtcttgatttacctccgactgatgatccaatgcttcttgcgtacctcttggacccgtcaaacacgacgcccgaaggcgtagcccgtcgttacggcggcgagtggaccgaagatgcagcgaaacgcgcgttattggccgaacgtttgcacgccaatttattaggacgtttgcaaggcgaggaacgtctcctctggctttacgaagaagtggagaaaccattgagtcgcgtgctcgcgcatatggaagctaccggtgtcaaattagacgtggcgtatttggaggctctcagccttgaagttgctgccgaaatgcgccgcttggaggaagaagtattccgtttagcaggccattcctttcgccttaattctcgcgatcagttagaacgtgtgttgttcgatgaacttggtctccctcctatcggcaagacagagaagaccggtaaacgtagcacttcagcggcggttttagaagctcttcgcgaagtccatcccattgtggacaagatcttgcagtaccgcgaactcgcgaaattgaaaggcacctatattgaccctcttccggcattagtccacccgaaaacgggacgcctccatacccgcttcaaccaaacagccacggcgaccggtcgtttgtcctcctctgatccaaaccttcagaatattccagtacgtaccccattgggccagaagatccgccgcgcgtttgtagctgaggagggttggcgtttagtggccctcgattatagccaaattgaattacgtgtccttgcccatctttctggcgatgagaacctcatccgcgtgtttcaggaaggcaaagacattcacactcaaacggcaagctggatgtttggattatcagctgaagcgatcgatcctttgatgcgtcgtgcagcgaagaccatcaatttcggtgttctctacggtatgagtgcctttcgtttgtcgcaggaattaggcattccctatgaagaagctgcggcgttcattcagaaatactttcaaagctatcccaaagttaaagcatggatcgagaagactctcgaagaaggccgcacacgtggttacgtagagaccttatttggacgtcgccgctatgttcccgatttaaacgctcgcgtgaaatctgtccgtgaagccgccgaacgcatggcgttcaacatgcctgtacagggcacggcagctgacctcatgaaacttgcaatggtgcgcctttttccacaattgcgtgaagttggtgcccgcatgctcttgcaggtccacgatgaactcttgttagaagcgccaaaagagcgtgcggaagaggtggcagccctcgcgaaagaggttatggaaggcgtgtggcccttagcggtgcctcttgaagtcgaagttggtattggcgaggattggctggctgccaaaggataatga

SEQ ID NO: 2666 - protein, 841 aa, synthetic construct
  REGION 1..841: note = Variant of DNA polymerase I from Thermus sp. strain 2.9
MHHHHHHGGSGVLPVFEPKGRVLLVDGHHLAYRNFFALKGLTTSRGEPVQGVYGFAKSLLKALKEDGDVVIVVFDAKAPSFRHEAYEAYKAGRAPTPEDFPDQLALMKELVDLLGLERLEVPGFEADDVLATLAKKAEREGYEVQILTADRDLFQLLSPRISVLHPEGHRITPEWLWEKYGLRPEQWVDFRALAGDPSDNIPGVKGIGEKTALKLLKEWGSLENLLKNLDQVKPESVREKILAHLEDLKLSRELSRVRTDLPLEVDFRRRREPDWEGLKAFLERLEFGSLLHEFGLLESPLPAEEAPWPPPEGAFLGYRLSRPEPMWAELLALAASAQGRVYRAEDPHGALRGLFEVRGLLAKDLAVVALREGLDLPPTDDPMLLAYLLDPSNTTPEGVARRYGGEWTEDAAKRALLAERLHANLLGRLQGEERLLWLYEEVEKPLSRVLAHMEATGVKLDVAYLEALSLEVAAEMRRLEEEVFRLAGHSFRLNSRDQLERVLFDELGLPPIGKTEKTGKRSTSAAVLEALREVHPIVDKILQYRELAKLKGTYIDPLPALVHPKTGRLHTRFNQTATATGRLSSSDPNLQNIPVRTPLGQKIRRAFVAEEGWRLVALDYSQIELRVLAHLSGDENLIRVFQEGKDIHTQTASWMFGLSAEAIDPLMRRAAKTINFGVLYGMSAFRLSQELGIPYEEAAAFIQKYFQSYPKVKAWIEKTLEEGRTRGYVETLFGRRRYVPDLNARVKSVREAAERMAFNMPVQGTAADLMKLAMVRLFPQLREVGARMLLQVHDELLLEAPKERAEEVAALAKEVMEGVWPLAVPLEVEVGIGEDWLAAKG

SEQ ID NO: 2667 - DNA, 2529 bp, synthetic construct
  misc_feature 1..2529: note = Variant of DNA polymerase I from Thermus sp. strain 2.9
  source 1..2529: mol_type = other DNA
atgcaccatcatcatcatcatggcggtagcggcgtgttaccggtgttcgagcctaaaggtcgcgtgcttctggttgatggccatcatctcgcgtatcgtaacttctttgccctgaaaggattaaccaccagccgtggcgagccggtacagggtgtctacggctttgcaaagtcgctcctgaaagctctgaaagaagacggtgatgtggtgattgttgtctttgatgcgaaagcgccaagttttcgccacgaagcgtacgaagcttacaaagccgggcgtgctccaacgccggaagactttcctcgccaattggcgcttatgaaggaattagtggatttgcttggcctcgaacgcttggaagttcccggtttcgaggcagacgacgtattagcgactctcgcaaagaaagccgaacgtgagggctatgaagtccagatcttgacagcagatcgcgatcttttccagcttttatctccgcgcatctcggtgttacacccggaagggcatcgtatcaccccggaatggctctgggagaaatatggtttgcgtcccgaacaatgggtggattttcgcgccttagggggcgatccgagcgacaatattccgggagttaaaggtatcggcgagaagacggcgctcaagctccttaaagaatgggggtcgttggagaacttgcttaagaatttagatcaggtcaaaccagagtcagtgcgtgagaagattcttgcacacctcgaagacctcaaattaagccgcgaattgtcccgtgtacgcaccgatttgccgctcgaagttgatttccgtcgccgccgcgaacctgactgggagggtcttaaagcgtttttagagcgtcttgaatttggttcgctcttgcatgaattcggccttttagaaagcccgttaccagccgaagaagcaccttggccaccgcccgaaggcgcgtttttaggttaccgtttgagtcgcccggaaccgatgtgggccgaattattggctcttgcagcgtctgcccagggacgtgtgtatcgcgcggaagaccctcatggtgcgctccgcggcctcttcgaagtccgtggactccttgccaaagacttagctgttgttgcattgcgcgaaggtcttgatttacctccgactgatgatccaatgcttcttgcgtacctcttggacccgtcaaacacgacgcccgaaggcgtagcccgtcgttacggcggcgagtggaccgaagatgcagcgaaacgcgcgttattggccgaacgtttgcacgccaatttattaggacgtttgcaaggcgaggaacgtctcctctggctttacgaagaagtggagaaaccattgagtcgcgtgctcgcgcatatggaagctaccggtgtcaaattagacgtggcgtatttggaggctctcagccttgaagttgctgccgaaatgcgccgcttggaggaagaagtattccgtttagcaggccattcctttcgccttaattctcgcgatcagttagaacgtgtgttgttcgatgaacttggtctccctcctatcggcaagacagagaagaccggtaaacgtagcacttcagcggcggttttagaagctcttcgcgaagtccatcccattgtggacaagatcttgcagtaccgcgaactcgcgaaattgaaaggcacctatattgaccctcttccggcattagtccacccgaaaacgggacgcctccatacccgcttcaaccaaacagccacggcgaccggtcgtttgtcctcctctgatccaaaccttcagaatattccagtacgtaccccattgggccagaagatccgccgcgcgtttgtagctgaggagggttggcgtttagtggccctcgattatagccaaattgaattacgtgtccttgcccatctttctggcgatgagaacctcatccgcgtgtttcaggaaggcaaagacattcacactcaaacggcaagctggatgtttggattatcagctgaagcgatcgatcctttgatgcgtcgtgcagcgaagaccatcaatttcggtgttctctacggtatgagtgcctttcgtttgtcgcaggaattaggcattccctatgaagaagctgcggcgttcattcagaaatactttcaaagctatcccaaagttaaagcatggatcgagaagactctcgaagaaggccgcacacgtggttacgtagagaccttatttggacgtcgccgctatgttcccgatttaaacgctcgcgtgaaatctgtccgtgaagccgccgaacgcatggcgttcaacatgcctgtacagggcacggcagctgacctcatgaaacttgcaatggtgcgcctttttccacaattgcgtgaagttggtgcccgcatgctcttgcaggtccacgatgaactcttgttagaagcgccaaaagagcgtgcggaagaggtggcagccctcgcgaaagaggttatggaaggcgtgtggcccttagcggtgcctcttgaagtcgaagttggtattggcgaggattggctggctgccaaaggataatga

SEQ ID NO: 2668 - protein, 841 aa, synthetic construct
  REGION 1..841: note = Variant of DNA polymerase I from Thermus sp. strain 2.9
MHHHHHHGGSGVLPVFEPKGRVLLVDGHHLAYRNFFALKGLTTSRGEPVQGVYGFAKSLLKALKEDGDVVIVVFDAKAPSFRHEAYEAYKAGRAPTPEDFPRQLALMKELVDLLGLERLEVPGFEADDVLATLAKKAEREGYEVQILTADRDLFQLLSPRISVLHPEGHRITPEWLWEKYGLRPEQWVDFRALGGDPSDNIPGVKGIGEKTALKLLKEWGSLENLLKNLDQVKPESVREKILAHLEDLKLSRELSRVRTDLPLEVDFRRRREPDWEGLKAFLERLEFGSLLHEFGLLESPLPAEEAPWPPPEGAFLGYRLSRPEPMWAELLALAASAQGRVYRAEDPHGALRGLFEVRGLLAKDLAVVALREGLDLPPTDDPMLLAYLLDPSNTTPEGVARRYGGEWTEDAAKRALLAERLHANLLGRLQGEERLLWLYEEVEKPLSRVLAHMEATGVKLDVAYLEALSLEVAAEMRRLEEEVFRLAGHSFRLNSRDQLERVLFDELGLPPIGKTEKTGKRSTSAAVLEALREVHPIVDKILQYRELAKLKGTYIDPLPALVHPKTGRLHTRFNQTATATGRLSSSDPNLQNIPVRTPLGQKIRRAFVAEEGWRLVALDYSQIELRVLAHLSGDENLIRVFQEGKDIHTQTASWMFGLSAEAIDPLMRRAAKTINFGVLYGMSAFRLSQELGIPYEEAAAFIQKYFQSYPKVKAWIEKTLEEGRTRGYVETLFGRRRYVPDLNARVKSVREAAERMAFNMPVQGTAADLMKLAMVRLFPQLREVGARMLLQVHDELLLEAPKERAEEVAALAKEVMEGVWPLAVPLEVEVGIGEDWLAAKG

SEQ ID NO: 2669 - DNA, 2529 bp, synthetic construct
  misc_feature 1..2529: note = Variant of DNA polymerase I from Thermus sp. strain 2.9
  source 1..2529: mol_type = other DNA
atgcaccatcatcatcatcatggcggtagcggcgtgttaccggtgttcgagcctaaaggtcgcgtgcttctggttgatggccatcatctcgcgtatcgtaacttctttgccctgaaaggattaaccaccagccgtggcgagccggtacagggtgtctacggctttgcaaagtcgctcctgaaagctctgaaagaagacggtgatgtggtgattgttgtctttgatgcgaaagcgccaagttttcgccacgaagcgtacgaagcttacaaagccgggcgtgctccaacgccggaagactttcctcgccaattggcgcttatgaaggaattagtggatttgcttggcctcgaacgcttggaagttcccggtttcgaggcagacgacgtattagcgactctcgcaaagaaagccgaacgtgagggctatgaagtccagatcttgacagcagatcgcgatcttttccagcttttatctccgcgcatctcggtgttacacccggaagggcatcgtatcaccccggaatggctctgggagaaatatggtttgcgtcccgaacaatgggtggattttcgcgccttagcaggcgatccgagcgacaatattccgggagttaaaggtatcggcgagaagacggcgctcaagctccttaaagaatgggggtcgttggagaacttgcttaagaatttagatcaggtcaaaccagagtcagtgcgtgagaagattcttgcacacctcgaagacctcaaattaagccgcgaattgtcccgtgtacgcaccgatttgccgctcgaagttgatttccgtcgccgccgcgaacctgactgggagggtcttaaagcgtttttagagcgtcttgaatttggttcgctcttgcatgaattcggccttttagaaagcccgttaccagccgaagaagcaccttggccaccgcccgaaggcgcgtttttaggttaccgtttgagtcgcccggaaccgatgtgggccgaattattggctcttgcagcgtctgcccagggacgtgtgtatcgcgcggaagaccctcatggtgcgctccgcggcctcttcgaagtccgtggactccttgccaaagacttagctgttgttgcattgcgcgaaggtcttgatttacctccgactgatgatccaatgcttcttgcgtacctcttggacccgtcaaacacgacgcccgaaggcgtagcccgtcgttacggcggcgagtggaccgaagatgcagcgaaacgcgcgttattggccgaacgtttgcacgccaatttattaggacgtttgcaaggcgaggaacgtctcctctggctttacgaagaagtggagaaaccattgagtcgcgtgctcgcgcatatggaagctaccggtgtcaaattagacgtggcgtatttggaggctctcagccttgaagttgctgccgaaatgcgccgcttggaggaagaagtattccgtttagcaggccattcctttcgccttaattctcgcgatcagttagaacgtgtgttgttcgatgaacttggtctccctcctatcggcaagacagagaagaccggtaaacgtagcacttcagcggcggttttagaagctcttcgcgaagtccatcccattgtggacaagatcttgcagtaccgcgaactcgcgaaattgaaaggcacctatattgaccctcttccggcattagtccacccgaaaacgggacgcctccatacccgcttcaaccaaacagccacggcgaccggtcgtttgtcctcctctgatccaaaccttcagaatattccagtacgtaccccattgggccagaagatccgccgcgcgtttgtagctgaggagggttggcgtttagtggccctcgattatagccaaattgaattacgtgtccttgcccatctttctggcgatgagaacctcatccgcgtgtttcaggaaggcaaagacattcacactcaaacggcaagctggatgtttggattatcagctgaagcgatcgatcctttgatgcgtcgtgcagcgaagaccatcaatttcggtgttctctacggtatgagtgcctttcgtttgtcgcaggaattaggcattccctatgaagaagctgcggcgttcattcagaaatactttcaaagctatcccaaagttaaagcatggatcgagaagactctcgaagaaggccgcacacgtggttacgtagagaccttatttggacgtcgccgctatgttcccgatttaaacgctcgcgtgaaaggggtccgtgaagccgccgaacgcatggcgttcaacatgcctgtacagggcacggcagctgacctcatgaaacttgcaatggtgcgcctttttccacaattgcgtgaagttggtgcccgcatgctcttgcaggtccacgatgaactcttgttagaagcgccaaaagagcgtgcggaagaggtggcagccctcgcgaaagaggttatggaaggcgtgtggcccttagcggtgcctcttgaagtcgaagttggtattggcgaggattggctggctgccaaaggataatga

SEQ ID NO: 2670 - protein, 841 aa, synthetic construct
  REGION 1..841: note = Variant of DNA polymerase I from Thermus sp. strain 2.9
MHHHHHHGGSGVLPVFEPKGRVLLVDGHHLAYRNFFALKGLTTSRGEPVQGVYGFAKSLLKALKEDGDVVIVVFDAKAPSFRHEAYEAYKAGRAPTPEDFPRQLALMKELVDLLGLERLEVPGFEADDVLATLAKKAEREGYEVQILTADRDLFQLLSPRISVLHPEGHRITPEWLWEKYGLRPEQWVDFRALAGDPSDNIPGVKGIGEKTALKLLKEWGSLENLLKNLDQVKPESVREKILAHLEDLKLSRELSRVRTDLPLEVDFRRRREPDWEGLKAFLERLEFGSLLHEFGLLESPLPAEEAPWPPPEGAFLGYRLSRPEPMWAELLALAASAQGRVYRAEDPHGALRGLFEVRGLLAKDLAVVALREGLDLPPTDDPMLLAYLLDPSNTTPEGVARRYGGEWTEDAAKRALLAERLHANLLGRLQGEERLLWLYEEVEKPLSRVLAHMEATGVKLDVAYLEALSLEVAAEMRRLEEEVFRLAGHSFRLNSRDQLERVLFDELGLPPIGKTEKTGKRSTSAAVLEALREVHPIVDKILQYRELAKLKGTYIDPLPALVHPKTGRLHTRFNQTATATGRLSSSDPNLQNIPVRTPLGQKIRRAFVAEEGWRLVALDYSQIELRVLAHLSGDENLIRVFQEGKDIHTQTASWMFGLSAEAIDPLMRRAAKTINFGVLYGMSAFRLSQELGIPYEEAAAFIQKYFQSYPKVKAWIEKTLEEGRTRGYVETLFGRRRYVPDLNARVKGVREAAERMAFNMPVQGTAADLMKLAMVRLFPQLREVGARMLLQVHDELLLEAPKERAEEVAALAKEVMEGVWPLAVPLEVEVGIGEDWLAAKG

SEQ ID NO: 2671 - DNA, 2529 bp, synthetic construct
  misc_feature 1..2529: note = Variant of DNA polymerase I from Thermus sp. strain 2.9
  source 1..2529: mol_type = other DNA
atgcaccatcatcatcatcatggcggtagcggcgtgttaccggtgttcgagcctaaaggtcgcgtgcttctggttgatggccatcatctcgcgtatcgtaacttctttgccctgaaaggattaaccaccagccgtggcgagccggtacagggtgtctacggctttgcaaagtcgctcctgaaagctctgaaagaagacggtgatgtggtgattgttgtctttgatgcgaaagcgccaagttttcgccacgaagcgtacgaagcttacaaagccgggcgtgctccaacgccggaagactttcctgagcaattggcgcttatgaaggaattagtggatttgcttggcctcgaacgcttggaagttcccggtttcgaggcagacgacgtattagcgactctcgcaaagaaagccgaacgtgagggctatgaagtccagatcttgacagcagatcgcgatcttttccagcttttatctccgcgcatctcggtgttacacccggaagggcatcgtatcaccccggaatggctctgggagaaatatggtttgcgtcccgaacaatgggtggattttcgcgccttagcaggcgatccgagcgacaatattccgggagttaaaggtatcggcgagaagacggcgctcaagctccttaaagaatgggggtcgttggagaacttgcttaagaatttagatcaggtcaaaccagagtcagtgcgtgagaagattcttgcacacctcgaagacctcaaattaagccgcgaattgtcccgtgtacgcaccgatttgccgctcgaagttgatttccgtcgccgccgcgaacctgactgggagggtcttaaagcgtttttagagcgtcttgaatttggttcgctcttgcatgaattcggccttttagaaagcccgttaccagccgaagaagcaccttggccaccgcccgaaggcgcgtttttaggttaccgtttgagtcgcccggaaccgatgtgggccgaattattggctcttgcagcgtctgcccagggacgtgtgtatcgcgcggaagaccctcatggtgcgctccgcggcctcttcgaagtccgtggactccttgccaaagacttagctgttgttgcattgcgcgaaggtcttgatttacctccgactgatgatccaatgcttcttgcgtacctcttggacccgtcaaacacgacgcccgaaggcgtagcccgtcgttacggcggcgagtggaccgaagatgcagcgaaacgcgcgttattggccgaacgtttgcacgccaatttattaggacgtttgcaaggcgaggaacgtctcctctggctttacgaagaagtggagaaaccattgagtcgcgtgctcgcgcatatggaagctaccggtgtcaaattagacgtggcgtatttggaggctctcagccttgaagttgctgccgaaatgcgccgcttggaggaagaagtattccgtttagcaggccattcctttcgccttaattctcgcgatcagttagaacgtgtgttgttcgatgaacttggtctccctcctatcggcaagacagagaagaccggtaaacgtagcacttcagcggcggttttagaagctcttcgcgaagtccatcccattgtggacaagatcttgcagtaccgcgaactcgcgaaattgaaaggcacctatattgaccctcttccggcattagtccacccgaaaacgggacgcctccatacccgcttcaaccaaacagccacggcgaccggtcgtttgtcctcctctgatccaaaccttcagaatattccagtacgtaccccattgggccagaagatccgccgcgcgtttgtagctgaggagggttggcgtttagtggccctcgattatagccaaattgaattacgtgtccttgcccatctttctggcgatgagaacctcatccgcgtgtttcaggaaggcaaagacattcacactcaaacggcaagctggatgtttggattatcagctgaagcgatcgatcctttgatgcgtcgtgcagcgaagaccatcaatttcggtgttctctacggtatgagtgcctttcgtttgtcgcaggaattaggcattccctatgaagaagctgcggcgttcattcagaaatactttcaaagctatcccaaagttaaagcatggatcgagaagactctcgaagaaggccgcacacgtggttacgtagagaccttatttggacgtcgccgctatgttcccgatttaaacgctcgcgtgaaatctgtccgtgaagccgccgaacgcatggcgttcaacatgcctgtacagggcacggcagctgacctcatgaaacttgcaatggtgcgcctttttccacaattgcgtgaagttggtgcccgcatgctcttgcaggtccacgatgaactcttgttagaagcgccaaaagagcgtgcggaagaggtggcagccctcgcgaaagaggttatggaaggcgtgtggcccttagcggtgcctcttgaagtcgaagttggtattggcgaggattggctggctgccaaaggataatga

SEQ ID NO: 2672 - protein, 841 aa, synthetic construct
  REGION 1..841: note = Variant of DNA polymerase I from Thermus sp. strain 2.9
MHHHHHHGGSGVLPVFEPKGRVLLVDGHHLAYRNFFALKGLTTSRGEPVQGVYGFAKSLLKALKEDGDVVIVVFDAKAPSFRHEAYEAYKAGRAPTPEDFPEQLALMKELVDLLGLERLEVPGFEADDVLATLAKKAEREGYEVQILTADRDLFQLLSPRISVLHPEGHRITPEWLWEKYGLRPEQWVDFRALAGDPSDNIPGVKGIGEKTALKLLKEWGSLENLLKNLDQVKPESVREKILAHLEDLKLSRELSRVRTDLPLEVDFRRRREPDWEGLKAFLERLEFGSLLHEFGLLESPLPAEEAPWPPPEGAFLGYRLSRPEPMWAELLALAASAQGRVYRAEDPHGALRGLFEVRGLLAKDLAVVALREGLDLPPTDDPMLLAYLLDPSNTTPEGVARRYGGEWTEDAAKRALLAERLHANLLGRLQGEERLLWLYEEVEKPLSRVLAHMEATGVKLDVAYLEALSLEVAAEMRRLEEEVFRLAGHSFRLNSRDQLERVLFDELGLPPIGKTEKTGKRSTSAAVLEALREVHPIVDKILQYRELAKLKGTYIDPLPALVHPKTGRLHTRFNQTATATGRLSSSDPNLQNIPVRTPLGQKIRRAFVAEEGWRLVALDYSQIELRVLAHLSGDENLIRVFQEGKDIHTQTASWMFGLSAEAIDPLMRRAAKTINFGVLYGMSAFRLSQELGIPYEEAAAFIQKYFQSYPKVKAWIEKTLEEGRTRGYVETLFGRRRYVPDLNARVKSVREAAERMAFNMPVQGTAADLMKLAMVRLFPQLREVGARMLLQVHDELLLEAPKERAEEVAALAKEVMEGVWPLAVPLEVEVGIGEDWLAAKG

SEQ ID NO: 2673 - DNA, 2529 bp, synthetic construct
  misc_feature 1..2529: note = Variant of DNA polymerase I from Thermus sp. strain 2.9
  source 1..2529: mol_type = other DNA
atgcaccatcatcatcatcatggcggtagcggcgtgttaccggtgttcgagcctaaaggtcgcgtgcttctggttgatggccatcatctcgcgtatcgtaacttctttgccctgaaaggattaaccaccagccgtggcgagccggtacagggtgtctacggctttgcaaagtcgctcctgaaagctctgaaagaagacggtgatgtggtgattgttgtctttgatgcgaaagcgccaagttttcgccacgaagcgtacgaagcttacaaagccgggcgtgctccaacgccggaagactttcctcgccaattggcgcttatgaaggaattagtggatttgcttggcctcgaacgcttggaagttcccggtttcgaggcagacgacgtattagcgactctcgcaaagaaagccgaacgtgagggctatgaagtccagatcttgacagcagatcgcgatcttttccagcttttatctccgcgcatctcggtgttacacccggaagggcatcgtatcaccccggaatggctctgggagaaatatggtttgcgtcccgaacaatgggtggattttcgcgccttagcaggcgatccgagcgacaatattccgggagttaaaggtatcggcgaggggacggcgctcaagctccttaaagaatgggggtcgttggagaacttgcttaagaatttagatcaggtcaaaccagagtcagtgcgtgagaagattcttgcacacctcgaagacctcaaattaagccgcgaattgtcccgtgtacgcaccgatttgccgctcgaagttgatttccgtcgccgccgcgaacctgactgggagggtcttaaagcgtttttagagcgtcttgaatttggttcgctcttgcatgaattcggccttttagaaagcccgttaccagccgaagaagcaccttggccaccgcccgaaggcgcgtttttaggttaccgtttgagtcgcccggaaccgatgtgggccgaattattggctcttgcagcgtctgcccagggacgtgtgtatcgcgcggaagaccctcatggtgcgctccgcggcctcttcgaagtccgtggactccttgccaaagacttagctgttgttgcattgcgcgaaggtcttgatttacctccgactgatgatccaatgcttcttgcgtacctcttggacccgtcaaacacgacgcccgaaggcgtagcccgtcgttacggcggcgagtggaccgaagatgcagcgaaacgcgcgttattggccgaacgtttgcacgccaatttattaggacgtttgcaaggcgaggaacgtctcctctggctttacgaagaagtggagaaaccattgagtcgcgtgctcgcgcatatggaagctaccggtgtcaaattagacgtggcgtatttggaggctctcagccttgaagttgctgccgaaatgcgccgcttggaggaagaagtattccgtttagcaggccattcctttcgccttaattctcgcgatcagttagaacgtgtgttgttcgatgaacttggtctccctcctatcggcaagacagagaagaccggtaaacgtagcacttcagcggcggttttagaagctcttcgcgaagtccatcccattgtggacaagatcttgcagtaccgcgaactcgcgaaattgaaaggcacctatattgaccctcttccggcattagtccacccgaaaacgggacgcctccatacccgcttcaaccaaacagccacggcgaccggtcgtttgtcctcctctgatccaaaccttcagaatattccagtacgtaccccattgggccagaagatccgccgcgcgtttgtagctgaggagggttggcgtttagtggccctcgattatagccaaattgaattacgtgtccttgcccatctttctggcgatgagaacctcatccgcgtgtttcaggaaggcaaagacattcacactcaaacggcaagctggatgtttggattatcagctgaagcgatcgatcctttgatgcgtcgtgcagcgaagaccatcaatttcggtgttctctacggtatgagtgcctttcgtttgtcgcaggaattaggcattccctatgaagaagctgcggcgttcattcagaaatactttcaaagctatcccaaagttaaagcatggatcgagaagactctcgaagaaggccgcacacgtggttacgtagagaccttatttggacgtcgccgctatgttcccgatttaaacgctcgcgtgaaatctgtccgtgaagccgccgaacgcatggcgttcaacatgcctgtacagggcacggcagctgacctcatgaaacttgcaatggtgcgcctttttccacaattgcgtgaagttggtgcccgcatgctcttgcaggtccacgatgaactcttgttagaagcgccaaaagagcgtgcggaagaggtggcagccctcgcgaaagaggttatggaaggcgtgtggcccttagcggtgcctcttgaagtcgaagttggtattggcgaggattggctggctgccaaaggataatga

SEQ ID NO: 2674 - protein, 841 aa, synthetic construct
  REGION 1..841: note = Variant of DNA polymerase I from Thermus sp. strain 2.9
MHHHHHHGGSGVLPVFEPKGRVLLVDGHHLAYRNFFALKGLTTSRGEPVQGVYGFAKSLLKALKEDGDVVIVVFDAKAPSFRHEAYEAYKAGRAPTPEDFPRQLALMKELVDLLGLERLEVPGFEADDVLATLAKKAEREGYEVQILTADRDLFQLLSPRISVLHPEGHRITPEWLWEKYGLRPEQWVDFRALAGDPSDNIPGVKGIGEGTALKLLKEWGSLENLLKNLDQVKPESVREKILAHLEDLKLSRELSRVRTDLPLEVDFRRRREPDWEGLKAFLERLEFGSLLHEFGLLESPLPAEEAPWPPPEGAFLGYRLSRPEPMWAELLALAASAQGRVYRAEDPHGALRGLFEVRGLLAKDLAVVALREGLDLPPTDDPMLLAYLLDPSNTTPEGVARRYGGEWTEDAAKRALLAERLHANLLGRLQGEERLLWLYEEVEKPLSRVLAHMEATGVKLDVAYLEALSLEVAAEMRRLEEEVFRLAGHSFRLNSRDQLERVLFDELGLPPIGKTEKTGKRSTSAAVLEALREVHPIVDKILQYRELAKLKGTYIDPLPALVHPKTGRLHTRFNQTATATGRLSSSDPNLQNIPVRTPLGQKIRRAFVAEEGWRLVALDYSQIELRVLAHLSGDENLIRVFQEGKDIHTQTASWMFGLSAEAIDPLMRRAAKTINFGVLYGMSAFRLSQELGIPYEEAAAFIQKYFQSYPKVKAWIEKTLEEGRTRGYVETLFGRRRYVPDLNARVKSVREAAERMAFNMPVQGTAADLMKLAMVRLFPQLREVGARMLLQVHDELLLEAPKERAEEVAALAKEVMEGVWPLAVPLEVEVGIGEDWLAAKG

SEQ ID NO: 2675 - DNA, 2529 bp, synthetic construct
  misc_feature 1..2529: note = Variant of DNA polymerase I from Thermus sp. strain 2.9
  source 1..2529: mol_type = other DNA
atgcaccatcatcatcatcatggcggtagcggcgtgttaccggtgttcgagcctaaaggtcgcgtacttctggttgatggccatcatctcgcgtatcgtaacttctttgccctgaaaggattaaccaccagccgtggcgagccggtacagggtgtctacggctttgcaaagtcgctcctgaaagctctgaaagaagacggtgatgtggtgattgttgtctttgatgcgaaagcgccaagttttcgccacgaagcgtacgaagcttacaaagccgggcgtgctccaacgccggaagactttcctcgccaattggcgcttatgaaggaattagtggatttgcttggcctcgaacgcttggaagttcccggtttcgaggcagacgacgtattagcgactctcgcaaagaaagccgaacgtgagggctatgaagtccagatcttgacagcagatcgcgatcttttccagcttttatctccgcgcatctcggtgttacacccggaagggcatcgtatcaccccggaatggctctgggagaaatatggtttgcgtcccgaacaatgggtggattttcgcgccttagcaggcgatccgagcgacaatattccgggagttaaaggtatcggcgagaagacggcgctcaagctccttaaagaatgggggtcgttggagaacttgcttaagaatttagatcaggtcaaaccagagtcagtgcgtgagaagattcttgcacacctcgaagacctcaaattaagccgcgaattgtcccgtgtacgcaccgatttgccgctcgaagttgatttccgtcgccgccgcgaacctgactgggagggtcttaaagcgtttttagagcgtcttgaatttggttcgctcttggaggaattcggccttttagaaagcccgttaccagccgaagaagcaccttggccaccgcccgaaggcgcgtttttaggttaccgtttgagtcgcccggaaccgatgtgggccgaattattggctcttgcagcgtctgcccagggacgtgtgtatcgcgcggaagaccctcatggtgcgctccgcggcctcttcgaagtccgtggactccttgccaaagacttagctgttgttgcattgcgcgaaggtcttgatttacctccgactgatgatccaatgcttcttgcgtacctcttggacccgtcaaacacgacgcccgaaggcgtagcccgtcgttacggcggcgagtggaccgaagatgcagcgaaacgcgcgttattggccgaacgtttgcacgccaatttattaggacgtttgcaaggcgaggaacgtctcctctggctttacgaagaagtggagaaaccattgagtcgcgtgctcgcgcatatggaagctaccggtgtcaaattagacgtggcgtatttggaggctctcagccttgaagttgctgccgaaatgcgccgcttggaggaagaagtattccgtttagcaggccattcctttcgccttaattctcgcgatcagttagaacgtgtgttgttcgatgaacttggtctccctcctatcggcaagacagagaagaccggtaaacgtagcacttcagcggcggttttagaagctcttcgcgaagtccatcccattgtggacaagatcttgcagtaccgcgaactcgcgaaattgaaaggcacctatattgaccctcttccggcattagtccacccgaaaacgggacgcctccatacccgcttcaaccaaacagccacggcgaccggtcgtttgtcctcctctgatccaaaccttcagaatattccagtacgtaccccattgggccagaagatccgccgcgcgtttgtagctgaggagggttggcgtttagtggccctcgattatagccaaattgaattacgtgtccttgcccatctttctggcgatgagaacctcatccgcgtgtttcaggaaggcaaagacattcacactcaaacggcaagctggatgtttggattatcagctgaagcgatcgatcctttgatgcgtcgtgcagcgaagaccatcaatttcggtgttctctacggtatgagtgcctttcgtttgtcgcaggaattaggcattccctatgaagaagctgcggcgttcattcagaaatactttcaaagctatcccaaagttaaagcatggatcgagaagactctcgaagaaggccgcacacgtggttacgtagagaccttatttggacgtcgccgctatgttcccgatttaaacgctcgcgtgaaatctgtccgtgaagccgccgaacgcatggcgttcaacatgcctgtacagggcacggcagctgacctcatgaaacttgcaatggtgcgcctttttccacaattgcgtgaagttggtgcccgcatgctcttgcaggtccacgatgaactcttgttagaagcgccaaaagagcgtgcggaagaggtggcagccctcgcgaaagaggttatggaaggcgtgtggcccttagcggtgcctcttgaagtcgaagttggtattggcgaggattggctggctgccaaaggataatga

SEQ ID NO: 2676 - protein, 841 aa, synthetic construct
  REGION 1..841: note = Variant of DNA polymerase I from Thermus sp. strain 2.9
MHHHHHHGGSGVLPVFEPKGRVLLVDGHHLAYRNFFALKGLTTSRGEPVQGVYGFAKSLLKALKEDGDVVIVVFDAKAPSFRHEAYEAYKAGRAPTPEDFPRQLALMKELVDLLGLERLEVPGFEADDVLATLAKKAEREGYEVQILTADRDLFQLLSPRISVLHPEGHRITPEWLWEKYGLRPEQWVDFRALAGDPSDNIPGVKGIGEKTALKLLKEWGSLENLLKNLDQVKPESVREKILAHLEDLKLSRELSRVRTDLPLEVDFRRRREPDWEGLKAFLERLEFGSLLEEFGLLESPLPAEEAPWPPPEGAFLGYRLSRPEPMWAELLALAASAQGRVYRAEDPHGALRGLFEVRGLLAKDLAVVALREGLDLPPTDDPMLLAYLLDPSNTTPEGVARRYGGEWTEDAAKRALLAERLHANLLGRLQGEERLLWLYEEVEKPLSRVLAHMEATGVKLDVAYLEALSLEVAAEMRRLEEEVFRLAGHSFRLNSRDQLERVLFDELGLPPIGKTEKTGKRSTSAAVLEALREVHPIVDKILQYRELAKLKGTYIDPLPALVHPKTGRLHTRFNQTATATGRLSSSDPNLQNIPVRTPLGQKIRRAFVAEEGWRLVALDYSQIELRVLAHLSGDENLIRVFQEGKDIHTQTASWMFGLSAEAIDPLMRRAAKTINFGVLYGMSAFRLSQELGIPYEEAAAFIQKYFQSYPKVKAWIEKTLEEGRTRGYVETLFGRRRYVPDLNARVKSVREAAERMAFNMPVQGTAADLMKLAMVRLFPQLREVGARMLLQVHDELLLEAPKERAEEVAALAKEVMEGVWPLAVPLEVEVGIGEDWLAAKG

SEQ ID NO: 2677 - DNA, 2529 bp, synthetic construct
  misc_feature 1..2529: note = Variant of DNA polymerase I from Thermus sp. strain 2.9
  source 1..2529: mol_type = other DNA
atgcaccatcatcatcatcatggcggtagcggcgtgttaccggtgttcgagcctaaaggtcgcgtgcttctggttgatggccatcatctcgcgtatcgtaacttctttgccctgaaaggattaaccaccagccgtggcgagccggtacagggtgtctacggctttgcaaagtcgctcctgaaagctctgaaagaagacggtgatgtggtgattgttgtctttgatgcgaaagcgccaagttttcgccacgaagcgtacgaagcttacaaagccgggcgtgctccaacgccggaagactttcctcgccaattggcgcttatgaaggaattagtggatttgcttggcctcgaacgcttggaagttcccggtttcgaggcagacgacgtattagcgactctcgcaaagaaagccgaacgtgagggctatgaagtccagatcttgacagcagatcgcgatcttttccagcttttatctccgcgcatctcggtgttacacccggaagggcatcgtatcaccccggaatggctctgggagaaatatggtttgcgtcccgaacaatgggtggattttcgcgccttagcaggcgatccgagcgacaatattccgggagttaaaggtatcggcgagaagacggcgctcaagctccttaaagaatgggggtcgttggagaacttgcttaagaatttagatcaggtcaaaccagagtcagtgcgtgagaagattcttgcacacctcgaagacctcaaattaagccgcgaattgtcccgtgtacgcaccgatttgccgctcgaagttgatttccgtcgccgccgcgaacctgactgggagggtcttaaagcgtttttagagcgtcttgaatttggttcgctcttgcatgaattcggccttttagaaagcccgttaccagccgaagaagcaccttggccaccgcccgaaggcgcgtttacgggttaccgtttgagtcgcccggaaccgatgtgggccgaattattggctcttgcagcgtctgcccagggacgtgtgtatcgcgcggaagaccctcatggtgcgctccgcggcctcttcgaagtccgtggactccttgccaaagacttagctgttgttgcattgcgcgaaggtcttgatttacctccgactgatgatccaatgcttcttgcgtacctcttggacccgtcaaacacgacgcccgaaggcgtagcccgtcgttacggcggcgagtggaccgaagatgcagcgaaacgcgcgttattggccgaacgtttgcacgccaatttattaggacgtttgcaaggcgaggaacgtctcctctggctttacgaagaagtggagaaaccattgagtcgcgtgctcgcgcatatggaagctaccggtgtcaaattagacgtggcgtatttggaggctctcagccttgaagttgctgccgaaatgcgccgcttggaggaagaagtattccgtttagcaggccattcctttcgccttaattctcgcgatcagttagaacgtgtgttgttcgatgaacttggtctccctcctatcggcaagacagagaagaccggtaaacgtagcacttcagcggcggttttagaagctcttcgcgaagtccatcccattgtggacaagatcttgcagtaccgcgaactcgcgaaattgaaaggcacctatattgaccctcttccggcattagtccacccgaaaacgggacgcctccatacccgcttcaaccaaacagccacggcgaccggtcgtttgtcctcctctgatccaaaccttcagaatattccagtacgtaccccattgggccagaagatccgccgcgcgtttgtagctgaggagggttggcgtttagtggccctcgattatagccaaattgaattacgtgtccttgcccatctttctggcgatgagaacctcatccgcgtgtttcaggaaggcaaagacattcacactcaaacggcaagctggatgtttggattatcagctgaagcgatcgatcctttgatgcgtcgtgcagcgaagaccatcaatttcggtgttctctacggtatgagtgcctttcgtttgtcgcaggaattaggcattccctatgaagaagctgcggcgttcattcagaaatactttcaaagctatcccaaagttaaagcatggatcgagaagactctcgaagaaggccgcacacgtggttacgtagagaccttatttggacgtcgccgctatgttcccgatttaaacgctcgcgtgaaatctgtccgtgaagccgccgaacgcatggcgttcaacatgcctgtacagggcacggcagctgacctcatgaaacttgcaatggtgcgcctttttccacaattgcgtgaagttggtgcccgcatgctcttgcaggtccacgatgaactcttgttagaagcgccaaaagagcgtgcggaagaggtggcagccctcgcgaaagaggttatggaaggcgtgtggcccttagcggtgcctcttgaagtcgaagttggtattggcgaggattggctggctgccaaaggataatga

SEQ ID NO: 2678 - protein, 841 aa, synthetic construct
  REGION 1..841: note = Variant of DNA polymerase I from Thermus sp. strain 2.9
MHHHHHHGGSGVLPVFEPKGRVLLVDGHHLAYRNFFALKGLTTSRGEPVQGVYGFAKSLLKALKEDGDVVIVVFDAKAPSFRHEAYEAYKAGRAPTPEDFPRQLALMKELVDLLGLERLEVPGFEADDVLATLAKKAEREGYEVQILTADRDLFQLLSPRISVLHPEGHRITPEWLWEKYGLRPEQWVDFRALAGDPSDNIPGVKGIGEKTALKLLKEWGSLENLLKNLDQVKPESVREKILAHLEDLKLSRELSRVRTDLPLEVDFRRRREPDWEGLKAFLERLEFGSLLHEFGLLESPLPAEEAPWPPPEGAFTGYRLSRPEPMWAELLALAASAQGRVYRAEDPHGALRGLFEVRGLLAKDLAVVALREGLDLPPTDDPMLLAYLLDPSNTTPEGVARRYGGEWTEDAAKRALLAERLHANLLGRLQGEERLLWLYEEVEKPLSRVLAHMEATGVKLDVAYLEALSLEVAAEMRRLEEEVFRLAGHSFRLNSRDQLERVLFDELGLPPIGKTEKTGKRSTSAAVLEALREVHPIVDKILQYRELAKLKGTYIDPLPALVHPKTGRLHTRFNQTATATGRLSSSDPNLQNIPVRTPLGQKIRRAFVAEEGWRLVALDYSQIELRVLAHLSGDENLIRVFQEGKDIHTQTASWMFGLSAEAIDPLMRRAAKTINFGVLYGMSAFRLSQELGIPYEEAAAFIQKYFQSYPKVKAWIEKTLEEGRTRGYVETLFGRRRYVPDLNARVKSVREAAERMAFNMPVQGTAADLMKLAMVRLFPQLREVGARMLLQVHDELLLEAPKERAEEVAALAKEVMEGVWPLAVPLEVEVGIGEDWLAAKG

SEQ ID NO: 2679 - DNA, 2529 bp, synthetic construct
  misc_feature 1..2529: note = Variant of DNA polymerase I from Thermus sp. strain 2.9
  source 1..2529: mol_type = other DNA
atgcaccatcatcatcatcatggcggtagcggcgtgttaccggtgttcgagcctaaaggtcgcgtgcttctggttgatggccatcatctcgcgtatcgtaacttctttgccctgaaaggattaaccaccagccgtggcgagccggtacagggtgtctacggctttgcaaagtcgctcctgaaagctctgaaagaagacggtgatgtggtgattgttgtctttgatgcgaaagcgccaagttttcgccacgaagcgtacgaagcttacaaagccgggcgtgctccaacgccggaagactttcctcgccaattggcgcttatgaaggaattagtggatttgcttggcctcgaacgcttggaagttcccggtttcgaggcagacgacgtattagcgactctcgcaaagaaagccgaacgtgagggctatgaagtccagatcttgacagcagatcgcgatcttttccagcttttatctccgcgcatctcggtgttacacccggaagggcatcgtatcaccccggaatggctctgggagaaatatggtttgcgtcccgaacaatgggtggattttcgcgccttagcaggcgatccgagcgacaatattccgggagttaaaggtatcggcgagaagacggcgctcaagctccttaaagaatgggggtcgttggagaacttgcttaagaatttagatcaggtcaaaccagagtcagtgcgtgagaagattcttgcacacctcgaagacctcaaattaagccgcgaattgtcccgtgtacgcaccgatttgccgctcgaagttgatttccgtcgccgccgcgaacctgactgggagggtcttaaagcgtttttagagcgtcttgaatttggttcgctcttgcatgaattcggccttttagaaagcccgttaccagccgaagaagcaccttggccaccgcccgaaggcgcgtttttaggttaccgtttgagtcgcccggaaccgatgtgggccgaattattggctcttgcagcgtctgcccagggacgtgtgtatcgcgcggaagaccctcatggtgcgctccgcggcctcttcgaagtccgtggactccttgccaaagacttagctgttgttgcattgcgcgaaggtcttgatttacctccgactgatgatccaatgcttcttgcgtacctcttggacccgtcaaacacgacgcccgaaggcgtagcccgtcgttacggcggcgagtggaccgaagatgcagcgaaacgcgcgttattggccgaacgtttgcacgccaatttattaggacgtttgcaaggcgaggaacgtctcctctggctttacgaagaagtggagaaaccattgagtcgcgtgctcgcgcatatggaagctaccggtgtcaaattagacgtggcgtatttggaggctctcagccttgaagttgctgccgaaatgcgccgcttggaggaagaagtattccgtttagcaggccattcctttcgccttaattctcgcgatcagttagaacgtgtgttgttcgatgaacttggtctccctcctatcggcaagacagagaagaccggtaaacgtagcacttcagcggcggttttagaagctcttcgcgaagtccatcccattgtggacaagatcttgcagtaccgcgaactcgcgaaattgaaaggcacctatattgaccctcttccggcattagtccacccgaaaacgggacgcctccatacccgcttcaaccaaacagccacggcgaccggtcgtttgtcctcctctgatccaaaccttcagaatattccagtacgtaccccattgggccagaagatccgccgcgcgtttgtagctgaggagggttggcgtttagtggccctcgattatagccaaattgaattacgtgtccttgcccatctttctggcgatgagaacctcatccgcgtgtttcaggaaggcaaagacattcacactcaaacggcaagctggatgtttggattatcagctgaagcgatcgatccttggatgcgtcgtgcagcgaagaccatcaatttcggtgttctctacggtatgagtgcctttcgtttgtcgcaggaattaggcattccctatgaagaagctgcggcgttcattcagaaatactttcaaagctatcccaaagttaaagcatggatcgagaagactctcgaagaaggccgcacacgtggttacgtagagaccttatttggacgtcgccgctatgttcccgatttaaacgctcgcgtgaaatctgtccgtgaagccgccgaacgcatggcgttcaacatgcctgtacagggcacggcagctgacctcatgaaacttgcaatggtgcgcctttttccacaattgcgtgaagttggtgcccgcatgctcttgcaggtccacgatgaactcttgttagaagcgccaaaagagcgtgcggaagaggtggcagccctcgcgaaagaggttatggaaggcgtgtggcccttagcggtgcctcttgaagtcgaagttggtattggcgaggattggctggctgccaaaggataatga

SEQ ID NO: 2680 - protein, 841 aa, synthetic construct
  REGION 1..841: note = Variant of DNA polymerase I from Thermus sp. strain 2.9
MHHHHHHGGSGVLPVFEPKGRVLLVDGHHLAYRNFFALKGLTTSRGEPVQGVYGFAKSLLKALKEDGDVVIVVFDAKAPSFRHEAYEAYKAGRAPTPEDFPRQLALMKELVDLLGLERLEVPGFEADDVLATLAKKAEREGYEVQILTADRDLFQLLSPRISVLHPEGHRITPEWLWEKYGLRPEQWVDFRALAGDPSDNIPGVKGIGEKTALKLLKEWGSLENLLKNLDQVKPESVREKILAHLEDLKLSRELSRVRTDLPLEVDFRRRREPDWEGLKAFLERLEFGSLLHEFGLLESPLPAEEAPWPPPEGAFLGYRLSRPEPMWAELLALAASAQGRVYRAEDPHGALRGLFEVRGLLAKDLAVVALREGLDLPPTDDPMLLAYLLDPSNTTPEGVARRYGGEWTEDAAKRALLAERLHANLLGRLQGEERLLWLYEEVEKPLSRVLAHMEATGVKLDVAYLEALSLEVAAEMRRLEEEVFRLAGHSFRLNSRDQLERVLFDELGLPPIGKTEKTGKRSTSAAVLEALREVHPIVDKILQYRELAKLKGTYIDPLPALVHPKTGRLHTRFNQTATATGRLSSSDPNLQNIPVRTPLGQKIRRAFVAEEGWRLVALDYSQIELRVLAHLSGDENLIRVFQEGKDIHTQTASWMFGLSAEAIDPWMRRAAKTINFGVLYGMSAFRLSQELGIPYEEAAAFIQKYFQSYPKVKAWIEKTLEEGRTRGYVETLFGRRRYVPDLNARVKSVREAAERMAFNMPVQGTAADLMKLAMVRLFPQLREVGARMLLQVHDELLLEAPKERAEEVAALAKEVMEGVWPLAVPLEVEVGIGEDWLAAKG

SEQ ID NO: 2681 - DNA, 2529 bp, synthetic construct
  misc_feature 1..2529: note = Variant of DNA polymerase I from Thermus sp. strain 2.9
  source 1..2529: mol_type = other DNA
atgcaccatcatcatcatcatggcggtagcggcgtgttaccggtgttcgagcctaaaggtcgcgtgcttctggttgatggccatcatctcgcgtatcgtaacttctttgccctgaaaggattaaccaccagccgtggcgagccggtacagggtgtctacggctttgcaaagtcgctcctgaaagctctgaaagaagacggtgatgtggtgattgttgtctttgatgcgaaagcgccaagttttcgccacgaagcgtacgaagcttacaaagccgggcgtgctccaacgccggaagactttcctacgcaattggcgcttatgaaggaattagtggatttgcttggcctcgaacgcttggaagttcccggtttcgaggcagacgacgtattagcgactctcgcaaagaaagccgaacgtgagggctatgaagtccagatcttgacagcagatcgcgatcttttccagcttttatctccgcgcatctcggtgttacacccggaagggcatcgtatcaccccggaatggctctgggagaaatatggtttgcgtcccgaacaatgggtggattttcgcgccttagcaggcgatccgagcgacaatattccgggagttaaaggtatcggcgagaagacggcgctcaagctccttaaagaatgggggtcgttggagaacttgcttaagaatttagatcaggtcaaaccagagtcagtgcgtgagaagattcttgcacacctcgaagacctcaaattaagccgcgaattgtcccgtgtacgcaccgatttgccgctcgaagttgatttccgtcgccgccgcgaacctgactgggagggtcttaaagcgtttttagagcgtcttgaatttggttcgctcttgcatgaattcggccttttagaaagcccgttaccagccgaagaagcaccttggccaccgcccgaaggcgcgtttttaggttaccgtttgagtcgcccggaaccgatgtgggccgaattattggctcttgcagcgtctgcccagggacgtgtgtatcgcgcggaagaccctcatggtgcgctccgcggcctcttcgaagtccgtggactccttgccaaagacttagctgttgttgcattgcgcgaaggtcttgatttacctccgactgatgatccaatgcttcttgcgtacctcttggacccgtcaaacacgacgcccgaaggcgtagcccgtcgttacggcggcgagtggaccgaagatgcagcgaaacgcgcgttattggccgaacgtttgcacgccaatttattaggacgtttgcaaggcgaggaacgtctcctctggctttacgaagaagtggagaaaccattgagtcgcgtgctcgcgcatatggaagctaccggtgtcaaattagacgtggcgtatttggaggctctcagccttgaagttgctgccgaaatgcgccgcttggaggaagaagtattccgtttagcaggccattcctttcgccttaattctcgcgatcagttagaacgtgtgttgttcgatgaacttggtctccctcctatcggcaagacagagaagaccggtaaacgtagcacttcagcggcggttttagaagctcttcgcgaagtccatcccattgtggacaagatcttgcagtaccgcgaactcgcgaaattgaaaggcacctatattgaccctcttccggcattagtccacccgaaaacgggacgcctccatacccgcttcaaccaaacagccacggcgaccggtcgtttgtcctcctctgatccaaaccttcagaatattccagtacgtaccccattgggccagaagatccgccgcgcgtttgtagctgaggagggttggcgtttagtggccctcgattatagccaaattgaattacgtgtccttgcccatctttctggcgatgagaacctcatccgcgtgtttcaggaaggcaaagacattcacactcaaacggcaagctggatgtttggattatcagctgaagcgatcgatcctttgatgcgtcgtgcagcgaagaccatcaatttcggtgttctctacggtatgagtgcctttcgtttgtcgcaggaattaggcattccctatgaagaagctgcggcgttcattcagaaatactttcaaagctatcccaaagttaaagcatggatcgagaagactctcgaagaaggccgcacacgtggttacgtagagaccttatttggacgtcgccgctatgttcccgatttaaacgctcgcgtgaaatctgtccgtgaagccgccgaacgcatggcgttcaacatgcctgtacagggcacggcagctgacctcatgaaacttgcaatggtgcgcctttttccacaattgcgtgaagttggtgcccgcatgctcttgcaggtccacgatgaactcttgttagaagcgccaaaagagcgtgcggaagaggtggcagccctcgcgaaagaggttatggaaggcgtgtggcccttagcggtgcctcttgaagtcgaagttggtattggcgaggattggctggctgccaaaggataatga

SEQ ID NO: 2682 - protein, 841 aa, synthetic construct
  REGION 1..841: note = Variant of DNA polymerase I from Thermus sp. strain 2.9
MHHHHHHGGSGVLPVFEPKGRVLLVDGHHLAYRNFFALKGLTTSRGEPVQGVYGFAKSLLKALKEDGDVVIVVFDAKAPSFRHEAYEAYKAGRAPTPEDFPTQLALMKELVDLLGLERLEVPGFEADDVLATLAKKAEREGYEVQILTADRDLFQLLSPRISVLHPEGHRITPEWLWEKYGLRPEQWVDFRALAGDPSDNIPGVKGIGEKTALKLLKEWGSLENLLKNLDQVKPESVREKILAHLEDLKLSRELSRVRTDLPLEVDFRRRREPDWEGLKAFLERLEFGSLLHEFGLLESPLPAEEAPWPPPEGAFLGYRLSRPEPMWAELLALAASAQGRVYRAEDPHGALRGLFEVRGLLAKDLAVVALREGLDLPPTDDPMLLAYLLDPSNTTPEGVARRYGGEWTEDAAKRALLAERLHANLLGRLQGEERLLWLYEEVEKPLSRVLAHMEATGVKLDVAYLEALSLEVAAEMRRLEEEVFRLAGHSFRLNSRDQLERVLFDELGLPPIGKTEKTGKRSTSAAVLEALREVHPIVDKILQYRELAKLKGTYIDPLPALVHPKTGRLHTRFNQTATATGRLSSSDPNLQNIPVRTPLGQKIRRAFVAEEGWRLVALDYSQIELRVLAHLSGDENLIRVFQEGKDIHTQTASWMFGLSAEAIDPLMRRAAKTINFGVLYGMSAFRLSQELGIPYEEAAAFIQKYFQSYPKVKAWIEKTLEEGRTRGYVETLFGRRRYVPDLNARVKSVREAAERMAFNMPVQGTAADLMKLAMVRLFPQLREVGARMLLQVHDELLLEAPKERAEEVAALAKEVMEGVWPLAVPLEVEVGIGEDWLAAKG

SEQ ID NO: 2683 - DNA, 2529 bp, synthetic construct
  misc_feature 1..2529: note = Variant of DNA polymerase I from Thermus sp. strain 2.9
  source 1..2529: mol_type = other DNA
atgcaccatcatcatcatcatggcggtagcggcgtgttaccggtgttcgagcctaaaggtcgcgtgcttctggttgatggccatcatctcgcgtatcgtaacttctttgccctgaaaggattaaccaccagccgtggcgagccggtacagggtgtctacggctttgcaaagtcgctcctgaaagctctgaaagaagacggtgatgtggtgattgttgtctttgatgcgaaagcgccaagttttcgccacgaagcgtacgaagcttacaaagccgggcgtgctccaacgccggaagactttcctcgccaattggcgcttatgaaggaattagtggatttgcttggcctcgaacgcttggaagttcccggtttcgaggcagacgacgtattagcgactctcgcaaagaaagccgaacgtgagggctatgaagtccagatcttgacagcagatcgcgatcttttccagcttttatctccgcgcatctcggtgttacacccggaagggcatcgtatcaccccggaatggctctgggagaaatatggtttgcgtcccgaacaatgggtggattttcgcgccttagcaggcgatccgagcgacaatattccgggagttaaaggtatcggcgagaagacggcgctcaagctccttaaagaatgggggtcgttggagaacttgcttaagaatttagatcaggtcaaaccagagtcagtgcgtgagaagattcttgcacacctcgaagacctcaaattaagccgcgaattgtcccgtgtacgcaccgatttgccgctcgaagttgatttccgtcgccgccgcgaacctgactgggagggtcttaaagcgtttttagagcgtcttgaatttggttcgctcttgcatgaattcggccttttagaaagcccgttaccagccgaagaagcaccttggccaccgcccgaaggcgcgtttttaggttaccgtttgagtcgcccggaaccgatgtgggccgaattattggctcttgcagcgtctgcccagggacgtgtgtatcgcgcggaagaccctcatggtgcgctccgcggcctcttcgaagtccgtggactccttgccaaagacttagctgttgttgcattgcgcgaaggtcttgatttacctccgactgatgatccaatgcttcttgcgtacctcttggacccgtcaaacacgacgcccgaaggcgtagcccgtcgttacggcggcgagtggaccgaagatgcagcgaaacgcgcgttattggccgaacgtttgcacgagaatttattaggacgtttgcaaggcgaggaacgtctcctctggctttacgaagaagtggagaaaccattgagtcgcgtgctcgcgcatatggaagctaccggtgtcaaattagacgtggcgtatttggaggctctcagccttgaagttgctgccgaaatgcgccgcttggaggaagaagtattccgtttagcaggccattcctttcgccttaattctcgcgatcagttagaacgtgtgttgttcgatgaacttggtctccctcctatcggcaagacagagaagaccggtaaacgtagcacttcagcggcggttttagaagctcttcgcgaagtccatcccattgtggacaagatcttgcaataccgcgaactcgcgaaattgaaaggcacctatattgaccctcttccggcattagtccacccgaaaacgggacgcctccatacccgcttcaaccaaacagccacggcgaccggtcgtttgtcctcctctgatccaaaccttcagaatattccagtacgtaccccattgggccagaagatccgccgtgcgtttgtagctgaggagggttggcgtttagtggccctcgattatagccaaattgaattacgtgtccttgcccatctttctggcgatgagaacctcatccgcgtgtttcaggaaggcaaagacattcacactcaaacggcaagctggatgtttggattatcagctgaagcgatcgatcctttgatgcgtcgtgcagcgaagaccatcaatttcggtgttctctacggtatgagtgcctttcgtttgtcgcaggaattaggcattccctatgaagaagctgcggcgttcattcagaaatactttcaaagctatcccaaagttaaagcatggatcgagaagactctcgaagaaggccgcacacgtggttacgtagagaccttatttggacgtcgccgctatgttcccgatttaaacgctcgcgtgaaatctgtccgtgaagccgccgaacgcatggcgttcaacatgcctgtacagggcacggcagctgacctcatgaaacttgcaatggtgcgcctttttccacaattgcgtgaagttggtgcccgcatgctcttgcaggtccacgatgaactcttgttagaagcgccaaaagagcgtgcggaagaggtggcagccctcgcgaaagaggttatggaaggcgtgtggcccttagcggtgcctcttgaagtcgaagttggtattggcgaggattggctggctgccaaaggataatga

SEQ ID NO: 2684 - protein, 841 aa, synthetic construct
  REGION 1..841: note = Variant of DNA polymerase I from Thermus sp. strain 2.9
MHHHHHHGGSGVLPVFEPKGRVLLVDGHHLAYRNFFALKGLTTSRGEPVQGVYGFAKSLLKALKEDGDVVIVVFDAKAPSFRHEAYEAYKAGRAPTPEDFPRQLALMKELVDLLGLERLEVPGFEADDVLATLAKKAEREGYEVQILTADRDLFQLLSPRISVLHPEGHRITPEWLWEKYGLRPEQWVDFRALAGDPSDNIPGVKGIGEKTALKLLKEWGSLENLLKNLDQVKPESVREKILAHLEDLKLSRELSRVRTDLPLEVDFRRRREPDWEGLKAFLERLEFGSLLHEFGLLESPLPAEEAPWPPPEGAFLGYRLSRPEPMWAELLALAASAQGRVYRAEDPHGALRGLFEVRGLLAKDLAVVALREGLDLPPTDDPMLLAYLLDPSNTTPEGVARRYGGEWTEDAAKRALLAERLHENLLGRLQGEERLLWLYEEVEKPLSRVLAHMEATGVKLDVAYLEALSLEVAAEMRRLEEEVFRLAGHSFRLNSRDQLERVLFDELGLPPIGKTEKTGKRSTSAAVLEALREVHPIVDKILQYRELAKLKGTYIDPLPALVHPKTGRLHTRFNQTATATGRLSSSDPNLQNIPVRTPLGQKIRRAFVAEEGWRLVALDYSQIELRVLAHLSGDENLIRVFQEGKDIHTQTASWMFGLSAEAIDPLMRRAAKTINFGVLYGMSAFRLSQELGIPYEEAAAFIQKYFQSYPKVKAWIEKTLEEGRTRGYVETLFGRRRYVPDLNARVKSVREAAERMAFNMPVQGTAADLMKLAMVRLFPQLREVGARMLLQVHDELLLEAPKERAEEVAALAKEVMEGVWPLAVPLEVEVGIGEDWLAAKG

SEQ ID NO: 2685 - DNA, 2529 bp, synthetic construct
  misc_feature 1..2529: note = Variant of DNA polymerase I from Thermus sp. strain 2.9
  source 1..2529: mol_type = other DNA
atgcaccatcatcatcatcatggcggtagcggcgtgttaccggtgttcgagcctaaaggtcgcgtgcttctggttgatggccatcatctcgcgtatcgtaacttctttgccctgaaaggattaaccaccagccgtggcgagccggtacagggtgtctacggctttgcaaagtcgctcctgaaagctctgaaagaagacggtgatgtggtgattgttgtctttgatgcgaaagcgccaagttttcgccacgaagcgtacgaagcttacaaagccgggcgtgctccaacgccggaagactttcctcgccaattggcgcttatgaaggaattagtggatttgcttggcctcgaacgcttggaagttcccggtttcgaggcagacgacgtattagcgactctcgcaaagaaagccgaacgtgagggctatgaagtccagatcttgacagcagatcgcgatcttttccagcttttatctccgcgcatctcggtgttacacccggaagggcatcgtatcaccccggaatggctctgggagaaatatggtttgcgtcccgaacaatgggtggattttcgcgccttagcaggcgatccgagcgacaatattccgggagttaaaggtatcggcgagaagacggcgctcaagctccttaaagaatgggggtcgttggagaacttgcttaagaatttagatcaggtcaaaccagagtcagtgcgtgagaagattcttgcacacctcgaagacctcaaattaagccgcgaattgtcccgtgtacgcaccgatttgccgctcgaagttgatttccgtcgccgccgcgaacctgactgggagggtcttaaagcgtttttagagcgtcttgaatttggttcgctcttgcatgaattcggccttttagaaagcccgttaccagccgaagaagcaccttggccaccgcccgaaggcgcgtttttaggttaccgtttgagtcgcccggaaccgatgtgggccgaattattggctcttgcagcgtctgcccagggacgtgtgtatcgcgcggaagaccctcatggtgcgctccgcggcctcttcgaagtccgtggactccttgccaaagacttagctgttgttgcattgcgcgaaggtcttgatttacctccgactgatgatccaatgcttcttgcgtacctcttggacccgtcaaacacgacgcccgaaggcgtagcccgtcgttacggcggcgagtggaccgaagatgcagcgaaacgcgcgttattggccgaacatttgcacgccaatttattaggacgtttgcaaggcgaggaacgtctcctctggctttacgaagaagtggagaaaccattgagtcgcgtgctcgcgcatatggaagctaccggtgtcaaattagacgtggcgtatttggaggctctcagccttgaagttgctgccgaaatgcgccgcttggaggaagaagtattccgtttagcaggccattcctttcgccttaattctcgcgatcagttagaacgtgtgttgttcgatgaacttggtctccctcctatcggcaagacagagaagaccggtaaacgtagcacttcagcggcggttttagaagctcttcgcgaagtccatcccattgtggacaagatcttgcagtaccgcgaactcgcgaaattgaaaggcacctatattgaccctcttccggcattagtccacccgaaaacgggacgcctccatacccgcttcaaccaaacagccacggcgaccggtcgtttgtcctcctctgatccaaaccttcagaatattccagtacgtaccccattgggccagaagatccgccgcgcgtttgtagctgaggagggttggcgtttagtggccctcgattatagccaaattgaattacgtgtccttgcccatctttctggcgatgagaacctcatccgcgtgtttcaggaaggcaaagacattcacactcaaacggcaagctggatgtttggattatcagctgaagcgatcgatcctttgatgcgtcgtgcagcgaagaccatcaatttcggtgttctctacggtatgagtgcctttcgtttgtcgcaggaattaggcattccctatgaagaagctgcggcgttcattcagaaatactttcaaagctatcccaaagttaaagcatggatcgagaagactctcgaagaaggccgcacacgtggttacgtagagaccttatttggacgtcgccgctatgttcccgatttaaacgctcgcgtgaaatctgtccgtgaagccgccgaacgcatggcgttcaacatgcctgtacagggcacggcagctgacctcatgaaacttgcaatggtgcgcctttttccacaattgcgtgaagttggtgcccgcatgctcttgcaggtccacgatgaactcttgttagaagcgccaaaagagcgtgcggaagaggtggcagccctcgcgaaagaggttatggaaggcgtgtggcccttagcggtgcctcttgaagtcgaagttggtattggcgaggattggctggctgccaaaggataatga

SEQ ID NO: 2686 - protein, 841 aa, synthetic construct
  REGION 1..841: note = Variant of DNA polymerase I from Thermus sp. strain 2.9
MHHHHHHGGSGVLPVFEPKGRVLLVDGHHLAYRNFFALKGLTTSRGEPVQGVYGFAKSLLKALKEDGDVVIVVFDAKAPSFRHEAYEAYKAGRAPTPEDFPRQLALMKELVDLLGLERLEVPGFEADDVLATLAKKAEREGYEVQILTADRDLFQLLSPRISVLHPEGHRITPEWLWEKYGLRPEQWVDFRALAGDPSDNIPGVKGIGEKTALKLLKEWGSLENLLKNLDQVKPESVREKILAHLEDLKLSRELSRVRTDLPLEVDFRRRREPDWEGLKAFLERLEFGSLLHEFGLLESPLPAEEAPWPPPEGAFLGYRLSRPEPMWAELLALAASAQGRVYRAEDPHGALRGLFEVRGLLAKDLAVVALREGLDLPPTDDPMLLAYLLDPSNTTPEGVARRYGGEWTEDAAKRALLAEHLHANLLGRLQGEERLLWLYEEVEKPLSRVLAHMEATGVKLDVAYLEALSLEVAAEMRRLEEEVFRLAGHSFRLNSRDQLERVLFDELGLPPIGKTEKTGKRSTSAAVLEALREVHPIVDKILQYRELAKLKGTYIDPLPALVHPKTGRLHTRFNQTATATGRLSSSDPNLQNIPVRTPLGQKIRRAFVAEEGWRLVALDYSQIELRVLAHLSGDENLIRVFQEGKDIHTQTASWMFGLSAEAIDPLMRRAAKTINFGVLYGMSAFRLSQELGIPYEEAAAFIQKYFQSYPKVKAWIEKTLEEGRTRGYVETLFGRRRYVPDLNARVKSVREAAERMAFNMPVQGTAADLMKLAMVRLFPQLREVGARMLLQVHDELLLEAPKERAEEVAALAKEVMEGVWPLAVPLEVEVGIGEDWLAAKG

SEQ ID NO: 2687 - DNA, 2529 bp, synthetic construct
  misc_feature 1..2529: note = Variant of DNA polymerase I from Thermus sp. strain 2.9
  source 1..2529: mol_type = other DNA
atgcaccatcatcatcatcatggcggtagcggcgtgttaccggtgttcgagcctaaaggtcgcgtgcttctggttgatggccatcatctcgcgtatcgtaacttctttgccctgaaaggattaaccaccagccgtggcgagccggtacagggtgtctacggctttgcaaagtcgctcctgaaagctctgaaagaagacggtgatgtggtgattgttgtctttgatgcgaaagcgccaagttttcgccacgaagcgtacgaagcttacaaagccgggcgtgctccaacgccggaagactttcctcgccaattggcgcttatgaaggaattagtggatttgcttggcctcgaacgcttggaagttcccggtttcgaggcagacgacgtattagcgactctcgcaaagaaagccgaacgtgagggctatgaagtccagatcttgacagcagatcgcgatcttttccagcttttatctccgcgcatctcggtgttacacccggaagggcatcgtatcaccccggaatggctctgggagaaatatggtttgcgtcccgaacaatgggtggattttcgcgccttagcaggcgatccgagcgacaatattccgggagttaaaggtatcggcgagaagacggcgctcaagctccttaaagaatgggggtcgttggagaacttgcttaagaatttagatcaggtcaaaccagagtcagtgcgtgagaagattcttgcacacctcgaagacctcaaattaagccgcgaattgtcccgtgtacgcaccgatttgccgctcgaagttgatttccgtcgccgccgcgaacctgactgggagggtcttaaagcgtttttagagcgtcttgaatttggttcgctcttgcatgaattcggccttttagaaagcccgttaccagccgaagaagcaccttggccaccgcccgaaggcgcgtttttaggttaccgtttgagtcgcccggaaccgatgtgggccgaattattggctcttgcagcgtctgcccagggacgtgtgtatcgcgcggaagaccctcatggtgcgctccgcggcctcttcgaagtccgtggactccttgccaaagacttagctgttgttgcattgcgcgaaggtcttgatttacctccgactgatgatccaatgcttcttgcgtacctcttggacccgtcaaacacgacgcccgaaggcgtagcccgtcgttacggcggcgagtggaccgaagatgcagcgaaacgcgcgttattggccgaacgtttgcacgccaatttattaggacgtttgcaaggcgaggaacgtctcctctggctttacgaagaagtggagaaaccattgagtcgcgtgctcgcgcatatggaagctaccggtgtcaaattagacgtggcgtatttgaaggctctcagccttgaagttgctgccgaaatgcgccgcttggaggaagaagtattccgtttagcaggccattcctttcgccttaattctcgcgatcagttagaacgtgtgttgttcgatgaacttggtctccctcctatcggcaagacagagaagaccggtaaacgtagcacttcagcggcggttttagaagctcttcgcgaagtccatcccattgtggacaagatcttgcagtaccgcgaactcgcgaaattgaaaggcacctatattgaccctcttccggcattagtccacccgaaaacgggacgcctccatacccgcttcaaccaaacagccacggcgaccggtcgtttgtcctcctctgatccaaaccttcagaatattccagtacgtaccccattgggccagaagatccgccgcgcgtttgtagctgaggagggttggcgtttagtggccctcgattatagccaaattgaattacgtgtccttgcccatctttctggcgatgagaacctcatccgcgtgtttcaggaaggcaaagacattcacactcaaacggcaagctggatgtttggattatcagctgaagcgatcgatcctttgatgcgtcgtgcagcgaagaccatcaatttcggtgttctctacggtatgagtgcctttcgtttgtcgcaggaattaggcattccctatgaagaagctgcggcgttcattcagaaatactttcaaagctatcccaaagttaaagcatggatcgagaagactctcgaagaaggccgcacacgtggttacgtagagaccttatttggacgtcgccgctatgttcccgatttaaacgctcgcgtgaaatctgtccgtgaagccgccgaacgcatggcgttcaacatgcctgtacagggcacggcagctgacctcatgaaacttgcaatggtgcgcctttttccacaattgcgtgaagttggtgcccgcatgctcttgcaggtccacgatgaactcttgttagaagcgccaaaagagcgtgcggaagaggtggcagccctcgcgaaagaggttatggaaggcgtgtggcccttagcggtgcctcttgaagtcgaagttggtattggcgaggattggctggctgccaaaggataatga

SEQ ID NO: 2688 - protein, 841 aa, synthetic construct
  REGION 1..841: note = Variant of DNA polymerase I from Thermus sp. strain 2.9
MHHHHHHGGSGVLPVFEPKGRVLLVDGHHLAYRNFFALKGLTTSRGEPVQGVYGFAKSLLKALKEDGDVVIVVFDAKAPSFRHEAYEAYKAGRAPTPEDFPRQLALMKELVDLLGLERLEVPGFEADDVLATLAKKAEREGYEVQILTADRDLFQLLSPRISVLHPEGHRITPEWLWEKYGLRPEQWVDFRALAGDPSDNIPGVKGIGEKTALKLLKEWGSLENLLKNLDQVKPESVREKILAHLEDLKLSRELSRVRTDLPLEVDFRRRREPDWEGLKAFLERLEFGSLLHEFGLLESPLPAEEAPWPPPEGAFLGYRLSRPEPMWAELLALAASAQGRVYRAEDPHGALRGLFEVRGLLAKDLAVVALREGLDLPPTDDPMLLAYLLDPSNTTPEGVARRYGGEWTEDAAKRALLAERLHANLLGRLQGEERLLWLYEEVEKPLSRVLAHMEATGVKLDVAYLKALSLEVAAEMRRLEEEVFRLAGHSFRLNSRDQLERVLFDELGLPPIGKTEKTGKRSTSAAVLEALREVHPIVDKILQYRELAKLKGTYIDPLPALVHPKTGRLHTRFNQTATATGRLSSSDPNLQNIPVRTPLGQKIRRAFVAEEGWRLVALDYSQIELRVLAHLSGDENLIRVFQEGKDIHTQTASWMFGLSAEAIDPLMRRAAKTINFGVLYGMSAFRLSQELGIPYEEAAAFIQKYFQSYPKVKAWIEKTLEEGRTRGYVETLFGRRRYVPDLNARVKSVREAAERMAFNMPVQGTAADLMKLAMVRLFPQLREVGARMLLQVHDELLLEAPKERAEEVAALAKEVMEGVWPLAVPLEVEVGIGEDWLAAKG

SEQ ID NO: 2689 - DNA, 2529 bp, synthetic construct
  misc_feature 1..2529: note = Variant of DNA polymerase I from Thermus sp. strain 2.9
  source 1..2529: mol_type = other DNA
atgcaccatcatcatcatcatggcggtagcggcgtgttaccggtgttcgagcctaaaggtcgcgtgcttctggttgatggccatcatctcgcgtatcgtaacttctttgccctgaaaggattaaccaccagccgtggcgagccggtacagggtgtctacggctttgcaaagtcgctcctgaaagctctgaaagaagacggtgatgtggtgattgttgtctttgatgcgaaagcgccaagttttcgccacgaagcgtacgaagcttacaaagccgggcgtgctccaacgccggaagactttcctcgccaattggcgcttatgaaggaattagtggatttgcttggcctcgaacgcttggaagttcccggtttcgaggcagacgacgtattagcgactctcgcaaagaaagccgaacgtgagggctatgaagtccagatcttgacagcagatcgcgatcttttccagcttttatctccgcgcatctcggtgttacacccggaagggcatcgtatcaccccggaatggctctgggagaaatatggtttgcgtcccgaacaatgggtggattttcgcgccttagcaggcgatccgagcgacaatattccgggagttaaaggtatcggcgagaagacggcgctcaagctccttaaagaatgggggtcgttggagaacttgcttaagaatttagatcaggtcaaaccagagtcagtgcgtgagaagattcttgcacacctcgaagacctcaaattaagccgcgaattgtcccgtgtacgcaccgatttgccgctcgaagttgatttccgtcgccgccgcgttcctgactgggagggtcttaaagcgtttttagagcgtcttgaatttggttcgctcttgcatgaattcggccttttagaaagcccgttaccagccgaagaagcaccttggccaccgcccgaaggcgcgtttttaggttaccgtttgagtcgcccggaaccgatgtgggccgaattattggctcttgcagcgtctgcccagggacgtgtgtatcgcgcggaagaccctcatggtgcgctccgcggcctcttcgaagtccgtggactccttgccaaagacttagctgttgttgcattgcgcgaaggtcttgatttacctccgactgatgatccaatgcttcttgcgtacctcttggacccgtcaaacacgacgcccgaaggcgtagcccgtcgttacggcggcgagtggaccgaagatgcagcgaaacgcgcgttattggccgaacgtttgcacgccaatttattaggacgtttgcaaggcgaggaacgtctcctctggctttacgaagaagtggagaaaccattgagtcgcgtgctcgcgcatatggaagctaccggtgtcaaattagacgtggcgtatttggaggctctcagccttgaagttgctgccgaaatgcgccgcttggaggaagaagtattccgtttagcaggccattcctttcgccttaattctcgcgatcagttagaacgtgtgttgttcgatgaacttggtctccctcctatcggcaagacagagaagaccggtaaacgtagcacttcagcggcggttttagaagctcttcgcgaagtccatcccattgtggacaagatcttgcagtaccgcgaactcgcgaaattgaaaggcacctatattgaccctcttccggcattagtccacccgaaaacgggacgcctccatacccgcttcaaccaaacagccacggcgaccggtcgtttgtcctcctctgatccaaaccttcagaatattccagtacgtaccccattgggccagaagatccgccgcgcgtttgtagctgaggagggttggcgtttagtggccctcgattatagccaaattgaattacgtgtccttgcccatctttctggcgatgagaacctcatccgcgtgtttcaggaaggcaaagacattcacactcaaacggcaagctggatgtttggattatcagctgaagcgatcgatcctttgatgcgtcgtgcagcgaagaccatcaatttcggtgttctctacggtatgagtgcctttcgtttgtcgcaggaattaggcattccctatgaagaagctgcggcgttcattcagaaatactttcaaagctatcccaaagttaaagcatggatcgagaagactctcgaagaaggccgcacacgtggttacgtagagaccttatttggacgtcgccgctatgttcccgatttaaacgctcgcgtgaaatctgtccgtgaagccgccgaacgcatggcgttcaacatgcctgtacagggcacggcagctgacctcatgaaacttgcaatggtgcgcctttttccacaattgcgtgaagttggtgcccgcatgctcttgcaggtccacgatgaactcttgttagaagcgccaaaagagcgtgcggaagaggtggcagccctcgcgaaagaggttatggaaggcgtgtggcccttagcggtgcctcttgaagtcgaagttggtattggcgaggattggctggctgccaaaggataatga

SEQ ID NO: 2690 - protein, 841 aa, synthetic construct
  REGION 1..841: note = Variant of DNA polymerase I from Thermus sp. strain 2.9
MHHHHHHGGSGVLPVFEPKGRVLLVDGHHLAYRNFFALKGLTTSRGEPVQGVYGFAKSLLKALKEDGDVVIVVFDAKAPSFRHEAYEAYKAGRAPTPEDFPRQLALMKELVDLLGLERLEVPGFEADDVLATLAKKAEREGYEVQILTADRDLFQLLSPRISVLHPEGHRITPEWLWEKYGLRPEQWVDFRALAGDPSDNIPGVKGIGEKTALKLLKEWGSLENLLKNLDQVKPESVREKILAHLEDLKLSRELSRVRTDLPLEVDFRRRRVPDWEGLKAFLERLEFGSLLHEFGLLESPLPAEEAPWPPPEGAFLGYRLSRPEPMWAELLALAASAQGRVYRAEDPHGALRGLFEVRGLLAKDLAVVALREGLDLPPTDDPMLLAYLLDPSNTTPEGVARRYGGEWTEDAAKRALLAERLHANLLGRLQGEERLLWLYEEVEKPLSRVLAHMEATGVKLDVAYLEALSLEVAAEMRRLEEEVFRLAGHSFRLNSRDQLERVLFDELGLPPIGKTEKTGKRSTSAAVLEALREVHPIVDKILQYRELAKLKGTYIDPLPALVHPKTGRLHTRFNQTATATGRLSSSDPNLQNIPVRTPLGQKIRRAFVAEEGWRLVALDYSQIELRVLAHLSGDENLIRVFQEGKDIHTQTASWMFGLSAEAIDPLMRRAAKTINFGVLYGMSAFRLSQELGIPYEEAAAFIQKYFQSYPKVKAWIEKTLEEGRTRGYVETLFGRRRYVPDLNARVKSVREAAERMAFNMPVQGTAADLMKLAMVRLFPQLREVGARMLLQVHDELLLEAPKERAEEVAALAKEVMEGVWPLAVPLEVEVGIGEDWLAAKG

SEQ ID NO: 2691 - DNA, 2529 bp, synthetic construct
  misc_feature 1..2529: note = Variant of DNA polymerase I from Thermus sp. strain 2.9
  source 1..2529: mol_type = other DNA
atgcaccatcatcatcatcatggcggtagcggcgtgttaccggtgttcgagcctaaaggtcgcgtgcttctggttgatggccatcatctcgcgtatcgtaacttctttgccctgaaaggattaaccaccagccgtggcgagccggtacagggtgtctacggctttgcaaagtcgctcctgaaagctctgaaagaagacggtgatgtggtgattgttgtctttgatgcgaaagcgccaagttttcgccacgaagcgtacgaagcttacaaagccgggcgtgctccaacgccggaagactttcctcgccaattggcgcttatgaaggaattagtggatttgcttggcctcgaacgcttggaagttcccggtttcgaggcagacgacgtattagcgactctcgcaaagaaagccgaacgtgagggctatgaagtccagatcttgacagcagatcgcgatcttttccagcttttatctccgcgcatctcggtgttacacccggaagggcatcgtatcaccccggaatggctctgggagaaatatggtttgcgtcccgaacaatgggtggattttcgcgccttagcaggcgatccgagcgacaatattccgggagttaaaggtatcggcgagaagacggcgctcaagctccttaaagaatgggggtcgttggagaacttgcttaagaatttagatcaggtcaaaccagagtcagtgcgtgagaagattcttgcacacctcgaagacctcaaattaagccgcgaattgtcccgtgtacgcaccgatttgccgctcgaagttgatttccgtcgccgccgcgaacctgactgggagggtcttaaagcgtttttagagcgtcttgaatttggttcgctcttgcatgaattcggccttttagaaagcggtttaccagccgaagaagcaccttggccaccgcccgaaggcgcgtttttaggttaccgtttgagtcgcccggaaccgatgtgggccgaattattggctcttgcagcgtctgcccagggacgtgtgtatcgcgcggaagaccctcatggtgcgctccgcggcctcttcgaagtccgtggactccttgccaaagacttagctgttgttgcattgcgcgaaggtcttgatttacctccgactgatgatccaatgcttcttgcgtacctcttggacccgtcaaacacgacgcccgaaggcgtagcccgtcgttacggcggcgagtggaccgaagatgcagcgaaacgcgcgttattggccgaacgtttgcacgccaatttattaggacgtttgcaaggcgaggaacgtctcctctggctttacgaagaagtggagaaaccattgagtcgcgtgctcgcgcatatggaagctaccggtgtcaaattagacgtggcgtatttggaggctctcagccttgaagttgctgccgaaatgcgccgcttggaggaagaagtattccgtttagcaggccattcctttcgccttaattctcgcgatcagttagaacgtgtgttgttcgatgaacttggtctccctcctatcggcaagacagagaagaccggtaaacgtagcacttcagcggcggttttagaagctcttcgcgaagtccatcccattgtggacaagatcttgcagtaccgcgaactcgcgaaattgaaaggcacctatattgaccctcttccggcattagtccacccgaaaacgggacgcctccatacccgcttcaaccaaacagccacggcgaccggtcgtttgtcctcctctgatccaaaccttcagaatattccagtacgtaccccattgggccagaagatccgccgcgcgtttgtagctgaggagggttggcgtttagtggccctcgattatagccaaattgaattacgtgtccttgcccatctttctggcgatgagaacctcatccgcgtgtttcaggaaggcaaagacattcacactcaaacggcaagctggatgtttggattatcagctgaagcgatcgatcctttgatgcgtcgtgcagcgaagaccatcaatttcggtgttctctacggtatgagtgcctttcgtttgtcgcaggaattaggcattccctatgaagaagctgcggcgttcattcagaaatactttcaaagctatcccaaagttaaagcatggatcgagaagactctcgaagaaggccgcacacgtggttacgtagagaccttatttggacgtcgccgctatgttcccgatttaaacgctcgcgtgaaatctgtccgtgaagccgccgaacgcatggcgttcaacatgcctgtacagggcacggcagctgacctcatgaaacttgcaatggtgcgcctttttccacaattgcgtgaagttggtgcccgcatgctcttgcaggtccacgatgaactcttgttagaagcgccaaaagagcgtgcggaagaggtggcagccctcgcgaaagaggttatggaaggcgtgtggcccttagcggtgcctcttgaagtcgaagttggtattggcgaggattggctggctgccaaaggataatga

SEQ ID NO: 2692 - protein, 841 aa, synthetic construct
  REGION 1..841: note = Variant of DNA polymerase I from Thermus sp. strain 2.9
MHHHHHHGGSGVLPVFEPKGRVLLVDGHHLAYRNFFALKGLTTSRGEPVQGVYGFAKSLLKALKEDGDVVIVVFDAKAPSFRHEAYEAYKAGRAPTPEDFPRQLALMKELVDLLGLERLEVPGFEADDVLATLAKKAEREGYEVQILTADRDLFQLLSPRISVLHPEGHRITPEWLWEKYGLRPEQWVDFRALAGDPSDNIPGVKGIGEKTALKLLKEWGSLENLLKNLDQVKPESVREKILAHLEDLKLSRELSRVRTDLPLEVDFRRRREPDWEGLKAFLERLEFGSLLHEFGLLESGLPAEEAPWPPPEGAFLGYRLSRPEPMWAELLALAASAQGRVYRAEDPHGALRGLFEVRGLLAKDLAVVALREGLDLPPTDDPMLLAYLLDPSNTTPEGVARRYGGEWTEDAAKRALLAERLHANLLGRLQGEERLLWLYEEVEKPLSRVLAHMEATGVKLDVAYLEALSLEVAAEMRRLEEEVFRLAGHSFRLNSRDQLERVLFDELGLPPIGKTEKTGKRSTSAAVLEALREVHPIVDKILQYRELAKLKGTYIDPLPALVHPKTGRLHTRFNQTATATGRLSSSDPNLQNIPVRTPLGQKIRRAFVAEEGWRLVALDYSQIELRVLAHLSGDENLIRVFQEGKDIHTQTASWMFGLSAEAIDPLMRRAAKTINFGVLYGMSAFRLSQELGIPYEEAAAFIQKYFQSYPKVKAWIEKTLEEGRTRGYVETLFGRRRYVPDLNARVKSVREAAERMAFNMPVQGTAADLMKLAMVRLFPQLREVGARMLLQVHDELLLEAPKERAEEVAALAKEVMEGVWPLAVPLEVEVGIGEDWLAAKG

SEQ ID NO: 2693 - DNA, 2529 bp, synthetic construct
  misc_feature 1..2529: note = Variant of DNA polymerase I from Thermus sp. strain 2.9
  source 1..2529: mol_type = other DNA
atgcaccatcatcatcatcatggcggtagcggcgtgttaccggtgttcgagcctaaaggtcgcgtgcttctggttgatggccatcatctcgcgtatcgtaacttctttgccctgaaaggattaaccaccagccgtggcgagccggtacagggtgtctacggctttgcaaagtcgctcctgaaagctctgaaagaagacggtgatgtggtgattgttgtctttgatgcgaaagcgccaagttttcgccacgaagcgtacgaagcttacaaagccgggcgtgctccaacgccggaagactttcctcgccaattggcgcttatgaaggaattagtggatttgcttggcctcgaacgcttggaagttcccggtttcgaggcagacgacgtattagcgactctcgcaaagaaagccgaacgtgagggctatgaagtccagatcttgacagcagatcgcgatcttttccagcttttatctccgcgcatctcggtgttacacccggaagggcatcgtatcaccccggaatggctctgggagaaatatggtttgcgtcccgaacaatgggtggattttcgcgccttagcaggcgatccgagcgacaatattccgggagttaaaggtatcggcgagaagacggcgctcaagctccttaaagaatgggggtcgttggagaacttgcttaagaatttagatcaggtcaaaccagagtcagtgcgtgagaagattcttgcacacctcgaagacctcaaattaagccgcgaattgtcccgtgtacgcaccgatttgccgctcgaagttgatttccgtcgccgccgcgaacctgactgggagggtcttaaagggtttttagagcgtcttgaatttggttcgctcttgcatgaattcggccttttagaaagcccgttaccagccgaagaagcaccttggccaccgcccgaaggcgcgtttttaggttaccgtttgagtcgcccggaaccgatgtgggccgaattattggctcttgcagcgtctgcccagggacgtgtgtatcgcgcggaagaccctcatggtgcgctccgcggcctcttcgaagtccgtggactccttgccaaagacttagctgttgttgcattgcgcgaaggtcttgatttacctccgactgatgatccaatgcttcttgcgtacctcttggacccgtcaaacacgacgcccgaaggcgtagcccgtcgttacggcggcgagtggaccgaagatgcagcgaaacgcgcgttattggccgaacgtttgcacgccaatttattaggacgtttgcaaggcgaggaacgtctcctctggctttacgaagaagtggagaaaccattgagtcgcgtgctcgcgcatatggaagctaccggtgtcaaattagacgtggcgtatttggaggctctcagccttgaagttgctgccgaaatgcgccgcttggaggaagaagtattccgtttagcaggccattcctttcgccttaattctcgcgatcagttagaacgtgtgttgttcgatgaacttggtctccctcctatcggcaagacagagaagaccggtaaacgtagcacttcagcggcggttttagaagctcttcgcgaagtccatcccattgtggacaagatcttgcagtaccgcgaactcgcgaaattgaaaggcacctatattgaccctcttccggcattagtccacccgaaaacgggacgcctccatacccgcttcaaccaaacagccacggcgaccggtcgtttgtcctcctctgatccaaaccttcagaatattccagtacgtaccccattgggccagaagatccgccgcgcgtttgtagctgaggagggttggcgtttagtggccctcgattatagccaaattgaattacgtgtccttgcccatctttctggcgatgagaacctcatccgcgtgtttcaggaaggcaaagacattcacactcaaacggcaagctggatgtttggattatcagctgaagcgatcgatcctttgatgcgtcgtgcagcgaagaccatcaatttcggtgttctctacggtatgagtgcctttcgtttgtcgcaggaattaggcattccctatgaagaagctgcggcgttcattcagaaatactttcaaagctatcccaaagttaaagcatggatcgagaagactctcgaagaaggccgcacacgtggttacgtagagaccttatttggacgtcgccgctatgttcccgatttaaacgctcgcgtgaaatctgtccgtgaagccgccgaacgcatggcgttcaacatgcctgtacagggcacggcagctgacctcatgaaacttgcaatggtgcgcctttttccacaattgcgtgaagttggtgcccgcatgctcttgcaggtccacgatgaactcttgttagaagcgccaaaagagcgtgcggaagaggtggcagccctcgcgaaagaggttatggaaggcgtgtggcccttagcggtgcctcttgaagtcgaagttggtattggcgaggattggctggctgccaaaggataatga

SEQ ID NO: 2694 - protein, 841 aa, synthetic construct
  REGION 1..841: note = Variant of DNA polymerase I from Thermus sp. strain 2.9
MHHHHHHGGSGVLPVFEPKGRVLLVDGHHLAYRNFFALKGLTTSRGEPVQGVYGFAKSLLKALKEDGDVVIVVFDAKAPSFRHEAYEAYKAGRAPTPEDFPRQLALMKELVDLLGLERLEVPGFEADDVLATLAKKAEREGYEVQILTADRDLFQLLSPRISVLHPEGHRITPEWLWEKYGLRPEQWVDFRALAGDPSDNIPGVKGIGEKTALKLLKEWGSLENLLKNLDQVKPESVREKILAHLEDLKLSRELSRVRTDLPLEVDFRRRREPDWEGLKGFLERLEFGSLLHEFGLLESPLPAEEAPWPPPEGAFLGYRLSRPEPMWAELLALAASAQGRVYRAEDPHGALRGLFEVRGLLAKDLAVVALREGLDLPPTDDPMLLAYLLDPSNTTPEGVARRYGGEWTEDAAKRALLAERLHANLLGRLQGEERLLWLYEEVEKPLSRVLAHMEATGVKLDVAYLEALSLEVAAEMRRLEEEVFRLAGHSFRLNSRDQLERVLFDELGLPPIGKTEKTGKRSTSAAVLEALREVHPIVDKILQYRELAKLKGTYIDPLPALVHPKTGRLHTRFNQTATATGRLSSSDPNLQNIPVRTPLGQKIRRAFVAEEGWRLVALDYSQIELRVLAHLSGDENLIRVFQEGKDIHTQTASWMFGLSAEAIDPLMRRAAKTINFGVLYGMSAFRLSQELGIPYEEAAAFIQKYFQSYPKVKAWIEKTLEEGRTRGYVETLFGRRRYVPDLNARVKSVREAAERMAFNMPVQGTAADLMKLAMVRLFPQLREVGARMLLQVHDELLLEAPKERAEEVAALAKEVMEGVWPLAVPLEVEVGIGEDWLAAKG

SEQ ID NO: 2695 - DNA, 2529 bp, synthetic construct
  misc_feature 1..2529: note = Variant of DNA polymerase I from Thermus sp. strain 2.9
  source 1..2529: mol_type = other DNA
atgcaccatcatcatcatcatggcggtagcggcgtgttaccggtgttcgagcctaaaggtcgcgtgcttctggttgatggccatcatctcgcgtatcgtaacttctttgccctgaaaggattaaccaccagcagcggcgagccggtacagggtgtctacggctttgcaaagtcgctcctgaaagctctgaaagaagacggtgatgtggtgattgttgtctttgatgcgaaagcgccaagttttcgccacgaagcgtacgaagcttacaaagccgggcgtgctccaacgccggaagactttcctcgccaattggcgcttatgaaggaattagtggatttgcttggcctcgaacgcttggaagttcccggtttcgaggcagacgacgtattagcgactctcgcaaagaaagccgaacgtgagggctatgaagtccagatcttgacagcagatcgcgatcttttccagcttttatctccgcgcatctcggtgttacacccggaagggcatcgtatcaccccggaatggctctgggagaaatatggtttgcgtcccgaacaatgggtggattttcgcgccttagcaggcgatccgagcgacaatattccgggagttaaaggtatcggcgagaagacggcgctcaagctccttaaagaatgggggtcgttggagaacttgcttaagaatttagatcaggtcaaaccagagtcagtgcgtgagaagattcttaatcacctcgaagacctcaaattaagccgcgaattgtcccgtgtacgcaccgatttgccgctcgaagttgatttccgtcgccgccgcgaacctgactgggagggtcttaaagcgtttttagagcgtcttgaatttggttcgctcttgcatgaattcggccttttagaaagcccgttaccagccgaagaagcaccttggccaccgcccgaaggcgcgtttttaggttaccgtttgagtcgcccggaaccgatgtgggccgaattattggctcttgcagcgtctgcccagggacgtgtgtatcgcgcggaagaccctcatggtgcgctccgcggcctcttcgaagtccgtggactccttgccaaagacttagctgttgttgcattgcgcgaaggtcttgatttacctccgactgatgatccaatgcttcttgcgtacctcttggacccgtcaaacacgacgcccgaaggcgtagcccgtcgttacggcggcgagtggaccgaagatgcagcgaaacgcgcgttattggccgaacgtttgcacgccaatttattaggacgtttgcaaggcgaggaacgtctcctctggctttacgaagaagtggagaaaccattgagtcgcgtgctcgcgcatatggaagctaccggtgtcaaattagacgtggcgtatttggaggctctcagccttgaagttgctgccgaaatgcgccgcttggaggaagaagtattccgtttagcaggccattcctttcgccttaattctcgcgatcagttagaacgtgtgttgttcgatgaacttggtctccctcctatcggcaagacagagaagaccggtaaacgtagcacttcagcggcggttttagaagctcttcgcgaagtccatcccattgtggacaagatcttgcagtaccgcgaactcgcgaaattgaaaggcacctatattgaccctcttccggcattagtccacccgaaaacgggacgcctccatacccgcttcaaccaaacagccacggcgaccggtcgtttgtcctcctctgatccaaaccttcagaatattccagtacgtaccccattgggccagaagatccgccgcgcgtttgtagctgaggagggttggcgtttagtggccctcgattatagccaaattgaattacgtgtccttgcccatctttctggcgatgagaacctcatccgcgtgtttcaggaaggcaaagacattcacactcaaacggcaagctggatgtttggattaagtgctgaagcgatcgatcctttgatgcgtcgtgcagcgaagaccatcaatttcggtgttctctacggtatgagtgcctttcgtttgtcgcaggaattaggcattccctatgaagaagctgcggcgttcattcagaaatactttcaaagctatcccaaagttaaagcatggatcgagaagactctcgaagaaggccgcacacgtggttacgtagagaccttatttggacgtcgccgctatgttcccgatttaaacgctcgcgtgaaatctgtccgtgaagccgccgaacgcatggcgttcaacatgcctgtacagggcacggcagctgacctcatgaaacttgcaatggtgcgcctttttccacaattgcgtgaagttggtgcccgcatgctcttgcaggtccacgatgaactcttgttagaagcgccaaaagagcgtgcggaagaggtggcagccctcgcgaaaacggttatggaaggcgtgtggcccttagcggtgcctcttgaagtcgaagttggtattggcgaggattggctggctgccaaaggataatga

SEQ ID NO: 2696 - protein, 841 aa, synthetic construct
  REGION 1..841: note = Variant of DNA polymerase I from Thermus sp. strain 2.9
MHHHHHHGGSGVLPVFEPKGRVLLVDGHHLAYRNFFALKGLTTSSGEPVQGVYGFAKSLLKALKEDGDVVIVVFDAKAPSFRHEAYEAYKAGRAPTPEDFPRQLALMKELVDLLGLERLEVPGFEADDVLATLAKKAEREGYEVQILTADRDLFQLLSPRISVLHPEGHRITPEWLWEKYGLRPEQWVDFRALAGDPSDNIPGVKGIGEKTALKLLKEWGSLENLLKNLDQVKPESVREKILNHLEDLKLSRELSRVRTDLPLEVDFRRRREPDWEGLKAFLERLEFGSLLHEFGLLESPLPAEEAPWPPPEGAFLGYRLSRPEPMWAELLALAASAQGRVYRAEDPHGALRGLFEVRGLLAKDLAVVALREGLDLPPTDDPMLLAYLLDPSNTTPEGVARRYGGEWTEDAAKRALLAERLHANLLGRLQGEERLLWLYEEVEKPLSRVLAHMEATGVKLDVAYLEALSLEVAAEMRRLEEEVFRLAGHSFRLNSRDQLERVLFDELGLPPIGKTEKTGKRSTSAAVLEALREVHPIVDKILQYRELAKLKGTYIDPLPALVHPKTGRLHTRFNQTATATGRLSSSDPNLQNIPVRTPLGQKIRRAFVAEEGWRLVALDYSQIELRVLAHLSGDENLIRVFQEGKDIHTQTASWMFGLSAEAIDPLMRRAAKTINFGVLYGMSAFRLSQELGIPYEEAAAFIQKYFQSYPKVKAWIEKTLEEGRTRGYVETLFGRRRYVPDLNARVKSVREAAERMAFNMPVQGTAADLMKLAMVRLFPQLREVGARMLLQVHDELLLEAPKERAEEVAALAKTVMEGVWPLAVPLEVEVGIGEDWLAAKG

SEQ ID NO: 2697 - DNA, 2529 bp, synthetic construct
  misc_feature 1..2529: note = Variant of DNA polymerase I from Thermus sp. strain 2.9
  source 1..2529: mol_type = other DNA
atgcaccatcatcatcatcatggcggtagcggcgtgttaccggtgttcgagcctaaaggtcgcgtgcttctggttgatggccatcatctcgcgtatcgtaacttctttgccctgaaaggattaaccaccagccgtggcgagccggtacagggtgtctacggctttgcaaagtcgctcctgaaagctctgaaagaagacggtgatgtggtgattgttgtctttgatgcgaaagcgccaagttttcgccacgaagcgtacgaagcttacaaagccgggcgtgctccaacgccggaagactttcctcgccaattggcgcttatgaaggaattagtggatttgcttggcctcgaacgcttggaagttcccggtttcgaggcagacgacgtattagcgactctcgcaaagaaagccgaacgtgagggctatgaagtccagatcttgacagcagatcgcgatcttttccagcttttatctccgcgcatctcggtgttacacccggaagggcatcgtatcaccccggaatggctctgggagaaatatggtttgcgtcccgaacaatgggtggattttcgcgccttagcaggcgatccgagcgacaatattccgggagttaaaggtatcggcgagaagacggcgctcaagctccttaaagaatgggggtcgttggagaacttgcttaagaatttagatcaggtcaaaccagagtcagtgcgtgagaagattcttgcacacctcgaagacctcaaattaagccgcgaattgtcccgtgtacgcaccgatttgccgctcgaagttgatttccgtcgccgccgcgaacctgactgggagggtcttaaagcgtttttagagcgtcttgaatttggttcgctcttgcatgaattcggccttttagaaagcccgttaccagccgaagaagcaccttggccaccgcccgaaggcgcgtttttaggttaccgtttgagtcgcccggaaccgatgtgggccgaattattggctcttgcagcgtctgcccagggacgtgtgtatcgcgcggaagaccctcatggtgcgctccgcggcctcttcgaagtccgtggactccttgccaaagacttagctgttgttgcattgcgcgaaggtcttgatttacctccgactgatgatccaatgcttcttgcgtacctcttggacccgtcaaacacgacgcccgaaggcgtagcccgtcgttacggcggcgagtggaccgaagatgcagcgaaacgcgcgttattggccgaacgtttgcacgccaatttattaggacgtttgcaaggcgaggaacgtctcctctggctttacgaagaagtggagaaaccattgagtcgcgtgctcgcgcatatggaagctaccggtgtcaaattagacgtggcgtatttggaggctctcagccttgaagttgctgccgaaatgcgccgcttggaggaagaagtattccgtttagcaggccattcctttcgccttaattctcgcgatcagttagaacgtgtgttgttcgatgaacttggtctccctcctatcggcaagacagagaagaccggtaaacgtagcacttcagcggcggttttagaagctcttcgcgaagtccatcccattgtggacaagatcttgcagtaccgcgaactcgcgaaattgaaaggcacctatattgaccctcttccggcattagtccacccgaaaacgggacgcctccatacccgcttcaaccaaacagccacggcgaccggtcgtttgtcctcctctgatccaaaccttcagaatattccagtacgtaccccattgggccagaagatccgccgcgcgtttgtagctgaggagggttggcgtttagtggccctcgattatagccaaattgaattacgtgtccttgcccatctttctggcgatgagaacctcatccgcgtgtttcaggaaggcaaagacattcacactcaaacggcaagctggatgtttggattatcagctgaagcgatcgatcctttgatgcgtcgtgcagcgaagaccatcaatttcggtgttctctacggtatgagtgcctttcgtttgtcgcaggaattaggcattccctatgaagaagctgcggcgttcattcagaaatactttcaaagctatcccaaagttaaagcatggatcgagaagactctcgaagaaggccgcacacgtggttacgtagagaccttatttggacgtcgccgctatgttcccgatttaaacgctcgcgtgaaatctgtccgtgaagccgccgaacgcatggcgttcaacatgcctgtacagggcacggcagctgacctcatgaaacttgcaatggtgcgcctttttccacaattgcgtgaagttggtgcccgcatgctcttgcaggtccacgatgaactcttgttagaagcgccaaaagagcgtgcggaagaggtggcagccctcgcgaaagaggttatggaaggcgtgtggcccttagcggtgcctcttgaagtccgggttggtattggcgaggattggctggctgccaaaggataatga

SEQ ID NO: 2698 - protein, 841 aa, synthetic construct
  REGION 1..841: note = Variant of DNA polymerase I from Thermus sp. strain 2.9
MHHHHHHGGSGVLPVFEPKGRVLLVDGHHLAYRNFFALKGLTTSRGEPVQGVYGFAKSLLKALKEDGDVVIVVFDAKAPSFRHEAYEAYKAGRAPTPEDFPRQLALMKELVDLLGLERLEVPGFEADDVLATLAKKAEREGYEVQILTADRDLFQLLSPRISVLHPEGHRITPEWLWEKYGLRPEQWVDFRALAGDPSDNIPGVKGIGEKTALKLLKEWGSLENLLKNLDQVKPESVREKILAHLEDLKLSRELSRVRTDLPLEVDFRRRREPDWEGLKAFLERLEFGSLLHEFGLLESPLPAEEAPWPPPEGAFLGYRLSRPEPMWAELLALAASAQGRVYRAEDPHGALRGLFEVRGLLAKDLAVVALREGLDLPPTDDPMLLAYLLDPSNTTPEGVARRYGGEWTEDAAKRALLAERLHANLLGRLQGEERLLWLYEEVEKPLSRVLAHMEATGVKLDVAYLEALSLEVAAEMRRLEEEVFRLAGHSFRLNSRDQLERVLFDELGLPPIGKTEKTGKRSTSAAVLEALREVHPIVDKILQYRELAKLKGTYIDPLPALVHPKTGRLHTRFNQTATATGRLSSSDPNLQNIPVRTPLGQKIRRAFVAEEGWRLVALDYSQIELRVLAHLSGDENLIRVFQEGKDIHTQTASWMFGLSAEAIDPLMRRAAKTINFGVLYGMSAFRLSQELGIPYEEAAAFIQKYFQSYPKVKAWIEKTLEEGRTRGYVETLFGRRRYVPDLNARVKSVREAAERMAFNMPVQGTAADLMKLAMVRLFPQLREVGARMLLQVHDELLLEAPKERAEEVAALAKEVMEGVWPLAVPLEVRVGIGEDWLAAKG

SEQ ID NO: 2699 - DNA, 2529 bp, synthetic construct
  misc_feature 1..2529: note = Variant of DNA polymerase I from Thermus sp. strain 2.9
  source 1..2529: mol_type = other DNA
atgcaccatcatcatcatcatggcggtagcggcgtgttaccggtgttcgagcctaaaggtcgcgtgcttctggttgatggccatcatctcgcgtatcgtaacttctttgccctgaaaggattaaccaccagccgtggcgagccggtacagggtgtctacggctttgcaaagtcgctcctgaaagctctgaaagaagacggtgatgtggtgattgttgtctttgatgcgaaagcgccaagttttcgccacgaagcgtacgaagcttacaaagccgggcgtgctccaacgccggaagactttcctcgccaattggcgcttatgaaggaattagtggatttgcttggcctcgaacgcttggaagttcccggtttcgaggcagacgacgtattagcgactctcgcaaagaaagccgaacgtgagggctatgaagtccagatcttgacagcagatcgcgatcttttccagcttttatctccgcgcatctcggtgttacacccggaagggcatcgtatcaccccggaatggctctgggagaaatatggtttgcgtcccgaacaatgggtggattttcgcgccttagcaggcgatccgagcgacaatattccgggagttaaaggtatcggcgagaagacggcgctcaagctccttaaagaatgggggtcgttggagaacttgcttaagaatttagatcaggtcaaaccagagtcagtgcgtgagaagattcttgcacacctcgaagacctcaaattaagccgcgaattgtcccgtgtacgcaccgatttgccgctcgaagttgatttccgtcgccgccgcgaacctgactgggagggtcttaaagcgtttttagagcgtcttgaatttggttcgctcttgcatgaattcggccttttagaaagcccgttaccagccgaagaagcaccttggccaccgcccgaaggcgcgtttttaggttaccgtttgagtcgcccggaaccgatgtgggccgaattattggctcttgcagcgtctgcccagggacgtgtgtatcgcgcggaagaccctcatggtgcgctccgcggcctcttcgaagtccgtggactccttgccaaagacttagctgttgttgcattgcgcgaaggtcttgatttacctccgactgatgatccaatgcttcttgcgtacctcttggacccgtcaaacacgacgcccgaaggcgtagcccgtcgttacggcggcgagtggaccgaagatgcagcgaaacgcgcgttattggccgaacgtttgcacgccaatttattaggacgtttgcaaggcgaggaacgtctcctctggctttacgaagaagtggagaaaccattgagtcgcgtgctcgcgcatatggaagctaccggtgtcaaattagacgtggcgtatttggaggctctcagcctcgaagttgctgccgaaatgcgccgcttggaggaagaagtattccgtttagcaggccattcctttcgccttaattctcgcgatcagttagaacgtgtgttgttcgatgaacttggtctccctcctatcggcaagacagagaagaccggtaaacgtagcacttcagcggcggttttagaagctcttcgcgaagtccatcccattgtggacaagatcttgcagtaccgcgaactcgcgaaattgaaaggcacctatattgaccctcttccggcattagtccacccgaaaacgggacgcctccatacccgcttcaaccaaacagccacggcgaccggtcgtttgtcctcctctgatccaaaccttcagaatattccagtacgtaccccattgggccagaagatccgccgcgcgtttgtagctgaggagggttggcgtttagtggccctcgattatagccaaattgaattacgtgtccttgcccatctttctggcgatgagaacctcatccgcgtgtttcaggaaggcaaagacattcacactcaaacggcaagctggatgtttggattatcagctgaagcgatcgatcctttgatgcgtcgtgcagcgaagaccatcaatttcggtgttctctacggtatgagtgcctttcgtttgtcgcaggaattaggcattccctatgaagaagctggggcgttcattcagaaatactttcaaagctatcccaaagttaaagcatggatcgagaagactctcgaagaaggccgcacacgtggttacgtagagaccttatttggacgtcgccgctatgttcccgatttaaacgctcgcgtgaaatctgtccgtgaagccgccgaacgcatggcgttcaacatgcctgtacagggcacggcagctgacctcatgaaacttgcaatggtgcgcctttttccacaattgcgtgaagttggtgcccgcatgctcttgcaggtccacgatgaactcttgttagaagcgccaaaagagcgtgcggaagaggtggcagccctcgcgaaagaggttatggaaggcgtgtggcccttagcggtgcctcttgaagtcgaagttggtattggcgaggattggctggctgccaaaggataatga

SEQ ID NO: 2700 - protein, 841 aa, synthetic construct
  REGION 1..841: note = Variant of DNA polymerase I from Thermus sp. strain 2.9
MHHHHHHGGSGVLPVFEPKGRVLLVDGHHLAYRNFFALKGLTTSRGEPVQGVYGFAKSLLKALKEDGDVVIVVFDAKAPSFRHEAYEAYKAGRAPTPEDFPRQLALMKELVDLLGLERLEVPGFEADDVLATLAKKAEREGYEVQILTADRDLFQLLSPRISVLHPEGHRITPEWLWEKYGLRPEQWVDFRALAGDPSDNIPGVKGIGEKTALKLLKEWGSLENLLKNLDQVKPESVREKILAHLEDLKLSRELSRVRTDLPLEVDFRRRREPDWEGLKAFLERLEFGSLLHEFGLLESPLPAEEAPWPPPEGAFLGYRLSRPEPMWAELLALAASAQGRVYRAEDPHGALRGLFEVRGLLAKDLAVVALREGLDLPPTDDPMLLAYLLDPSNTTPEGVARRYGGEWTEDAAKRALLAERLHANLLGRLQGEERLLWLYEEVEKPLSRVLAHMEATGVKLDVAYLEALSLEVAAEMRRLEEEVFRLAGHSFRLNSRDQLERVLFDELGLPPIGKTEKTGKRSTSAAVLEALREVHPIVDKILQYRELAKLKGTYIDPLPALVHPKTGRLHTRFNQTATATGRLSSSDPNLQNIPVRTPLGQKIRRAFVAEEGWRLVALDYSQIELRVLAHLSGDENLIRVFQEGKDIHTQTASWMFGLSAEAIDPLMRRAAKTINFGVLYGMSAFRLSQELGIPYEEAGAFIQKYFQSYPKVKAWIEKTLEEGRTRGYVETLFGRRRYVPDLNARVKSVREAAERMAFNMPVQGTAADLMKLAMVRLFPQLREVGARMLLQVHDELLLEAPKERAEEVAALAKEVMEGVWPLAVPLEVEVGIGEDWLAAKG

SEQ ID NO: 2701 - DNA, 2529 bp, synthetic construct
  misc_feature 1..2529: note = Variant of DNA polymerase I from Thermus sp. strain 2.9
  source 1..2529: mol_type = other DNA
atgcaccatcatcatcatcatggcggtagcggcgtgttaccggtgttcgagcctaaaggtcgcgtgcttctggttgatggccatcatctcgcgtatcgtaacttctttgccctgaaaggattaaccaccagccgtggcgagccggtacagggtgtctacggctttgcaaagtcgctcctgaaagctctgaaagaagacggtgatgtggtgattgttgtctttgatgcgaaagcgccaagttttcgccacgaagcgtacgaagcttacaaagccgggcgtgctccaacgccggaagactttcctcgccaattggcgcttatgaaggaattagtggatttgcttggcctcgaacgcttggaagttcccggtttcgaggcagacgacgtattagcgactctcgcaaagaaagccgaacgtgagggctatgaagtccagatcttgacagcagatcgcgatcttttccagcttttatctccgcgcatctcggtgttacacccggaagggcatcgtatcaccccggaatggctctgggagaaatatggtttgcgtcccgaacaatgggtggattttcgcgccttagcaggcgatccgagcgacaatattccgggagttaaaggtatcggcgagaagacggcgctcaagctccttaaagaatgggggtcgttggagaacttgcttaagaatttagatcaggtcaaaccagagtcagtgcgtgagaagattcttgcacacctcgaagacctcaaattaagccgcgaattgtcccgtgtacgcaccgatttgccgctcgaagttgatttccgtcgccgccgcgaacctgactgggagggtcttaaagcgtttttagagcgtcttgaatttggttcgctcttgcatgaattcggccttttagaaagcccgttaccagccgaagaagcaccttggccaccgcccgaaggcgcgtttttaggttaccgtttgagtcgcccggaaccgatgtgggccgaattattggctcttgcagcgtctgcccagggacgtgtgtatcgcgcggaagaccctcatggtgcgctccgcggcctcttcgaagtccgtggactccttgccaaagacttagctgttgttgcattgcgcgaaggtcttgatttacctccgactgatgatccaatgcttcttgcgtacctcttggacccgtcaaacacgacgcccgaaggcgtagcccgtcgttacggcggcgagtggaccgaagatgcagcgaaacgcgcgttattggccgaacgtttgcacgccaatttattaggacgtttgcaaggcgaggaacgtctcctctggctttacgaagaagtggagaaaccattgagtcgcgtgctcgcgcatatggaagctaccggtgtcaaattagacgtggcgtatttggaggctctcagccttgaagttgctgccgaaatgcgccgcttggaggaagaagtattccgtttagcacggcattcctttcgccttaattctcgcgatcagttagaacgtgtgttgttcgatgaacttggtctccctcctatcggcaagacagagaagaccggtaaacgtagcacttcagcggcggttttagaagctcttcgcgaagtccatcccattgtggacaagatcttgcagtaccgcgaactcgcgaaattgaaaggcacctatattgaccctcttccggcattagtccacccgaaaacgggacgcctccatacccgcttcaaccaaacagccacggcgaccggtcgtttgtcctcctctgatccaaaccttcagaatattccagtacgtaccccattgggccagaagatccgccgcgcgtttgtagctgaggagggttggcgtttagtggccctcgattatagccaaattgaattacgtgtccttgcccatctttctggcgatgagaacctcatccgcgtgtttcaggaaggcaaagacattcacactcaaacggcaagctggatgtttggattatcagctgaagcgatcgatcctttgatgcgtcgtgcagcgaagaccatcaatttcggtgttctctacggtatgagtgcctttcgtttgtcgcaggaattaggcattccctatgaagaagctgcggcgttcattcagaaatactttcaaagctatcccaaagttaaagcatggatcgagaagactctcgaagaaggccgcacacgtggttacgtagagaccttatttggacgtcgccgctatgttcccgatttaaacgctcgcgtgaaatctgtccgtgaagccgccgaacgcatggcgttcaacatgcctgtacagggcacggcagctgacctcatgaaacttgcaatggtgcgcctttttccacaattgcgtgaagttggtgcccgcatgctcttgcaggtccacgatgaactcttgttagaagcgccaaaagagcgtgcggaagaggtggcagccctcgcgaaagaggttatggaaggcgtgtggcccttagcggtgcctcttgaagtcgaagttggtattggcgaggattggctggctgccaaaggataatga

SEQ ID NO: 2702 - protein, 841 aa, synthetic construct
  REGION 1..841: note = Variant of DNA polymerase I from Thermus sp. strain 2.9
MHHHHHHGGSGVLPVFEPKGRVLLVDGHHLAYRNFFALKGLTTSRGEPVQGVYGFAKSLLKALKEDGDVVIVVFDAKAPSFRHEAYEAYKAGRAPTPEDFPRQLALMKELVDLLGLERLEVPGFEADDVLATLAKKAEREGYEVQILTADRDLFQLLSPRISVLHPEGHRITPEWLWEKYGLRPEQWVDFRALAGDPSDNIPGVKGIGEKTALKLLKEWGSLENLLKNLDQVKPESVREKILAHLEDLKLSRELSRVRTDLPLEVDFRRRREPDWEGLKAFLERLEFGSLLHEFGLLESPLPAEEAPWPPPEGAFLGYRLSRPEPMWAELLALAASAQGRVYRAEDPHGALRGLFEVRGLLAKDLAVVALREGLDLPPTDDPMLLAYLLDPSNTTPEGVARRYGGEWTEDAAKRALLAERLHANLLGRLQGEERLLWLYEEVEKPLSRVLAHMEATGVKLDVAYLEALSLEVAAEMRRLEEEVFRLARHSFRLNSRDQLERVLFDELGLPPIGKTEKTGKRSTSAAVLEALREVHPIVDKILQYRELAKLKGTYIDPLPALVHPKTGRLHTRFNQTATATGRLSSSDPNLQNIPVRTPLGQKIRRAFVAEEGWRLVALDYSQIELRVLAHLSGDENLIRVFQEGKDIHTQTASWMFGLSAEAIDPLMRRAAKTINFGVLYGMSAFRLSQELGIPYEEAAAFIQKYFQSYPKVKAWIEKTLEEGRTRGYVETLFGRRRYVPDLNARVKSVREAAERMAFNMPVQGTAADLMKLAMVRLFPQLREVGARMLLQVHDELLLEAPKERAEEVAALAKEVMEGVWPLAVPLEVEVGIGEDWLAAKG

SEQ ID NO: 2703 - DNA, 2529 bp, synthetic construct
  misc_feature 1..2529: note = Variant of DNA polymerase I from Thermus sp. strain 2.9
  source 1..2529: mol_type = other DNA
atgcaccatcatcatcatcatggcggtagcggcgtgttaccggtgttcgagcctaaaggtcgcgtgcttctggttgatggccatcatctcgcgtatcgtaacttctttgccctgaaaggattaaccaccagccgtggcgagccggtacagggtgtctacggctttgcaaagtcgctcctgaaagctctgaaagaagacggtgatgtggtgattgttgtctttgatgcgaaagcgccaagttttcgccacgaagcgtacgaagcttacaaagccgggcgtgctccaacgccggaagactttcctcgccaattggcgcttatgaaggaattagtggatttgcttggcctcgaacgcttggaagttcccggtttcgaggcagacgacgtattagcgactctcgcaaagaaagccgaacgtgagggctatgaagtccagatcttgacagcagatcgcgatcttttccagcttttatctccgcgcatctcggtgttacacccggaagggcatcgtatcaccccggaatggctctgggagaaatatggtttgcgtcccgaacaatgggtggattttcgcgccttagcaggcgatccgagcgacaatattccgggagttaaaggtatcggcgagaagacggcgctcaagctccttaaagaatgggggtcgttggagaacttgcttaagaatttagatcaggtcaaaccagagtcagtgcgtgagaagattcttgcacacctcgaagacctcaaattaagccgcgaattgtcccgtgtacgcaccgatttgccgctcgaagttgatttccgtcgccgccgcgaacctgactgggagggtcttaaagcgtttttagagcgtcttgaatttggttcgctcttgcatgaattcggccttttagaaagcccgttaccagccgaagaagcaccttggccaccgcccgaaggcgcgtttttaggttaccgtttgagtcgcccggaaccgatgtgggccgaattattggctcttgcagcgtctgcccagggacgtgtgtatcgcgcggaagaccctcatggtgcgctccgcggcctcttcgaagtccgtggactccttgccaaagacttagctgttgttgcattgcgcgaaggtcttgatttacctccgactgatgatccaatgcttcttgcgtacctcttggacccgtcaaacacgacgcccgaaggcgtagcccgtcgttacggcggcgagtggaccgaagatgcagcgaaacgcgcgttattggccgaacgtttgcacgccaatttattaggacgtttgcaaggcgaggaacgtctcctctggctttacgaagaagtggagaaaccattgagtcgcgtgctcgcgcatatggaagctaccggtgtcaaattagacgtggcgtatttggaggctctcagccttgaagttgctgccgaaatgcgccgcttggaggaagaagtattccgtttagcaggccattcctttcgccttaattctcgcgatcagttagaacgtgtgttgttcgatgaacttggtctccctcctatcggcaagacagagaagaccggtaaacgtagcacttcagcggcggttttagaagctcttcgcgaagtccatcccattgtggacaagatcttgcagtaccgcgaactcgcgaaattgaaaggcacctatattgaccctcttccggcattagtccacccgaaaacgggacgcctccatacccgcttcaaccaaacagccacggcgaccggtcgtttgtcctcctctgatccaaaccttcagaatattccagtacgtaccccattgggccagaagatccgccgcgcgtttgtagctgaggagggttggcgtttagtggccctcgattatagccaaattgaattacgtgtccttgcccatctttctggcgatgagaacctcatccgcgtgtttcaggaaggcaaagacattcacactcaaacggcaagctggatgtttggattatcagctgaagcgatcgatcctttgatgcgtcgtgcagcgaagaccatcaatttcggtgttctctacggtatgagtgcctttcgtttgtcgcaggaattaggcattccctatgaagaagctgcggcgttcattcagaaatactttcaaagctatcccaaagttaaagcatggatcgagaagactctcgaagaaggccgcacacgtggttacgtagagaccttatttggacgtcgccgctatgttcccgatttaaacgctcgcgtgaaatctgtccgtgaagccgccgaacgcatggcgttcaacatgcctgtacagggcacggcagctgacctcatgaaacttgcaatggtgcgcctttttccacaattgcgtgaagttggtgcccgcatgctcttgcaggtccacgatgaactcttgttagaagcgccatgtgagcgtgcggaagaggtggcagccctcgcgaaagaggttatggaaggcgtgtggcccttagcggtgcctcttgaagtcgaagttggtattggcgaggattggctggctgccaaaggataatga

SEQ ID NO: 2704 - protein, 841 aa, synthetic construct
  REGION 1..841: note = Variant of DNA polymerase I from Thermus sp. strain 2.9
MHHHHHHGGSGVLPVFEPKGRVLLVDGHHLAYRNFFALKGLTTSRGEPVQGVYGFAKSLLKALKEDGDVVIVVFDAKAPSFRHEAYEAYKAGRAPTPEDFPRQLALMKELVDLLGLERLEVPGFEADDVLATLAKKAEREGYEVQILTADRDLFQLLSPRISVLHPEGHRITPEWLWEKYGLRPEQWVDFRALAGDPSDNIPGVKGIGEKTALKLLKEWGSLENLLKNLDQVKPESVREKILAHLEDLKLSRELSRVRTDLPLEVDFRRRREPDWEGLKAFLERLEFGSLLHEFGLLESPLPAEEAPWPPPEGAFLGYRLSRPEPMWAELLALAASAQGRVYRAEDPHGALRGLFEVRGLLAKDLAVVALREGLDLPPTDDPMLLAYLLDPSNTTPEGVARRYGGEWTEDAAKRALLAERLHANLLGRLQGEERLLWLYEEVEKPLSRVLAHMEATGVKLDVAYLEALSLEVAAEMRRLEEEVFRLAGHSFRLNSRDQLERVLFDELGLPPIGKTEKTGKRSTSAAVLEALREVHPIVDKILQYRELAKLKGTYIDPLPALVHPKTGRLHTRFNQTATATGRLSSSDPNLQNIPVRTPLGQKIRRAFVAEEGWRLVALDYSQIELRVLAHLSGDENLIRVFQEGKDIHTQTASWMFGLSAEAIDPLMRRAAKTINFGVLYGMSAFRLSQELGIPYEEAAAFIQKYFQSYPKVKAWIEKTLEEGRTRGYVETLFGRRRYVPDLNARVKSVREAAERMAFNMPVQGTAADLMKLAMVRLFPQLREVGARMLLQVHDELLLEAPCERAEEVAALAKEVMEGVWPLAVPLEVEVGIGEDWLAAKG

SEQ ID NO: 2705 - DNA, 2529 bp, synthetic construct
  misc_feature 1..2529: note = Variant of DNA polymerase I from Thermus sp. strain 2.9
  source 1..2529: mol_type = other DNA
atgcaccatcatcatcatcatggcggtagcggcgtgttaccggtgttcgagcctaaaggtcgcgtgcttctggttgatggccatcatctcgcgtatcgtaacttctttgccctgaaaggattaaccaccagccgtggcgagccggtacagggtgtctacggctttgcaaagtcgctcctgaaagctctgaaagaagacggtgatgtggtgattgttgtctttgatgcgaaagcgccaagttttcgccacgaagcgtacgaagcttacaaagccgggcgtgctccaacgccggaagactttcctcgccaattggcgcttatgaaggaattagtggatttgcttggcctcgaacgcttggaagttcccggtttcgaggcagacgacgtattagcgactctcgcaaagaaagccgaacgtgagggctatgaagtccagatcttgacagcagatcgcgatcttttccagcttttatctccgcgcatctcggtgttacacccggaagggcatcgtatcaccccggaatggctctgggagaaatatggtttgcgtcccgaacaatgggtggattttcgcgccttagcaggcgatccgagcgacaatattccgggagttaaaggtatcggcgagaagacggcgctcaagctccttaaagaatgggggtcgttggagaacttgcttaagaatttagatcaggtcaaaccagagtcagtgcgtgagaagattcttgcacacctcgaagacctcaaattaagccgcgaattgtcccgtgtacgcaccgatttgccgctcgaagttgatttccgtcgccgccgcgaacctgactgggagggtcttaaagcgtttttagagcgtcttgaatttggttcgctcttgcatgaattcggccttttagaaagcccgttaccagccgaagaagcaccttggccaccgcccgaaggcgcgtttttaggttaccgtttgagtcgcccggaaccgatgtgggccgaattattggctcttgcagcgtctgcccagggacgtgtgtatcgcgcggaagaccctcatggtgcgctccgcggcctcttcgaagtccgtggactccttgccaaagacttagctgttgttgcattgcgcgaaggtcttgatttacctccgactgatgatccaatgcttcttgcgtacctcttggacccgtcaaacacgacgcccgaaggcgtagcccgtcgttacggcggcgagtggaccgaagatgcagcgaaacgcgcgttattggccgaacgtttgcacgccaatttattaggacgtttgcaaggcgaggaacgtctcctctggctttacgaactggtggagaaaccattgagtcgcgtgctcgcgcatatggaagctaccggtgtcaaattagacgtggcgtatttggaggctctcagccttgaagttgctgccgaaatgcgccgcttggaggaagaagtattccgtttagcaggccattcctttcgccttaattctcgcgatcagttagaacgtgtgttgttcgatgaacttggtctccctcctatcggcaagacagagaagaccggtaaacgtagcacttcagcggcggttttagaagctcttcgcgaagtccatcccattgtggacaagatcttgcagtaccgcgaactcgcgaaattgaaaggcacctatattgaccctcttccggcattagtccacccgaaaacgggacgcctccatacccgcttcaaccaaacagccacggcgaccggtcgtttgtcctcctctgatccaaaccttcagaatattccagtacgtaccccattgggccagaagatccgccgcgcgtttgtagctgaggagggttggcgtttagtggccctcgattatagccaaattgaattacgtgtccttgcccatctttctggcgatgagaacctcatccgcgtgtttcaggaaggcaaagacattcacactcaaacggcaagctggatgtttggattatcagctgaagcgatcgatcctttgatgcgtcgtgcagcgaagaccatcaatttcggtgttctctacggtatgagtgcctttcgtttgtcgcaggaattaggcattccctatgaagaagctgcggcgttcattcagaaatactttcaaagctatcccaaagttaaagcatggatcgagaagactctcgaagaaggccgcacacgtggttacgtagagaccttatttggacgtcgccgctatgttcccgatttaaacgctcgcgtgaaatctgtccgtgaagccgccgaacgcatggcgttcaacatgcctgtacagggcacggcagctgacctcatgaaacttgcaatggtgcgcctttttccacaattgcgtgaagttggtgcccgcatgctcttgcaggtccacgatgaactcttgttagaagcgccaaaagagcgtgcggaagaggtggcagccctcgcgaaagaggttatggaaggcgtgtggcccttagcggtgcctcttgaagtcgaagttggtattggcgaggattggctggctgccaaaggataatga

SEQ ID NO: 2706 - protein, 841 aa, synthetic construct
  REGION 1..841: note = Variant of DNA polymerase I from Thermus sp. strain 2.9
MHHHHHHGGSGVLPVFEPKGRVLLVDGHHLAYRNFFALKGLTTSRGEPVQGVYGFAKSLLKALKEDGDVVIVVFDAKAPSFRHEAYEAYKAGRAPTPEDFPRQLALMKELVDLLGLERLEVPGFEADDVLATLAKKAEREGYEVQILTADRDLFQLLSPRISVLHPEGHRITPEWLWEKYGLRPEQWVDFRALAGDPSDNIPGVKGIGEKTALKLLKEWGSLENLLKNLDQVKPESVREKILAHLEDLKLSRELSRVRTDLPLEVDFRRRREPDWEGLKAFLERLEFGSLLHEFGLLESPLPAEEAPWPPPEGAFLGYRLSRPEPMWAELLALAASAQGRVYRAEDPHGALRGLFEVRGLLAKDLAVVALREGLDLPPTDDPMLLAYLLDPSNTTPEGVARRYGGEWTEDAAKRALLAERLHANLLGRLQGEERLLWLYELVEKPLSRVLAHMEATGVKLDVAYLEALSLEVAAEMRRLEEEVFRLAGHSFRLNSRDQLERVLFDELGLPPIGKTEKTGKRSTSAAVLEALREVHPIVDKILQYRELAKLKGTYIDPLPALVHPKTGRLHTRFNQTATATGRLSSSDPNLQNIPVRTPLGQKIRRAFVAEEGWRLVALDYSQIELRVLAHLSGDENLIRVFQEGKDIHTQTASWMFGLSAEAIDPLMRRAAKTINFGVLYGMSAFRLSQELGIPYEEAAAFIQKYFQSYPKVKAWIEKTLEEGRTRGYVETLFGRRRYVPDLNARVKSVREAAERMAFNMPVQGTAADLMKLAMVRLFPQLREVGARMLLQVHDELLLEAPKERAEEVAALAKEVMEGVWPLAVPLEVEVGIGEDWLAAKG

SEQ ID NO: 2707 - DNA, 2529 bp, synthetic construct
  misc_feature 1..2529: note = Variant of DNA polymerase I from Thermus sp. strain 2.9
  source 1..2529: mol_type = other DNA
atgcaccatcatcatcatcatggcggtagcggcgtgttaccggtgttcgagcctaaaggtcgcgtgcttctggttgatggccatcatctcgcgtatcgtaacttctttgccctgaaaggattaaccaccagccgtggcgagccggtacagggtgtctacggctttgcaaagtcgctcctgaaagctctgaaagaagacggtgatgtggtgattgttgtctttgatgcgaaagcgccaagttttcgccacgaagcgtacgaagcttacaaagccgggcgtgctccaacgccggaagactttcctcgccaattggcgcttatgaaggaattagtggatttgcttggcctcgaacgcttggaagttcccggtttcgaggcagacgacgtattagcgactctcgcaaagaaagccgaacgtgagggctatgaagtccagatcttgacagcagatcgcgatcttttccagcttttatctccgcgcatctcggtgttacacccggaagggcatcgtatcaccccggaatggctctgggagaaatatggtttgcgtcccgaacaatgggtggattttcgcgccttagcaggcgatccgagcgacaatattccgggagttaaaggtatcggcgagaagacggcgctcaagctccttaaagaatgggggtcgttggagaacttgcttaagaatttagatcaggtcaaaccagagtcagtgcgtgagaagattcttgcacacctcgaagacctcaaattaagccgcgaattgtcccgtgtacgcaccgatttgccgctcgaagttgatttccgtcgccgccgcgaacctgactgggagggtcttaaagcgtttttagagcgtcttgaatttggttcgctcttgcatgaattcggccttttagaaagcccgttaccagccgaagaagcaccttggccaccgcccgaaggcgcgtttttaggttaccgtttgagtcgcccggaaccgatgtgggccgaattattggctcttgcagcgtctgcccagggacgtgtgtatcgcgcggaagaccctcatggtgcgctccgcggcctcttcgaagtccgtggactccttgccaaagacttagctgttgttgcattgcgcgaaggtcttgatttacctccgactgatgatccaatgcttcttgcgtacctcttggacccgtcaaacacgacgcccgaaggcgtagcccgtcgttacggcggcgagtggaccgaagatgcagcgaaacgcgcgttattggccgaacgtttgcacgccaatttattaggacgtttgcaaggcgaggaacgtctcctctggctttacgaagaagtggagaaaccattgagtcgcgtgctcgcgcatatggaagctaccggtgtcaaattagacgtggcgtatttggaggctctcagccttgaagttgctgccgaaatgcgccgcttggaggaagaagtattccgtttagcaggccattcctttcgccttaattctcgcgatcagttagaacgtgtgttgttcgatgaacttggtctccctcctatcggcaagacagagaagaccggtaaacgtagcacttcagcggcggttttagaagctcttcgcgaagtccatcccattgtggacaagatcttgcagtaccgcgaactcgcgaaattgaaaggcacctatattgaccctcttccggcattagtccacccgaaaacgggacgcctccatacccgcttcaaccaaacagccacggcgaccggtcgtttgtcctcctctgatccaaaccttcagaatattccagtacgtaccccattgggccagaagatccgcaaggcgtttgtagctgaggagggttggcgtttagtggccctcgattatagccaaattgaattacgtgtccttgcccatctttctggcgatgagaacctcatccgcgtgtttcaggaaggcaaagacattcacactcaaacggcaagctggatgtttggattatcagctgaagcgatcgatcctttgatgcgtcgtgcagcgaagaccatcaatttcggtgttctctacggtatgagtgcctttcgtttgtcgcaggaattaggcattccctatgaagaagctgcggcgttcattcagaaatactttcaaagctatcccaaagttaaagcatggatcgagaagactctcgaagaaggccgcacacgtggttacgtagagaccttatttggacgtcgccgctatgttcccgatttaaacgctcgcgtgaaatctgtccgtgaagccgccgaacgcatggcgttcaacatgcctgtacagggcacggcagctgacctcatgaaacttgcaatggtgcgcctttttccacaattgcgtgaagttggtgcccgcatgctcttgcaggtccacgatgaactcttgttagaagcgccaaaagagcgtgcggaagaggtggcagccctcgcgaaagaggttatggaaggcgtgtggcccttagcggtgcctcttgaagtcgaagttggtattggcgaggattggctggctgccaaaggataatga

SEQ ID NO: 2708 - protein, 841 aa, synthetic construct
  REGION 1..841: note = Variant of DNA polymerase I from Thermus sp. strain 2.9
MHHHHHHGGSGVLPVFEPKGRVLLVDGHHLAYRNFFALKGLTTSRGEPVQGVYGFAKSLLKALKEDGDVVIVVFDAKAPSFRHEAYEAYKAGRAPTPEDFPRQLALMKELVDLLGLERLEVPGFEADDVLATLAKKAEREGYEVQILTADRDLFQLLSPRISVLHPEGHRITPEWLWEKYGLRPEQWVDFRALAGDPSDNIPGVKGIGEKTALKLLKEWGSLENLLKNLDQVKPESVREKILAHLEDLKLSRELSRVRTDLPLEVDFRRRREPDWEGLKAFLERLEFGSLLHEFGLLESPLPAEEAPWPPPEGAFLGYRLSRPEPMWAELLALAASAQGRVYRAEDPHGALRGLFEVRGLLAKDLAVVALREGLDLPPTDDPMLLAYLLDPSNTTPEGVARRYGGEWTEDAAKRALLAERLHANLLGRLQGEERLLWLYEEVEKPLSRVLAHMEATGVKLDVAYLEALSLEVAAEMRRLEEEVFRLAGHSFRLNSRDQLERVLFDELGLPPIGKTEKTGKRSTSAAVLEALREVHPIVDKILQYRELAKLKGTYIDPLPALVHPKTGRLHTRFNQTATATGRLSSSDPNLQNIPVRTPLGQKIRKAFVAEEGWRLVALDYSQIELRVLAHLSGDENLIRVFQEGKDIHTQTASWMFGLSAEAIDPLMRRAAKTINFGVLYGMSAFRLSQELGIPYEEAAAFIQKYFQSYPKVKAWIEKTLEEGRTRGYVETLFGRRRYVPDLNARVKSVREAAERMAFNMPVQGTAADLMKLAMVRLFPQLREVGARMLLQVHDELLLEAPKERAEEVAALAKEVMEGVWPLAVPLEVEVGIGEDWLAAKG

SEQ ID NO: 2709 - DNA, 2529 bp, synthetic construct
  misc_feature 1..2529: note = Variant of DNA polymerase I from Thermus sp. strain 2.9
  source 1..2529: mol_type = other DNA
atgcaccatcatcatcatcatggcggtagcggcgtgttaccggtgttcgagcctaaaggtcgcgtgcttctggttgatggccatcatctcgcgtatcgtaacttctttgccctgaaaggattaaccaccagccgtggcgagccggtacagggtgtctacggctttgcaaagtcgctcctgaaagctctgaaagaagacggtgatgtggtgattgttgtctttgatgcgaaagcgccaagttttcgccacgaagcgtacgaagcttacaaagccgggcgtgctccaacgccggaagactttcctcgccaattggcgcttatgaaggaattagtggatttgcttggcctcgaacgcttggaagttcccggtttcgaggcagacgacgtattagcgactctcgcaaagaaagccgaacgtgagggctatgaagtccagatcttgacagcagatcgcgatcttttccagcttttatctccgcgcatctcggtgttacacccggaagggcatcgtatcaccccggaatggctctgggagaaatatggtttgcgtcccgaacaatgggtggattttcgcgccttagcaggcgatccgagcgacaatattccgggagttaaaggtatcggcgagaagacggcgctcaagctccttaaagaatgggggtcgttggagaacttgcttaagaatttagatcaggtcaaaccagagtcagtgcgtgagaagattcttgcacacctcgaagacctcaaattaagccgcgaattgtcccgtgtacgcaccgatttgccgctcgaagttgatttccgtcgccgccgcgaacctgactgggagggtcttaaagcgtttttagagcgtcttgaatttggttcgctcttgcatgaattcggccttttagaaagcccgttaccagccgaagaagcaccttggccaccgcccgaaggcgcgtttttaggttaccgtttgagtcgcccggaaccgatgtgggccgaattattggctcttgcagcgtctgcccagggacgtgtgtatcgcgcggaagaccctcatggtgcgctccgcggcctcttggaagtccgtggactccttgccaaagacttagctgttgttgcattgcgcgaaggtcttgatttacctccgactgatgatccaatgcttcttgcgtacctcttggacccgtcaaacacgacgcccgaaggcgtagcccgtcgttacggcggcgagtggaccgaagatgcagcgaaacgcgcgttattggccgaacgtttgcacgccaatttattaggacgtttgcgaggcgaggaacgtctcctctggctttacgaagaagtggagaaaccattgagtcgcgtgctcgcgcatatggaagctaccggtgtcaaattagacgtggcgtatttggaggctctcagccttgaagttgctgccgaaatgcgccgcttggaggaagaagtattccgtttagcaggccattcctttcgccttaattctcgcgatcagttagaacgtgtgttgttcgatgaacttggtctccctcctatcggcaagacagagaagaccggtaaacgtagcacttcagcggcggttttagaagctcttcgcgaagtccatcccattgtggacaagatcttgcagtaccgcgaactcgcgaaattgaaaggcacctatattgaccctcttccggcattagtccacccgaaaacgggacgcctccatacccgcttcaaccaaacagccacggcgaccggtcgtttgtcctcctctgatccaaaccttcagaatattccagtacgtaccccattgggccagaagatccgccgcgcgtttgtagctgaggagggttggcgtttagtggccctcgattatagccaaattgaattacgtgtccttgcccatctttctggcgatgagaacctcatccgcgtgtttcaggaaggcaaagacattcacactcaaacggcaagctggatgtttggattatcagctgaagcgatcgatcctttgatgcgtcgtgcagcgaagaccatcaatttcggtgttctctacggtatgagtgcctttcgtttgtcgcaggaattaggcattccctatgaagaagctgcggcgttcattcagaaatactttcaaagctatcccaaagttaaagcatggatcgagaagactctcgaagaaggccgcacacgtggttacgtagagaccttatttggacgtcgccgctatgttcccgatttaaacgctcgcgtgaaatctgtccgtgaagccgccgaacgcatggcgttcaacatgcctgtacagggcacggcagctgacctcatgaaacttgcaatggtgcgcctttttccacaattgcgtgaagttggtgcccgcatgctcttgcaggtccacgatgaactcttgttagaagcgccaaaagagcgtgcggaagaggtggcagccctcgcgaaagaggttatggaaggcgtgtggcccttagcggtgcctcttgaagtcgaagttggtattggcgaggattggctggctgccaaaggataatga

SEQ ID NO: 2710 - protein, 841 aa, synthetic construct
  REGION 1..841: note = Variant of DNA polymerase I from Thermus sp. strain 2.9
MHHHHHHGGSGVLPVFEPKGRVLLVDGHHLAYRNFFALKGLTTSRGEPVQGVYGFAKSLLKALKEDGDVVIVVFDAKAPSFRHEAYEAYKAGRAPTPEDFPRQLALMKELVDLLGLERLEVPGFEADDVLATLAKKAEREGYEVQILTADRDLFQLLSPRISVLHPEGHRITPEWLWEKYGLRPEQWVDFRALAGDPSDNIPGVKGIGEKTALKLLKEWGSLENLLKNLDQVKPESVREKILAHLEDLKLSRELSRVRTDLPLEVDFRRRREPDWEGLKAFLERLEFGSLLHEFGLLESPLPAEEAPWPPPEGAFLGYRLSRPEPMWAELLALAASAQGRVYRAEDPHGALRGLLEVRGLLAKDLAVVALREGLDLPPTDDPMLLAYLLDPSNTTPEGVARRYGGEWTEDAAKRALLAERLHANLLGRLRGEERLLWLYEEVEKPLSRVLAHMEATGVKLDVAYLEALSLEVAAEMRRLEEEVFRLAGHSFRLNSRDQLERVLFDELGLPPIGKTEKTGKRSTSAAVLEALREVHPIVDKILQYRELAKLKGTYIDPLPALVHPKTGRLHTRFNQTATATGRLSSSDPNLQNIPVRTPLGQKIRRAFVAEEGWRLVALDYSQIELRVLAHLSGDENLIRVFQEGKDIHTQTASWMFGLSAEAIDPLMRRAAKTINFGVLYGMSAFRLSQELGIPYEEAAAFIQKYFQSYPKVKAWIEKTLEEGRTRGYVETLFGRRRYVPDLNARVKSVREAAERMAFNMPVQGTAADLMKLAMVRLFPQLREVGARMLLQVHDELLLEAPKERAEEVAALAKEVMEGVWPLAVPLEVEVGIGEDWLAAKG

SEQ ID NO: 2711 - DNA, 2529 bp, synthetic construct
  misc_feature 1..2529: note = Variant of DNA polymerase I from Thermus sp. strain 2.9
  source 1..2529: mol_type = other DNA
atgcaccatcatcatcatcatggcggtagcggcgtgttaccggtgttcgagcctaaaggtcgcgtgcttctggttgatggccatcatctcgcgtatcgtaacttctttgccctgaaaggattaaccaccagccgtggcgagccggtacagggtgtctacggctttgcaaagtcgctcctgaaagctctgaaagaagacggtgatgtggtgattgttgtctttgatgcgaaagcgccaagttttcgccacgaagcgtacgaagcttacaaagccgggcgtgctccaacgccggaagactttcctcgccaattggcgcttatgaaggaattagtggatttgcttggcctcgaactgttggaagttcccggtttcgaggcagacgacgtattagcgactctcgcaaagaaagccgaacgtgagggctatgaagtccagatcttgacagcagatcgcgatcttttccagcttttatctccgcgcatctcggtgttacacccggaagggcatcgtatcaccccggaatggctctgggagaaatatggtttgcgtcccgaacaatgggtggattttcgcgccttagcaggcgatccgagcgacaatattccgggagttaaaggtatcggcgagaagacggcgctcaagctccttaaagaatgggggtcgttggagaacttgcttaagaatttagatcaggtcaaaccagagtcagtgcgtgagaagattcttgcacacctcgaagacctcaaattaagccgcgaattgtcccgtgtacgcaccgatttgccgctcgaagttgatttccgtcgccgccgcgaacctgactgggagggtcttaaagcgtttttagagcgtcttgaatttggttcgctcttgcatgaattcggccttttagaaagcccgttaccagccgaagaagcaccttggccaccgcccgaaggcgcgtttttaggttaccgtttgagtcgcccggaaccgatgtgggccgaattattggctcttgcagcgtctgcccagggacgtgtgtatcgcgcggaagaccctcatggtgcgctccgcggcctcttcgaagtccgtggactccttgccaaagacttagctgttgttgcattgcgcgaaggtcttgatttacctccgactgatgatccaatgcttcttgcgtacctcttggacccgtcaaacacgacgcccgaaggcgtagcccgtcgttacggcggcgagtggaccgaagatgcagcgaaacgcgcgttattggccgaacgtttgcacgccaatttattaggacgtttgcaaggcgaggaacgtctcctctggctttacgaagaagtggagaaaccattgagtcgcgtgctcgcgcatatggaagctaccggtgtcaaattagacgtggcgtatttggaggctctcagccttgaagttgctgccgaaatgcgccgcttggaggaagaagtattccgtttagcaggccattcctttcgccttaattctcgcgatcagttagaacgtgtgttgttcgatgaacttggtctccctcctatcggcaagacagagaagaccggtaaacgtagcacttcagcggcggttttagaagctcttcgcgaagtccatcccattgtggacaagatcttgcagtaccgcgaactcgcgaaattgaaaggcacctatattgaccctcttccggcattagtccacccgaaaacgggacgcctccatacccgcttcaaccaaacagccacggcgaccggtcgtttgtcctcctctgatccaaaccttcagaatattccagtacgtaccccattgggccagaagatccgccgcgcgtttgtagctgaggagggttggcgtttagtggccctcgattatagccaaattgaattacgtgtccttgcccatctttctggcgatgagaacctcatccgcgtgtttcaggaaggcaaagacattcacactcaaacggcaagctggatgtttggattatcagctgaagcgatcgatcctttgatgcgtcgtgcagcgaagaccatcaatttcggtgttctctacggtatgagtgcctttcgtttgtcgcaggaattaggcattccctatgaagaagctgcggcgttcattcagaaatactttcaaagctatcccaaagttaaagcatggatcgagaagactctcgaagaaggccgcacacgtggttacgtagagaccttatttggacgtcgccgctatgttcccgatttaaacgctcgcgtgaaatctgtccgtgaagccgccgaacgcatggcgttcaacatgcctgtacagggcacggcagctgacctcatgaaacttgcaatggtgcgcctttttccacaattgcgtgaagttggtgcccgcatgctcttgcaggtccacgatgaactcttgttagaagcgccaaaagagcgtgcggaagaggtggcagccctcgcgaaagaggttatggaaggcgtgtggcccttagcggtgcctcttgaagtcgaagttggtattggcgaggattggctggctgccaaaggataatga

SEQ ID NO: 2712 - protein, 841 aa, synthetic construct
  REGION 1..841: note = Variant of DNA polymerase I from Thermus sp. strain 2.9
MHHHHHHGGSGVLPVFEPKGRVLLVDGHHLAYRNFFALKGLTTSRGEPVQGVYGFAKSLLKALKEDGDVVIVVFDAKAPSFRHEAYEAYKAGRAPTPEDFPRQLALMKELVDLLGLELLEVPGFEADDVLATLAKKAEREGYEVQILTADRDLFQLLSPRISVLHPEGHRITPEWLWEKYGLRPEQWVDFRALAGDPSDNIPGVKGIGEKTALKLLKEWGSLENLLKNLDQVKPESVREKILAHLEDLKLSRELSRVRTDLPLEVDFRRRREPDWEGLKAFLERLEFGSLLHEFGLLESPLPAEEAPWPPPEGAFLGYRLSRPEPMWAELLALAASAQGRVYRAEDPHGALRGLFEVRGLLAKDLAVVALREGLDLPPTDDPMLLAYLLDPSNTTPEGVARRYGGEWTEDAAKRALLAERLHANLLGRLQGEERLLWLYEEVEKPLSRVLAHMEATGVKLDVAYLEALSLEVAAEMRRLEEEVFRLAGHSFRLNSRDQLERVLFDELGLPPIGKTEKTGKRSTSAAVLEALREVHPIVDKILQYRELAKLKGTYIDPLPALVHPKTGRLHTRFNQTATATGRLSSSDPNLQNIPVRTPLGQKIRRAFVAEEGWRLVALDYSQIELRVLAHLSGDENLIRVFQEGKDIHTQTASWMFGLSAEAIDPLMRRAAKTINFGVLYGMSAFRLSQELGIPYEEAAAFIQKYFQSYPKVKAWIEKTLEEGRTRGYVETLFGRRRYVPDLNARVKSVREAAERMAFNMPVQGTAADLMKLAMVRLFPQLREVGARMLLQVHDELLLEAPKERAEEVAALAKEVMEGVWPLAVPLEVEVGIGEDWLAAKG

SEQ ID NO: 2713 - DNA, 2529 bp, synthetic construct
  misc_feature 1..2529: note = Variant of DNA polymerase I from Thermus sp. strain 2.9
  source 1..2529: mol_type = other DNA
atgcaccatcatcatcatcatggcggtagcggcgtgttaccggtgttcgagcctaaaggtcgcgtgcttctggttgatggccatcatctcgcgtatcgtaacttctttgccctgaaaggattaaccaccagccgtggcgagccggtacagggtgtctacggctttgcaaagtcgctcctgaaagctctgaaagaagacggtgatgtggtgattgttgtctttgatgcgaaagcgccaagttttcgccacgaagcgtacgaagcttacaaagccgggcgtgctccaacgccggaagactttcctcgccaattggcgcttatgaaggaattagtggatttgcttggcctcgaacgcttggaagttcccggtttcgaggcagacgacgtattagcgactctcgcaaagaaagccgaacgtgagggctatgaagtccagatcttgacagcagatcgcgatcttttccagcttttatctccgcgcatctcggtgttacacccggaagggcatcgtatcaccccggaatggctctgggagaaatatggtttgcgtcccgaacaatgggtggattttcgcgccttagcaggcgatccgagcgacaatattccgggagttaaaggtatcggcgagaagacggcgctcaagctccttaaagaatgggggtcgttggagaacttgcttaagaatttagatcaggtcaaaccagagtcagtgcgtgagaagattcttgcacacctcgaagacctcaaattaagccgcgaattgtcccgtgtacgcaccgatttgccgctcgaagttgatttccgtcgccgccgcgaacctgactgggagggtcttaaagcgtttttagagcgtcttgaatttggttcgctcttgcatgaattcggccttttagaaagcccgttaccagccgaagaagcaccttggccaccgcccgaaggcgcgtttttaggttaccgtttgagtcgcccggaaccgatgtgggccgaattattggctcttgcagcgtctgcccagggacgtgtgtatcgcgcggaagaccctcatggtgcgctccgcggcctcttcgaagtccgtggactccttgccaaagacttagctgttgttgcattgcgcgaaggtcttgatttacctccgactgatgatccaatgcttcttgcgtacctcttggacccgtcaaacacgacgcccgaaggcgtagcccgtcgttacggcggcgagtggaccgaagatgcagcgaaacgcgcgttattggccgaacgtttgcacgccaatttattaggacgtttgcaaggcgaggaacgtctcctctggctttacgaagaagtggagaaaccattgagtcgcgtgctcgcgcatatggaagctaccggtgtcaaattagacgtggcgtatttggaggctctcagccttgaagttgctgccgaaatgcgccgcttggaggaagaagtattccgtttagcaggccattcctttcgccttaattctcgcgatcagttagaacgtgtgttgttcgatgaacttggtctccctcctatcggcaagacagagaagaccggtaaacgtagcacttcagcggcggttttagaagctcttcgcgaagtccatcccattgtggacaagatcttgcagtaccgcgaactcgcgaaattgaaaggcacctatattgaccctcttccggcattagtccacccgaaaacgggacgcctccatacccgcttcaaccaaacagccacggcgaccggtcgtttgtcctcctctgatccaaaccttcagaatattccagtacgttctccattgggccagaagatccgccgcgcgtttgtagctgaggagggttggcgtttagtggccctcgattatagccaaattgaattacgtgtccttgcccatctttctggcgatgagaacctcatccgcgtgtttcaggaaggcaaagacattcacactcaaacggcaagctggatgtttggattatcagctgaagcgatcgatcctttgatgcgtcgtgcagcgaagaccatcaatttcggtgttctctacggtatgagtgcctttcgtttgtcgcaggaattaggcattccctatgaagaagctgcggcgttcattcagaaatactttcaaagctatcccaaagttaaagcatggatcgagaagactctcgaagaaggccgcacacgtggttacgtagagaccttatttggacgtcgccgctatgttcccgatttaaacgctcgcgtgaaatctgtccgtgaagccgccgaacgcatggcgttcaacatgcctgtacagggcacggcagctgacctcatgaaacttgcaatggtgcgcctttttccacaattgcgtgaagttggtgcccgcatgctcttgcaggtccacgatgaactcttgttagaagcgccaaaagagcgtgcggaagaggtggcagccctcgcgaaagaggttatggaaggcgtgtggcccttagcggtgcctcttgaagtcgaagttggtattggcgaggattggctggctgccaaaggataatga

SEQ ID NO: 2714 - protein, 841 aa, synthetic construct
  REGION 1..841: note = Variant of DNA polymerase I from Thermus sp. strain 2.9
MHHHHHHGGSGVLPVFEPKGRVLLVDGHHLAYRNFFALKGLTTSRGEPVQGVYGFAKSLLKALKEDGDVVIVVFDAKAPSFRHEAYEAYKAGRAPTPEDFPRQLALMKELVDLLGLERLEVPGFEADDVLATLAKKAEREGYEVQILTADRDLFQLLSPRISVLHPEGHRITPEWLWEKYGLRPEQWVDFRALAGDPSDNIPGVKGIGEKTALKLLKEWGSLENLLKNLDQVKPESVREKILAHLEDLKLSRELSRVRTDLPLEVDFRRRREPDWEGLKAFLERLEFGSLLHEFGLLESPLPAEEAPWPPPEGAFLGYRLSRPEPMWAELLALAASAQGRVYRAEDPHGALRGLFEVRGLLAKDLAVVALREGLDLPPTDDPMLLAYLLDPSNTTPEGVARRYGGEWTEDAAKRALLAERLHANLLGRLQGEERLLWLYEEVEKPLSRVLAHMEATGVKLDVAYLEALSLEVAAEMRRLEEEVFRLAGHSFRLNSRDQLERVLFDELGLPPIGKTEKTGKRSTSAAVLEALREVHPIVDKILQYRELAKLKGTYIDPLPALVHPKTGRLHTRFNQTATATGRLSSSDPNLQNIPVRSPLGQKIRRAFVAEEGWRLVALDYSQIELRVLAHLSGDENLIRVFQEGKDIHTQTASWMFGLSAEAIDPLMRRAAKTINFGVLYGMSAFRLSQELGIPYEEAAAFIQKYFQSYPKVKAWIEKTLEEGRTRGYVETLFGRRRYVPDLNARVKSVREAAERMAFNMPVQGTAADLMKLAMVRLFPQLREVGARMLLQVHDELLLEAPKERAEEVAALAKEVMEGVWPLAVPLEVEVGIGEDWLAAKG

SEQ ID NO: 2715 - DNA, 2529 bp, synthetic construct
  misc_feature 1..2529: note = Variant of DNA polymerase I from Thermus sp. strain 2.9
  source 1..2529: mol_type = other DNA
atgcaccatcatcatcatcatggcggtagcggcgtgttaccggtgttcgagcctaaaggtcgcgtgcttctggttgatggccatcatctcgcgtatcgtaacttctttgccctgaaaggattaaccaccagccgtggcgagccggtacagggtgtctacggctttgcaaagtcgctcctgaaagctctgaaagaagacggtgatgtggtgattgttgtctttgatgcgaaagcgccaagttttcgccacgaagcgtacgaagcttacaaagccgggcgtgctccaacgccggaagactttcctcgccaattggcgcttatgaaggaattagtggatttgcttggcctcgaacgcttggaagttcccggtttcgaggcagacgacgtattagcgactctcgcaaagaaagccgaacgtgagggctatgaagtccagatcttgacagcagatcgcgatcttttccagcttttatctccgcgcatctcggtgttacacccggaagggcatcgtatcaccccggaatggctctgggagaaatatggtttgcgtcccgaacaatgggtggattttcgcgccttagcaggcgatccgagcgacaatattccgggagttaaaggtatcggcgagaagacggcgctcaagctccttaaagaatgggggtcgttggagaacttgcttaagaatttagatcaggtcaaaccagagtcagtgcgtgagaagattcttgcacacctcgaagacctcaaattaagccgcgaattgtcccgtgtacgcaccgatttgccgctcgaagttgatttccgtcgccgccgcgaacctgactgggagggtcttaaagcgtttttagagcgtcttgaatttggttcgctcttgcatgaattcggccttttagaaagcccgttaccagccgaagaagcaccttggccaccgcccgaaggcgcgtttttaggttaccgtttgagtcgcccggaaccgatgtgggccgaattattggctcttgcagcgtctgcccagggacgtgtgtatcgcgcggaagaccctcatggtgcgctccgcggcctcttcgaagtccgtggactccttgccaaagacttagctgttgttgcattgcgcgaaggtcttgatttacctccgactgatgatccaatgcttcttgcgtacctcttggacccgtcaaacacgacgcccgaaggcgtagcccgtcgttacggcggcgagtggaccgaagatgcagcgaaacgcgcgttattggccgaacgtttgcacgccaatttattaggacgtttgcaaggcgaggaacgtctcctctggctttacgaagaagtggagaaaccattgagtcgcgtgctcgcgcatatggaagctaccggtgtcaaattagacgtggcgtatttggaggctctcagccttgaagttgctgccgaaatgcgccgcttggaggaagaagtattccgtttagcaggccattcctttcgccttaattctcgcgatcagttagaacgtgtgttgttcgatgaacttggtctccctcctatcggcaagacagagaagaccggtaaacgtagcacttcagcggcggttttagaagagcttcgcgaagtccatcccattgtggacaagatcttgcagtaccgcgaactcgcgaaattgaaaggcacctatattgaccctcttccggcattagtccacccgaaaacgggacgcctccatacccgcttcaaccaaacagccacggcgaccggtcgtttgtcctcctctgatccaaaccttcagaatattccagtacgtaccccattgggccagaagatccgccgcgcgtttgtagctgaggagggttggcgtttagtggccctcgattatagccaaattgaattacgtgtccttgcccatctttctggcgatgagaacctcatccgcgtgtttcaggaaggcaaagacattcacactcaaacggcaagctggatgtttggattatcagctgaagcgatcgatcctttgatgcgtcgtgcagcgaagaccatcaatttcggtgttctctacggtatgagtgcctttcgtttgtcgcaggaattaggcattccctatgaagaagctgcggcgttcattcagaaatactttcaaagctatcccaaagttaaagcatggatcgagaagactctcgaagaaggccgcacacgtggttacgtagagaccttatttggacgtcgccgctatgttcccgatttaaacgctcgcgtgaaatctgtccgtgaagccgccgaacgcatggcgttcaacatgcctgtacagggcacggcagctgacctcatgaaacttgcaatggtgcgcctttttccacaattgcgtgaagttggtgcccgcatgctcttgcaggtccacgatgaactcttgttagaagcgccaaaagagcgtgcggaagaggtggcagccctcgcgaaagaggttatggaaggcgtgtggcccttagcggtgcctcttgaagtcgaagttggtattggcgaggattggctggctgccaaaggataatga

SEQ ID NO: 2716 - protein, 841 aa, synthetic construct
  REGION 1..841: note = Variant of DNA polymerase I from Thermus sp. strain 2.9
MHHHHHHGGSGVLPVFEPKGRVLLVDGHHLAYRNFFALKGLTTSRGEPVQGVYGFAKSLLKALKEDGDVVIVVFDAKAPSFRHEAYEAYKAGRAPTPEDFPRQLALMKELVDLLGLERLEVPGFEADDVLATLAKKAEREGYEVQILTADRDLFQLLSPRISVLHPEGHRITPEWLWEKYGLRPEQWVDFRALAGDPSDNIPGVKGIGEKTALKLLKEWGSLENLLKNLDQVKPESVREKILAHLEDLKLSRELSRVRTDLPLEVDFRRRREPDWEGLKAFLERLEFGSLLHEFGLLESPLPAEEAPWPPPEGAFLGYRLSRPEPMWAELLALAASAQGRVYRAEDPHGALRGLFEVRGLLAKDLAVVALREGLDLPPTDDPMLLAYLLDPSNTTPEGVARRYGGEWTEDAAKRALLAERLHANLLGRLQGEERLLWLYEEVEKPLSRVLAHMEATGVKLDVAYLEALSLEVAAEMRRLEEEVFRLAGHSFRLNSRDQLERVLFDELGLPPIGKTEKTGKRSTSAAVLEELREVHPIVDKILQYRELAKLKGTYIDPLPALVHPKTGRLHTRFNQTATATGRLSSSDPNLQNIPVRTPLGQKIRRAFVAEEGWRLVALDYSQIELRVLAHLSGDENLIRVFQEGKDIHTQTASWMFGLSAEAIDPLMRRAAKTINFGVLYGMSAFRLSQELGIPYEEAAAFIQKYFQSYPKVKAWIEKTLEEGRTRGYVETLFGRRRYVPDLNARVKSVREAAERMAFNMPVQGTAADLMKLAMVRLFPQLREVGARMLLQVHDELLLEAPKERAEEVAALAKEVMEGVWPLAVPLEVEVGIGEDWLAAKG

SEQ ID NO: 2717 - DNA, 2529 bp, synthetic construct
  misc_feature 1..2529: note = Variant of DNA polymerase I from Thermus sp. strain 2.9
  source 1..2529: mol_type = other DNA
atgcaccatcatcatcatcatggcggtagcggcgtgttaccggtgttcgagcctaaaggtcgcgtgcttctggttgatggccatcatctcgcgtatcgtaacttctttgccctgaaaggattaaccaccagccgtggcgagccggtacagggtgtctacggctttgcaaagtcgctcctgaaagctctgaaagaagacggtgatgtggtgattgttgtctttgatgcgaaagcgccaagttttcgccacgaagcgtacgaagcttacaaagccgggcgtgctccaacgccggaagactttcctcgccaattggcgcttatgaaggaattagtggatttgcttggcctcgaacgcttggaagttcccggtttcgaggcagacgacgtattagcgactctcgcaaagaaagccgaacgtgagggctatgaagtccagatcttgacagcagatcgcgatcttttccagcttttatctccgcgcatctcggtgttacacccggaagggcatcgtatcaccccggaatggctctgggagaaatatggtttgcgtcccgaacaatgggtggattttcgcgccttagcaggcgatccgagcgacaatattccgggagttaaaggtatcggcgagaagacggcgctcaagctccttaaagaatgggggtcgttggagaacttgcttaagaatttagatcaggtcaaaccagagtcagtgcgtgagaagattcttgcacacctcgaagacctcaaattaagccgcgaattgtcccgtgtacgcaccgatttgccgctcgaagttgatttccgtcgccgccgcgaacctgactgggagggtcttaaagagtttttagagcgtcttgaatttggttcgctcttgcatgaattcggccttttagaaagcccgttaccagccgaagaagcaccttggccaccgcccgaaggcgcgtttttaggttaccgtttgagtcgcccggaaccgatgtgggccgaattattggctcttgcagcgtctgcccagggacgtgtgtatcgcgcggaagaccctcatggtgcgctccgcggcctcttcgaagtccgtggactccttgccaaagacttagctgttgttgcattgcgcgaaggtcttgatttacctccgactgatgatccaatgcttcttgcgtacctcttggacccgtcaaacacgacgcccgaaggcgtagcccgtcgttacggcggcgagtggaccgaagatgcagcgaaacgcgcgttattggccgaacgtttgcacgccaatttattaggacgtttgcaaggcgaggaacgtctcctctggctttacgaagaagtggagaaaccattgagtcgcgtgctcgcgcatatggaagctaccggtgtcaaattagacgtggcgtatttggaggctctcagccttgaagttgctgccgaaatgcgccgcttggaggaagaagtattccgtttagcaggccattcctttcgccttaattctcgcgatcagttagaacgtgtgttgttcgatgaacttggtctccctcctatcggcaagacagagaagaccggtaaacgtagcacttcagcggcggttttagaagctcttcgcgaagtccatcccattgtggacaagatcttgcagtaccgcgaactcgcgaaattgaaaggcacctatattgaccctcttccggcattagtccacccgaaaacgggacgcctccatacccgcttcaaccaaacagccacggcgaccggtcgtttgtcctcctctgatccaaaccttcagaatattccagtacgtaccccattgggccagaagatccgccgcgcgtttgtagctgaggagggttggcgtttagtggccctcgattatagccaaattgaattacgtgtccttgcccatctttctggcgatgagaacctcatccgcgtgtttcaggaaggcaaagacattcacactcaaacggcaagctggatgtttggattatcagctgaagcgatcgatcctttgatgcgtcgtgcagcgaagaccatcaatttcggtgttctctacggtatgagtgcctttcgtttgtcgcaggaattaggcattccctatgaagaagctgcggcgttcattcagaaatactttcaaagctatcccaaagttaaagcatggatcgagaagactctcgaagaaggccgcacacgtggttacgtagagaccttatttggacgtcgccgctatgttcccgatttaaacgctcgcgtgaaatctgtccgtgaagccgccgaacgcatggcgttcaacatgcctgtacagggcacggcagctgacctcatgaaacttgcaatggtgcgcctttttccacaattgcgtgaagttggtgcccgcatgctcttgcaggtccacgatgaactcttgttagaagcgccaaaagagcgtgcggaagaggtggcagccctcgcgaaagaggttatggaaggcgtgtggcccttagcggtgcctcttgaagtcgaagttggtattggcgaggattggctggctgccaaaggataatga

SEQ ID NO: 2718 - protein, 841 aa, synthetic construct
  REGION 1..841: note = Variant of DNA polymerase I from Thermus sp. strain 2.9
MHHHHHHGGSGVLPVFEPKGRVLLVDGHHLAYRNFFALKGLTTSRGEPVQGVYGFAKSLLKALKEDGDVVIVVFDAKAPSFRHEAYEAYKAGRAPTPEDFPRQLALMKELVDLLGLERLEVPGFEADDVLATLAKKAEREGYEVQILTADRDLFQLLSPRISVLHPEGHRITPEWLWEKYGLRPEQWVDFRALAGDPSDNIPGVKGIGEKTALKLLKEWGSLENLLKNLDQVKPESVREKILAHLEDLKLSRELSRVRTDLPLEVDFRRRREPDWEGLKEFLERLEFGSLLHEFGLLESPLPAEEAPWPPPEGAFLGYRLSRPEPMWAELLALAASAQGRVYRAEDPHGALRGLFEVRGLLAKDLAVVALREGLDLPPTDDPMLLAYLLDPSNTTPEGVARRYGGEWTEDAAKRALLAERLHANLLGRLQGEERLLWLYEEVEKPLSRVLAHMEATGVKLDVAYLEALSLEVAAEMRRLEEEVFRLAGHSFRLNSRDQLERVLFDELGLPPIGKTEKTGKRSTSAAVLEALREVHPIVDKILQYRELAKLKGTYIDPLPALVHPKTGRLHTRFNQTATATGRLSSSDPNLQNIPVRTPLGQKIRRAFVAEEGWRLVALDYSQIELRVLAHLSGDENLIRVFQEGKDIHTQTASWMFGLSAEAIDPLMRRAAKTINFGVLYGMSAFRLSQELGIPYEEAAAFIQKYFQSYPKVKAWIEKTLEEGRTRGYVETLFGRRRYVPDLNARVKSVREAAERMAFNMPVQGTAADLMKLAMVRLFPQLREVGARMLLQVHDELLLEAPKERAEEVAALAKEVMEGVWPLAVPLEVEVGIGEDWLAAKG

SEQ ID NO: 2719 - DNA, 2529 bp, synthetic construct
  misc_feature 1..2529: note = Variant of DNA polymerase I from Thermus sp. strain 2.9
  source 1..2529: mol_type = other DNA
atgcaccatcatcatcatcatggcggtagcggcgtgttaccggtgttcgagcctaaaggtcgcgtgcttctggttgatggccatcatctcgcgtatcgtaacttctttgccctgaaaggattaaccaccagccgtggcgagccggtacagggtgtctacggctttgcaaagtcgctcctgaaagctctgaaagaagacggtgatgtggtgattgttgtctttgatgcgaaagcgccaagttttcgccacgaagcgtacgaagcttacaaagccgggcgtgctccaacgccggaagactttcctcgccaattggcgcttatgaaggaattagtggatttgcttggcctcgaacgcttggaagttcccggtttcgaggcagacgacgtattagcgactctcgcaaagaaagccgaacgtgagggctatgaagtccagatcttgacagcagatcgcgatcttttccagcttttatctccgcgcatctcggtgttacacccggaagggcatcgtatcaccccggaatggctctgggagaaatatggtttgcgtcccgaacaatgggtggattttcgcgccttagcaggcgatccgagcgacaatattccgggagttaaaggtatcggcgagaagacggcgctcaagctccttaaagaatgggggtcgttggagaacttgcttaagaatttagatcaggtcaaaccagagtcagtgcgtgagaagattcttgcacacctcgaagacctcaaattaagccgcgaattgtcccgtgtacgcaccgatttgccgctcgaagttgatttccgtcgccgccgcgaacctgactgggagggtcttaaagcgtttttagagcgtcttgaatttggttcgctcttgcatgaattcggccttttagaaagcccgttaccagccgaagaagcaccttggccaccgcccgaaggcgcgtttttaggttaccgtttgagtcgcccggaaccgatgtgggccgaattattggctcttgcagcgtctgcccagggacgtgtgtatcgcgcggaagaccctcatggtgcgctccgcggcctcttcgaagtccgtggactccttgccaaagacttagctgttgttgcattgagtgaaggtcttgatttacctccgactgatgatccaatgcttcttgcgtacctcttggacccgtcaaacacgacgcccgaaggcgtagcccgtcgttacggcggcgagtggaccgaagatgcagcgaaacgcgcgttattggccgaacgtttgcacgccaatttattaggacgtttgcaaggcgaggaacgtctcctctggctttacgaagaagtggagaaaccattgagtcgcgtgctcgcgcatatggaagctaccggtgtcaaattagacgtggcgtatttggaggctctcagccttgaagttgctgccgaaatgcgccgcttggaggaagaagtattccgtttagcaggccattcctttcgccttaattctcgcgatcagttagaacgtgtgttgttcgatgaacttggtctccctcctatcggcaagacagagaagaccggtaaacgtagcacttcagcggcggttttagaagctcttcgcgaagtccatcccattgtggacaagatcttgcagtaccgcgaactcgcgaaattgaaaggcacctatattgaccctcttccggcattagtccacccgaaaacgggacgcctccatacccgcttcaaccaaacagccacggcgaccggtcgtttgtcctcctctgatccaaaccttcagaatattccagtacgtaccccattgggccagaagatccgccgcgcgtttgtagctgaggagggttggcgtttagtggccctcgattatagccaaattgaattacgtgtccttgcccatctttctggcgatgagaacctcatccgcgtgtttcaggaaggcaaagacattcacactcaaacggcaagctggatgtttggattatcagctgaagcgatcgatcctttgatgcgtcgtgcagcgaagaccatcaatttcggtgttctctacggtatgagtgcctttcgtttgtcgcaggaattaggcattccctatgaagaagctgcggcgttcattcagaaatactttcaaagctatcccaaagttaaagcatggatcgagaagactctcgaagaaggccgcacacgtggttacgtagagaccttatttggacgtcgccgctatgttcccgatttaaacgctcgcgtgaaatctgtccgtgaagccgccgaacgcatggcgttcaacatgcctgtacagggcacggcagctgacctcatgaaacttgcaatggtgcgcctttttccacaattgcgtgaagttggtgcccgcatgctcttgcaggtccacgatgaactcttgttagaagcgccaaaagagcgtgcggaagaggtggcagccctcgcgaaagaggttatggaaggcgtgtggcccttagcggtgcctcttgaagtcgaagttggtattggcgaggattggctggctgccaaaggataatga

SEQ ID NO: 2720 - protein, 841 aa, synthetic construct
  REGION 1..841: note = Variant of DNA polymerase I from Thermus sp. strain 2.9
MHHHHHHGGSGVLPVFEPKGRVLLVDGHHLAYRNFFALKGLTTSRGEPVQGVYGFAKSLLKALKEDGDVVIVVFDAKAPSFRHEAYEAYKAGRAPTPEDFPRQLALMKELVDLLGLERLEVPGFEADDVLATLAKKAEREGYEVQILTADRDLFQLLSPRISVLHPEGHRITPEWLWEKYGLRPEQWVDFRALAGDPSDNIPGVKGIGEKTALKLLKEWGSLENLLKNLDQVKPESVREKILAHLEDLKLSRELSRVRTDLPLEVDFRRRREPDWEGLKAFLERLEFGSLLHEFGLLESPLPAEEAPWPPPEGAFLGYRLSRPEPMWAELLALAASAQGRVYRAEDPHGALRGLFEVRGLLAKDLAVVALSEGLDLPPTDDPMLLAYLLDPSNTTPEGVARRYGGEWTEDAAKRALLAERLHANLLGRLQGEERLLWLYEEVEKPLSRVLAHMEATGVKLDVAYLEALSLEVAAEMRRLEEEVFRLAGHSFRLNSRDQLERVLFDELGLPPIGKTEKTGKRSTSAAVLEALREVHPIVDKILQYRELAKLKGTYIDPLPALVHPKTGRLHTRFNQTATATGRLSSSDPNLQNIPVRTPLGQKIRRAFVAEEGWRLVALDYSQIELRVLAHLSGDENLIRVFQEGKDIHTQTASWMFGLSAEAIDPLMRRAAKTINFGVLYGMSAFRLSQELGIPYEEAAAFIQKYFQSYPKVKAWIEKTLEEGRTRGYVETLFGRRRYVPDLNARVKSVREAAERMAFNMPVQGTAADLMKLAMVRLFPQLREVGARMLLQVHDELLLEAPKERAEEVAALAKEVMEGVWPLAVPLEVEVGIGEDWLAAKG

SEQ ID NO: 2721 - DNA, 2529 bp, synthetic construct
  misc_feature 1..2529: note = Variant of DNA polymerase I from Thermus sp. strain 2.9
  source 1..2529: mol_type = other DNA
atgcaccatcatcatcatcatggcggtagcggcgtgttaccggtgttcgagcctaaaggtcgcgtgcttctggttgatggccatcatctcgcgtatcgtaacttctttgccctgaaaggattaaccaccagccgtggcgagccggtacagggtgtctacggctttgcaaagtcgctcctgaaagctctgaaagaagacggtgatgtggtgattgttgtctttgatgcgaaagcgccaagttttcgccacgaagcgtacgaagcttacaaagccgggcgtgctccaacgccggaagactttcctcgccaattggcgcttatgaaggaattagtggatttgcttggcctcgaacgcttggaagttcccggtttcgaggcagacgacgtattagcgactctcgcaaagaaagccgaacgtgagggctatgaagtccagatcttgacagcagatcgcgatcttttccagcttttatctccgcgcatctcggtgttacacccggaagggcatcgtatcaccccggaatggctctgggagaaatatggtttgcgtcccgaacaatgggtggattttcgcgccttagcaggcgatccgagcgacaatattccgggagttaaaggtatcggcgagaagacggcgctcaagctccttaaagaatgggggtcgttggagaacttgcttaagaatttagatcaggtcttgccagagtcagtgcgtgagaagattcttgcacacctcgaagacctcaaattaagccgcgaattgtcccgtgtacgcaccgatttgccgctcgaagttgatttccgtcgccgccgcgaacctgactgggagggtcttaaagcgtttttagagcgtcttgaatttggttcgctcttgcatgaattcggccttttagaaagcccgttaccagccgaagaagcaccttggccaccgcccgaaggcgcgtttttaggttaccgtttgagtcgcccggaaccgatgtgggccgaattattggctcttgcagcgtctgcccagggacgtgtgtatcgcgcggaagaccctcatggtgcgctccgcggcctcttcgaagtccgtggactccttgccaaagacttagctgttgttgcattgcgcgaaggtcttgatttacctccgactgatgatccaatgcttcttgcgtacctcttggacccgtcaaacacgacgcccgaaggcgtagcccgtcgttacggcggcgagtggaccgaagatgcagcgaaacgcgcgttattggccgaacgtttgcacgccaatttattaggacgtttgcaaggcgaggaacgtctcctctggctttacgaagaagtggagaaaccattgagtcgcgtgctcgcgcatatggaagctaccggtgtcaaattagacgtggcgtatttggaggctctcagccttgaagttgctgccgaaatgcgccgcttggaggaagaagtattccgtttagcaggccattcctttcgccttaattctcgcgatcagttagaacgtgtgttgttcgatgaacttggtctccctcctatcggcaagacagagaagaccggtaaacgtagcacttcagcggcggttttagaagctcttcgcgaagtccatcccattgtggacaagatcttgcagtaccgcgaactcgcgaaattgaaaggcacctatattgaccctcttccggcattagtccacccgaaaacgggacgcctccatacccgcttcaaccaaacagccacggcgaccggtcgtttgtcctcctctgatccaaaccttcagaatattccagtacgtaccccattgggccagaagatccgccgcgcgtttgtagctgaggagggttggcgtttagtggccctcgattatagccaaattgaattacgtgtccttgcccatctttctggcgatgagaacctcatccgcgtgtttcaggaaggcaaagacattcacactcaaacggcaagctggatgtttggattatcagctgaagcgatcgatcctttgatgcgtcgtgcagcgaagaccatcaatttcggtgttctctacggtatgagtgcctttcgtttgtcgcaggaattaggcattccctatgaagaagctgcggcgttcattcagaaatactttcaaagctatcccaaagttaaagcatggatcgagaagactctcgaagaaggccgcacacgtggttacgtagagaccttatttggacgtcgccgctatgttcccgatttaaacgctcgcgtgaaatctgtccgtgaagccgccgaacgcatggcgttcaacatgcctgtacagggcacggcagctgacctcatgaaacttgcaatggtgcgcctttttccacaattgcgtgaagttggtgcccgcatgctcttgcaggtccacgatgaactcttgttagaagcgccaaaagagcgtgcggaagaggtggcagccctcgcgaaagaggttatggaaggcgtgtggcccttagcggtgcctcttgaagtcgaagttggtattggcgaggattggctggctgccaaaggataatga

SEQ ID NO: 2722 - protein, 841 aa, synthetic construct
  REGION 1..841: note = Variant of DNA polymerase I from Thermus sp. strain 2.9
MHHHHHHGGSGVLPVFEPKGRVLLVDGHHLAYRNFFALKGLTTSRGEPVQGVYGFAKSLLKALKEDGDVVIVVFDAKAPSFRHEAYEAYKAGRAPTPEDFPRQLALMKELVDLLGLERLEVPGFEADDVLATLAKKAEREGYEVQILTADRDLFQLLSPRISVLHPEGHRITPEWLWEKYGLRPEQWVDFRALAGDPSDNIPGVKGIGEKTALKLLKEWGSLENLLKNLDQVLPESVREKILAHLEDLKLSRELSRVRTDLPLEVDFRRRREPDWEGLKAFLERLEFGSLLHEFGLLESPLPAEEAPWPPPEGAFLGYRLSRPEPMWAELLALAASAQGRVYRAEDPHGALRGLFEVRGLLAKDLAVVALREGLDLPPTDDPMLLAYLLDPSNTTPEGVARRYGGEWTEDAAKRALLAERLHANLLGRLQGEERLLWLYEEVEKPLSRVLAHMEATGVKLDVAYLEALSLEVAAEMRRLEEEVFRLAGHSFRLNSRDQLERVLFDELGLPPIGKTEKTGKRSTSAAVLEALREVHPIVDKILQYRELAKLKGTYIDPLPALVHPKTGRLHTRFNQTATATGRLSSSDPNLQNIPVRTPLGQKIRRAFVAEEGWRLVALDYSQIELRVLAHLSGDENLIRVFQEGKDIHTQTASWMFGLSAEAIDPLMRRAAKTINFGVLYGMSAFRLSQELGIPYEEAAAFIQKYFQSYPKVKAWIEKTLEEGRTRGYVETLFGRRRYVPDLNARVKSVREAAERMAFNMPVQGTAADLMKLAMVRLFPQLREVGARMLLQVHDELLLEAPKERAEEVAALAKEVMEGVWPLAVPLEVEVGIGEDWLAAKG

SEQ ID NO: 2723 - DNA, 2529 bp, synthetic construct
  misc_feature 1..2529: note = Variant of DNA polymerase I from Thermus sp. strain 2.9
  source 1..2529: mol_type = other DNA
atgcaccatcatcatcatcatggcggtagcggcgtgttaccggtgttcgagcctaaaggtcgcgtgcttctggttgatggccatcatctcgcgtatcgtaacttctttgccctgaaaggattaaccaccagccgtggcgagccggtacagggtgtctacggctttgcaaagtcgctcctgaaagctctgaaagaagacggtgatgtggtgattgttgtctttgatgcgaaagcgccaagttttcgccacgaagcgtacgaagcttacaaagccgggcgtgctccaacgccggaagactttcctcgccaattggcgcttatgaaggaattagtggatttgcttggcctcgaagtgttggaagttcccggtttcgaggcagacgacgtattagcgactctcgcaaagaaagccgaacgtgagggctatgaagtccagatcttgacagcagatcgcgatcttttccagcttttatctccgcgcatctcggtgttacacccggaagggcatcgtatcaccccggaatggctctgggagaaatatggtttgcgtcccgaacaatgggtggattttcgcgccttagcaggcgatccgagcgacaatattccgggagttaaaggtatcggcgagaagacggcgctcaagctccttaaagaatgggggtcgttggagaacttgcttaagaatttagatcaggtcaaaccagagtcagtgcgtgagaagattcttgcacacctcgaagacctcaaattaagccgcgaattgtcccgtgtacgcaccgatttgccgctcgaagttgatttccgtcgccgccgcgaacctgactgggagggtcttaaagcgtttttagagcgtcttgaatttggttcgctcttgcatgaattcggccttttagaaagcccgttaccagccgaagaagcaccttggccaccgcccgaaggcgcgtttttaggttaccgtttgagtcgcccggaaccgatgtgggccgaattattggctcttgcagcgtctgcccagggacgtgtgtatcgcgcggaagaccctcatggtgcgctccgcggcctcttcgaagtccgtggactccttgccaaagacttagctgttgttgcattgcgcgaaggtcttgatttacctccgactgatgatccaatgcttcttgcgtacctcttggacccgtcaaacacgacgcccgaaggcgtagcccgtcgttacggcggcgagtggaccgaagatgcagcgaaacgcgcgttattggccgaacgtttgcacgccaatttattaggacgtttgcaaggcgaggaacgtctcctctggctttacgaagaagtggagaaaccattgagtcgcgtgctcgcgcatatggaagctaccggtgtcaaattagacgtggcgtatttggaggctctcagccttgaagttgctgccgaaatgcgccgcttggaggaagaagtattccgtttagcaggccattcctttcgccttaattctcgcgatcagttagaacgtgtgttgttcgatgaacttggtctccctcctatcggcaagacagagaagaccggtaaacgtagcacttcagcggcggttttagaagctcttcgcgaagtccatcccattgtggacaagatcttgcagtaccgcgaactcgcgaaattgaaaggcacctatattgaccctcttccggcattagtccacccgaaaacgggacgcctccatacccgcttcaaccaaacagccacggcgaccggtcgtttgtcctcctctgatccaaaccttcagaatattccagtacgtaccccattgggccagaagatccgccgcgcgtttgtagctgaggagggttggcgtttagtggccctcgattatagccaaattgaattacgtgtccttgcccatctttctggcgatgagaacctcatccgcgtgtttcaggaaggcaaagacattcacactcaaacggcaagctggatgtttggattatcagctgaagcgatcgatcctttgatgcgtcgtgcagcgaagaccatcaatttcggtgttctctacggtatgagtgcctttcgtttgtcgcaggaattaggcattccctatgaagaagctgcggcgttcattcagaaatactttcaaagctatcccaaagttaaagcatggatcgagaagactctcgaagaaggccgcacacgtggttacgtagagaccttatttggacgtcgccgctatgttcccgatttaaacgctcgcgtgaaatctgtccgtgaagccgccgaacgcatggcgttcaacatgcctgtacagggcacggcagctgacctcatgaaacttgcaatggtgcgcctttttccacaattgcgtgaagttggtgcccgcatgctcttgcaggtccacgatgaactcttgttagaagcgccaaaagagcgtgcggaagaggtggcagccctcgcgaaagaggttatggaaggcgtgtggcccttagcggtgcctcttgaagtcgaagttggtattggcgaggattggctggctgccaaaggataatga

SEQ ID NO: 2724 - protein, 841 aa, synthetic construct
  REGION 1..841: note = Variant of DNA polymerase I from Thermus sp. strain 2.9
MHHHHHHGGSGVLPVFEPKGRVLLVDGHHLAYRNFFALKGLTTSRGEPVQGVYGFAKSLLKALKEDGDVVIVVFDAKAPSFRHEAYEAYKAGRAPTPEDFPRQLALMKELVDLLGLEVLEVPGFEADDVLATLAKKAEREGYEVQILTADRDLFQLLSPRISVLHPEGHRITPEWLWEKYGLRPEQWVDFRALAGDPSDNIPGVKGIGEKTALKLLKEWGSLENLLKNLDQVKPESVREKILAHLEDLKLSRELSRVRTDLPLEVDFRRRREPDWEGLKAFLERLEFGSLLHEFGLLESPLPAEEAPWPPPEGAFLGYRLSRPEPMWAELLALAASAQGRVYRAEDPHGALRGLFEVRGLLAKDLAVVALREGLDLPPTDDPMLLAYLLDPSNTTPEGVARRYGGEWTEDAAKRALLAERLHANLLGRLQGEERLLWLYEEVEKPLSRVLAHMEATGVKLDVAYLEALSLEVAAEMRRLEEEVFRLAGHSFRLNSRDQLERVLFDELGLPPIGKTEKTGKRSTSAAVLEALREVHPIVDKILQYRELAKLKGTYIDPLPALVHPKTGRLHTRFNQTATATGRLSSSDPNLQNIPVRTPLGQKIRRAFVAEEGWRLVALDYSQIELRVLAHLSGDENLIRVFQEGKDIHTQTASWMFGLSAEAIDPLMRRAAKTINFGVLYGMSAFRLSQELGIPYEEAAAFIQKYFQSYPKVKAWIEKTLEEGRTRGYVETLFGRRRYVPDLNARVKSVREAAERMAFNMPVQGTAADLMKLAMVRLFPQLREVGARMLLQVHDELLLEAPKERAEEVAALAKEVMEGVWPLAVPLEVEVGIGEDWLAAKG

SEQ ID NO: 2725 - DNA, 2529 bp, synthetic construct
  misc_feature 1..2529: note = Variant of DNA polymerase I from Thermus sp. strain 2.9
  source 1..2529: mol_type = other DNA
atgcaccatcatcatcatcatggcggtagcggcgtgttaccggtgttcgagcctaaaggtcgcgtgcttctggttgatggccatcatctcgcgtatcgtaacttctttgccctgaaaggattaaccaccagccgtggcgagccggtacagggtgtctacggctttgcaaagtcgctcctgaaagctctgaaagaagacggtgatgtggtgattgttgtctttgatgcgaaagcgccaagttttcgccacgaagcgtacgaagcttacaaagccgggcgtgctccaacgccggaagactttcctcgccaattggcgcttatgaaggaattagtggatttgcttggcctcgaacgcttggaagttcccggtttcgaggcagacgacgtattagcgactctcgcaaagaaagccgaacgtgagggctatgaagtccagatcttgacagcagatcgcgatcttttccagcttttatctccgcgcatctcggtgttacacccggaagggcatcgtatcaccccggaatggctctttgagaaatatggtttgcgtcccgaacaatgggtggattttcgcgccttagcaggcgatccgagcgacaatattccgggagttaaaggtatcggcgagaagacggcgctcaagctccttaaagaatgggggtcgttggagaacttgcttaagaatttagatcaggtcaaaccagagtcagtgcgtgagaagattcttgcacacctcgaagacctcaaattaagccgcgaattgtcccgtgtacgcaccgatttgccgctcgaagttgatttccgtcgccgccgcgaacctgactgggagggtcttaaagcgtttttagagcgtcttgaatttggttcgctcttgcatgaattcggccttttagaaagcccgttaccagccgaagaagcaccttggccaccgcccgaaggcgcgtttttaggttaccgtttgagtcgcccggaaccgatgtgggccgaattattggctcttgcagcgtctgcccagggacgtgtgtatcgcgcggaagaccctcatggtgcgctccgcggcctcttcgaagtccgtggactccttgccaaagacttagctgttgttgcattgcgcgaaggtcttgatttacctccgactgatgatccaatgcttcttgcgtacctcttggacccgtcaaacacgacgcccgaaggcgtagcccgtcgttacggcggcgagtggaccgaagatgcagcgaaacgcgcgttattggccgaacgtttgcacgccaatttattaggacgtttgcaaggcgaggaacgtctcctctggctttacgaagaagtggagaaaccattgagtcgcgtgctcgcgcatatggaagctaccggtgtcaaattagacgtggcgtatttggaggctctcagccttgaagttgctgccgaaatgcgccgcttggaggaagaagtattccgtttagcaggccattcctttcgccttaattctcgcgatcagttagaacgtgtgttgttcgatgaacttggtctccctcctatcggcaagacagagaagaccggtaaacgtagcacttcagcggcggttttagaagctcttcgcgaagtccatcccattgtggacaagatcttgcagtaccgcgaactcgcgaaattgaaaggcacctatattgaccctcttccggcattagtccacccgaaaacgggacgcctccatacccgcttcaaccaaacagccacggcgaccggtcgtttgtcctcctctgatccaaaccttcagaatattccagtacgtaccccattgggccagaagatccgccgcgcgtttgtagctgaggagggttggcgtttagtggccctcgattatagccaaattgaattacgtgtccttgcccatctttctggcgatgagaacctcatccgcgtgtttcaggaaggcaaagacattcacactcaaacggcaagctggatgtttggattatcagctgaagcgatcgatcctttgatgcgtcgtgcagcgaagaccatcaatttcggtgttctctacggtatgagtgcctttcgtttgtcgcaggaattaggcattccctatgaagaagctgcggcgttcattcagaaatactttcaaagctatcccaaagttaaagcatggatcgagaagactctcgaagaaggccgcacacgtggttacgtagagaccttatttggacgtcgccgctatgttcccgatttaaacgctcgcgtgaaatctgtccgtgaagccgccgaacgcatggcgttcaacatgcctgtacagggcacggcagctgacctcatgaaacttgcaatggtgcgcctttttccacaattgcgtgaagttggtgcccgcatgctcttgcaggtccacgatgaactcttgttagaagcgccaaaagagcgtgcggaagaggtggcagccctcgcgaaagaggttatggaaggcgtgtggcccttagcggtgcctcttgaagtcgaagttggtattggcgaggattggctggctgccaaaggataatga

SEQ ID NO: 2726 - protein, 841 aa, synthetic construct
  REGION 1..841: note = Variant of DNA polymerase I from Thermus sp. strain 2.9
MHHHHHHGGSGVLPVFEPKGRVLLVDGHHLAYRNFFALKGLTTSRGEPVQGVYGFAKSLLKALKEDGDVVIVVFDAKAPSFRHEAYEAYKAGRAPTPEDFPRQLALMKELVDLLGLERLEVPGFEADDVLATLAKKAEREGYEVQILTADRDLFQLLSPRISVLHPEGHRITPEWLFEKYGLRPEQWVDFRALAGDPSDNIPGVKGIGEKTALKLLKEWGSLENLLKNLDQVKPESVREKILAHLEDLKLSRELSRVRTDLPLEVDFRRRREPDWEGLKAFLERLEFGSLLHEFGLLESPLPAEEAPWPPPEGAFLGYRLSRPEPMWAELLALAASAQGRVYRAEDPHGALRGLFEVRGLLAKDLAVVALREGLDLPPTDDPMLLAYLLDPSNTTPEGVARRYGGEWTEDAAKRALLAERLHANLLGRLQGEERLLWLYEEVEKPLSRVLAHMEATGVKLDVAYLEALSLEVAAEMRRLEEEVFRLAGHSFRLNSRDQLERVLFDELGLPPIGKTEKTGKRSTSAAVLEALREVHPIVDKILQYRELAKLKGTYIDPLPALVHPKTGRLHTRFNQTATATGRLSSSDPNLQNIPVRTPLGQKIRRAFVAEEGWRLVALDYSQIELRVLAHLSGDENLIRVFQEGKDIHTQTASWMFGLSAEAIDPLMRRAAKTINFGVLYGMSAFRLSQELGIPYEEAAAFIQKYFQSYPKVKAWIEKTLEEGRTRGYVETLFGRRRYVPDLNARVKSVREAAERMAFNMPVQGTAADLMKLAMVRLFPQLREVGARMLLQVHDELLLEAPKERAEEVAALAKEVMEGVWPLAVPLEVEVGIGEDWLAAKG

SEQ ID NO: 2727 - DNA, 2529 bp, synthetic construct
  misc_feature 1..2529: note = Variant of DNA polymerase I from Thermus sp. strain 2.9
  source 1..2529: mol_type = other DNA
atgcaccatcatcatcatcatggcggtagcggcgtgttaccggtgttcgagcctaaaggtcgcgtgcttctggttgatggccatcatctcgcgtatcgtaacttctttgccctgaaaggattaaccaccagccgtggcgagccggtacagggtgtctacggctttgcaaagtcgctcctgaaagctctgaaagaagacggtgatgtggtgattgttgtctttgatgcgaaagcgccaagttttcgccacgaagcgtacgaagcttacaaagccgggcgtgctccaacgccggaagactttcctcgccaattggcgcttatgaaggaattagtggatttgcttggcctcgaacgcttggaagttcccggtttcgaggcagacgacgtattagcgactctcgcaaagaaagccgaacgtgagggctatgaagtccagatcttgacagcagatcgcgatcttttccagcttttatctccgcgcatctcggtgttacacccggaagggcatcgtatcaccccggaatggctctgggagaaatatggtttgcgtcccgaacaatgggtggattttcgcgccttagcaggcgatccgagcgacaatattccgggagttaaaggtatcggcgagaagacggcgctcaagctccttaaagaatgggggtcgttggagaacttgcttaagaatttagatcaggtcaaaccagagtcagtgcgtgagaagattcttgcacacctcgaagacctcaaattaagccgcgaattgtcccgtgtacgcaccgatttgccgctcgaagttgatttccgtcgccgccgcgaacctgactgggagggtcttaaagcgtttttagagcgtcttgaatttggttcgctcttgcatgaattcggccttttagaaagcccgttaccagccgaagaagcaccttggccaccgccccagggcgcgtttttaggttaccgtttgagtcgcccggaaccgatgtgggccgaattagccgctcttgcagcgtctgcccagggacgtgtgtatcgcgcggaagaccctcatggtgcgctccgcggcctcttcgaagtccgtggactccttgccaaagacttagctgttgttgcattgcgcgaaggtcttgatttacctccgactgatgatccaatgcttcttgcgtacctcttggacccgtcaaacacgacgcccgaaggcgtagcccgtcgttacggcggcgagtggaccgaagatgcagcgaaacgcgcgttattggccgaacgtttgcacgccaatttattaggacgtttgcaaggcgaggaacgtctcctctggctttacgaagaagtggagaaaccattgagtcgcgtgctcgcgcatatggaagctaccggtgtcaaattagacgtggcgtatttggaggctctcagccttgaagttgctgccgaaatgcgccgcttggaggaagaagtattccgtttagcaggccattcctttcgccttaattctcgcgatcagttagaacgtgtgttgttcgatgaacttggtctccctcctatcggcaagacagagaagaccggtaaacgtagcacttcagcggcggttttagaagctcttcgcgaagtccatcccattgtggacaagatcttgcagtaccgcgaactcgcgaaattgaaaggcacctatattgaccctcttccggcattagtccacccgaaaacgggacgcctccatacccgcttcaaccaaacagccacggcgaccggtcgtttgtcctcctctgatccaaaccttcagaatattccagtacgtaccccattgggccagaagatccgcaaggcgtttgtagctgaggagggttggcgtttagtggccctcgattatagccaaattgaattacgtgtccttgcccatctttctggcgatgagaacctcatccgcgtgtttcaggaaggcaaagacattcacactcaaacggcaagctggatgtttggattatcagctgaagcgatcgatcctttgatgcgtcgtgcagcgaagaccatcaatttcggtgttctctacggtatgagtgcctttcgtttgtcgcaggaattaggcattccctatgaagaagctgcggcgttcattcagaaatactttcaaagctatcccaaagttaaagcatggatcgagaagactctcgaagaaggccgcacacgtggttacgtagagaccttatttggacgtcgccgctatgttcccgatttaaacgctcgcgtgaaatctgtccgtgaagccgccgaacgcatggcgttcaacatgcctgtacagggcacggcagctgacctcatgaaacttgcaatggtgcgcctttttccacaattgcgtgaagttggtgcccgcatgctcttgcaggtccacgatgaactcttgttagaagcgccaaaagagcgtgcggaagaggtggcagccctcgcgaaaacggttatggaaggcgtgtggcccttagcggtgcctcttgaagtcgaagttggtattggcgaggattggctggctgccaaaggataatga

SEQ ID NO: 2728 - protein, 841 aa, synthetic construct
  REGION 1..841: note = Variant of DNA polymerase I from Thermus sp. strain 2.9
MHHHHHHGGSGVLPVFEPKGRVLLVDGHHLAYRNFFALKGLTTSRGEPVQGVYGFAKSLLKALKEDGDVVIVVFDAKAPSFRHEAYEAYKAGRAPTPEDFPRQLALMKELVDLLGLERLEVPGFEADDVLATLAKKAEREGYEVQILTADRDLFQLLSPRISVLHPEGHRITPEWLWEKYGLRPEQWVDFRALAGDPSDNIPGVKGIGEKTALKLLKEWGSLENLLKNLDQVKPESVREKILAHLEDLKLSRELSRVRTDLPLEVDFRRRREPDWEGLKAFLERLEFGSLLHEFGLLESPLPAEEAPWPPPQGAFLGYRLSRPEPMWAELAALAASAQGRVYRAEDPHGALRGLFEVRGLLAKDLAVVALREGLDLPPTDDPMLLAYLLDPSNTTPEGVARRYGGEWTEDAAKRALLAERLHANLLGRLQGEERLLWLYEEVEKPLSRVLAHMEATGVKLDVAYLEALSLEVAAEMRRLEEEVFRLAGHSFRLNSRDQLERVLFDELGLPPIGKTEKTGKRSTSAAVLEALREVHPIVDKILQYRELAKLKGTYIDPLPALVHPKTGRLHTRFNQTATATGRLSSSDPNLQNIPVRTPLGQKIRKAFVAEEGWRLVALDYSQIELRVLAHLSGDENLIRVFQEGKDIHTQTASWMFGLSAEAIDPLMRRAAKTINFGVLYGMSAFRLSQELGIPYEEAAAFIQKYFQSYPKVKAWIEKTLEEGRTRGYVETLFGRRRYVPDLNARVKSVREAAERMAFNMPVQGTAADLMKLAMVRLFPQLREVGARMLLQVHDELLLEAPKERAEEVAALAKTVMEGVWPLAVPLEVEVGIGEDWLAAKG

SEQ ID NO: 2729 - DNA, 2529 bp, synthetic construct
  misc_feature 1..2529: note = Variant of DNA polymerase I from Thermus sp. strain 2.9
  source 1..2529: mol_type = other DNA
atgcaccatcatcatcatcatggcggtagcggcgtgttaccggtgttcgagcctaaaggtcgcgtgcttctggttgatggccatcatctcgcgtatcgtaacttctttgccctgaaaggattaaccaccagccgtggcgagccggtacagggtgtctacggctttgcaaagtcgctcctgaaagctctgaaagaagacggtgatgtggtgattgttgtctttgatgcgaaagcgccaagttttcgccacgaagcgtacgaagcttacaaagccgggcgtgctccaacgccggaagactttcctcgccaattggcgcttatgaaggaattagtggatttgcttggcctcgaacgcttggaagttcccggtttcgaggcagacgacgtattagcgactctcgcaaagaaagccgaacgtgagggctatgaagtccagatcttgacagcagatcgcgatcttttccagcttttatctccgcgcatctcggtgttacacccggaagggcatcgtatcaccccggaatggctctgggagaaatatggtttgcgtcccgaacaatgggtggattttcgcgccttagcaggcgatccgagcgacaatattccgggagttaaaggtatcggcgagaagacggcgctcaagctccttaaagaatgggggtcgttggagaacttgcttaagaatttagatcaggtcaaaccagagtcagtgcgtgagaagattcttgcacacctcgaagacctcaaattaagccgcgaattgtcccgtgtacgcaccgatttgccgctcgaagttgatttccgtcgccgccgcgaacctgactgggagggtcttaaagcgtttttagagcgtcttgaatttggttcgctcttgcatgaattcggccttttagaaagcccgttaccagccgaagaagcaccttggccaccgcccgaaggcgcgtttttaggttaccgtttgagtcgcccggaaccgatgtgggccgaattattggctcttgcagcgtctgcccagggacgtgtgtatcgcgcggaagaccctcatggtgcgctccgcggcctcttcgaagtccgtggactccttgccaaagacttagctgttgttgcattgcgcgaaggtcttgatttacctccgactgatgatccaatgcttcttgcgtacctcttggacccgtcaaacacgacgcccgaaggcgtagcccgtcgttacggcggcgagtggaccgaagatgcagcgaaacgcgcgttattggccgaacgtttgcacgccaatttattaggacgtttgcaaggcgaggaacgtctcctctggctttacgaagaagtggagaaaccattgagtcgcgtgctcgcgcatatggaagctaccggtgtcaaattagacgtggcgtatttggaggctctcagccttgaagttgctgccgaaatgcgccgcttggaggaagaagtattccgtttagcaggccattcctttcgccttaattctcgcgatcagttagaacgtgtgttgttcgatgaacttggtctccctcctatcggcaagacagagaagaccggtaaacgtagcacttcagcggcggttttagaagctcttcgcgaagtccatcccattgtggacaagatcttgcagtaccgcgaactcgcgaaattgaaaggcacctatattgaccctcttccggcattagtccacccgaaaacgggacgcctccatacccgcttcaaccaaacagccacggcgaccggtcgtttgtcctcctctgatccaaaccttcagaatattccagtacgtaccccattgggccagaagatccgccgcgcgtttgtagctgaggagggttggcgtttagtggccctcgattatagccaaattgaattacgtgtccttgcccatctttctggcgatgagaacctcatccgcgtgtttcaggaaaggaaagacattcacactcaaacggcaagctggatgtttggattatcagctgaagcgatcgatcctttgatgcgtcgtgcagcgaagaccatcaatttcggtgttctctacggtatgagtgcctttcgtttgtcgcaggaattaggcattccctatgaagaagctgcggcgttcattcagaaatactttcaaagctatcccaaagttaaagcatggatcgagaagactctcgaagaaggccgcacacgtggttacgtagagaccttatttggacgtcgccgctatgttcccgatttaaacgctcgcgtgaaatctgtccgtgaagccgccgaacgcatggcgttcaacatgcctgtacagggcacggcagctgacctcatgaaacttgcaatggtgcgcctttttccacaattgcgtgaagttggtgcccgcatgctcttgcaggtccacgatgaactcttgttagaagcgccaaaagagcgtgcggaagaggtggcagccctcgcgaaagaggttatggaaggcgtgtggcccttagcggtgcctcttgaagtcgaagttggtattggcgaggattggctggctgccaaaggataatga

SEQ ID NO: 2730 - protein, 841 aa, synthetic construct
  REGION 1..841: note = Variant of DNA polymerase I from Thermus sp. strain 2.9
MHHHHHHGGSGVLPVFEPKGRVLLVDGHHLAYRNFFALKGLTTSRGEPVQGVYGFAKSLLKALKEDGDVVIVVFDAKAPSFRHEAYEAYKAGRAPTPEDFPRQLALMKELVDLLGLERLEVPGFEADDVLATLAKKAEREGYEVQILTADRDLFQLLSPRISVLHPEGHRITPEWLWEKYGLRPEQWVDFRALAGDPSDNIPGVKGIGEKTALKLLKEWGSLENLLKNLDQVKPESVREKILAHLEDLKLSRELSRVRTDLPLEVDFRRRREPDWEGLKAFLERLEFGSLLHEFGLLESPLPAEEAPWPPPEGAFLGYRLSRPEPMWAELLALAASAQGRVYRAEDPHGALRGLFEVRGLLAKDLAVVALREGLDLPPTDDPMLLAYLLDPSNTTPEGVARRYGGEWTEDAAKRALLAERLHANLLGRLQGEERLLWLYEEVEKPLSRVLAHMEATGVKLDVAYLEALSLEVAAEMRRLEEEVFRLAGHSFRLNSRDQLERVLFDELGLPPIGKTEKTGKRSTSAAVLEALREVHPIVDKILQYRELAKLKGTYIDPLPALVHPKTGRLHTRFNQTATATGRLSSSDPNLQNIPVRTPLGQKIRRAFVAEEGWRLVALDYSQIELRVLAHLSGDENLIRVFQERKDIHTQTASWMFGLSAEAIDPLMRRAAKTINFGVLYGMSAFRLSQELGIPYEEAAAFIQKYFQSYPKVKAWIEKTLEEGRTRGYVETLFGRRRYVPDLNARVKSVREAAERMAFNMPVQGTAADLMKLAMVRLFPQLREVGARMLLQVHDELLLEAPKERAEEVAALAKEVMEGVWPLAVPLEVEVGIGEDWLAAKG

SEQ ID NO: 2731 - DNA, 2529 bp, synthetic construct
  misc_feature 1..2529: note = Variant of DNA polymerase I from Thermus sp. strain 2.9
  source 1..2529: mol_type = other DNA
atgcaccatcatcatcatcatggcggtagcggcgtgttaccggtgttcgagcctaaaggtcgcgtgcttctggttgatggccatcatctcgcgtatcgtaacttctttgccctgaaaggattaaccaccagccgtggcgagccggtacagggtgtctacggctttgcaaagtcgctcctgaaagctctgaaagaagacggtgatgtggtgattgttgtctttgatgcgaaagcgccaagttttcgccacgaagcgtacgaagcttacaaagccgggcgtgctccaacgccggaagactttcctcgccaattggcgcttatgaaggaattagtggatttgcttggcctcgaacgcttggaagttcccggtttcgaggcagacgacgtattagcgactctcgcaaagaaagccgaacgtgagggctatgaagtccagatcttgacagcagatcgcgatcttttccagcttttatctccgcgcatctcggtgttacacccggaagggcatcgtatcaccccggaatggctctgggagaaatatggtttgcgtcccgaacaatgggtggattttcgcgccttagcaggcgatccgagcgacaatattccgggagttaaaggtatcggcgagaagacggcgctcaagctccttaaagaatgggggtcgttggagaacttgcttaagaatttagatcaggtcaaaccagagtcagtgcgtgagaagattgtggcacacctcgaagacctcaaattaagccgcgaattgtcccgtgtacgcaccgatttgccgctcgaagttgatttccgtcgccgccgcgaacctgactgggagggtcttaaagcgtttttagagcgtcttgaatttggttcgctcttgcatgaattcggccttttagaaagcccgttaccagccgaagaagcaccttggccaccgcccgaaggcgcgtttttaggttaccgtttgagtcgcccggaaccgatgtgggccgaattattggctcttgcagcgtctgcccagggacgtgtgtatcgcgcggaagaccctcatggtgcgctccgcggcctcttcgaagtccgtggactccttgccaaagacttagctgttgttgcattgcgcgaaggtcttgatttacctccgactgatgatccaatgcttcttgcgtacctcttggacccgtcaaacacgacgcccgaaggcgtagcccgtcgttacggcggcgagtggaccgaagatgcagcgaaacgcgcgttattggccgaacgtttgcacgccaatttattaggacgtttgcaaggcgaggaacgtctcctctggctttacgaagaagtggagaaaccattgagtcgcgtgctcgcgcatatggaagctaccggtgtcaaattagacgtggcgtatttggaggctctcagccttgaagttgctgccgaaatgcgccgcttggaggaagaagtattccgtttagcaggccattcctttcgccttaattctcgcgatcagttagaacgtgtgttgttcgatgaacttggtctccctcctatcggcaagacagagaagaccggtaaacgtagcacttcagcggcggttttagaagctcttcgcgaagtccatcccattgtggacaagatcttgcagtaccgcgaactcgcgaaattgaaaggcacctatattgaccctcttccggcattagtccacccgaaaacgggacgcctccatacccgcttcaaccaaacagccacggcgaccggtcgtttgtcctcctctgatccaaaccttcagaatattccagtacgtaccccattgggccagaagatccgccgcgcgtttgtagctgaggagggttggcgtttagtggccctcgattatagccaaattgaattacgtgtccttgcccatctttctggcgatgagaacctcatccgcgtgtttcaggaaggcaaagacattcacactcaaacggcaagctggatgtttggattatcagctgaagcgatcgatcctttgatgcgtcgtgcagcgaagaccatcaatttcggtgttctctacggtatgagtgcctttcgtttgtcgcaggaattaggcattccctatgaagaagctgcggcgttcattcagaaatactttcaaagctatcccaaagttaaagcatggatcgagaagactctcgaagaaggccgcacacgtggttacgtagagaccttatttggacgtcgccgctatgttcccgatttaaacgctcgcgtgaaatctgtccgtgaagccgccgaacgcatggcgttcaacatgcctgtacagggcacggcagctgacctcatgaaacttgcaatggtgcgcctttttccacaattgcgtgaagttggtgcccgcatgctcttgcaggtccacgatgaactcttgttagaagcgccaaaagagcgtgcggaagaggtggcagccctcgcgaaagaggttatggaaggcgtgtggcccttagcggtgcctcttgaagtcgaagttggtattggcgaggattggctggctgccaaaggataatga

SEQ ID NO: 2732 - protein, 841 aa, synthetic construct
  REGION 1..841: note = Variant of DNA polymerase I from Thermus sp. strain 2.9
MHHHHHHGGSGVLPVFEPKGRVLLVDGHHLAYRNFFALKGLTTSRGEPVQGVYGFAKSLLKALKEDGDVVIVVFDAKAPSFRHEAYEAYKAGRAPTPEDFPRQLALMKELVDLLGLERLEVPGFEADDVLATLAKKAEREGYEVQILTADRDLFQLLSPRISVLHPEGHRITPEWLWEKYGLRPEQWVDFRALAGDPSDNIPGVKGIGEKTALKLLKEWGSLENLLKNLDQVKPESVREKIVAHLEDLKLSRELSRVRTDLPLEVDFRRRREPDWEGLKAFLERLEFGSLLHEFGLLESPLPAEEAPWPPPEGAFLGYRLSRPEPMWAELLALAASAQGRVYRAEDPHGALRGLFEVRGLLAKDLAVVALREGLDLPPTDDPMLLAYLLDPSNTTPEGVARRYGGEWTEDAAKRALLAERLHANLLGRLQGEERLLWLYEEVEKPLSRVLAHMEATGVKLDVAYLEALSLEVAAEMRRLEEEVFRLAGHSFRLNSRDQLERVLFDELGLPPIGKTEKTGKRSTSAAVLEALREVHPIVDKILQYRELAKLKGTYIDPLPALVHPKTGRLHTRFNQTATATGRLSSSDPNLQNIPVRTPLGQKIRRAFVAEEGWRLVALDYSQIELRVLAHLSGDENLIRVFQEGKDIHTQTASWMFGLSAEAIDPLMRRAAKTINFGVLYGMSAFRLSQELGIPYEEAAAFIQKYFQSYPKVKAWIEKTLEEGRTRGYVETLFGRRRYVPDLNARVKSVREAAERMAFNMPVQGTAADLMKLAMVRLFPQLREVGARMLLQVHDELLLEAPKERAEEVAALAKEVMEGVWPLAVPLEVEVGIGEDWLAAKG

SEQ ID NO: 2733 - DNA, 2529 bp, synthetic construct
  misc_feature 1..2529: note = Variant of DNA polymerase I from Thermus sp. strain 2.9
  source 1..2529: mol_type = other DNA
atgcaccatcatcatcatcatggcggtagcggcgtgttaccggtgttcgagcctaaaggtcgcgtgcttctggttgatggccatcatctcgcgtatcgtaacttctttgccctgaaaggattaaccaccagccgtggcgagccggtacagggtgtctacggctttgcaaagtcgctcctgaaagctctgaaagaagacggtgatgtggtgattgttgtctttgatgcgaaagcgccaagttttcgccacgaagcgtacgaagcttacaaagccgggcgtgctccaacgccggaagactttcctcgccaattggcgcttatgaaggaattagtggatttgcttggcctcgaacgcttggaagttcccggtttcgaggcagacgacgtattagcgactctcgcaaagaaagccgaacgtgagggctatgaagtccagatcttgacagcagatcgcgatcttttccagcttttatctccgcgcatctcggtgttacacccggaagggcatcgtatcaccccggaatggctctgggagaaatatggtttgcgtcccgaacaatgggtggattttcgcgccttagcaggcgatccgagcgacaatattccgggagttaaaggtatcggcgagaagacggcgctcaagctccttaaagaatgggggtcgttggagaacttgcttaagaatttagatcaggtcaaaccagagtcagtgcgtgagaagattcttgcacacctcgaagacctcaaattaagccgcgaattgtcccgtgtacgcaccgatttgccgctcgaagttgatttccgtcgccgccgcgaacctgactgggagggtcttaaagcgtttttagagcgtcttgaatttggttcgctcttgcatgaattcggccttttagaaagcccgttaccagccgaagaagcaccttggccaccgcccgaaggcgcgtttttaggttaccgtttgagtcgcccggaaccgatgtgggccgaattattggctcttgcagcgtctgcccagggacgtgtgtatcgcgcggaagaccctcatggtgcgctccgcggcctcttcgaagtccgtggactccttgccaaagacttagctgttgttgcattgcgcgaaggtcttgatttacctccgactgatgatccaatgcttcttgcgtacctcttggacccgtcaaacacgacgcccgaaggcgtagcccgtcgttacggcggcgagtggaccgaagatgcagcgaaacgcgcgttattggccgaacgtttgcacgccaatttattaggacgtttgcaaggcgaggaacgtctcctctggctttacgaagaagtggagaaaccattgagtcgcgtgctcgcgcatatggaagctaccggtgtcaaattagacgtggcgtatttggaggctctcagccttgaagttgctgccgaaatgcgccgcttggaggaagaagtattccgtttagcaggccattcctttcgccttcattctcgcgatcagttagaacgtgtgttgttcgatgaacttggtctccctcctatcggcaagacagagaagaccggtaaacgtagcacttcagcggcggttttagaagctcttcgcgaagtccatcccattgtggacaagatcttgcagtaccgcgaactcgcgaaattgaaaggcacctatattgaccctcttccggcattagtccacccgaaaacgggacgcctccatacccgcttcaaccaaacagccacggcgaccggtcgtttgtcctcctctgatccaaaccttcagaatattccagtacgtaccccattgggccagaagatccgccgcgcgtttgtagctgaggagggttggcgtttagtggccctcgattatagccaaattgaattacgtgtccttgcccatctttctggcgatgagaacctcatccgcgtgtttcaggaaggcaaagacattcacactcaaacggcaagctggatgtttggattatcagctgaagcgatcgatcctttgatgcgtcgtgcagcgaagaccatcaatttcggtgttctctacggtatgagtgcctttcgtttgtcgcaggaattaggcattccctatgaagaagctgcggcgttcattcagaaatactttcaaagctatcccaaagttaaagcatggatcgagaagactctcgaagaaggccgcacacgtggttacgtagagaccttatttggacgtcgccgctatgttcccgatttaaacgctcgcgtgaaatctgtccgtgaagccgccgaacgcatggcgttcaacatgcctgtacagggcacggcagctgacctcatgaaacttgcaatggtgcgcctttttccacaattgcgtgaagttggtgcccgcatgctcttgcaggtccacgatgaactcttgttagaagcgccaaaagagcgtgcggaagaggtggcagccctcgcgaaagaggttatggaaggcgtgtggcccttagcggtgcctcttgaagtcgaagttggtattggcgaggattggctggctgccaaaggataatga

SEQ ID NO: 2734 - protein, 841 aa, synthetic construct
  REGION 1..841: note = Variant of DNA polymerase I from Thermus sp. strain 2.9
MHHHHHHGGSGVLPVFEPKGRVLLVDGHHLAYRNFFALKGLTTSRGEPVQGVYGFAKSLLKALKEDGDVVIVVFDAKAPSFRHEAYEAYKAGRAPTPEDFPRQLALMKELVDLLGLERLEVPGFEADDVLATLAKKAEREGYEVQILTADRDLFQLLSPRISVLHPEGHRITPEWLWEKYGLRPEQWVDFRALAGDPSDNIPGVKGIGEKTALKLLKEWGSLENLLKNLDQVKPESVREKILAHLEDLKLSRELSRVRTDLPLEVDFRRRREPDWEGLKAFLERLEFGSLLHEFGLLESPLPAEEAPWPPPEGAFLGYRLSRPEPMWAELLALAASAQGRVYRAEDPHGALRGLFEVRGLLAKDLAVVALREGLDLPPTDDPMLLAYLLDPSNTTPEGVARRYGGEWTEDAAKRALLAERLHANLLGRLQGEERLLWLYEEVEKPLSRVLAHMEATGVKLDVAYLEALSLEVAAEMRRLEEEVFRLAGHSFRLHSRDQLERVLFDELGLPPIGKTEKTGKRSTSAAVLEALREVHPIVDKILQYRELAKLKGTYIDPLPALVHPKTGRLHTRFNQTATATGRLSSSDPNLQNIPVRTPLGQKIRRAFVAEEGWRLVALDYSQIELRVLAHLSGDENLIRVFQEGKDIHTQTASWMFGLSAEAIDPLMRRAAKTINFGVLYGMSAFRLSQELGIPYEEAAAFIQKYFQSYPKVKAWIEKTLEEGRTRGYVETLFGRRRYVPDLNARVKSVREAAERMAFNMPVQGTAADLMKLAMVRLFPQLREVGARMLLQVHDELLLEAPKERAEEVAALAKEVMEGVWPLAVPLEVEVGIGEDWLAAKG

SEQ ID NO: 2735 - DNA, 2529 bp, synthetic construct
  misc_feature 1..2529: note = Variant of DNA polymerase I from Thermus sp. strain 2.9
  source 1..2529: mol_type = other DNA
atgcaccatcatcatcatcatggcggtagcggcgtgttaccggtgttcgagcctaaaggtcgcgtgcttctggttgatggccatcatctcgcgtatcgtaacttctttgccctgaaaggattaaccaccagccgtggcgagccggtacagggtgtctacggctttgcaaagtcgctcctgaaagctctgaaagaagacggtgatgtggtgattgttgtctttgatgcgaaagcgccaagttttcgccacgaagcgtacgaagcttacaaagccgggcgtgctccaacgccggaagactttcctcgccaattggcgcttatgaaggaattagtggatttgcttggcctcgaacgcttggaagttcccggtttcgaggcagacgacgtattagcgactctcgcaaagaaagccgaacgtgagggctatgaagtccagatcttgacagcagatcgcgatcttttccagcttttatctccgcgcatctcggtgttacacccggaagggcatcgtatcaccccggaatggctctgggagaaatatggtttgcgtcccgaacaatgggtggattttcgcgccttagcaggcgatccgagcgacaatattccgggagttaaaggtatcggcgagaagacggcgctcaagctccttaaagaatgggggtcgttggagaacttgcttaagaatttagatcaggtcaaaccagagtcagtgcgtgagaagattcttgcacacctcgaagacctcaaattaagccgcgaattgtcccgtgtacgcaccgatttgccgctcgaagttgatttccgtcgccgccgcgaacctgactgggagggtcttaaagcgtttttagagcgtcttgaatttggttcgctcttgcatgaattcggccttttagaaagcccgttaccagccgaagaagcaccttggccaccgcccgaaggcgcgtttttaggttaccgtttgagtcgcccggaaccgatgtgggccgaattattggctcttgcagcgtctgcccagggacgtgtgtatcgcgcggaagaccctcatggtgcgctccgcggcctcttcgaagtccgtggactccttgccaaagacttagctgttgttgcattgcgcgaaggtcttgatttacctccgactgatgatccaatgcttcttgcgtacctcttggacccgtcaaacacgacgcccgaaggcgtagcccgtcgttacggcggcgagtggaccgaagatgcagcgaaacgcgcgttattggccgaacgtttgcacgccaatttattaggacgtttgcaaggcgaggaacgtctcctctggctttacgaagaagtggagaaaccattgagtcgcgtgctcgcgcatatggaagctaccggtgtcaaattagacgtggcgtatttggaggctctcagccttgaagttgctgccgaaatgcgccgcttggaggaagaagtattccgtttagcaggccattcctttcgccttaattctcgcgatcagttagaacgtgtgttgttcgatgaacttggtctccctcctatcggcaagacagagaagaccggtaaacgtagcacttcagcggcggttttagaagctcttcgcgaagtccatcccattgtggacaagatcttgcagtaccgcgaactcgcgaaattgaaaggcacctatattgaccctcttccggcattagtccacccgaaaacgggacgcctccatacccgcttcaaccaaacagccacggcgaccggtcgtttgtcctcctctgatccaaaccttcagaatattccagtacgtaccccattgggccagaagatccgccgcgcgtttgtagctgaggagggttggcgtttagtggccctcgattatagccaaattgaattacgtgtccttgcccatctttctggcgatgagaacctcatccgcgtgtttcaggaaggcaaagacattcacactcaaacggcaagctggatgtttggattatcagctgaagcgatcgatcctttgatgcgtcgtgcagcgaagaccatcaatttcggtgttctctacggtatgagtgcctttcgtttgtcgcaggaattaggcattccctatgaagaagctgcggcgttcattcagcggtactttcaaagctatcccaaagttaaagcatggatcgagaagactctcgaagaaggccgcacacgtggttacgtagagaccttatttggacgtcgccgctatgttcccgatttaaacgctcgcgtgaaatctgtccgtgaagccgccgaacgcatggcgttcaacatgcctgtacagggcacggcagctgacctcatgaaacttgcaatggtgcgcctttttccacaattgcgtgaagttggtgcccgcatgctcttgcaggtccacgatgaactcttgttagaagcgccaaaagagcgtgcggaagaggtggcagccctcgcgaaagaggttatggaaggcgtgtggcccttagcggtgcctcttgaagtcgaagttggtattggcgaggattggctggctgccaaaggataatga

SEQ ID NO: 2736 - protein, 841 aa, synthetic construct
  REGION 1..841: note = Variant of DNA polymerase I from Thermus sp. strain 2.9
MHHHHHHGGSGVLPVFEPKGRVLLVDGHHLAYRNFFALKGLTTSRGEPVQGVYGFAKSLLKALKEDGDVVIVVFDAKAPSFRHEAYEAYKAGRAPTPEDFPRQLALMKELVDLLGLERLEVPGFEADDVLATLAKKAEREGYEVQILTADRDLFQLLSPRISVLHPEGHRITPEWLWEKYGLRPEQWVDFRALAGDPSDNIPGVKGIGEKTALKLLKEWGSLENLLKNLDQVKPESVREKILAHLEDLKLSRELSRVRTDLPLEVDFRRRREPDWEGLKAFLERLEFGSLLHEFGLLESPLPAEEAPWPPPEGAFLGYRLSRPEPMWAELLALAASAQGRVYRAEDPHGALRGLFEVRGLLAKDLAVVALREGLDLPPTDDPMLLAYLLDPSNTTPEGVARRYGGEWTEDAAKRALLAERLHANLLGRLQGEERLLWLYEEVEKPLSRVLAHMEATGVKLDVAYLEALSLEVAAEMRRLEEEVFRLAGHSFRLNSRDQLERVLFDELGLPPIGKTEKTGKRSTSAAVLEALREVHPIVDKILQYRELAKLKGTYIDPLPALVHPKTGRLHTRFNQTATATGRLSSSDPNLQNIPVRTPLGQKIRRAFVAEEGWRLVALDYSQIELRVLAHLSGDENLIRVFQEGKDIHTQTASWMFGLSAEAIDPLMRRAAKTINFGVLYGMSAFRLSQELGIPYEEAAAFIQRYFQSYPKVKAWIEKTLEEGRTRGYVETLFGRRRYVPDLNARVKSVREAAERMAFNMPVQGTAADLMKLAMVRLFPQLREVGARMLLQVHDELLLEAPKERAEEVAALAKEVMEGVWPLAVPLEVEVGIGEDWLAAKG

SEQ ID NO: 2737 - DNA, 2529 bp, synthetic construct
  misc_feature 1..2529: note = Variant of DNA polymerase I from Thermus sp. strain 2.9
  source 1..2529: mol_type = other DNA
atgcaccatcatcatcatcatggcggtagcggcgtgttaccggtgttcgagcctaaaggtcgcgtgcttctggttgatggccatcatctcgcgtatcgtaacttctttgccctgaaaggattaaccaccagctcgggcgagccggtacagggtgtctacggctttgcaaagtcgctcctgaaagctctgaaagaagacggtgatgtggtgattgttgtctttgatgcgaaagcgccaagttttcgccacgaagcgtacgaagcttacaaagccgggcgtgctccaacgccggaagactttcctcgccaattggcgcttatgaaggaattagtggatttgcttggcctcgaacgcttggaagttcccggtttcgaggcagacgacgtattagcgactctcgcaaagaaagccgaacgtgagggctatgaagtccagatcttgacagcagatcgcgatcttttccagcttttatctccgcgcatctcggtgttacacccggaagggcatcgtatcaccccggaatggctctgggagaaatatggtttgcgtcccgaacaatgggtggattttcgcgccttagcaggcgatccgagcgacaatattccgggagttaaaggtatcggcgagaagacggcgctcaagctccttaaagaatgggggtcgttggagaacttgcttaagaatttagatcaggtcaaaccagagtcagtgcgtgagaagattcttgcacacctcgaagacctcaaattaagccgcgaattgtcccgtgtacgcaccgatttgccgctcgaagttgatttccgtcgccgccgcgaacctgactgggagggtcttaaagcgtttttagagcgtcttgaatttggttcgctcttgcatgaattcggccttttagaaagcccgttaccagccgaagaagcaccttggccaccgcccgaaggcgcgtttttaggttaccgtttgagtcgcccggaaccgatgtgggccgaattattggctcttgcagcgtctgcccagggacgtgtgtatcgcgcggaagaccctcatggtgcgctccgcggcctcttcgaagtccgtggactccttgccaaagacttagctgttgttgcattgcgcgaaggtcttgatttacctccgactgatgatccaatgcttcttgcgtacctcttggacccgtcaaacacgacgcccgaaggcgtagcccgtcgttacggcggcgagtggaccgaagatgcagcgaaacgcgcgttattggccgaacgtttgcacgccaatttattaggacgtttgcaaggcgaggaacgtctcctctggctttacgaagaagtggagaaaccattgagtcgcgtgctcgcgcatatggaagctaccggtgtcaaattagacgtggcgtatttggaggctctcagccttgaagttgctgccgaaatgcgccgcttggaggaagaagtattccgtttagcaggccattcctttcgccttaattctcgcgatcagttagaacgtgtgttgttcgatgaacttggtctccctcctatcggcaagacagagaagaccggtaaacgtagcacttcagcggcggttttagaagctcttcgcgaagtccatcccattgtggacaagatcttgcagtaccgcgaactcgcgaaattgaaaggcacctatattgaccctcttccggcattagtccacccgaaaacgggacgcctccatacccgcttcaaccaaacagccacggcgaccggtcgtttgtcctcctctgatccaaaccttcagaatattccagtacgtaccccattgggccagaagatccgccgcgcgtttgtagctgaggagggttggcgtttagtggccctcgattatagccaaattgaattacgtgtccttgcccatctttctggcgatgagaacctcatccgcgtgtttcaggaaggcaaagacattcacactcaaacggcaagctggatgtttggattatcagctgaagcgatcgatcctttgatgcgtcgtgcagcgaagaccatcaatttcggtgttctctacggtatgagtgcctttcgtttgtcgcaggaattaggcattccctatgaagaagctgcggcgttcattcagaaatactttcaaagctatcccaaagttaaagcatggatcgagaagactctcgaagaaggccgcacacgtggttacgtagagaccttatttggacgtcgccgctatgttcccgatttaaacgctcgcgtgaaatctgtccgtgaagccgccgaacgcatggcgttcaacatgcctgtacagggcacggcagctgacctcatgaaacttgcaatggtgcgcctttttccacaattgcgtgaagttggtgcccgcatgctcttgcaggtccacgatgaactcttgttagaagcgccaaaagagcgtgcggaagaggtggcagccctcgcgaaagaggttatggaaggcgtgtggcccttagcggtgcctcttgaagtcgaagttggtattggcgaggattggctggctgccaaaggataatga

SEQ ID NO: 2738 - protein, 841 aa, synthetic construct
  REGION 1..841: note = Variant of DNA polymerase I from Thermus sp. strain 2.9
MHHHHHHGGSGVLPVFEPKGRVLLVDGHHLAYRNFFALKGLTTSSGEPVQGVYGFAKSLLKALKEDGDVVIVVFDAKAPSFRHEAYEAYKAGRAPTPEDFPRQLALMKELVDLLGLERLEVPGFEADDVLATLAKKAEREGYEVQILTADRDLFQLLSPRISVLHPEGHRITPEWLWEKYGLRPEQWVDFRALAGDPSDNIPGVKGIGEKTALKLLKEWGSLENLLKNLDQVKPESVREKILAHLEDLKLSRELSRVRTDLPLEVDFRRRREPDWEGLKAFLERLEFGSLLHEFGLLESPLPAEEAPWPPPEGAFLGYRLSRPEPMWAELLALAASAQGRVYRAEDPHGALRGLFEVRGLLAKDLAVVALREGLDLPPTDDPMLLAYLLDPSNTTPEGVARRYGGEWTEDAAKRALLAERLHANLLGRLQGEERLLWLYEEVEKPLSRVLAHMEATGVKLDVAYLEALSLEVAAEMRRLEEEVFRLAGHSFRLNSRDQLERVLFDELGLPPIGKTEKTGKRSTSAAVLEALREVHPIVDKILQYRELAKLKGTYIDPLPALVHPKTGRLHTRFNQTATATGRLSSSDPNLQNIPVRTPLGQKIRRAFVAEEGWRLVALDYSQIELRVLAHLSGDENLIRVFQEGKDIHTQTASWMFGLSAEAIDPLMRRAAKTINFGVLYGMSAFRLSQELGIPYEEAAAFIQKYFQSYPKVKAWIEKTLEEGRTRGYVETLFGRRRYVPDLNARVKSVREAAERMAFNMPVQGTAADLMKLAMVRLFPQLREVGARMLLQVHDELLLEAPKERAEEVAALAKEVMEGVWPLAVPLEVEVGIGEDWLAAKG

SEQ ID NO: 2739 - DNA, 2529 bp, synthetic construct
  misc_feature 1..2529: note = Variant of DNA polymerase I from Thermus sp. strain 2.9
  source 1..2529: mol_type = other DNA
atgcaccatcatcatcatcatggcggtagcggcgtgttaccggtgttcgagcctaaaggtcgcgtgcttctggttgatggccatcatctcgcgtatcgtaacttctttgccctgaaaggattaaccaccagccgtggcgagccggtacagggtgtctacggctttgcaaagtcgctcctgaaagctctgaaagaagacggtgatgtggtgattgttgtctttgatgcgaaagcgccaagttttcgccacgaagcgtacgaagcttacaaagccgggcgtgctccaacgccggaagactttcctcgccaattggcgcttatgaaggaattagtggatttgcttggcctcgaacgcttggaagttcccggtttcgaggcagacgacgtattagcgactctcgcaaagaaagccgaacgtgagggctatgaagtccagatcttgacagcagatcgcgatcttttccagcttttatctccgcgcatctcggtgttacacccggaagggcatcgtatcaccccggaatggctctgggagaaatatggtttgcgtcccgaacaatgggtggattttcgcgccttagcaggcgatccgagcgacaatattccgggagttaaaggtatcggcgagaagacggcgctcaagctccttaaagaatgggggtcgttggagaacttgcttaagaatttagatcaggtcaaaccagagtcagtgcgtgagaagattcttgcacacctcgaagacctcaaattaagccgcgaattgtcccgtgtacgcaccgatttgccgctcgaagttgatttccgtcgccgccgcgaacctgactgggagggtcttaaagcgtttttagagcgtcttgaatttggttcgctcttgcatgaattcggccttttagaaagcccgttaccagccgaagaagcaccttggccaccgcccgaaggcgcgtttttaggttaccgtttgagtcgcccggaaccgatgtgggccgaattattggctcttgcagcgtctgcccagggacgtgtgtatcgcgcggaagaccctcatggtgcgctccgcggcctcttcgaagtccgtggactccttgccaaagacttagctgttgttgcattgcgcgaaggtcttgatttacctccgactgatgatccaatgcttcttgcgtacctcttggacccgtcaaacacgacgcccgaaggcgtagcccgtcgttacggcggcgagtggaccgaagatgcagcgaaacgcgcgttattggccgaacgtttgcacgccaatttattaggacgtttgcaaggcgaggaacgtctcctctggctttacgaagaagtggagaaaccattgagtcgcgtgctcgcgcatatggaagctaccggtgtcaaattagacgtggcgtatttggaggctctcagccttgaagttgctgccgaaatgcgccgcttggaggaagaagtattccgtttagcaggccattcctttcgccttaattctcgcgatcagttagaacgtgtgttgttcgatgaacttggtctccctcctatcggcaagacagagaagaccggtaaacgtagcacttcagcggcggttttagaagctcttcgcgaagtccatcccattgtggacaagatcttgttgtaccgcgaactcgcgaaattgaaaggcacctatattgaccctcttccggcattagtccacccgaaaacgggacgcctccatacccgcttcaaccaaacagccacggcgaccggtcgtttgtcctcctctgatccaaaccttcagaatattccagtacgtaccccattgggccagaagatccgccgcgcgtttgtagctgaggagggttggcgtttagtggccctcgattatagccaaattgaattacgtgtccttgcccatctttctggcgatgagaacctcatccgcgtgtttcaggaaggcaaagacattcacactcaaacggcaagctggatgtttggattatcagctgaagcgatcgatcctttgatgcgtcgtgcagcgaagaccatcaatttcggtgttctctacggtatgagtgcctttcgtttgtcgcaggaattaggcattccctatgaagaagctgcggcgttcattcagaaatactttcaaagctatcccaaagttaaagcatggatcgagaagactctcgaagaaggccgcacacgtggttacgtagagaccttatttggacgtcgccgctatgttcccgatttaaacgctcgcgtgaaatctgtccgtgaagccgccgaacgcatggcgttcaacatgcctgtacagggcacggcagctgacctcatgaaacttgcaatggtgcgcctttttccacaattgcgtgaagttggtgcccgcatgctcttgcaggtccacgatgaactcttgttagaagcgccaaaagagcgtgcggaagaggtggcagccctcgcgaaagaggttatggaaggcgtgtggcccttagcggtgcctcttgaagtcgaagttggtattggcgaggattggctggctgccaaaggataatga

SEQ ID NO: 2740 - protein, 841 aa, synthetic construct
  REGION 1..841: note = Variant of DNA polymerase I from Thermus sp. strain 2.9
MHHHHHHGGSGVLPVFEPKGRVLLVDGHHLAYRNFFALKGLTTSRGEPVQGVYGFAKSLLKALKEDGDVVIVVFDAKAPSFRHEAYEAYKAGRAPTPEDFPRQLALMKELVDLLGLERLEVPGFEADDVLATLAKKAEREGYEVQILTADRDLFQLLSPRISVLHPEGHRITPEWLWEKYGLRPEQWVDFRALAGDPSDNIPGVKGIGEKTALKLLKEWGSLENLLKNLDQVKPESVREKILAHLEDLKLSRELSRVRTDLPLEVDFRRRREPDWEGLKAFLERLEFGSLLHEFGLLESPLPAEEAPWPPPEGAFLGYRLSRPEPMWAELLALAASAQGRVYRAEDPHGALRGLFEVRGLLAKDLAVVALREGLDLPPTDDPMLLAYLLDPSNTTPEGVARRYGGEWTEDAAKRALLAERLHANLLGRLQGEERLLWLYEEVEKPLSRVLAHMEATGVKLDVAYLEALSLEVAAEMRRLEEEVFRLAGHSFRLNSRDQLERVLFDELGLPPIGKTEKTGKRSTSAAVLEALREVHPIVDKILLYRELAKLKGTYIDPLPALVHPKTGRLHTRFNQTATATGRLSSSDPNLQNIPVRTPLGQKIRRAFVAEEGWRLVALDYSQIELRVLAHLSGDENLIRVFQEGKDIHTQTASWMFGLSAEAIDPLMRRAAKTINFGVLYGMSAFRLSQELGIPYEEAAAFIQKYFQSYPKVKAWIEKTLEEGRTRGYVETLFGRRRYVPDLNARVKSVREAAERMAFNMPVQGTAADLMKLAMVRLFPQLREVGARMLLQVHDELLLEAPKERAEEVAALAKEVMEGVWPLAVPLEVEVGIGEDWLAAKG

SEQ ID NO: 2741 - DNA, 2529 bp, synthetic construct
  misc_feature 1..2529: note = Variant of DNA polymerase I from Thermus sp. strain 2.9
  source 1..2529: mol_type = other DNA
atgcaccatcatcatcatcatggcggtagcggcgtgttaccggtgttcgagcctaaaggtcgcgtgcttctggttgatggccatcatctcgcgtatcgtaacttctttgccctgaaaggattaaccaccagccgtggcgagccggtacagggtgtctacggctttgcaaagtcgctcctgaaagctctgaaagaagacggtgatgtggtgattgttgtctttgatgcgaaagcgccaagttttcgccacgaagcgtacgaagcttacaaagccgggcgtgctccaacgccggaagactttcctcgccaattggcgcttatgaaggaattagtggatttgcttggcctcgaacgcttggaagttcccggtttcgaggcagacgacgtattagcgactctcgcaaagaaagccgaacgtgagggctatgaagtccagatcttgacagcagatcgcgatcttttccagcttttatctccgcgcatctcggtgttacacccggaagggcatcgtatcaccccggaatggctctgggagaaatatggtttgcgtcccgaacaatgggtggattttcgcgccttagcaggcgatccgagcgacaatattccgggagttaaaggtatcggcgagaagacggcgctcaagctccttaaagaatgggggtcgttggagaacttgcttaagaatttagatcaggtcaaaccagagtcagtgcgtgagaagattcttgcacacctcgaagacctcaaattaagccgcgaattgtcccgtgtacgcaccgatttgccgctcgaagttgatttccgtcgccgccgcgaacctgactgggagggtcttaaagcgtttttagagcgtcttgaatttggttcgctcttgcatgaattcggccttttagaaagcccgttaccagccgaagaagcaccttggccaccgcccgaaggcgcgtttttaggttaccgtttgagtcgcccggaaccgatgtgggccgaattattggctcttgcagcgtctgcccagggacgtgtgtatcgcgcggaagaccctcatggtgcgctccgcggcctcttcgaagtccgtggactccttgccaaagacttagctgttgttgcattgcgcgaaggtcttgatttacctccgactgatgatccaatgcttcttgcgtacctcttggacccgtcaaacacgacgcccgaaggcgtagcccgtcgttacggcggcgagtggaccgaagatgcagcgaaacgcgcgttattggccgaacgtttgcacgccaatttattaggacgtttgcaaggcgaggaacgtctcctctggctttacgaagaagtggagaaaccattgagtcgcgtgctcgcgcatatggaagctaccggtgtcaaattagacgtggcgtatttggaggctctcagccttgaagttgctgccgaaatgcgccgcttggaggaagaagtattccgtttagcaggccattcctttcgccttaattctcgcgatcagttagaagttgtgttgttcgatgaacttggtctccctcctatcggcaagacagagaagaccggtaaacgtagcacttcagcggcggttttagaagctcttcgcgaagtccatcccattgtggacaagatcttgcagtaccgcgaactcgcgaaattgaaaggcacctatattgaccctcttccggcattagtccacccgaaaacgggacgcctccatacccgcttcaaccaaacagccacggcgaccggtcgtttgtcctcctctgatccaaaccttcagaatattccagtacgtaccccattgggccagaagatccgccgcgcgtttgtagctgaggagggttggcgtttagtggccctcgattatagccaaattgaattacgtgtccttgcccatctttctggcgatgagaacctcatccgcgtgtttcaggaaggcaaagacattcacactcaaacggcaagctggatgtttggattatcagctgaagcgatcgatcctttgatgcgtcgtgcagcgaagaccatcaatttcggtgttctctacggtatgagtgcctttcgtttgtcgcaggaattaggcattccctatgaagaagctgcggcgttcattcagaaatactttcaaagctatcccaaagttaaagcatggatcgagaagactctcgaagaaggccgcacacgtggttacgtagagaccttatttggacgtcgccgctatgttcccgatttaaacgctcgcgtgaaatctgtccgtgaagccgccgaacgcatggcgttcaacatgcctgtacagggcacggcagctgacctcatgaaacttgcaatggtgcgcctttttccacaattgcgtgaagttggtgcccgcatgctcttgcaggtccacgatgaactcttgttagaagcgccaaaagagcgtgcggaagaggtggcagccctcgcgaaagaggttatggaaggcgtgtggcccttagcggtgcctcttgaagtcgaagttggtattggcgaggattggctggctgccaaaggataatga

SEQ ID NO: 2742 - protein, 841 aa, synthetic construct
  REGION 1..841: note = Variant of DNA polymerase I from Thermus sp. strain 2.9
MHHHHHHGGSGVLPVFEPKGRVLLVDGHHLAYRNFFALKGLTTSRGEPVQGVYGFAKSLLKALKEDGDVVIVVFDAKAPSFRHEAYEAYKAGRAPTPEDFPRQLALMKELVDLLGLERLEVPGFEADDVLATLAKKAEREGYEVQILTADRDLFQLLSPRISVLHPEGHRITPEWLWEKYGLRPEQWVDFRALAGDPSDNIPGVKGIGEKTALKLLKEWGSLENLLKNLDQVKPESVREKILAHLEDLKLSRELSRVRTDLPLEVDFRRRREPDWEGLKAFLERLEFGSLLHEFGLLESPLPAEEAPWPPPEGAFLGYRLSRPEPMWAELLALAASAQGRVYRAEDPHGALRGLFEVRGLLAKDLAVVALREGLDLPPTDDPMLLAYLLDPSNTTPEGVARRYGGEWTEDAAKRALLAERLHANLLGRLQGEERLLWLYEEVEKPLSRVLAHMEATGVKLDVAYLEALSLEVAAEMRRLEEEVFRLAGHSFRLNSRDQLEVVLFDELGLPPIGKTEKTGKRSTSAAVLEALREVHPIVDKILQYRELAKLKGTYIDPLPALVHPKTGRLHTRFNQTATATGRLSSSDPNLQNIPVRTPLGQKIRRAFVAEEGWRLVALDYSQIELRVLAHLSGDENLIRVFQEGKDIHTQTASWMFGLSAEAIDPLMRRAAKTINFGVLYGMSAFRLSQELGIPYEEAAAFIQKYFQSYPKVKAWIEKTLEEGRTRGYVETLFGRRRYVPDLNARVKSVREAAERMAFNMPVQGTAADLMKLAMVRLFPQLREVGARMLLQVHDELLLEAPKERAEEVAALAKEVMEGVWPLAVPLEVEVGIGEDWLAAKG

SEQ ID NO: 2743 - DNA, 2529 bp, synthetic construct
  misc_feature 1..2529: note = Variant of DNA polymerase I from Thermus sp. strain 2.9
  source 1..2529: mol_type = other DNA
atgcaccatcatcatcatcatggcggtagcggcgtgttaccggtgttcgagcctaaaggtcgcgtgcttctggttgatggccatcatctcgcgtatcgtaacttctttgccctgaaaggattaaccaccagccgtggcgagccggtacagggtgtctacggctttgcaaagtcgctcctgaaagctctgaaagaagacggtgatgtggtgattgttgtctttgatgcgaaagcgccaagttttcgccacgaagcgtacgaagcttacaaagccgggcgtgctccaacgccggaagactttcctcgccaattggcgcttatgaaggaattagtggatttgcttggcctcgaacgcttggaagttcccggtttcgaggcagacgacgtattagcgactctcgcaaagaaagccgaacgtgagggctatgaagtccagatcttgacagcagatcgcgatcttttccagcttttatctccgcgcatctcggtgttacacccggaagggcatcgtatcaccccggaatggctctgggagaaatatggtttgcgtcccgaacaatgggtggattttcgcgccttagcaggcgatccgagcgacaatattccgggagttaaaggtatcggcgagaagacggcgctcaagctccttaaagaatgggggtcgttggagaacttgcttaagaatttagatcaggtcaaaccagagtcagtgcgtgagaagattcttgcacacctcgaagacctcaaattaagccgcgaattgtcccgtgtacgcaccgatttgccgctcgaagttgatttcaagcgccgccgcgaacctgactgggagggtcttaaagcgtttttagagcgtcttgaatttggttcgctcttgcatgaattcggccttttagaaagcccgttaccagccgaagaagcaccttggccaccgcccgaaggcgcgtttttaggttaccgtttgagtcgcccggaaccgatgtgggccgaattattggctcttgcagcgtctgcccagggacgtgtgtatcgcgcggaagaccctcatggtgcgctccgcggcctcttcgaagtccgtggactccttgccaaagacttagctgttgttgcattgcgcgaaggtcttgatttacctccgactgatgatccaatgcttcttgcgtacctcttggacccgtcaaacacgacgcccgaaggcgtagcccgtcgttacggcggcgagtggaccgaagatgcagcgaaacgcgcgttattggccgaacgtttgcacgccaatttattaggacgtttgcaaggcgaggaacgtctcctctggctttacgaagaagtggagaaaccattgagtcgcgtgctcgcgcatatggaagctaccggtgtcaaattagacgtggcgtatttggaggctctcagccttgaagttgctgccgaaatgcgccgcttggaggaagaagtattccgtttagcaggccattcctttcgccttaattctcgcgatcagttagaacgtgtgttgttcgatgaacttggtctccctcctatcggcaagacagagaagaccggtaaacgtagcacttcagcggcggttttagaagctcttcgcgaagtccatcccattgtggacaagatcttgcagtaccgcgaactcgcgaaattgaaaggcacctatattgaccctcttccggcattagtccacccgaaaacgggacgcctccatacccgcttcaaccaaacagccacggcgaccggtcgtttgtcctcctctgatccaaaccttcagaatattccagtacgtaccccattgggccagaagatccgccgcgcgtttgtagctgaggagggttggcgtttagtggccctcgattatagccaaattgaattacgtgtccttgcccatctttctggcgatgagaacctcatccgcgtgtttcaggaaggcaaagacattcacactcaaacggcaagctggatgtttggattatcagctgaagcgatcgatcctttgatgcgtcgtgcagcgaagaccatcaatttcggtgttctctacggtatgagtgcctttcgtttgtcgcaggaattaggcattccctatgaagaagctgcggcgttcattcagaaatactttcaaagctatcccaaagttaaagcatggatcgagaagactctcgaagaaggccgcacacgtggttacgtagagaccttatttggacgtcgccgctatgttcccgatttaaacgctcgcgtgaaatctgtccgtgaagccgccgaacgcatggcgttcaacatgcctgtacagggcacggcagctgacctcatgaaacttgcaatggtgcgcctttttccacaattgcgtgaagttggtgcccgcatgctcttgcaggtccacgatgaactcttgttagaagcgccaaaagagcgtgcggaagaggtggcagccctcgcgaaagaggttatggaaggcgtgtggcccttagcggtgcctcttgaagtcgaagttggtattggcgaggattggctggctgccaaaggataatga

SEQ ID NO: 2744 - protein, 841 aa, synthetic construct
  REGION 1..841: note = Variant of DNA polymerase I from Thermus sp. strain 2.9
MHHHHHHGGSGVLPVFEPKGRVLLVDGHHLAYRNFFALKGLTTSRGEPVQGVYGFAKSLLKALKEDGDVVIVVFDAKAPSFRHEAYEAYKAGRAPTPEDFPRQLALMKELVDLLGLERLEVPGFEADDVLATLAKKAEREGYEVQILTADRDLFQLLSPRISVLHPEGHRITPEWLWEKYGLRPEQWVDFRALAGDPSDNIPGVKGIGEKTALKLLKEWGSLENLLKNLDQVKPESVREKILAHLEDLKLSRELSRVRTDLPLEVDFKRRREPDWEGLKAFLERLEFGSLLHEFGLLESPLPAEEAPWPPPEGAFLGYRLSRPEPMWAELLALAASAQGRVYRAEDPHGALRGLFEVRGLLAKDLAVVALREGLDLPPTDDPMLLAYLLDPSNTTPEGVARRYGGEWTEDAAKRALLAERLHANLLGRLQGEERLLWLYEEVEKPLSRVLAHMEATGVKLDVAYLEALSLEVAAEMRRLEEEVFRLAGHSFRLNSRDQLERVLFDELGLPPIGKTEKTGKRSTSAAVLEALREVHPIVDKILQYRELAKLKGTYIDPLPALVHPKTGRLHTRFNQTATATGRLSSSDPNLQNIPVRTPLGQKIRRAFVAEEGWRLVALDYSQIELRVLAHLSGDENLIRVFQEGKDIHTQTASWMFGLSAEAIDPLMRRAAKTINFGVLYGMSAFRLSQELGIPYEEAAAFIQKYFQSYPKVKAWIEKTLEEGRTRGYVETLFGRRRYVPDLNARVKSVREAAERMAFNMPVQGTAADLMKLAMVRLFPQLREVGARMLLQVHDELLLEAPKERAEEVAALAKEVMEGVWPLAVPLEVEVGIGEDWLAAKG

SEQ ID NO: 2745 - DNA, 2529 bp, synthetic construct
  misc_feature 1..2529: note = Variant of DNA polymerase I from Thermus sp. strain 2.9
  source 1..2529: mol_type = other DNA
atgcaccatcatcatcatcatggcggtagcggcgtgttaccggtgttcgagcctaaaggtcgcgtgcttctggttgatggccatcatctcgcgtatcgtaacttctttgccctgaaaggattaaccaccagccgtggcgagccggtacagggtgtctacggctttgcaaagtcgctcctgaaagctctgaaagaagacggtgatgtggtgattgttgtctttgatgcgaaagcgccaagttttcgccacgaagcgtacgaagcttacaaagccgggcgtgctccaacgccggaagactttcctcgccaattggcgcttatgaaggaattagtggatttgcttggcctcgaacgcttggaagttcccggtttcgaggcagacgacgtattagcgactctcgcaaagaaagccgaacgtgagggctatgaagtccagatcttgacagcagatcgcgatcttttccagcttttatctccgcgcatctcggtgttacacccggaagggcatcgtatcaccccggaatggctctgggagaaatatggtttgcgtcccgaacaatgggtggattttcgcgccttagcaggcgatccgagcgacaatattccgggagttaaaggtatcggcgagaagacggcgctcaagctccttaaagaatgggggtcgttggagaacttgcttaagaatttagatcaggtcaaaccagagtcagtgcgtgagaagattcttgcacacctcgaagacctcaaattaagccgcgaattgtcccgtgtacgcaccgatttgccgctcgaagttgatttccgtcgccgccgcgaacctgactgggagggtcttaaagcgtttttagagcgtcttgaatttggttcgctcttgcatgaattcggccttttagaaagcccgttaccagccgaagaagcaccttggccaccgcccgaaggcgcgtttttaggttaccgtttgagtcgcccggaaccgatgtgggccgaattattggctcttgcagcgtctgcccagggacgtgtgtatcgcgcggaagaccctcatggtgcgctccgcggcctcttcgaagtccgtggactccttgccaaagacttagctgttgttgcattgcgcgaaggtcttgatttacctccgactgatgatccaatgcttcttgcgtacctcttggacccgtcaaacacgacgcccgaaggcgtagcccgtcgttacggcggcgagtggaccgaagatgcagcgaaacgcgcgttattggccgaacgtttgcacgccaatttattaggacgtttgcaaggcgaggaacgtctcctctggctttacgaagaagtggagaaaccattgagtcgcgtgctcgcgcatatggaagctaccggtgtcaaattagacgtggcgtatttggaggctctcagccttgaagttgctgccgaaatgcgccgcttggaggaagaagtattccgtttagcaggccattcctttcgccttaattctcgcgatcagttagaacgtgtgttgttcgatgaacttggtctccctcctatcggcaagacagagaagaccggtaaacgtagcacttcagcggcggttttagaagctcttcgcgaagtccatcccattgtggacaagatcttgcagtaccgcgaactcgcgaaattgaaaggcacctatattgaccctcttccggcattagtccacccgaaaacgggacgcctccatacccgcttcaaccaaacagccacggcgaccggtcgtttgtcctcctctgatccaaaccttcagaatattccagtacgtaccccattgggccagaagatccgccgcgcgtttgtagctgaggagggttggcgtttagtggccctcgattatagccaaattgaattacgtgtccttgcccatctttctggcgatgagaacctcatccgcgtgtttcaggaaggcaaagacattcacactcaaacggcaagctggatgtttggattatcagctgaagcgatcgatcctttgatgcgtcgtgcagcgaagaccatcaatttcggtgttctctacggtatgagtgcctttcgtttgtcgcaggaattaggcattccctatgaagaagctgcggcgttcattcagaaatactttcaaagctatcccaaagttaaagcatggatcgagaagactctcgaagaaggccgcacacgtggttacgtagagaccttatttggacgtcgccgctatgttcccgatttaaacgctcgcgtgaaatctgtccgtgaagccgccgaacgcatggcgttcaacatgcctgtacagggcacggcagctgacctcatgaaacttgcaatggtgcgcctttttccacaattgcgtgaagttggtgcccgcatgctcttgcaggtccacgatgaactcttgttagaagcgccaaaagagcgtgcggaagaggtggcagccctcgcgaaaggggttatggaaggcgtgtggcccttagcggtgcctcttgaagtcgaagttggtattggcgaggattggctggctgccaaaggataatga

SEQ ID NO: 2746 - protein, 841 aa, synthetic construct
  REGION 1..841: note = Variant of DNA polymerase I from Thermus sp. strain 2.9
MHHHHHHGGSGVLPVFEPKGRVLLVDGHHLAYRNFFALKGLTTSRGEPVQGVYGFAKSLLKALKEDGDVVIVVFDAKAPSFRHEAYEAYKAGRAPTPEDFPRQLALMKELVDLLGLERLEVPGFEADDVLATLAKKAEREGYEVQILTADRDLFQLLSPRISVLHPEGHRITPEWLWEKYGLRPEQWVDFRALAGDPSDNIPGVKGIGEKTALKLLKEWGSLENLLKNLDQVKPESVREKILAHLEDLKLSRELSRVRTDLPLEVDFRRRREPDWEGLKAFLERLEFGSLLHEFGLLESPLPAEEAPWPPPEGAFLGYRLSRPEPMWAELLALAASAQGRVYRAEDPHGALRGLFEVRGLLAKDLAVVALREGLDLPPTDDPMLLAYLLDPSNTTPEGVARRYGGEWTEDAAKRALLAERLHANLLGRLQGEERLLWLYEEVEKPLSRVLAHMEATGVKLDVAYLEALSLEVAAEMRRLEEEVFRLAGHSFRLNSRDQLERVLFDELGLPPIGKTEKTGKRSTSAAVLEALREVHPIVDKILQYRELAKLKGTYIDPLPALVHPKTGRLHTRFNQTATATGRLSSSDPNLQNIPVRTPLGQKIRRAFVAEEGWRLVALDYSQIELRVLAHLSGDENLIRVFQEGKDIHTQTASWMFGLSAEAIDPLMRRAAKTINFGVLYGMSAFRLSQELGIPYEEAAAFIQKYFQSYPKVKAWIEKTLEEGRTRGYVETLFGRRRYVPDLNARVKSVREAAERMAFNMPVQGTAADLMKLAMVRLFPQLREVGARMLLQVHDELLLEAPKERAEEVAALAKGVMEGVWPLAVPLEVEVGIGEDWLAAKG

SEQ ID NO: 2747 - DNA, 2529 bp, synthetic construct
  misc_feature 1..2529: note = Variant of DNA polymerase I from Thermus sp. strain 2.9
  source 1..2529: mol_type = other DNA
atgcaccatcatcatcatcatggcggtagcggcgtgttaccggtgttcgagcctaaaggtcgcgtgcttctggttgatggccatcatctcgcgtatcgtaacttctttgccctgaaaggattaaccaccagccgtggcgagccggtacagggtgtctacggctttgcaaagtcgctcctgaaagctctgaaagaagacggtgatgtggtgattgttgtctttgatgcgaaagcgccaagttttcgccacgaagcgtacgaagcttacaaagccgggcgtgctccaacgccggaagactttcctcgccaattggcgcttatgaaggaattagtggatttgcttggcctcgaacgcttggaagttcccggtttcgaggcagacgacgtattagcgactctcgcaaagaaagccgaacgtgagggctatgaagtccagatcttgacagcagatcgcgatcttttccagcttttatctccgcgcatctcggtgttacacccggaagggcatcgtatcaccccggaatggctctgggagaaatatggtttgcgtcccgaacaatgggtggattttcgcgccttagcaggcgatccgagcgacaatattccgggagttaaaggtatcggcgagaagacggcgctcaagctccttaaagaatgggggtcgttggagaacttgcttaagaatttagatcaggtcaaaccagagtcagtgcgtgagaagattcttgcacacctcgaagacctcaaattaagccgcgaattgtcccgtgtacgcaccgatttgccgctcgaagttgatttccgtcgccgccgcgaacctgactgggagggtcttaaagcgtttttagagcgtcttgaatttggttcgctcttgcatgaattcggccttttagaaagcccgttaccagccgaagaagcaccttggccaccgcccgaaggcgcgtttttaggttaccgtttgagtcgcccggaaccgatgtgggccgaattattggctcttgcagcgtctgcccagggacgtgtgtatcgcgcggaagaccctcatggtgcgctccgcggcctcttcgaagtccgtggactccttgccaaagacttagctgttgttgcattgcgcgaaggtcttgatttacctccgactgatgatccaatgcttcttgcgtacctcttggacccgtcaaacacgacgcccgaaggcgtagcccgtcgttacggcggcgagtggaccgaagatgcagcgaaacgcgcgttattggccgaacgtttgcacgccaatttattaggacgtttgcaaggcgaggaacgtctcctctggctttacgaagaagtggagaaaccattgagtcgcgtgctcgcgcatatggaagctaccggtgtcaaattagacgtggcgtatttggaggctctcagccttgaagttgctgccgaaatgcgccgcttggaggaagaagtattccgtttagcaggccattcctttcgccttaattctcgcgatcagttagaacgtgtgttgttcgatgaacttggtctccctcctatcggcaagacagagaagaccggtaaacgtagcacttcagcggcggttttagaagctcttcgcgaagtccatcccattgtggacaagatcttgcagtaccgcgaactcgcgaaattgaaaggcacctatattgaccctcttccggcattagtccacccgaaaacgggacgcctccatacccgcttcaaccaaacagccacggcgaccggtcgtttgtcctcctctgatccaaaccttcagaatattccagtacgtaccccattgggccagaagatccgccgcgcgtttgtagctgaggagggttggcgtttagtggccctcgattatagccaaattgaattacgtgtccttgcccatctttctggcgatgagaacctcatccgcgtgtttcaggaaggcaaagacattcacactcaaacggcaagctggatgtttggattatcagctgaagcgatcgatcctttgatgcgtcgtgcagcgaagaccatcaatttcggtgttctctacggtatgagtgcctttcgtttgtcgcaggaattaggcattccctatgaagaagctgcggcgttcattcagaaatactttcaaagctatcccaaagttaaagcatggatcgagaagactctcgaagaaggccgcacacgtggttacgtagagaccttatttggacgtcgccgctatgttcccgatttaaacgctcgcgtgaaatctgtccgtgaagccgccgaacgcatggcgttcaacatgcctgtacagggcacggcagctgacctcatgaaacttgcaatggtgcgcctttttccacaattgcgtgaagttggtgcccgcatgctcttgcaggtccacgatgaactcttgttagaagcgccaaaagagcgtgcggaagaggtggcagccctcgcgaaagaggttatggaaggcgtgtggcccttagcggtgcctcttcgtgtcgaagttggtattggcgaggattggctggctgccaaaggataatga

SEQ ID NO: 2748 - protein, 841 aa, synthetic construct
  REGION 1..841: note = Variant of DNA polymerase I from Thermus sp. strain 2.9
MHHHHHHGGSGVLPVFEPKGRVLLVDGHHLAYRNFFALKGLTTSRGEPVQGVYGFAKSLLKALKEDGDVVIVVFDAKAPSFRHEAYEAYKAGRAPTPEDFPRQLALMKELVDLLGLERLEVPGFEADDVLATLAKKAEREGYEVQILTADRDLFQLLSPRISVLHPEGHRITPEWLWEKYGLRPEQWVDFRALAGDPSDNIPGVKGIGEKTALKLLKEWGSLENLLKNLDQVKPESVREKILAHLEDLKLSRELSRVRTDLPLEVDFRRRREPDWEGLKAFLERLEFGSLLHEFGLLESPLPAEEAPWPPPEGAFLGYRLSRPEPMWAELLALAASAQGRVYRAEDPHGALRGLFEVRGLLAKDLAVVALREGLDLPPTDDPMLLAYLLDPSNTTPEGVARRYGGEWTEDAAKRALLAERLHANLLGRLQGEERLLWLYEEVEKPLSRVLAHMEATGVKLDVAYLEALSLEVAAEMRRLEEEVFRLAGHSFRLNSRDQLERVLFDELGLPPIGKTEKTGKRSTSAAVLEALREVHPIVDKILQYRELAKLKGTYIDPLPALVHPKTGRLHTRFNQTATATGRLSSSDPNLQNIPVRTPLGQKIRRAFVAEEGWRLVALDYSQIELRVLAHLSGDENLIRVFQEGKDIHTQTASWMFGLSAEAIDPLMRRAAKTINFGVLYGMSAFRLSQELGIPYEEAAAFIQKYFQSYPKVKAWIEKTLEEGRTRGYVETLFGRRRYVPDLNARVKSVREAAERMAFNMPVQGTAADLMKLAMVRLFPQLREVGARMLLQVHDELLLEAPKERAEEVAALAKEVMEGVWPLAVPLRVEVGIGEDWLAAKG

SEQ ID NO: 2749 - DNA, 2529 bp, synthetic construct
  misc_feature 1..2529: note = Variant of DNA polymerase I from Thermus sp. strain 2.9
  source 1..2529: mol_type = other DNA
atgcaccatcatcatcatcatggcggtagcggcgtgttaccggtgttcgagcctaaaggtcgcgtgcttctggttgatggccatcatctcgcgtatcgtaacttctttgccctgaaaggattaaccaccagccgcggcgagccggtacagggtgtctacggctttgcaaagtcgctcctgaaagctctgaaagaagacggtgatgtggtgattgttgtctttgatgcgaaagcgccaagttttcgccacgaagcgtacgaagcttacaaagccgggcgtgctccaacgccggaagactttcctcgccaattggcgcttatgaaggaattagtggatttgcttggcctcgaacgcttggaagttcccggtttcgaggcagacgacgtattagcgactctcgcaaagaaagccgaacgtgagggctatgaagtccagatcttgacagcagatcgcgatcttttccagcttttatctccgcgcatctcggtgttacacccggaagggcatcgtatcaccccggaatggctctgggagaaatatggtttgcgtcccgaacaatgggtggattttcgcgccttagcaggcgatccgagcgacaatattccgggagttaaaggtatcggcgagaagacggcgctcaagctccttaaagaatgggggtcgttggagaacttgcttaagaatttagatcaggtcaaaccagagtcagtgcgtgagaagattcttaatcacctcgaagacctcaaattaagccgcgaattgtcccgtgtacgcaccgatttgccgctcgaagttgatttcggtcgccgccgcgaacctgactgggagggtcttaaagcgtttttagagcgtcttgaatttggttcgctcttgcatgaattcggccttttagaaagcccgttaccagccgaagaagcaccttggccaccgcccgaaggcgcgtttttaggttaccgtttgagtcgcccggaaccgatgtgggccgaattactggctcttgcagcgtctgcccagggacgtgtgtatcgcgcggaagaccctcatggtgcgctccgcggcctcttcgaagtccgtggactccttgccaaagacttagctgttgttgcattgcgcgaaggtcttgatttacctccgactgatgatccaatgcttcttgcgtacctcttggacccgtcaaacacgacgcccgaaggcgtagcccgtcgttacggcggcgagtggaccgaagatgcagcgaaacgcgcgttattggccgaacgtttgcacgccaatttattaggacgtttgcaaggcgaggaacgtctcctctggctttacgaagaagtggagaaaccattgagtcgcgtgctcgcgcatatggaagctaccggtgtcaaattagacgtggcgtatttggaggctctcagccttgaagttgctgccgaaatgcgccgcttggaggaagaagtattccgtttagcaggccattcctttcgccttaattctcgcgatcagttagaacgtgtgttgttcgatgaacttggtctccctcctatcggcaagacagagaagaccggtaaacgtagcacttcagcggcggttttagaagctcttcgcgaagtccatcccattgtggacaagatcttgcaataccgcgaactcgcgaaattgaaaggcacctatattgaccctcttccggcattagtccacccgaaaacgggacgcctccatacccgcttcaaccaaacagccacggcgaccggtcgtttgtcctcctctgatccaaaccttcagaatattccagtacgtaccccattgggccagaagatccgccgcgcgtttgtagctgaggagggttggcgtttagtggccctcgattatagccaaattgaattacgtgtccttgcccatctttctggcgatgagaacctcatccgcgtgtttcaggaaggcaaagacattcacactcaaacggcaagctggatgtttggattatcagctgaagcgatcgatcctttgatgcgtcgtgcagcgaagaccatcaatttcggtgttctctacggtatgagtgcctttcgtttgtcgcaggaattaggcattccctatgaagaagctgcggcgttcattcagaaatactttcaaagctatcccaaagttaaagcatggatcgagaagactctcgaagaaggccgcacacgtggttacgtagagaccttatttggacgtcgccgctatgttcccgatttaaacgctcgcgtgaaatctgtccgtgaagccgccgaacgcatggcgttcaacatgcctgtacagggcacggcagctgacctcatgaaacttgcaatggtgcgcctttttccacaattgcgtgaagttggtgcccgcatgctcttgcaggtccacgatgaactcttgttagaagcgccaaaagagcgtgcggaagaggtggcagccctcgcgaaagaggttatggaaggcgtgtggcccttagcggtgcctcttgaagtcgaagttggtattggcgaggattggctggctgccaaaggataatga

SEQ ID NO: 2750 - protein, 841 aa, synthetic construct
  REGION 1..841: note = Variant of DNA polymerase I from Thermus sp. strain 2.9
MHHHHHHGGSGVLPVFEPKGRVLLVDGHHLAYRNFFALKGLTTSRGEPVQGVYGFAKSLLKALKEDGDVVIVVFDAKAPSFRHEAYEAYKAGRAPTPEDFPRQLALMKELVDLLGLERLEVPGFEADDVLATLAKKAEREGYEVQILTADRDLFQLLSPRISVLHPEGHRITPEWLWEKYGLRPEQWVDFRALAGDPSDNIPGVKGIGEKTALKLLKEWGSLENLLKNLDQVKPESVREKILNHLEDLKLSRELSRVRTDLPLEVDFGRRREPDWEGLKAFLERLEFGSLLHEFGLLESPLPAEEAPWPPPEGAFLGYRLSRPEPMWAELLALAASAQGRVYRAEDPHGALRGLFEVRGLLAKDLAVVALREGLDLPPTDDPMLLAYLLDPSNTTPEGVARRYGGEWTEDAAKRALLAERLHANLLGRLQGEERLLWLYEEVEKPLSRVLAHMEATGVKLDVAYLEALSLEVAAEMRRLEEEVFRLAGHSFRLNSRDQLERVLFDELGLPPIGKTEKTGKRSTSAAVLEALREVHPIVDKILQYRELAKLKGTYIDPLPALVHPKTGRLHTRFNQTATATGRLSSSDPNLQNIPVRTPLGQKIRRAFVAEEGWRLVALDYSQIELRVLAHLSGDENLIRVFQEGKDIHTQTASWMFGLSAEAIDPLMRRAAKTINFGVLYGMSAFRLSQELGIPYEEAAAFIQKYFQSYPKVKAWIEKTLEEGRTRGYVETLFGRRRYVPDLNARVKSVREAAERMAFNMPVQGTAADLMKLAMVRLFPQLREVGARMLLQVHDELLLEAPKERAEEVAALAKEVMEGVWPLAVPLEVEVGIGEDWLAAKG

SEQ ID NO: 2751 - DNA, 2529 bp, synthetic construct
  misc_feature 1..2529: note = Variant of DNA polymerase I from Thermus sp. strain 2.9
  source 1..2529: mol_type = other DNA
atgcaccatcatcatcatcatggcggtagcggcgtgttaccggtgttcgagcctaaaggtcgcgtgcttctggttgatggccatcatctcgcgtatcgtaacttctttgccctgaaaggattaaccaccagccgtggcgagccggtacagggtgtctacggctttgcaaagtcgctcctgaaagctctgaaagaagacggtgatgtggtgattgttgtctttgatgcgaaagcgccaagttttcgccacgaagcgtacgaagcttacaaagccgggcgtgctccaacgccggaagactttcctcgccaattggcgcttatgaaggaattagtggatttgcttggcctcgaacgcttggaagttcccggtttcgaggcagacgacgtattagcgactctcgcaaagaaagccgaacgtgagggctatgaagtccagatcttgacagcagatcgcgatcttttccagcttttatctccgcgcatctcggtgttacacccggaagggcatcgtatcaccccggaatggctctgggagaaatatggtttgcgtcccgaacaatgggtggattttcgcgccttagcaggcgatccgagcgacaatattccgggagttaaaggtatcggcgagaagacggcgctcaagctccttaaagaatgggggtcgttggagaacttgcttaagaatttagatcaggtcaaaccagagtcagtgcgtgagaagattcttgcacacctcgaagacctcaaattaagccgcgaattgtcccgtgtacgcaccgatttgccgctcgaagttgatttccgtcgccgccgcgaacctgactgggagggtcttaaagcgtttttagagcgtcttgaatttggttcgctcttgcatgaattcggccttttagaaagctcgttaccagccgaagaagcaccttggccaccgcccgaaggcgcgtttttaggttaccgtttgagtcgcccggaaccgatgtgggccgaattattggctcttgcagcgtctgcccagggacgtgtgtatcgcgcggaagaccctcatggtgcgctccgcggcctcttcgaagtccgtggactccttgccaaagacttagctgttgttgcattgcgcgaaggtcttgatttacctccgactgatgatccaatgcttcttgcgtacctcttggacccgtcaaacacgacgcccgaaggcgtagcccgtcgttacggcggcgagtggaccgaagatgcagcgaaacgcgcgttattggccgaacgtttgcacgccaatttattaggacgtttgcaaggcgaggaacgtctcctctggctttacgaagaagtggagaaaccattgagtcgcgtgctcgcgcatatggaagctaccggtgtcaaattagacgtggcgtatttggaggctctcagccttgaagttgctgccgaaatgcgccgcttggaggaagaagtattccgtttagcaggccattcctttcgccttaattctcgcgatcagttagaacgtgtgttgttcgatgaacttggtctccctcctatcggcaagacagagaagaccggtaaacgtagcacttcagcggcggttttagaagctcttcgcgaagtccatcccattgtggacaagatcttgcagtaccgcgaactcgcgaaattgaaaggcacctatattgaccctcttccggcattagtccacccgaaaacgggacgcctccatacccgcttcaaccaaacagccacggcgaccggtcgtttgtcctcctctgatccaaaccttcagaatattccagtacgtaccccattgggccagaagatccgccgcgcgtttgtagctgaggagggttggcgtttagtggccctcgattatagccaaattgaattacgtgtccttgcccatctttctggcgatgagaacctcatccgcgtgtttcaggaaggcaaagacattcacactcaaacggcaagctggatgtttggattatcagctgaagcgatcgatcctttgatgcgtcgtgcagcgaagaccatcaatttcggtgttctctacggtatgagtgcctttcgtttgtcgcaggaattaggcattccctatgaagaagctgcggcgttcattcagaaatactttcaaagctatcccaaagttaaagcatggatcgagaagactctcgaagaaggccgcacacgtggttacgtagagaccttatttggacgtcgccgctatgttcccgatttaaacgctcgcgtgaaatctgtccgtgaagccgccgaacgcatggcgttcaacatgcctgtacagggcacggcagctgacctcatgaaacttgcaatggtgcgcctttttccacaattgcgtgaagttggtgcccgcatgctcttgcaggtccacgatgaactcttgttagaagcgccaaaagagcgtgcggaagaggtggcagccctcgcgaaagaggttatggaaggcgtgtggcccttagcggtgcctcttgaagtcgaagttggtattggcgaggattggctggctgccaaaggataatga

SEQ ID NO: 2752 - protein, 841 aa, synthetic construct
  REGION 1..841: note = Variant of DNA polymerase I from Thermus sp. strain 2.9
MHHHHHHGGSGVLPVFEPKGRVLLVDGHHLAYRNFFALKGLTTSRGEPVQGVYGFAKSLLKALKEDGDVVIVVFDAKAPSFRHEAYEAYKAGRAPTPEDFPRQLALMKELVDLLGLERLEVPGFEADDVLATLAKKAEREGYEVQILTADRDLFQLLSPRISVLHPEGHRITPEWLWEKYGLRPEQWVDFRALAGDPSDNIPGVKGIGEKTALKLLKEWGSLENLLKNLDQVKPESVREKILAHLEDLKLSRELSRVRTDLPLEVDFRRRREPDWEGLKAFLERLEFGSLLHEFGLLESSLPAEEAPWPPPEGAFLGYRLSRPEPMWAELLALAASAQGRVYRAEDPHGALRGLFEVRGLLAKDLAVVALREGLDLPPTDDPMLLAYLLDPSNTTPEGVARRYGGEWTEDAAKRALLAERLHANLLGRLQGEERLLWLYEEVEKPLSRVLAHMEATGVKLDVAYLEALSLEVAAEMRRLEEEVFRLAGHSFRLNSRDQLERVLFDELGLPPIGKTEKTGKRSTSAAVLEALREVHPIVDKILQYRELAKLKGTYIDPLPALVHPKTGRLHTRFNQTATATGRLSSSDPNLQNIPVRTPLGQKIRRAFVAEEGWRLVALDYSQIELRVLAHLSGDENLIRVFQEGKDIHTQTASWMFGLSAEAIDPLMRRAAKTINFGVLYGMSAFRLSQELGIPYEEAAAFIQKYFQSYPKVKAWIEKTLEEGRTRGYVETLFGRRRYVPDLNARVKSVREAAERMAFNMPVQGTAADLMKLAMVRLFPQLREVGARMLLQVHDELLLEAPKERAEEVAALAKEVMEGVWPLAVPLEVEVGIGEDWLAAKG

SEQ ID NO: 2753 - DNA, 2529 bp, synthetic construct
  misc_feature 1..2529: note = Variant of DNA polymerase I from Thermus sp. strain 2.9
  source 1..2529: mol_type = other DNA
atgcaccatcatcatcatcatggcggtagcggcgtgttaccggtgttcgagcctaaaggtcgcgtgcttctggttgatggccatcatctcgcgtatcgtaacttctttgccctgaaaggattaaccaccagccgtggcgagccggtacagggtgtctacggctttgcaaagtcgctcctgaaagctctgaaagaagacggtgatgtggtgattgttgtctttgatgcgaaagcgccaagttttcgccacgaagcgtacgaagcttacaaagccgggcgtgctccaacgccggaagactttcctcgccaattggcgcttatgaaggaattagtggatttgcttggcctcgaacgcttggaagttcccggtttcgaggcagacgacgtattagcgactctcgcaaagaaagccgaacgtgagggctatgaagtccagatcttgacagcagatcgcgatcttttccagcttttatctccgcgcatctcggtgttacacccggaagggcatcgtatcaccccggaatggctctgggagaaatatggtttgcgtcccgaacaatgggtggattttcgcgccttagcaggcgatccgagcgacaatattccgggagttaaaggtatcggcgagaagacggcgctcaagctccttaaagaatgggggtcgttggagaacttgcttaagaatttagatcaggtcaaaccagagtcagtgcgtgagaagattcttgcacacctcgaagacctcaaattaagccgcgaattgtcccgtgtacgcaccgatttgccgctcgaagttgatttccgtcgccgccgcgaacctgactgggagggtcttaaagcgtttttagagcgtcttgaatttggttcgctcttgcatgaattcggccttttagaaagcatgttaccagccgaagaagcaccttggccaccgcccgaaggcgcgtttttaggttaccgtttgagtcgcccggaaccgatgtgggccgaattattggctcttgcagcgtctgcccagggacgtgtgtatcgcgcggaagaccctcatggtgcgctccgcggcctcttcgaagtccgtggactccttgccaaagacttagctgttgttgcattgcgcgaaggtcttgatttacctccgactgatgatccaatgcttcttgcgtacctcttggacccgtcaaacacgacgcccgaaggcgtagcccgtcgttacggcggcgagtggaccgaagatgcagcgaaacgcgcgttattggccgaacgtttgcacgccaatttattaggacgtttgcaaggcgaggaacgtctcctctggctttacgaagaagtggagaaaccattgagtcgcgtgctcgcgcatatggaagctaccggtgtcaaattagacgtggcgtatttggaggctctcagccttgaagttgctgccgaaatgcgccgcttggaggaagaagtattccgtttagcaggccattcctttcgccttaattctcgcgatcagttagaacgtgtgttgttcgatgaacttggtctccctcctatcggcaagacagagaagaccggtaaacgtagcacttcagcggcggttttagaagctcttcgcgaagtccatcccattgtggacaagatcttgcagtaccgcgaactcgcgaaattgaaaggcacctatattgaccctcttccggcattagtccacccgaaaacgggacgcctccatacccgcttcaaccaaacagccacggcgaccggtcgtttgtcctcctctgatccaaaccttcagaatattccagtacgtaccccattgggccagaagatccgccgcgcgtttgtagctgaggagggttggcgtttagtggccctcgattatagccaaattgaattacgtgtccttgcccatctttctggcgatgagaacctcatccgcgtgtttcaggaaggcaaagacattcacactcaaacggcaagctggatgtttggattatcagctgaagcgatcgatcctttgatgcgtcgtgcagcgaagaccatcaatttcggtgttctctacggtatgagtgcctttcgtttgtcgcaggaattaggcattccctatgaagaagctgcggcgttcattcagaaatactttcaaagctatcccaaagttaaagcatggatcgagaagactctcgaagaaggccgcacacgtggttacgtagagaccttatttggacgtcgccgctatgttcccgatttaaacgctcgcgtgaaatctgtccgtgaagccgccgaacgcatggcgttcaacatgcctgtacagggcacggcagctgacctcatgaaacttgcaatggtgcgcctttttccacaattgcgtgaagttggtgcccgcatgctcttgcaggtccacgatgaactcttgttagaagcgccaaaagagcgtgcggaagaggtggcagccctcgcgaaagaggttatggaaggcgtgtggcccttagcggtgcctcttgaagtcgaagttggtattggcgaggattggctggctgccaaaggataatga

SEQ ID NO: 2754 - protein, 841 aa, synthetic construct
  REGION 1..841: note = Variant of DNA polymerase I from Thermus sp. strain 2.9
MHHHHHHGGSGVLPVFEPKGRVLLVDGHHLAYRNFFALKGLTTSRGEPVQGVYGFAKSLLKALKEDGDVVIVVFDAKAPSFRHEAYEAYKAGRAPTPEDFPRQLALMKELVDLLGLERLEVPGFEADDVLATLAKKAEREGYEVQILTADRDLFQLLSPRISVLHPEGHRITPEWLWEKYGLRPEQWVDFRALAGDPSDNIPGVKGIGEKTALKLLKEWGSLENLLKNLDQVKPESVREKILAHLEDLKLSRELSRVRTDLPLEVDFRRRREPDWEGLKAFLERLEFGSLLHEFGLLESMLPAEEAPWPPPEGAFLGYRLSRPEPMWAELLALAASAQGRVYRAEDPHGALRGLFEVRGLLAKDLAVVALREGLDLPPTDDPMLLAYLLDPSNTTPEGVARRYGGEWTEDAAKRALLAERLHANLLGRLQGEERLLWLYEEVEKPLSRVLAHMEATGVKLDVAYLEALSLEVAAEMRRLEEEVFRLAGHSFRLNSRDQLERVLFDELGLPPIGKTEKTGKRSTSAAVLEALREVHPIVDKILQYRELAKLKGTYIDPLPALVHPKTGRLHTRFNQTATATGRLSSSDPNLQNIPVRTPLGQKIRRAFVAEEGWRLVALDYSQIELRVLAHLSGDENLIRVFQEGKDIHTQTASWMFGLSAEAIDPLMRRAAKTINFGVLYGMSAFRLSQELGIPYEEAAAFIQKYFQSYPKVKAWIEKTLEEGRTRGYVETLFGRRRYVPDLNARVKSVREAAERMAFNMPVQGTAADLMKLAMVRLFPQLREVGARMLLQVHDELLLEAPKERAEEVAALAKEVMEGVWPLAVPLEVEVGIGEDWLAAKG

SEQ ID NO: 2755 - DNA, 2529 bp, synthetic construct
  misc_feature 1..2529: note = Variant of DNA polymerase I from Thermus sp. strain 2.9
  source 1..2529: mol_type = other DNA
atgcaccatcatcatcatcatggcggtagcggcgtgttaccggtgttcgagcctaaaggtcgcgtgcttctggttgatggccatcatctcgcgtatcgtaacttctttgccctgaaaggattaaccaccagccgtggcgagccggtacagggtgtctacggctttgcaaagtcgctcctgaaagctctgaaagaagacggtgatgtggtgattgttgtctttgatgcgaaagcgccaagttttcgccacgaagcgtacgaagcttacaaagccgggcgtgctccaacgccggaagactttcctcgccaattggcgcttatgaaggaattagtggatttgcttggcctcgaacgcttggaagttcccggtttcgaggcagacgacgtattagcgactctcgcaaagaaagccgaacgtgagggctatgaagtccagatcttgacagcagatcgcgatcttttccagcttttatctccgcgcatctcggtgttacacccggaagggcatcgtatcaccccggaatggctctgggagaaatatggtttgcgtcccgaacaatgggtggattttcgcgccttagcaggcgatccgagcgacaatattccgggagttaaaggtatcggcgagaagacggcgctcaagctccttaaagaatgggggtcgttggagaacttgcttaagaatttagatcaggtcaaaccagagtcagtgcgtgagaagattcttgcacacctcgaagacctcaaattaagccgcgaattgtcccgtgtacgcaccgatttgccgctcgaagttgatttccgtcgccgccgcgaacctgactgggagggtcttaaagcgtttttagagcgtcttgaatttggttcgctcttgcatgaattcggccttttagaaagcccgttaccagccgaagaagcaccttggccaccgcccgaaggcgcgtttttaggttaccgtttgagtcgcccggaaccgatgtgggccgaattattggctcttgcagcgtctgcccagggacgtgtgtatcgcgcggaagaccctcatggtgcgctccgcggcctcttcgaagtccgtggactccttgccaaagacttagctgttgttgcattgcgcgaaggtcttgatttacctccgactgatgatccaatgcttcttgcgtacctcttggacccgtcaaacacgacgcccgaaggcgtagcccgtcgttacggcggcgagtggaccgaagatgcagcgaaacgcgcgttattggccgaacgtttgcacgccaatttattaggacgtttgcaaggcgaggaacgtctcctctggctttacgaagaagtggagaaaccattgagtcgcgtgctcgcgcatatggaagctaccggtgtcaaattagacgtggcgtatttggaggctctcagccttgaagttgctgccgaaatgcgccgcttggaggaagaagtattccgtttagcaggccattcctttcgccttaattctcgcgatcagttagaacgtgtgttgttcgatgaacttggtctccctcctatcggcaagacagagaagaccggtaaacgtagcacttcagcggcggttttagaagctcttcgcgaatggcatcccattgtggacaagatcttgcagtaccgcgaactcgcgaaattgaaaggcacctatattgaccctcttccggcattagtccacccgaaaacgggacgcctccatacccgcttcaaccaaacagccacggcgaccggtcgtttgtcctcctctgatccaaaccttcagaatattccagtacgtaccccattgggccagaagatccgccgcgcgtttgtagctgaggagggttggcgtttagtggccctcgattatagccaaattgaattacgtgtccttgcccatctttctggcgatgagaacctcatccgcgtgtttcaggaaggcaaagacattcacactcaaacggcaagctggatgtttggattatcagctgaagcgatcgatcctttgatgcgtcgtgcagcgaagaccatcaatttcggtgttctctacggtatgagtgcctttcgtttgtcgcaggaattaggcattccctatgaagaagctgcggcgttcattcagaaatactttcaaagctatcccaaagttaaagcatggatcgagaagactctcgaagaaggccgcacacgtggttacgtagagaccttatttggacgtcgccgctatgttcccgatttaaacgctcgcgtgaaatctgtccgtgaagccgccgaacgcatggcgttcaacatgcctgtacagggcacggcagctgacctcatgaaacttgcaatggtgcgcctttttccacaattgcgtgaagttggtgcccgcatgctcttgcaggtccacgatgaactcttgttagaagcgccaaaagagcgtgcggaagaggtggcagccctcgcgaaagaggttatggaaggcgtgtggcccttagcggtgcctcttgaagtcgaagttggtattggcgaggattggctggctgccaaaggataatga

SEQ ID NO: 2756 - protein, 841 aa, synthetic construct
  REGION 1..841: note = Variant of DNA polymerase I from Thermus sp. strain 2.9
MHHHHHHGGSGVLPVFEPKGRVLLVDGHHLAYRNFFALKGLTTSRGEPVQGVYGFAKSLLKALKEDGDVVIVVFDAKAPSFRHEAYEAYKAGRAPTPEDFPRQLALMKELVDLLGLERLEVPGFEADDVLATLAKKAEREGYEVQILTADRDLFQLLSPRISVLHPEGHRITPEWLWEKYGLRPEQWVDFRALAGDPSDNIPGVKGIGEKTALKLLKEWGSLENLLKNLDQVKPESVREKILAHLEDLKLSRELSRVRTDLPLEVDFRRRREPDWEGLKAFLERLEFGSLLHEFGLLESPLPAEEAPWPPPEGAFLGYRLSRPEPMWAELLALAASAQGRVYRAEDPHGALRGLFEVRGLLAKDLAVVALREGLDLPPTDDPMLLAYLLDPSNTTPEGVARRYGGEWTEDAAKRALLAERLHANLLGRLQGEERLLWLYEEVEKPLSRVLAHMEATGVKLDVAYLEALSLEVAAEMRRLEEEVFRLAGHSFRLNSRDQLERVLFDELGLPPIGKTEKTGKRSTSAAVLEALREWHPIVDKILQYRELAKLKGTYIDPLPALVHPKTGRLHTRFNQTATATGRLSSSDPNLQNIPVRTPLGQKIRRAFVAEEGWRLVALDYSQIELRVLAHLSGDENLIRVFQEGKDIHTQTASWMFGLSAEAIDPLMRRAAKTINFGVLYGMSAFRLSQELGIPYEEAAAFIQKYFQSYPKVKAWIEKTLEEGRTRGYVETLFGRRRYVPDLNARVKSVREAAERMAFNMPVQGTAADLMKLAMVRLFPQLREVGARMLLQVHDELLLEAPKERAEEVAALAKEVMEGVWPLAVPLEVEVGIGEDWLAAKG

SEQ ID NO: 2757 - DNA, 2529 bp, synthetic construct
  misc_feature 1..2529: note = Variant of DNA polymerase I from Thermus sp. strain 2.9
  source 1..2529: mol_type = other DNA
atgcaccatcatcatcatcatggcggtagcggcgtgttaccggtgttcgagcctaaaggtcgcgtgcttctggttgatggccatcatctcgcgtatcgtaacttctttgccctgaaaggattaaccaccagccgtggcgagccggtacagggtgtctacggctttgcaaagtcgctcctgaaagctctgaaagaagacggtgatgtggtgattgttgtctttgatgcgaaagcgccaagttttcgccacgaagcgtacgaagcttacaaagccgggcgtgctccaacgccggaagactttcctcgccaattggcgcttatgaaggaattagtggatttgcttggcctcgaacgcttggaagttcccggtttcgaggcagacgacgtattagcgactctcgcaaagaaagccgaacgtgagggctatgaagtccagatcttgacagcagatcgcgatcttttccagcttttatctccgcgcatctcggtgttacacccggaagggcatcgtatcaccccggaatggctctgggagaaatatggtttgcgtcccgaacaatgggtggattttcgcgccttagcaggcgatccgagcgacaatattccgggagttaaaggtatcggcgagaagagggcgctcaagctccttaaagaatgggggtcgttggagaacttgcttaagaatttagatcaggtcaaaccagagtcagtgcgtgagaagattcttgcacacctcgaagacctcaaattaagccgcgaattgtcccgtgtacgcaccgatttgccgctcgaagttgatttccgtcgccgccgcgaacctgactgggagggtcttaaagcgtttttagagcgtcttgaatttggttcgctcttgcatgaattcggccttttagaaagcccgttaccagccgaagaagcaccttggccaccgcccgaaggcgcgtttttaggttaccgtttgagtcgcccggaaccgatgtgggccgaattattggctcttgcagcgtctgcccagggacgtgtgtatcgcgcggaagaccctcatggtgcgctccgcggcctcttcgaagtccgtggactccttgccaaagacttagctgttgttgcattgcgcgaaggtcttgatttacctccgactgatgatccaatgcttcttgcgtacctcttggacccgtcaaacacgacgcccgaaggcgtagcccgtcgttacggcggcgagtggaccgaagatgcagcgaaacgcgcgttattggccgaacgtttgcacgccaatttattaggacgtttgcaaggcgaggaacgtctcctctggctttacgaagaagtggagaaaccattgagtcgcgtgctcgcgcatatggaagctaccggtgtcaaattagacgtggcgtatttggaggctctcagccttgaagttgctgccgaaatgcgccgcttggaggaagaagtattccgtttagcaggccattcctttcgccttaattctcgcgatcagttagaacgtgtgttgttcgatgaacttggtctccctcctatcggcaagacagagaagaccggtaaacgtagcacttcagcggcggttttagaagctcttcgcgaagtccatcccattgtggacaagatcttgcagtaccgcgaactcgcgaaattgaaaggcacctatattgaccctcttccggcattagtccacccgaaaacgggacgcctccatacccgcttcaaccaaacagccacggcgaccggtcgtttgtcctcctctgatccaaaccttcagaatattccagtacgtaccccattgggccagaagatccgccgcgcgtttgtagctgaggagggttggcgtttagtggccctcgattatagccaaattgaattacgtgtccttgcccatctttctggcgatgagaacctcatccgcgtgtttcaggaaggcaaagacattcacactcaaacggcaagctggatgtttggattatcagctgaagcgatcgatcctttgatgcgtcgtgcagcgaagaccatcaatttcggtgttctctacggtatgagtgcctttcgtttgtcgcaggaattaggcattccctatgaagaagctgcggcgttcattcagaaatactttcaaagctatcccaaagttaaagcatggatcgagaagactctcgaagaaggccgcacacgtggttacgtagagaccttatttggacgtcgccgctatgttcccgatttaaacgctcgcgtgaaatctgtccgtgaagccgccgaacgcatggcgttcaacatgcctgtacagggcacggcagctgacctcatgaaacttgcaatggtgcgcctttttccacaattgcgtgaagttggtgcccgcatgctcttgcaggtccacgatgaactcttgttagaagcgccaaaagagcgtgcggaagaggtggcagccctcgcgaaagaggttatggaaggcgtgtggcccttagcggtgcctcttgaagtcgaagttggtattggcgaggattggctggctgccaaaggataatga

SEQ ID NO: 2758 - protein, 841 aa, synthetic construct
  REGION 1..841: note = Variant of DNA polymerase I from Thermus sp. strain 2.9
MHHHHHHGGSGVLPVFEPKGRVLLVDGHHLAYRNFFALKGLTTSRGEPVQGVYGFAKSLLKALKEDGDVVIVVFDAKAPSFRHEAYEAYKAGRAPTPEDFPRQLALMKELVDLLGLERLEVPGFEADDVLATLAKKAEREGYEVQILTADRDLFQLLSPRISVLHPEGHRITPEWLWEKYGLRPEQWVDFRALAGDPSDNIPGVKGIGEKRALKLLKEWGSLENLLKNLDQVKPESVREKILAHLEDLKLSRELSRVRTDLPLEVDFRRRREPDWEGLKAFLERLEFGSLLHEFGLLESPLPAEEAPWPPPEGAFLGYRLSRPEPMWAELLALAASAQGRVYRAEDPHGALRGLFEVRGLLAKDLAVVALREGLDLPPTDDPMLLAYLLDPSNTTPEGVARRYGGEWTEDAAKRALLAERLHANLLGRLQGEERLLWLYEEVEKPLSRVLAHMEATGVKLDVAYLEALSLEVAAEMRRLEEEVFRLAGHSFRLNSRDQLERVLFDELGLPPIGKTEKTGKRSTSAAVLEALREVHPIVDKILQYRELAKLKGTYIDPLPALVHPKTGRLHTRFNQTATATGRLSSSDPNLQNIPVRTPLGQKIRRAFVAEEGWRLVALDYSQIELRVLAHLSGDENLIRVFQEGKDIHTQTASWMFGLSAEAIDPLMRRAAKTINFGVLYGMSAFRLSQELGIPYEEAAAFIQKYFQSYPKVKAWIEKTLEEGRTRGYVETLFGRRRYVPDLNARVKSVREAAERMAFNMPVQGTAADLMKLAMVRLFPQLREVGARMLLQVHDELLLEAPKERAEEVAALAKEVMEGVWPLAVPLEVEVGIGEDWLAAKG

SEQ ID NO: 2759 - DNA, 2529 bp, synthetic construct
  misc_feature 1..2529: note = Variant of DNA polymerase I from Thermus sp. strain 2.9
  source 1..2529: mol_type = other DNA
atgcaccatcatcatcatcatggcggtagcggcgtgttaccggtgttcgagcctaaaggtcgcgtgcttctggttgatggccatcatctcgcgtatcgtaacttctttgccctgaaaggattaaccaccagccgtggcgagccggtacagggtgtctacggctttgcaaagtcgctcctgaaagctctgaaagaagacggtgatgtggtgattgttgtctttgatgcgaaagcgccaagttttcgccacgaagcgtacgaagcttacaaagccgggcgtgctccaacgccggaagactttcctcgccaattggcgcttatgaaggaattagtggatttgcttggcctcgaacgcttggaagttcccggtttcgaggcagacgacgtattagcgactctcgcaaagaaagccgaacgtgagggctatgaagtccagatcttgacagcagatcgcgatcttttccagcttttatctccgcgcatctcggtgttacacccggaagggcatcgtatcaccccggaatggctctgggagaaatatggtttgcgtcccgaacaatgggtggattttcgcgccttagcaggcgatccgagcgacaatattccgggagttaaaggtatcggcgagaagacggcgctcaagctccttaaagaatgggggtcgttggagaacttgcttaagaatttagatcaggtcaaaccagagtcagtgcgtgagaagattcttgcacacctcgaagacctcaaattaagccgcgaattgtcccgtgtacgcaccgatttgccgctcgaagttgatttccgtcgccgccgcgaacctgactgggagggtcttaaagcgtttttagagcgtcttgaatttggttcgctcttgcatgaattcggccttttagaaagcccgttaccagccgaagaagcaccttggccaccgcccgaaggcgcgtttttaggttaccgtttgagtcgcccggaaccgatgtgggccgaattattggctcttgcagcgtctgcccagggacgtgtgtatcgcgcggaagaccctcatggtgcgctccgcggcctcttcgaagtccgtggactccttgccaaagacttagctgttgttgcattgcgcgaaggtcttgatttacctccgactgatgatccaatgcttcttgcgtacctcttggacccgtcaaacacgacgcccgaaggcgtagcccgtcgttacggcggcgagtggaccgaagatgcagcgaaacgcgcgttattggccgaacgtttgcacgccaatttattaggacgtttgcaaggcgaggaacgtctcctctggctttacgaaatggtggagaaaccattgagtcgcgtgctcgcgcatatggaagctaccggtgtcaaattagacgtggcgtatttggaggctctcagccttgaagttgctgccgaaatgcgccgcttggaggaagaagtattccgtttagcaggccattcctttcgccttaattctcgcgatcagttagaacgtgtgttgttcgatgaacttggtctccctcctatcggcaagacagagaagaccggtaaacgtagcacttcagcggcggttttagaagctcttcgcgaagtccatcccattgtggacaagatcttgcagtaccgcgaactcgcgaaattgaaaggcacctatattgaccctcttccggcattagtccacccgaaaacgggacgcctccatacccgcttcaaccaaacagccacggcgaccggtcgtttgtcctcctctgatccaaaccttcagaatattccagtacgtaccccattgggccagaagatccgccgcgcgtttgtagctgaggagggttggcgtttagtggccctcgattatagccaaattgaattacgtgtccttgcccatctttctggcgatgagaacctcatccgcgtgtttcaggaaggcaaagacattcacactcaaacggcaagctggatgtttggattatcagctgaagcgatcgatcctttgatgcgtcgtgcagcgaagaccatcaatttcggtgttctctacggtatgagtgcctttcgtttgtcgcaggaattaggcattccctatgaagaagctgcggcgttcattcagaaatactttcaaagctatcccaaagttaaagcatggatcgagaagactctcgaagaaggccgcacacgtggttacgtagagaccttatttggacgtcgccgctatgttcccgatttaaacgctcgcgtgaaatctgtccgtgaagccgccgaacgcatggcgttcaacatgcctgtacagggcacggcagctgacctcatgaaacttgcaatggtgcgcctttttccacaattgcgtgaagttggtgcccgcatgctcttgcaggtccacgatgaactcttgttagaagcgccaaaagagcgtgcggaagaggtggcagccctcgcgaaagaggttatggaaggcgtgtggcccttagcggtgcctcttgaagtcgaagttggtattggcgaggattggctggctgccaaaggataatga

SEQ ID NO: 2760 - protein, 841 aa, synthetic construct
  REGION 1..841: note = Variant of DNA polymerase I from Thermus sp. strain 2.9
MHHHHHHGGSGVLPVFEPKGRVLLVDGHHLAYRNFFALKGLTTSRGEPVQGVYGFAKSLLKALKEDGDVVIVVFDAKAPSFRHEAYEAYKAGRAPTPEDFPRQLALMKELVDLLGLERLEVPGFEADDVLATLAKKAEREGYEVQILTADRDLFQLLSPRISVLHPEGHRITPEWLWEKYGLRPEQWVDFRALAGDPSDNIPGVKGIGEKTALKLLKEWGSLENLLKNLDQVKPESVREKILAHLEDLKLSRELSRVRTDLPLEVDFRRRREPDWEGLKAFLERLEFGSLLHEFGLLESPLPAEEAPWPPPEGAFLGYRLSRPEPMWAELLALAASAQGRVYRAEDPHGALRGLFEVRGLLAKDLAVVALREGLDLPPTDDPMLLAYLLDPSNTTPEGVARRYGGEWTEDAAKRALLAERLHANLLGRLQGEERLLWLYEMVEKPLSRVLAHMEATGVKLDVAYLEALSLEVAAEMRRLEEEVFRLAGHSFRLNSRDQLERVLFDELGLPPIGKTEKTGKRSTSAAVLEALREVHPIVDKILQYRELAKLKGTYIDPLPALVHPKTGRLHTRFNQTATATGRLSSSDPNLQNIPVRTPLGQKIRRAFVAEEGWRLVALDYSQIELRVLAHLSGDENLIRVFQEGKDIHTQTASWMFGLSAEAIDPLMRRAAKTINFGVLYGMSAFRLSQELGIPYEEAAAFIQKYFQSYPKVKAWIEKTLEEGRTRGYVETLFGRRRYVPDLNARVKSVREAAERMAFNMPVQGTAADLMKLAMVRLFPQLREVGARMLLQVHDELLLEAPKERAEEVAALAKEVMEGVWPLAVPLEVEVGIGEDWLAAKG

SEQ ID NO: 2761 - DNA, 2529 bp, synthetic construct
  misc_feature 1..2529: note = Variant of DNA polymerase I from Thermus sp. strain 2.9
  source 1..2529: mol_type = other DNA
atgcaccatcatcatcatcatggcggtagcggcgtgttaccggtgttcgagcctaaaggtcgcgtgcttctggttgatggccatcatctcgcgtatcgtaacttctttgccctgaaaggattaaccaccagccgtggcgagccggtacagggtgtctacggctttgcaaagtcgctcctgaaagctctgaaagaagacggtgatgtggtgattgttgtctttgatgcgaaagcgccaagttttcgccacgaagcgtacgaagcttacaaagccgggcgtgctccaacgccggaagactttcctgggcaattggcgcttatgaaggaattagtggatttgcttggcctcgaacgcttggaagttcccggtttcgaggcagacgacgtattagcgactctcgcaaagaaagccgaacgtgagggctatgaagtccagatcttgacagcagatcgcgatcttttccagcttttatctccgcgcatctcggtgttacacccggaagggcatcgtatcaccccggaatggctctgggagaaatatggtttgcgtcccgaacaatgggtggattttcgcgccttagcaggcgatccgagcgacaatattccgggagttaaaggtatcggcgagaagacggcgctcaagctccttaaagaatgggggtcgttggagaacttgcttaagaatttagatcaggtcaaaccagagtcagtgcgtgagaagattcttgcacacctcgaagacctcaaattaagccgcgaattgtcccgtgtacgcaccgatttgccgctcgaagttgatttccgtcgccgccgcgaacctgactgggagggtcttaaagcgtttttagagcgtcttgaatttggttcgctcttgcatgaattcggccttttagaaagcccgttaccagccgaagaagcaccttggccaccgcccgaaggcgcgtttttaggttaccgtttgagtcgcccggaaccgatgtgggccgaattattggctcttgcagcgtctgcccagggacgtgtgtatcgcgcggaagaccctcatggtgcgctccgcggcctcttcgaagtccgtggactccttgccaaagacttagctgttgttgcattgcgcgaaggtcttgatttacctccgactgatgatccaatgcttcttgcgtacctcttggacccgtcaaacacgacgcccgaaggcgtagcccgtcgttacggcggcgagtggaccgaagatgcagcgaaacgcgcgttattggccgaacgtttgcacgccaatttattaggacgtttgcaaggcgaggaacgtctcctctggctttacgaagaagtggagaaaccattgagtcgcgtgctcgcgcatatggaagctaccggtgtcaaattagacgtggcgtatttggaggctctcagccttgaagttgctgccgaaatgcgccgcttggaggaagaagtattccgtttagcaggccattcctttcgccttaattctcgcgatcagttagaacgtgtgttgttcgatgaacttggtctccctcctatcggcaagacagagaagaccggtaaacgtagcacttcagcggcggttttagaagctcttcgcgaagtccatcccattgtggacaagatcttgcagtaccgcgaactcgcgaaattgaaaggcacctatattgaccctcttccggcattagtccacccgaaaacgggacgcctccatacccgcttcaaccaaacagccacggcgaccggtcgtttgtcctcctctgatccaaaccttcagaatattccagtacgtaccccattgggccagaagatccgccgcgcgtttgtagctgaggagggttggcgtttagtggccctcgattatagccaaattgaattacgtgtccttgcccatctttctggcgatgagaacctcatccgcgtgtttcaggaaggcaaagacattcacactcaaacggcaagctggatgtttggattatcagctgaagcgatcgatcctttgatgcgtcgtgcagcgaagaccatcaatttcggtgttctctacggtatgagtgcctttcgtttgtcgcaggaattaggcattccctatgaagaagctgcggcgttcattcagaaatactttcaaagctatcccaaagttaaagcatggatcgagaagactctcgaagaaggccgcacacgtggttacgtagagaccttatttggacgtcgccgctatgttcccgatttaaacgctcgcgtgaaatctgtccgtgaagccgccgaacgcatggcgttcaacatgcctgtacagggcacggcagctgacctcatgaaacttgcaatggtgcgcctttttccacaattgcgtgaagttggtgcccgcatgctcttgcaggtccacgatgaactcttgttagaagcgccaaaagagcgtgcggaagaggtggcagccctcgcgaaagaggttatggaaggcgtgtggcccttagcggtgcctcttgaagtcgaagttggtattggcgaggattggctggctgccaaaggataatga

SEQ ID NO: 2762 - protein, 841 aa, synthetic construct
  REGION 1..841: note = Variant of DNA polymerase I from Thermus sp. strain 2.9
MHHHHHHGGSGVLPVFEPKGRVLLVDGHHLAYRNFFALKGLTTSRGEPVQGVYGFAKSLLKALKEDGDVVIVVFDAKAPSFRHEAYEAYKAGRAPTPEDFPGQLALMKELVDLLGLERLEVPGFEADDVLATLAKKAEREGYEVQILTADRDLFQLLSPRISVLHPEGHRITPEWLWEKYGLRPEQWVDFRALAGDPSDNIPGVKGIGEKTALKLLKEWGSLENLLKNLDQVKPESVREKILAHLEDLKLSRELSRVRTDLPLEVDFRRRREPDWEGLKAFLERLEFGSLLHEFGLLESPLPAEEAPWPPPEGAFLGYRLSRPEPMWAELLALAASAQGRVYRAEDPHGALRGLFEVRGLLAKDLAVVALREGLDLPPTDDPMLLAYLLDPSNTTPEGVARRYGGEWTEDAAKRALLAERLHANLLGRLQGEERLLWLYEEVEKPLSRVLAHMEATGVKLDVAYLEALSLEVAAEMRRLEEEVFRLAGHSFRLNSRDQLERVLFDELGLPPIGKTEKTGKRSTSAAVLEALREVHPIVDKILQYRELAKLKGTYIDPLPALVHPKTGRLHTRFNQTATATGRLSSSDPNLQNIPVRTPLGQKIRRAFVAEEGWRLVALDYSQIELRVLAHLSGDENLIRVFQEGKDIHTQTASWMFGLSAEAIDPLMRRAAKTINFGVLYGMSAFRLSQELGIPYEEAAAFIQKYFQSYPKVKAWIEKTLEEGRTRGYVETLFGRRRYVPDLNARVKSVREAAERMAFNMPVQGTAADLMKLAMVRLFPQLREVGARMLLQVHDELLLEAPKERAEEVAALAKEVMEGVWPLAVPLEVEVGIGEDWLAAKG

SEQ ID NO: 2763 - DNA, 2529 bp, synthetic construct
  misc_feature 1..2529: note = Variant of DNA polymerase I from Thermus sp. strain 2.9
  source 1..2529: mol_type = other DNA
atgcaccatcatcatcatcatggcggtagcggcgtgttaccggtgttcgagcctaaaggtcgcgtgcttctggttgatggccatcatctcgcgtatcgtaacttctttgccctgaaaggattaaccaccagccgtggcgagccggtacagggtgtctacggctttgcaaagtcgctcctgaaagctctgaaagaagacggtgatgtggtgattgttgtctttgatgcgaaagcgccaagttttcgccacgaagcgtacgaagcttacaaagccgggcgtgctccaacgccggaagactttcctcgccaattggcgcttatgaaggaattagtggatttgcttggcctcgaacgcttggaagttcccggtttcgaggcagacgacgtattagcgactctcgcaaagaaagccgaacgtgagggctatgaagtccagatcttgacagcagatcgcgatcttttccagcttttatctccgcgcatctcggtgttacacccggaagggcatcgtatcaccccggaatggctctgggagaaatatggtttgcgtcccgaacaatgggtggattttcgcgccttagcaggcgatccgagcgacaatattccgggagttaaaggtatcggcgagaagacggcgctcaagctccttaaagaatgggggtcgttggagaacttgcttaagaatttagatcaggtcaaaccagagtcagtgcgtgagaagattcttgcacacctcgaagacctcaaattaagccgcgaattgtcccgtgtacgcaccgatttgccgctcgaagttgatttccgtcgccgccgcgaacctgactgggagggtcttaaagcgtttttagagcgtcttgaatttggttcgctcttgcatgaattcggccttttagaaagcccgttaccagccgaagaagcaccttggccaccgcccgaaggcgcgtttttaggttaccgtttgagtcgcccggaaccgatgtgggccgaattattggctcttgcagcgtctgcccagggacgtgtgtatcgcgcggaagaccctcatggtgcgctccgcggcctcttcgaagtccgtggactccttgccaaagacttagctgttgttgcattgcgcgaaggtcttgatttacctccgactgatgatccaatgcttcttgcgtacctcttggacccgtcaaacacgacgcccgaaggcgtagcccgtcgttacggcggcgagtggaccgaagatgcagcgaaacgcgcgttattggccgaacgtttgcacgccaatttattaggacgtttgcaaggcgaggaacgtctcctctggctttacgaagaagtggagaaaccattgagtcgcgtgctcgcgcatatggaagctaccggtgtcaaattagacgtgttgtatttggaggctctcagccttgaagttgctgccgaaatgcgccgcttggaggaagaagtattccgtttagcaggccattcctttcgccttaattctcgcgatcagttagaacgtgtgttgttcgatgaacttggtctccctcctatcggcaagacagagaagaccggtaaacgtagcacttcagcggcggttttagaagctcttcgcgaagtccatcccattgtggacaagatcttgcagtaccgcgaactcgcgaaattgaaaggcacctatattgaccctcttccggcattagtccacccgaaaacgggacgcctccatacccgcttcaaccaaacagccacggcgaccggtcgtttgtcctcctctgatccaaaccttcagaatattccagtacgtaccccattgggccagaagatccgccgcgcgtttgtagctgaggagggttggcgtttagtggccctcgattatagccaaattgaattacgtgtccttgcccatctttctggcgatgagaacctcatccgcgtgtttcaggaaggcaaagacattcacactcaaacggcaagctggatgtttggattatcagctgaagcgatcgatcctttgatgcgtcgtgcagcgaagaccatcaatttcggtgttctctacggtatgagtgcctttcgtttgtcgcaggaattaggcattccctatgaagaagctgcggcgttcattcagaaatactttcaaagctatcccaaagttaaagcatggatcgagaagactctcgaagaaggccgcacacgtggttacgtagagaccttatttggacgtcgccgctatgttcccgatttaaacgctcgcgtgaaatctgtccgtgaagccgccgaacgcatggcgttcaacatgcctgtacagggcacggcagctgacctcatgaaacttgcaatggtgcgcctttttccacaattgcgtgaagttggtgcccgcatgctcttgcaggtccacgatgaactcttgttagaagcgccaaaagagcgtgcggaagaggtggcagccctcgcgaaagaggttatggaaggcgtgtggcccttagcggtgcctcttgaagtcgaagttggtattggcgaggattggctggctgccaaaggataatga

SEQ ID NO: 2764 - protein, 841 aa, synthetic construct
  REGION 1..841: note = Variant of DNA polymerase I from Thermus sp. strain 2.9
MHHHHHHGGSGVLPVFEPKGRVLLVDGHHLAYRNFFALKGLTTSRGEPVQGVYGFAKSLLKALKEDGDVVIVVFDAKAPSFRHEAYEAYKAGRAPTPEDFPRQLALMKELVDLLGLERLEVPGFEADDVLATLAKKAEREGYEVQILTADRDLFQLLSPRISVLHPEGHRITPEWLWEKYGLRPEQWVDFRALAGDPSDNIPGVKGIGEKTALKLLKEWGSLENLLKNLDQVKPESVREKILAHLEDLKLSRELSRVRTDLPLEVDFRRRREPDWEGLKAFLERLEFGSLLHEFGLLESPLPAEEAPWPPPEGAFLGYRLSRPEPMWAELLALAASAQGRVYRAEDPHGALRGLFEVRGLLAKDLAVVALREGLDLPPTDDPMLLAYLLDPSNTTPEGVARRYGGEWTEDAAKRALLAERLHANLLGRLQGEERLLWLYEEVEKPLSRVLAHMEATGVKLDVLYLEALSLEVAAEMRRLEEEVFRLAGHSFRLNSRDQLERVLFDELGLPPIGKTEKTGKRSTSAAVLEALREVHPIVDKILQYRELAKLKGTYIDPLPALVHPKTGRLHTRFNQTATATGRLSSSDPNLQNIPVRTPLGQKIRRAFVAEEGWRLVALDYSQIELRVLAHLSGDENLIRVFQEGKDIHTQTASWMFGLSAEAIDPLMRRAAKTINFGVLYGMSAFRLSQELGIPYEEAAAFIQKYFQSYPKVKAWIEKTLEEGRTRGYVETLFGRRRYVPDLNARVKSVREAAERMAFNMPVQGTAADLMKLAMVRLFPQLREVGARMLLQVHDELLLEAPKERAEEVAALAKEVMEGVWPLAVPLEVEVGIGEDWLAAKG

SEQ ID NO: 2765 - DNA, 2529 bp, synthetic construct
  misc_feature 1..2529: note = Variant of DNA polymerase I from Thermus sp. strain 2.9
  source 1..2529: mol_type = other DNA
atgcaccatcatcatcatcatggcggtagcggcgtgttaccggtgttcgagcctaaaggtcgcgtgcttctggttgatggccatcatctcgcgtatcgtaacttctttgccctgaaaggattaaccaccagccgtggcgagccggtacagggtgtctacggctttgcaaagtcgctcctgaaagctctgaaagaagacggtgatgtggtgattgttgtctttgatgcgaaagcgccaagttttcgccacgaagcgtacgaagcttacaaagccgggcgtgctccaacgccggaagactttcctcgccaattggcgcttatgaaggaattagtggatttgcttggcctcgaacgcttggaagttcccggtttcgaggcagacgacgtattagcgactctcgcaaagaaagccgaacgtgagggctatgaagtccagatcttgacagcagatcgcgatcttttccagcttttatctccgcgcatctcggtgttacacccggaagggcatcgtatcaccccggaatggctctgggagaaatatggtttgcgtcccgaacaatgggtggattttcgcgccttagcaggcgatccgagcgacaatattccgggagttaaaggtatcggcgagaagacggcgctcaagctccttaaagaatgggggtcgttggagaacttgcttaagaatttagatcaggtcaaaccagagtcagtgcgtgagaagattcttgcacacctcgaagacctcaaattaagccgcgaattgtcccgtgtacgcaccgatttgccgctcgaagttgatttccgtcgccgccgcgaacctgactgggagggtcttaaagcgtttttagagcgtcttgaatttggttcgctcttgcatgaattcggccttttagaaagcccgttaccagccgaagaagcaccttggccaccgcccgaaggcgcgtttttaggttaccgtttgagtcgcccggaaccgatgtgggccgaattattggctcttgcagcgtctgcccagggacgtgtgtatcgcgcggaagaccctcatggtgcgctccgcggcctcttcgaagtccgtggactccttgccaaagacttagctgttgttgcattgcgcgaaggtcttgatttacctccgactgatgatccaatgcttcttgcgtacctcttggacccgtcaaacacgacgcccgaaggcgtagcccgtcgttacggcggcgagtggaccgaagatgcagcgaaacgcgcgttattggccgaacgtttgcacgccaatttattaggacgtttgcaaggcgaggaacgtctcctctggctttacgaagaagtggagaaaccattgagtcgcgtgctcgcgcatatggaagctaccggtgtcaaattagacgtggcgtatttggaggctctcagccttgaagttgctgccgaaatgcgccgcttggaggaagaagtattccgtttagcaggccattcctttcgccttaattctcgcgatcagttagaacgtgtgttgttcgatgaacttggtctccctcctatcggcaagacagagaagaccggtaaacgtagcacttcagcggcggttttagaagctcttcgcgaagtccatcccattgtggacaagatcttgcagtaccgcgaactcgcgaaattgaaaggcacctatattgaccctcttccggcattagtccacccgaaaacgggacgcctccatacccgcttcaaccaaacagccacggcgaccggtcgtttgtcctcctctgatccaaaccttcagaatattccagtacgtaccccattgggccagaagatccgccgcgcgtttgtagctgaggagggttggcgtttagtggccctcgattatagccaaattgaattacgtgtccttgcccatctttctggcgatgagaacctcatccgcgtgtttcaggaaggcaaagacattcacactcaaacggcaagctggatgtttggattatcagctgaagcgatcgatcctttgatgcgtcgtgcagcgaagaccatcaatttcggtgttctctacggtatgagtgcctttcgtttgtcgcaggaattaggcattccctatgaagaagctgcggcgttcattcagaaatactttcaaagctatcccaaagttaaagcatggatcgagaagactctcgaagaaggccgcacacgtggttacgtagagaccttatttggacgtcgccgctatgttcccgatttaggggctcgcgtgaaatctgtccgtgaagccgccgaacgcatggcgttcaacatgcctgtacagggcacggcagctgacctcatgaaacttgcaatggtgcgcctttttccacaattgcgtgaagttggtgcccgcatgctcttgcaggtccacgatgaactcttgttagaagcgccaaaagagcgtgcggaagaggtggcagccctcgcgaaagaggttatggaaggcgtgtggcccttagcggtgcctcttgaagtcgaagttggtattggcgaggattggctggctgccaaaggataatga

SEQ ID NO: 2766 - protein, 841 aa, synthetic construct
  REGION 1..841: note = Variant of DNA polymerase I from Thermus sp. strain 2.9
MHHHHHHGGSGVLPVFEPKGRVLLVDGHHLAYRNFFALKGLTTSRGEPVQGVYGFAKSLLKALKEDGDVVIVVFDAKAPSFRHEAYEAYKAGRAPTPEDFPRQLALMKELVDLLGLERLEVPGFEADDVLATLAKKAEREGYEVQILTADRDLFQLLSPRISVLHPEGHRITPEWLWEKYGLRPEQWVDFRALAGDPSDNIPGVKGIGEKTALKLLKEWGSLENLLKNLDQVKPESVREKILAHLEDLKLSRELSRVRTDLPLEVDFRRRREPDWEGLKAFLERLEFGSLLHEFGLLESPLPAEEAPWPPPEGAFLGYRLSRPEPMWAELLALAASAQGRVYRAEDPHGALRGLFEVRGLLAKDLAVVALREGLDLPPTDDPMLLAYLLDPSNTTPEGVARRYGGEWTEDAAKRALLAERLHANLLGRLQGEERLLWLYEEVEKPLSRVLAHMEATGVKLDVAYLEALSLEVAAEMRRLEEEVFRLAGHSFRLNSRDQLERVLFDELGLPPIGKTEKTGKRSTSAAVLEALREVHPIVDKILQYRELAKLKGTYIDPLPALVHPKTGRLHTRFNQTATATGRLSSSDPNLQNIPVRTPLGQKIRRAFVAEEGWRLVALDYSQIELRVLAHLSGDENLIRVFQEGKDIHTQTASWMFGLSAEAIDPLMRRAAKTINFGVLYGMSAFRLSQELGIPYEEAAAFIQKYFQSYPKVKAWIEKTLEEGRTRGYVETLFGRRRYVPDLGARVKSVREAAERMAFNMPVQGTAADLMKLAMVRLFPQLREVGARMLLQVHDELLLEAPKERAEEVAALAKEVMEGVWPLAVPLEVEVGIGEDWLAAKG

SEQ ID NO: 2767 - DNA, 2529 bp, synthetic construct
  misc_feature 1..2529: note = Variant of DNA polymerase I from Thermus sp. strain 2.9
  source 1..2529: mol_type = other DNA
atgcaccatcatcatcatcatggcggtagcggcgtgttaccggtgttcgagcctaaaggtcgcgtgcttctggttgatggccatcatctcgcgtatcgtaacttctttgccctgaaaggattaaccaccagccgtggcgagccggtacagggtgtctacggctttgcaaagtcgctcctgaaagctctgaaagaagacggtgatgtggtgattgttgtctttgatgcgaaagcgccaagttttcgccacgaagcgtacgaagcttacaaagccgggcgtgctccaacgccggaagactttcctcgccaattggcgcttatgaaggaattagtggatttgcttggcctcgaacgcttggaagttcccggtttcgaggcagacgacgtattagcgactctcgcaaagaaagccgaacgtgagggctatgaagtccagatcttgacagcagatcgcgatcttttccagcttttatctccgcgcatctcggtgttacacccggaagggcatcgtatcaccccggaatggctctgggagaaatatggtttgcgtcccgaacaatgggtggattttcgcgccttagcaggcgatccgagcgacaatattccgggagttaaaggtatcggcgagaagacggcgctcaagctccttaaagaatgggggtcgttggagaacttgcttaagaatttagatcaggtcaaaccagagtcagtgcgtgagaagattcttgcacacctcgaagacctcaaattaagccgcgaattgtcccgtgtacgcaccgatttgccgctcgaagttgatttccgtcgccgccgcgaacctgactgggagggtcttaaagcgtttttagagcgtcttgaatttggttcgctcttgcatgaattcggccttttagaaagcccgttaccagccgaagaagcaccttggccaccgcccgaaggcgcgtttttaggttaccgtttgagtcgcccggaaccgatgtgggccgaattattggctcttgcagcgtctgcccagggacgtgtgtatcgcgcggaagaccctcatggtgcgctccgcggcctcttcgaagtccgtggactccttgccaaagacttagctgttgttgcattgcgcgaaggtcttgatttacctccgactgatgatccaatgcttcttgcgtacctcttggacccgtcaaacacgacgcccgaaggcgtagcccgtcgttacggcggcgagtggaccgaagatgcagcgaaacgcgcgttattggccgaacgtttgcacgccaatttattaggacgtttgcaagttgaggaacgtctcctctggctttacgaagaagtggagaaaccattgagtcgcgtgctcgcgcatatggaagctaccggtgtcaaattagacgtggcgtatttggaggctctcagccttgaagttgctgccgaaatgcgccgcttggaggaagaagtattccgtttagcaggccattcctttcgccttaattctcgcgatcagttagaacgtgtgttgttcgatgaacttggtctccctcctatcggcaagacagagaagaccggtaaacgtagcacttcagcggcggttttagaagctcttcgcgaagtccatcccattgtggacaagatcttgcagtaccgcgaactcgcgaaattgaaaggcacctatattgaccctcttccggcattagtccacccgaaaacgggacgcctccatacccgcttcaaccaaacagccacggcgaccggtcgtttgtcctcctctgatccaaaccttcagaatattccagtacgtaccccattgggccagaagatccgccgcgcgtttgtagctgaggagggttggcgtttagtggccctcgattatagccaaattgaattacgtgtccttgcccatctttctggcgatgagaacctcatccgcgtgtttcaggaaggcaaagacattcacactcaaacggcaagctggatgtttggattatcagctgaagcgatcgatcctttgatgcgtcgtgcagcgaagaccatcaatttcggtgttctctacggtatgagtgcctttcgtttgtcgcaggaattaggcattccctatgaagaagctgcggcgttcattcagaaatactttcaaagctatcccaaagttaaagcatggatcgagaagactctcgaagaaggccgcacacgtggttacgtagagaccttatttggacgtcgccgctatgttcccgatttaaacgctcgcgtgaaatctgtccgtgaagccgccgaacgcatggcgttcaacatgcctgtacagggcacggcagctgacctcatgaaacttgcaatggtgcgcctttttccacaattgcgtgaagttggtgcccgcatgctcttgcaggtccacgatgaactcttgttagaagcgccaaaagagcgtgcggaagaggtggcagccctcgcgaaagaggttatggaaggcgtgtggcccttagcggtgcctcttgaagtcgaagttggtattggcgaggattggctggctgccaaaggataatga

SEQ ID NO: 2768 - protein, 841 aa, synthetic construct
  REGION 1..841: note = Variant of DNA polymerase I from Thermus sp. strain 2.9
MHHHHHHGGSGVLPVFEPKGRVLLVDGHHLAYRNFFALKGLTTSRGEPVQGVYGFAKSLLKALKEDGDVVIVVFDAKAPSFRHEAYEAYKAGRAPTPEDFPRQLALMKELVDLLGLERLEVPGFEADDVLATLAKKAEREGYEVQILTADRDLFQLLSPRISVLHPEGHRITPEWLWEKYGLRPEQWVDFRALAGDPSDNIPGVKGIGEKTALKLLKEWGSLENLLKNLDQVKPESVREKILAHLEDLKLSRELSRVRTDLPLEVDFRRRREPDWEGLKAFLERLEFGSLLHEFGLLESPLPAEEAPWPPPEGAFLGYRLSRPEPMWAELLALAASAQGRVYRAEDPHGALRGLFEVRGLLAKDLAVVALREGLDLPPTDDPMLLAYLLDPSNTTPEGVARRYGGEWTEDAAKRALLAERLHANLLGRLQVEERLLWLYEEVEKPLSRVLAHMEATGVKLDVAYLEALSLEVAAEMRRLEEEVFRLAGHSFRLNSRDQLERVLFDELGLPPIGKTEKTGKRSTSAAVLEALREVHPIVDKILQYRELAKLKGTYIDPLPALVHPKTGRLHTRFNQTATATGRLSSSDPNLQNIPVRTPLGQKIRRAFVAEEGWRLVALDYSQIELRVLAHLSGDENLIRVFQEGKDIHTQTASWMFGLSAEAIDPLMRRAAKTINFGVLYGMSAFRLSQELGIPYEEAAAFIQKYFQSYPKVKAWIEKTLEEGRTRGYVETLFGRRRYVPDLNARVKSVREAAERMAFNMPVQGTAADLMKLAMVRLFPQLREVGARMLLQVHDELLLEAPKERAEEVAALAKEVMEGVWPLAVPLEVEVGIGEDWLAAKG

SEQ ID NO: 2769 - DNA, 2529 bp, synthetic construct
  misc_feature 1..2529: note = Variant of DNA polymerase I from Thermus sp. strain 2.9
  source 1..2529: mol_type = other DNA
atgcaccatcatcatcatcatggcggtagcggcgtgttaccggtgttcgagcctaaaggtcgcgtgcttctggttgatggccatcatctcgcgtatcgtaacttctttgccctgaaaggattaaccaccagccgtggcgagccggtacagggtgtctacggctttgcaaagtcgctcctgaaagctctgaaagaagacggtgatgtggtgattgttgtctttgatgcgaaagcgccaagttttcgccacgaagcgtacgaagcttacaaagccgggcgtgctccaacgccggaagactttcctcgccaattggcgcttatgaaggaattagtggatttgcttggcctcgaacgcttggaagttcccggtttcgaggcagacgacgtattagcgactctcgcaaagaaagccgaacgtgagggctatgaagtccagatcttgacagcagatcgcgatcttttccagcttttatctccgcgcatctcggtgttacacccggaagggcatcgtatcaccccggaatggctctgggagaaatatggtttgcgtcccgaacaatgggtggattttcgcgccttagcaggcgatccgagcgacaatattccgggagttaaaggtatcggcgagaagacggcgctcaagctccttaaagaatgggggtcgttggagaacttgcttaagaatttagatcaggtcaaaccagagtcagtgcgtgagaagattcttgcacacctcgaagacctcaaattaagccgcgaattgtcccgtgtacgcaccgatttgccgctcgaagttgatttccgtcgccgccgcgaacctgactgggagggtcttaaagcgtttttagagcgtcttgaatttggttcgctcttgcacgaattcggccttttagaaagcccgttaccagccgaagaagcaccttggccaccgcccgaaggcgcgtttttaggttaccgtttgagtcgcccggaaccgatgtgggccgaattattggctcttgcagcgtctgcccagggacgtgtgtatcgcgcggaagaccctcatggtgcgctccgcggcctcttcgaagtccgtggactccttgccaaagacttagctgttgttgcattgcgcgaaggtcttgatttacctccgactgatgatccaatgcttcttgcgtacctcttggacccgtcaaacacgacgcccgaaggcgtagcccgtcgttacggcggcgagtggaccgaagatgcagcgaaacgcgcgttattggccgaacgtttgcacgccaatttattaggacgtttgcaaggcgaggaacgtctcctctggctttacgaagaagtggagaaaccattgagtcgcgtgctcgcgcatatggaagctaccggtgtcaaattagacgtggcgtatttggaggctctcagccttgaagttgctgcccatatgcgccgcttggaggaagaagtattccgtttagcaggccattcctttcgccttaattctcgcgatcagttagaacgtgtgttgttcgatgaacttggtctccctcctatcggcaagacagagaagaccggtaaacgtagcacttcagcggcggttttagaagctcttcgcgaagtccatcccattgtggacaagatcttgcagtaccgcgaactcgcgaaattgaaaggcacctatattgaccctcttccggcattagtccacccgaaaacgggacgcctccatacccgcttcaaccaaacagccacggcgaccggtcgtttgtcctcctctgatccaaaccttcagaatattccagtacgtaccccattgggccagaagatccgccgcgcgtttgtagctgaggagggttggcgtttagtggccctcgattatagccaaattgaattacgtgtccttgcccatctttctggcgatgagaacctcatccgcgtgtttcaggaaggcaaagacattcacactcaaacggcaagctggatgtttggattatcagctgaagcgatcgatcctttgatgcgtcgtgcagcgaagaccatcaatttcggtgttctctacggtatgagtgcctttcgtttgtcgcaggaattaggcattccctatgaagaagctgcggcgttcattcagaaatactttcaaagctatcccaaagttaaagcatggatcgagaagactctcgaagaaggccgcacacgtggttacgtagagaccttatttggacgtcgccgctatgttcccgatttaaacgctcgcgtgaaatctgtccgtgaagccgccgaacgcatggcgttcaacatgcctgtacagggcacggcagctgacctcatgaaacttgcaatggtgcgcctttttccacaattgcgtgaagttggtgcccgcatgctcttgcaggtccacgatgaactcttgttagaagcgccaaaagagcgtgcggaagaggtggcagccctcgcgaaagaggttatggaaggcgtgtggcccttagcggtgcctcttgaagtcgaagttggtattggcgaggattggctggctgccaaaggataatga

SEQ ID NO: 2770 - protein, 841 aa, synthetic construct
  REGION 1..841: note = Variant of DNA polymerase I from Thermus sp. strain 2.9
MHHHHHHGGSGVLPVFEPKGRVLLVDGHHLAYRNFFALKGLTTSRGEPVQGVYGFAKSLLKALKEDGDVVIVVFDAKAPSFRHEAYEAYKAGRAPTPEDFPRQLALMKELVDLLGLERLEVPGFEADDVLATLAKKAEREGYEVQILTADRDLFQLLSPRISVLHPEGHRITPEWLWEKYGLRPEQWVDFRALAGDPSDNIPGVKGIGEKTALKLLKEWGSLENLLKNLDQVKPESVREKILAHLEDLKLSRELSRVRTDLPLEVDFRRRREPDWEGLKAFLERLEFGSLLHEFGLLESPLPAEEAPWPPPEGAFLGYRLSRPEPMWAELLALAASAQGRVYRAEDPHGALRGLFEVRGLLAKDLAVVALREGLDLPPTDDPMLLAYLLDPSNTTPEGVARRYGGEWTEDAAKRALLAERLHANLLGRLQGEERLLWLYEEVEKPLSRVLAHMEATGVKLDVAYLEALSLEVAAHMRRLEEEVFRLAGHSFRLNSRDQLERVLFDELGLPPIGKTEKTGKRSTSAAVLEALREVHPIVDKILQYRELAKLKGTYIDPLPALVHPKTGRLHTRFNQTATATGRLSSSDPNLQNIPVRTPLGQKIRRAFVAEEGWRLVALDYSQIELRVLAHLSGDENLIRVFQEGKDIHTQTASWMFGLSAEAIDPLMRRAAKTINFGVLYGMSAFRLSQELGIPYEEAAAFIQKYFQSYPKVKAWIEKTLEEGRTRGYVETLFGRRRYVPDLNARVKSVREAAERMAFNMPVQGTAADLMKLAMVRLFPQLREVGARMLLQVHDELLLEAPKERAEEVAALAKEVMEGVWPLAVPLEVEVGIGEDWLAAKG

SEQ ID NO: 2771 - DNA, 2529 bp, synthetic construct
  misc_feature 1..2529: note = Variant of DNA polymerase I from Thermus sp. strain 2.9
  source 1..2529: mol_type = other DNA
atgcaccatcatcatcatcatggcggtagcggcgtgttaccggtgttcgagcctaaaggtcgcgtgcttctggttgatggccatcatctcgcgtatcgtaacttctttgccctgaaaggattaaccaccagcgggggcgagccggtacagggtgtctacggctttgcaaagtcgctcctgaaagctctgaaagaagacggtgatgtggtgattgttgtctttgatgcgaaagcgccaagttttcgccacgaagcgtacgaagcttacaaagccgggcgtgctccaacgccggaagactttcctcgccaattggcgcttatgaaggaattagtggatttgcttggcctcgaacgcttggaagttcccggtttcgaggcagacgacgtattagcgactctcgcaaagaaagccgaacgtgagggctatgaagtccagatcttgacagcagatcgcgatcttttccagcttttatctccgcgcatctcggtgttacacccggaagggcatcgtatcaccccggaatggctctgggagaaatatggtttgcgtcccgaacaatgggtggattttcgcgccttagcaggcgatccgagcgacaatattccgggagttaaaggtatcggcgagaagacggcgctcaagctccttaaagaatgggggtcgttggagaacttgcttaagaatttagatcaggtcaaaccagagtcagtgcgtgagaagattcttgcacacctcgaagacctcaaattaagccgcgaattgtcccgtgtacgcaccgatttgccgctcgaagttgatttccgtcgccgccgcgaacctgactgggagggtcttaaagcgtttttagagcgtcttgaatttggttcgctcttgcatgaattcggccttttagaaagcccgttaccagccgaagaagcaccttggccaccgcccgaaggcgcgtttttaggttaccgtttgagtcgcccggaaccgatgtgggccgaattattggctcttgcagcgtctgcccagggacgtgtgtatcgcgcggaagaccctcatggtgcgctccgcggcctcttcgaagtccgtggactccttgccaaagacttagctgttgttgcattgcgcgaaggtcttgatttacctccgactgatgatccaatgcttcttgcgtacctcttggacccgtcaaacacgacgcccgaaggcgtagcccgtcgttacggcggcgagtggaccgaagatgcagcgaaacgcgcgttattggccgaacgtttgcacgccaatttattaggacgtttgcaaggcgaggaacgtctcctctggctttacgaagaagtggagaaaccattgagtcgcgtgctcgcgcatatggaagctaccggtgtcaaattagacgtggcgtatttggaggctctcagccttgaagttgctgccgaaatgcgccgcttggaggaagaagtattccgtttagcaggccattcctttcgccttaattctcgcgatcagttagaacgtgtgttgttcgatgaacttggtctccctcctatcggcaagacagagaagaccggtaaacgtagcacttcagcggcggttttagaagctcttcgcgaagtccatcccattgtggacaagatcttgcagtaccgcgaactcgcgaaattgaaaggcacctatattgaccctcttccggcattagtccacccgaaaacgggacgcctccatacccgcttcaaccaaacagccacggcgaccggtcgtttgtcctcctctgatccaaaccttcagaatattccagtacgtaccccattgggccagaagatccgccgcgcgtttgtagctgaggagggttggcgtttagtggccctcgattatagccaaattgaattacgtgtccttgcccatctttctggcgatgagaacctcatccgcgtgtttcaggaaggcaaagacattcacactcaaacggcaagctggatgtttggattatcagctgaagcgatcgatcctttgatgcgtcgtgcagcgaagaccatcaatttcggtgttctctacggtatgagtgcctttcgtttgtcgcaggaattaggcattccctatgaagaagctgcggcgttcattcagaaatactttcaaagctatcccaaagttaaagcatggatcgagaagactctcgaagaaggccgcacacgtggttacgtagagaccttatttggacgtcgccgctatgttcccgatttaaacgctcgcgtgaaatctgtccgtgaagccgccgaacgcatggcgttcaacatgcctgtacagggcacggcagctgacctcatgaaacttgcaatggtgcgcctttttccacaattgcgtgaagttggtgcccgcatgctcttgcaggtccacgatgaactcttgttagaagcgccaaaagagcgtgcggaagaggtggcagccctcgcgaaagaggttatggaaggcgtgtggcccttagcggtgcctcttgaagtcgaagttggtattggcgaggattggctggctgccaaaggataatga

SEQ ID NO: 2772 - protein, 841 aa, synthetic construct
  REGION 1..841: note = Variant of DNA polymerase I from Thermus sp. strain 2.9
MHHHHHHGGSGVLPVFEPKGRVLLVDGHHLAYRNFFALKGLTTSGGEPVQGVYGFAKSLLKALKEDGDVVIVVFDAKAPSFRHEAYEAYKAGRAPTPEDFPRQLALMKELVDLLGLERLEVPGFEADDVLATLAKKAEREGYEVQILTADRDLFQLLSPRISVLHPEGHRITPEWLWEKYGLRPEQWVDFRALAGDPSDNIPGVKGIGEKTALKLLKEWGSLENLLKNLDQVKPESVREKILAHLEDLKLSRELSRVRTDLPLEVDFRRRREPDWEGLKAFLERLEFGSLLHEFGLLESPLPAEEAPWPPPEGAFLGYRLSRPEPMWAELLALAASAQGRVYRAEDPHGALRGLFEVRGLLAKDLAVVALREGLDLPPTDDPMLLAYLLDPSNTTPEGVARRYGGEWTEDAAKRALLAERLHANLLGRLQGEERLLWLYEEVEKPLSRVLAHMEATGVKLDVAYLEALSLEVAAEMRRLEEEVFRLAGHSFRLNSRDQLERVLFDELGLPPIGKTEKTGKRSTSAAVLEALREVHPIVDKILQYRELAKLKGTYIDPLPALVHPKTGRLHTRFNQTATATGRLSSSDPNLQNIPVRTPLGQKIRRAFVAEEGWRLVALDYSQIELRVLAHLSGDENLIRVFQEGKDIHTQTASWMFGLSAEAIDPLMRRAAKTINFGVLYGMSAFRLSQELGIPYEEAAAFIQKYFQSYPKVKAWIEKTLEEGRTRGYVETLFGRRRYVPDLNARVKSVREAAERMAFNMPVQGTAADLMKLAMVRLFPQLREVGARMLLQVHDELLLEAPKERAEEVAALAKEVMEGVWPLAVPLEVEVGIGEDWLAAKG

SEQ ID NO: 2773 - DNA, 2529 bp, synthetic construct
  misc_feature 1..2529: note = Variant of DNA polymerase I from Thermus sp. strain 2.9
  source 1..2529: mol_type = other DNA
atgcaccatcatcatcatcatggcggtagcggcgtgttaccggtgttcgagcctaaaggtcgcgtgcttctggttgatggccatcatctcgcgtatcgtaacttctttgccctgaaaggattaaccaccagccgtggcgagccggtacagggtgtctacggctttgcaaagtcgctcctgaaagctctgaaagaagacggtgatgtggtgattgttgtctttgatgcgaaagcgccaagttggcgccacgaagcgtacgaagcttacaaagccgggcgtgctccaacgccggaagactttcctcgccaattggcgcttatgaaggaattagtggatttgcttggcctcgaacgcttggaagttcccggtttcgaggcagacgacgtattagcgactctcgcaaagaaagccgaacgtgagggctatgaagtccagatcttgacagcagatcgcgatcttttccagcttttatctccgcgcatctcggtgttacacccggaagggcatcgtatcaccccggaatggctctgggagaaatatggtttgcgtcccgaacaatgggtggattttcgcgccttagcaggcgatccgagcgacaatattccgggagttaaaggtatcggcgagaagacggcgctcaagctccttaaagaatgggggtcgttggagaacttgcttaagaatttagatcaggtcaaaccagagtcagtgcgtgagaagattcttgcacacctcgaagacctcaaattaagccgcgaattgtcccgtgtacgcaccgatttgccgctcgaagttgatttccgtcgccgccgcgaacctgactgggagggtcttaaagcgtttttagagcgtcttgaatttggttcgctcttgcatgaattcggccttttagaaagcccgttaccagccgaagaagcaccttggccaccgcccgaaggcgcgtttttaggttaccgtttgagtcgcccggaaccgatgtgggccgaattattggctcttgcagcgtctgcccagggacgtgtgtatcgcgcggaagaccctcatggtgcgctccgcggcctcttcgaagtccgtggactccttgccaaagacttagctgttgttgcattgcgcgaaggtcttgatttacctccgactgatgatccaatgcttcttgcgtacctcttggacccgtcaaacacgacgcccgaaggcgtagcccgtcgttacggcggcgagtggaccgaagatgcagcgaaacgcgcgttattggccgaacgtttgcacgccaatttattaggacgtttgcaaggcgaggaacgtctcctctggctttacgaagaagtggagaaaccattgagtcgcgtgctcgcgcatatggaagctaccggtgtcaaattagacgtggcgtatttggaggctctcagccttgaagttgctgccgaaatgcgccgcttggaggaagaagtattccgtttagcaggccattcctttcgccttaattctcgcgatcagttagaacgtgtgttgttcgatgaacttggtctccctcctatcggcaagacagagaagaccggtaaacgtagcacttcagcggcggttttagaagctcttcgcgaagtccatcccattgtggacaagatcttgcagtaccgcgaactcgcgaaattgaaaggcacctatattgaccctcttccggcattagtccacccgaaaacgggacgcctccatacccgcttcaaccaaacagccacggcgaccggtcgtttgtcctcctctgatccaaaccttcagaatattccagtacgtaccccattgggccagaagatccgccgcgcgtttgtagctgaggagggttggcgtttagtggccctcgattatagccaaattgaattacgtgtccttgcccatctttctggcgatgagaacctcatccgcgtgtttcaggaaggcaaagacattcacactcaaacggcaagctggatgtttggattatcagctgaagcgatcgatcctttgatgcgtcgtgcagcgaagaccatcaatttcggtgttctctacggtatgagtgcctttcgtttgtcgcaggaattaggcattccctatgaagaagctgcggcgttcattcagaaatactttcaaagctatcccaaagttaaagcatggatcgagaagactctcgaagaaggccgcacacgtggttacgtagagaccttatttggacgtcgccgctatgttcccgatttaaacgctcgcgtgaaatctgtccgtgaagccgccgaacgcatggcgttcaacatgcctgtacagggcacggcagctgacctcatgaaacttgcaatggtgcgcctttttccacaattgcgtgaagttggtgcccgcatgctcttgcaggtccacgatgaactcttgttagaagcgccaaaagagcgtgcggaagaggtggcagccctcgcgaaagaggttatggaaggcgtgtggcccttagcggtgcctcttgaagtcgaagttggtattggcgaggattggctggctgccaaaggataatga

SEQ ID NO: 2774 - protein, 841 aa, synthetic construct
  REGION 1..841: note = Variant of DNA polymerase I from Thermus sp. strain 2.9
MHHHHHHGGSGVLPVFEPKGRVLLVDGHHLAYRNFFALKGLTTSRGEPVQGVYGFAKSLLKALKEDGDVVIVVFDAKAPSWRHEAYEAYKAGRAPTPEDFPRQLALMKELVDLLGLERLEVPGFEADDVLATLAKKAEREGYEVQILTADRDLFQLLSPRISVLHPEGHRITPEWLWEKYGLRPEQWVDFRALAGDPSDNIPGVKGIGEKTALKLLKEWGSLENLLKNLDQVKPESVREKILAHLEDLKLSRELSRVRTDLPLEVDFRRRREPDWEGLKAFLERLEFGSLLHEFGLLESPLPAEEAPWPPPEGAFLGYRLSRPEPMWAELLALAASAQGRVYRAEDPHGALRGLFEVRGLLAKDLAVVALREGLDLPPTDDPMLLAYLLDPSNTTPEGVARRYGGEWTEDAAKRALLAERLHANLLGRLQGEERLLWLYEEVEKPLSRVLAHMEATGVKLDVAYLEALSLEVAAEMRRLEEEVFRLAGHSFRLNSRDQLERVLFDELGLPPIGKTEKTGKRSTSAAVLEALREVHPIVDKILQYRELAKLKGTYIDPLPALVHPKTGRLHTRFNQTATATGRLSSSDPNLQNIPVRTPLGQKIRRAFVAEEGWRLVALDYSQIELRVLAHLSGDENLIRVFQEGKDIHTQTASWMFGLSAEAIDPLMRRAAKTINFGVLYGMSAFRLSQELGIPYEEAAAFIQKYFQSYPKVKAWIEKTLEEGRTRGYVETLFGRRRYVPDLNARVKSVREAAERMAFNMPVQGTAADLMKLAMVRLFPQLREVGARMLLQVHDELLLEAPKERAEEVAALAKEVMEGVWPLAVPLEVEVGIGEDWLAAKG

SEQ ID NO: 2775 - DNA, 2529 bp, synthetic construct
  misc_feature 1..2529: note = Variant of DNA polymerase I from Thermus sp. strain 2.9
  source 1..2529: mol_type = other DNA
atgcaccatcatcatcatcatggcggtagcggcgtgttaccggtgttcgagcctaaaggtcgcgtgcttctggttgatggccatcatctcgcgtatcgtaacttctttgccctgaaaggattaaccaccagccgtggcgagccggtacagggtgtctacggctttgcaaagtcgctcctgaaagctctgaaagaagacggtgatgtggtgattgttgtctttgatgcgaaagcgccaagttttcgccacgaagcgtacgaagcttacaaagccgggcgtgctccaacgccggaagactttcctcgccaattggcgcttatgaaggaattagtggatttgcttggcctcgaacgcttggaagttcccggtttcgaggcagacgacgtattagcgactctcgcaaagaaagccgaacgtgagggctatgaagtccagatcttgacagcagatcgcgatcttttccagcttttatctccgcgcatctcggtgttacacccggaagggcatcgtatcaccccggaatggctctgggagaaatatggtttgcgtcccgaacaatgggtggattttcgcgccttagcaggcgatccgagcgacaatattccgggagttaaaggtatcggcgagaagacggcgctcaagctccttaaagaatgggggtcgttggagaacttgcttaagaatttagatcaggtcaaaccagagtcagtgcgtgagaagattcttgcacacctcgaagacctcaaattaagccgcgaattgtcccgtgtacgcaccgatttgccgctcgaagttgatttccgtcgccgccgcgaacctgactgggagggtcttaaagcgtttttagagcgtcttgaatttggttcgctcttgcatgaattcggccttttagaaagcccgttaccagccgaagaagcaccttggccaccgcccgaaggcgcgtttttaggttaccgtttgagtcgcccggaaccgatgtgggccgaattattggctcttgcagcgtctgcccagggacgtgtgtatcgcgcggaagaccctcatggtgcgctccgcggcctcttcgaagtccgtggactccttgccaaagacttagctgttgttgcattgcgcgaaggtcttgatttacctccgactgatgatccaatgcttcttgcgtacctcttggacccgtcaaacacgacgcccgaaggcgtagcccgtcgttacggcggcgagtggaccgaagatgcagcgaaacgcgcgttattggccgaacgtttgcacgccaatttattaggacgtttgcaaggcgaggaacgtctcctctggctttacgaagaagtggagaaaccattgagtcgcgtgctcgcgcatatggaagctaccggtgtcaaattagacgtggcgtatttggaggctctcagccttgaagttgctgccgaaatgcgccgcttggaggaagaagtattccgtttagcaggccattcctttcgccttaattctcgcgatcagttagaacgtgtgttgttcgatgaacttggtctccctcctatcggcaagacagagaagaccggtaaacgtagcacttcagcggcggttttagaagctcttcgcgaagtccatacgattgtggacaagatcttgcagtaccgcgaactcgcgaaattgaaaggcacctatattgaccctcttccggcattagtccacccgaaaacgggacgcctccatacccgcttcaaccaaacagccacggcgaccggtcgtttgtcctcctctgatccaaaccttcagaatattccagtacgtaccccattgggccagaagatccgccgcgcgtttgtagctgaggagggttggcgtttagtggccctcgattatagccaaattgaattacgtgtccttgcccatctttctggcgatgagaacctcatccgcgtgtttcaggaaggcaaagacattcacactcaaacggcaagctggatgtttggattatcagctgaagcgatcgatcctttgatgcgtcgtgcagcgaagaccatcaatttcggtgttctctacggtatgagtgcctttcgtttgtcgcaggaattaggcattccctatgaagaagctgcggcgttcattcagaaatactttcaaagctatcccaaagttaaagcatggatcgagaagactctcgaagaaggccgcacacgtggttacgtagagaccttatttggacgtcgccgctatgttcccgatttaaacgctcgcgtgaaatctgtccgtgaagccgccgaacgcatggcgttcaacatgcctgtacagggcacggcagctgacctcatgaaacttgcaatggtgcgcctttttccacaattgcgtgaagttggtgcccgcatgctcttgcaggtccacgatgaactcttgttagaagcgccaaaagagcgtgcggaagaggtggcagccctcgcgaaagaggttatggaaggcgtgtggcccttagcggtgcctcttgaagtcgaagttggtattggcgaggattggctggctgccaaaggataatga

SEQ ID NO: 2776 - protein, 841 aa, synthetic construct
  REGION 1..841: note = Variant of DNA polymerase I from Thermus sp. strain 2.9
MHHHHHHGGSGVLPVFEPKGRVLLVDGHHLAYRNFFALKGLTTSRGEPVQGVYGFAKSLLKALKEDGDVVIVVFDAKAPSFRHEAYEAYKAGRAPTPEDFPRQLALMKELVDLLGLERLEVPGFEADDVLATLAKKAEREGYEVQILTADRDLFQLLSPRISVLHPEGHRITPEWLWEKYGLRPEQWVDFRALAGDPSDNIPGVKGIGEKTALKLLKEWGSLENLLKNLDQVKPESVREKILAHLEDLKLSRELSRVRTDLPLEVDFRRRREPDWEGLKAFLERLEFGSLLHEFGLLESPLPAEEAPWPPPEGAFLGYRLSRPEPMWAELLALAASAQGRVYRAEDPHGALRGLFEVRGLLAKDLAVVALREGLDLPPTDDPMLLAYLLDPSNTTPEGVARRYGGEWTEDAAKRALLAERLHANLLGRLQGEERLLWLYEEVEKPLSRVLAHMEATGVKLDVAYLEALSLEVAAEMRRLEEEVFRLAGHSFRLNSRDQLERVLFDELGLPPIGKTEKTGKRSTSAAVLEALREVHTIVDKILQYRELAKLKGTYIDPLPALVHPKTGRLHTRFNQTATATGRLSSSDPNLQNIPVRTPLGQKIRRAFVAEEGWRLVALDYSQIELRVLAHLSGDENLIRVFQEGKDIHTQTASWMFGLSAEAIDPLMRRAAKTINFGVLYGMSAFRLSQELGIPYEEAAAFIQKYFQSYPKVKAWIEKTLEEGRTRGYVETLFGRRRYVPDLNARVKSVREAAERMAFNMPVQGTAADLMKLAMVRLFPQLREVGARMLLQVHDELLLEAPKERAEEVAALAKEVMEGVWPLAVPLEVEVGIGEDWLAAKG

SEQ ID NO: 2777 - DNA, 2529 bp, synthetic construct
  misc_feature 1..2529: note = Variant of DNA polymerase I from Thermus sp. strain 2.9
  source 1..2529: mol_type = other DNA
atgcaccatcatcatcatcatggcggtagcggcgtgttaccggtgttcgagcctaaaggtcgcgtgcttctggttgatggccatcatctcgcgtatcgtaacttctttgccctgaaaggattaaccaccagccgtggcgagccggtacagggtgtctacggctttgcaaagtcgctcctgaaagctctgaaagaagacggtgatgtggtgattgttgtctttgatgcgaaagcgccaagttttcgccacgaagcgtacgaagcttacaaagccgggcgtgctccaacgccggaagactttcctcgccaattggcgcttatgaaggaattagtggatttgcttggcctcgaacgcttggaagttcccggtttcgaggcagacgacgtattagcgactctcgcaaagaaagccgaacgtgagggctatgaagtccagatcttgacagcagatcgcgatcttttccagcttttatctccgcgcatctcggtgttacacccggaagggcatcgtatcaccccggaatggctctgggagaaatatggtttgcgtcccgaacaatgggtggattttcgcgccttagcaggcgatccgagcgacaatattccgggagttaaaggtatcggcgagaagacggcgctcaagctccttaaagaatgggggtcgttggagaacttgcttaagaatttagatcaggtcaaaccagagtcagtgcgtgagaagattcttagtcacctcgaagacctcaaattaagccgcgaattgtcccgtgtacgcaccgatttgccgctcgaagttgatttccgtcgccgccgcgaacctgactgggagggtcttaaagcgtttttagagcgtcttgaatttggttcgctcttgcatgaattcggccttttagaaagcccgttaccagccgaagaagcaccttggccaccgcccgaaggcgcgtttttaggttaccgtttgagtcgcccggaaccgatgtgggccgaattattggctcttgcagcgtctgcccagggacgtgtgtatcgcgcggaagaccctcatggtgcgctccgcggcctcttcgaagtccgtggactccttgccaaagacttagctgttgttgcattgcgcgaaggtcttgatttacctccgactgatgatccaatgcttcttgcgtacctcttggacccgtcaaacacgacgcccgaaggcgtagcccgtcgttacggcggcgagtggaccgaagatgcagcgaaacgcgcgttattggccgaacgtttgcacgccaatttattaggacgtttgcaaggcgaggaacgtctcctctggctttacgaagaagtggagaaaccattgagtcgcgtgctcgcgcatatggaagctaccggtgtcaaattagacgtggcgtatttggaggctctcagccttgaagttgctgccgaaatgcgccgcttggaggaagaagtattccgtttagcaggccattcctttcgccttaattctcgcgatcagttagaacgtgtgttgttcgatgaacttggtctccctcctatcggcaagacagagaagaccggtaaacgtagcacttcagcggcggttttagaagctcttcgcgaagtccatcccattgtggacaagatcttgcagtaccgcgaactcgcgaaattgaaaggcacctatattgaccctcttccggcattagtccacccgaaaacgggacgcctccatacccgcttcaaccaaacagccacggcgaccggtcgtttgtcctcctctgatccaaaccttcagaatattccagtacgtaccccattgggccagaagatccgccgcgcgtttgtagctgaggagggttggcgtttagtggccctcgattatagccaaattgaattacgtgtccttgcccatctttctggcgatgagaacctcatccgcgtgtttcaggaaggcaaagacattcacactcaaacggcaagctggatgtttggattatcagctgaagcgatcgatcctttgatgcgtcgtgcagcgaagaccatcaatttcggtgttctctacggtatgagtgcctttcgtttgtcgcaggaattaggcattccctatgaagaagctgcggcgttcattcagaaatactttcaaagctatcccaaagttaaagcatggatcgagaagactctcgaagaaggccgcacacgtggttacgtagagaccttatttggacgtcgccgctatgttcccgatttaaacgctcgcgtgaaatctgtccgtgaagccgccgaacgcatggcgttcaacatgcctgtacagggcacggcagctgacctcatgaaacttgcaatggtgcgcctttttccacaattgcgtgaagttggtgcccgcatgctcttgcaggtccacgatgaactcttgttagaagcgccaaaagagcgtgcggaagaggtggcagccctcgcgaaagaggttatggaaggcgtgtggcccttagcggtgcctcttgaagtcgaagttggtattggcgaggattggctggctgccaaaggataatga

SEQ ID NO: 2778 - protein, 841 aa, synthetic construct
  REGION 1..841: note = Variant of DNA polymerase I from Thermus sp. strain 2.9
MHHHHHHGGSGVLPVFEPKGRVLLVDGHHLAYRNFFALKGLTTSRGEPVQGVYGFAKSLLKALKEDGDVVIVVFDAKAPSFRHEAYEAYKAGRAPTPEDFPRQLALMKELVDLLGLERLEVPGFEADDVLATLAKKAEREGYEVQILTADRDLFQLLSPRISVLHPEGHRITPEWLWEKYGLRPEQWVDFRALAGDPSDNIPGVKGIGEKTALKLLKEWGSLENLLKNLDQVKPESVREKILSHLEDLKLSRELSRVRTDLPLEVDFRRRREPDWEGLKAFLERLEFGSLLHEFGLLESPLPAEEAPWPPPEGAFLGYRLSRPEPMWAELLALAASAQGRVYRAEDPHGALRGLFEVRGLLAKDLAVVALREGLDLPPTDDPMLLAYLLDPSNTTPEGVARRYGGEWTEDAAKRALLAERLHANLLGRLQGEERLLWLYEEVEKPLSRVLAHMEATGVKLDVAYLEALSLEVAAEMRRLEEEVFRLAGHSFRLNSRDQLERVLFDELGLPPIGKTEKTGKRSTSAAVLEALREVHPIVDKILQYRELAKLKGTYIDPLPALVHPKTGRLHTRFNQTATATGRLSSSDPNLQNIPVRTPLGQKIRRAFVAEEGWRLVALDYSQIELRVLAHLSGDENLIRVFQEGKDIHTQTASWMFGLSAEAIDPLMRRAAKTINFGVLYGMSAFRLSQELGIPYEEAAAFIQKYFQSYPKVKAWIEKTLEEGRTRGYVETLFGRRRYVPDLNARVKSVREAAERMAFNMPVQGTAADLMKLAMVRLFPQLREVGARMLLQVHDELLLEAPKERAEEVAALAKEVMEGVWPLAVPLEVEVGIGEDWLAAKG

SEQ ID NO: 2779 - DNA, 2529 bp, synthetic construct
  misc_feature 1..2529: note = Variant of DNA polymerase I from Thermus sp. strain 2.9
  source 1..2529: mol_type = other DNA
atgcaccatcatcatcatcatggcggtagcggcgtgttaccggtgttcgagcctaaaggtcgcgtgcttctggttgatggccatcatctcgcgtatcgtaacttctttgccctgaaaggattaaccaccagccgtggcgagccggtacagggtgtctacggctttgcaaagtcgctcctgaaagctctgaaagaagacggtgatgtggtgattgttgtctttgatgcgaaagcgccaagttttcgccacgaagcgtacgaagcttacaaagccgggcgtgctccaacgccggaagactttcctcgccaattggcgcttatgaaggaattagtggatttgcttggcctcgaacgcttggaagttcccggtttcgaggcagacgacgtattagcgactctcgcaaagaaagccgaacgtgagggctatgaagtccagatcttgacagcagatcgcgatcttttccagcttttatctccgcgcatctcggtgttacacccggaagggcatcgtatcaccccggaatggctctgggagaaatatggtttgcgtcccgaacaatgggtggattttcgcgccttagcaggcgatccgagcgacaatattccgggagttaaaggtatcggcgagaagacggcgctcaagctccttaaagaatgggggtcgttggagaacttgcttaagaatttagatcaggtcaaaccagagtcagtgcgtgagaagattcttgcacacctcgaagacctcaaattaagccgcgaattgtcccgtgtacgcaccgatttgccgctcgaagttgatttccgtcgccgccgcgaacctgactgggagggtcttaaagcgtttttagagcgtcttgaatttggttcgctcttgcatgaattcggccttttagaaagcccgttaccagccgaagaagcaccttggccaccgcccgaaggcgcgtttttaggttaccgtttgagtcgcccggaaccgatgtgggccgaattattggctcttgcagcgtctgcccagggacgtgtgtatcgcgcggaagaccctcatggtgcgctccgcggcctcttcgaagtccgtggactccttgccaaagacttagctgttgttgcattgcgcgaaggtcttgatttacctccgactgatgatccaatgcttcttgcgtacctcttggacccgtcaaacacgacgcccgaaggcgtagcccgtcgttacggcggcgagtggaccgaagatgcagcgaaacgcgcgttattggccgaacgtttgcacgccaatttattaggacgtttgcaaggcgaggaacgtctcctctggctttacgaagaagtggagaaaccattgagtcgcgtgctcgcgcatatggaagctaccggtgtcaaattagacgtggcgtatttggaggctctcagccttgaagttgctgccgaaatgcgccgcttggaggaagaagtattccgtttagcaggccattcctttcgccttaattctcgcgatcagttagaacgtgtgttgttcgatgaacttggtctccctcctatcggcaagacagagaagaccggtaaacgtagcacttcagcggcggttttagaagctcttcgcgaagtccatcccattgtggacaagatcttgcagtaccgcgaactcgcgaaattgaaaggcacctatattgaccctcttccggcattagtccacccgaaaacgggacgcctccatacccgcttcaaccaaacagccacggcgaccggtcgtttgtcctcctctgatccaaaccttcagaatattccagtacgtaccccattgggccagaagatccgccgcgcgtttgtagctgaggagggttggcgtttagtggccctcgattatagccaaattgaattacgtgtccttgcccatctttctggcgatgagaacctcatccgcgtgtttcaggaaggcaaagacattcacactcaaacggcaagctggatgtttggattatcagctgaagcgatcgatcctttgatgcgtcgtgcagcgaagaccatcaatttcggtgttctctacggtatgagtgcctttcgtttgtcgcaggaattaggcattccctatgaagaagctgcggcgttcattcagaaatactttcaaagctatcccaaagttaaagcatggatcgagaagactctcgaatggggccgcacacgtggttacgtagagaccttatttggacgtcgccgctatgttcccgatttaaacgctcgcgtgaaatctgtccgtgaagccgccgaacgcatggcgttcaacatgcctgtacagggcacggcagctgacctcatgaaacttgcaatggtgcgcctttttccacaattgcgtgaagttggtgcccgcatgctcttgcaggtccacgatgaactcttgttagaagcgccaaaagagcgtgcggaagaggtggcagccctcgcgaaagaggttatggaaggcgtgtggcccttagcggtgcctcttgaagtcgaagttggtattggcgaggattggctggctgccaaaggataatga

SEQ ID NO: 2780 - protein, 841 aa, synthetic construct
  REGION 1..841: note = Variant of DNA polymerase I from Thermus sp. strain 2.9
MHHHHHHGGSGVLPVFEPKGRVLLVDGHHLAYRNFFALKGLTTSRGEPVQGVYGFAKSLLKALKEDGDVVIVVFDAKAPSFRHEAYEAYKAGRAPTPEDFPRQLALMKELVDLLGLERLEVPGFEADDVLATLAKKAEREGYEVQILTADRDLFQLLSPRISVLHPEGHRITPEWLWEKYGLRPEQWVDFRALAGDPSDNIPGVKGIGEKTALKLLKEWGSLENLLKNLDQVKPESVREKILAHLEDLKLSRELSRVRTDLPLEVDFRRRREPDWEGLKAFLERLEFGSLLHEFGLLESPLPAEEAPWPPPEGAFLGYRLSRPEPMWAELLALAASAQGRVYRAEDPHGALRGLFEVRGLLAKDLAVVALREGLDLPPTDDPMLLAYLLDPSNTTPEGVARRYGGEWTEDAAKRALLAERLHANLLGRLQGEERLLWLYEEVEKPLSRVLAHMEATGVKLDVAYLEALSLEVAAEMRRLEEEVFRLAGHSFRLNSRDQLERVLFDELGLPPIGKTEKTGKRSTSAAVLEALREVHPIVDKILQYRELAKLKGTYIDPLPALVHPKTGRLHTRFNQTATATGRLSSSDPNLQNIPVRTPLGQKIRRAFVAEEGWRLVALDYSQIELRVLAHLSGDENLIRVFQEGKDIHTQTASWMFGLSAEAIDPLMRRAAKTINFGVLYGMSAFRLSQELGIPYEEAAAFIQKYFQSYPKVKAWIEKTLEWGRTRGYVETLFGRRRYVPDLNARVKSVREAAERMAFNMPVQGTAADLMKLAMVRLFPQLREVGARMLLQVHDELLLEAPKERAEEVAALAKEVMEGVWPLAVPLEVEVGIGEDWLAAKG

SEQ ID NO: 2781 - DNA, 2529 bp, synthetic construct
  misc_feature 1..2529: note = Variant of DNA polymerase I from Thermus sp. strain 2.9
  source 1..2529: mol_type = other DNA
atgcaccatcatcatcatcatggcggtagcggcgtgttaccggtgttcgagcctaaaggtcgcgtgcttctggttgatggccatcatctcgcgtatcgtaacttctttgccctgaaaggattaaccaccagccgtggcgagccggtacagggtgtctacggctttgcaaagtcgctcctgaaagctctgaaagaagacggtgatgtggtgattgttgtctttgatgcgaaagcgccaagttttcgccacgaagcgtacgaagcttacaaagccgggcgtgctccaacgccggaagactttcctcgccaattggcgcttatgaaggaattagtggatttgcttggcctcgaacgcttggaagttcccggtttcgaggcagacgacgtattagcgactctcgcaaagaaagccgaacgtgagggctatgaagtccagatcttgacagcagatcgcgatcttttccagcttttatctccgcgcatctcggtgttacacccggaagggcatcgtatcaccccggaatggctctgggagaaatatggtttgcgtcccgaacaatgggtggattttcgcgccttagcaggcgatccgagcgacaatattccgggagttaaaggtatcggcgagaagacggcgctcaagctccttaaagaatgggggtcgttggagaacttgcttaagaatttagatcaggtcaaaccagagtcagtgcgtgagaagattcttgcacacctcgaagacctcaaattaagccgcgaattgtcccgtgtacgcaccgatttgccgctcgaagttgatttccgtcgccgccgcgaacctgactgggagggtcttaaagcgtttttagagcgtcttgaatttggttcgctcttgcatgaattcggccttttagaaagcccgttaccagccgaagaagcaccttggccaccgcccgaaggcgcgtttttaggttaccgtttgagtcgcccggaaccgatgtgggccgaattattggctcttgcagcgtctgcccagggacgtgtgtatcgcgcggaagaccctcatggttgtctccgcggcctcttcgaagtccgtggactccttgccaaagacttagctgttgttgcattgcgcgaaggtcttgatttacctccgactgatgatccaatgcttcttgcgtacctcttggacccgtcaaacacgacgcccgaaggcgtagcccgtcgttacggcggcgagtggaccgaagatgcagcgaaacgcgcgttattggccgaacgtttgcacgccaatttattaggacgtttgcaaggcgaggaacgtctcctctggctttacgaagaagtggagaaaccattgagtcgcgtgctcgcgcatatggaagctaccggtgtcaaattagacgtggcgtatttggaggctctcagccttgaagttgctgccgaaatgcgccgcttggaggaagaagtattccgtttagcaggccattcctttcgccttaattctcgcgatcagttagaacgtgtgttgttcgatgaacttggtctccctcctatcggcaagacagagaagaccggtaaacgtagcacttcagcggcggttttagaagctcttcgcgaagtccatcccattgtggacaagatcttgcagtaccgcgaactcgcgaaattgaaaggcacctatattgaccctcttccggcattagtccacccgaaaacgggacgcctccatacccgcttcaaccaaacagccacggcgaccggtcgtttgtcctcctctgatccaaaccttcagaatattccagtacgtaccccattgggccagaagatccgccgcgcgtttgtagctgaggagggttggcgtttagtggccctcgattatagccaaattgaattacgtgtccttgcccatctttctggcgatgagaacctcatccgcgtgtttcaggaaggcaaagacattcacactcaaacggcaagctggatgtttggattatcagctgaagcgatcgatcctttgatgcgtcgtgcagcgaagaccatcaatttcggtgttctctacggtatgagtgcctttcgtttgtcgcaggaattaggcattccctatgaagaagctgcggcgttcattcagaaatactttcaaagctatcccaaagttaaagcatggatcgagaagactctcgaagaaggccgcacacgtggttacgtagagaccttatttggacgtcgccgctatgttcccgatttaaacgctcgcgtgaaatctgtccgtgaagccgccgaacgcatggcgttcaacatgcctgtacagggcacggcagctgacctcatgaaacttgcaatggtgcgcctttttccacaattgcgtgaagttggtgcccgcatgctcttgcaggtccacgatgaactcttgttagaagcgccaaaagagcgtgcggaagaggtggcagccctcgcgaaagaggttatggaaggcgtgtggcccttagcggtgcctcttgaagtcgaagttggtattggcgaggattggctggctgccaaaggataatga

SEQ ID NO: 2782 - protein, 841 aa, synthetic construct
  REGION 1..841: note = Variant of DNA polymerase I from Thermus sp. strain 2.9
MHHHHHHGGSGVLPVFEPKGRVLLVDGHHLAYRNFFALKGLTTSRGEPVQGVYGFAKSLLKALKEDGDVVIVVFDAKAPSFRHEAYEAYKAGRAPTPEDFPRQLALMKELVDLLGLERLEVPGFEADDVLATLAKKAEREGYEVQILTADRDLFQLLSPRISVLHPEGHRITPEWLWEKYGLRPEQWVDFRALAGDPSDNIPGVKGIGEKTALKLLKEWGSLENLLKNLDQVKPESVREKILAHLEDLKLSRELSRVRTDLPLEVDFRRRREPDWEGLKAFLERLEFGSLLHEFGLLESPLPAEEAPWPPPEGAFLGYRLSRPEPMWAELLALAASAQGRVYRAEDPHGCLRGLFEVRGLLAKDLAVVALREGLDLPPTDDPMLLAYLLDPSNTTPEGVARRYGGEWTEDAAKRALLAERLHANLLGRLQGEERLLWLYEEVEKPLSRVLAHMEATGVKLDVAYLEALSLEVAAEMRRLEEEVFRLAGHSFRLNSRDQLERVLFDELGLPPIGKTEKTGKRSTSAAVLEALREVHPIVDKILQYRELAKLKGTYIDPLPALVHPKTGRLHTRFNQTATATGRLSSSDPNLQNIPVRTPLGQKIRRAFVAEEGWRLVALDYSQIELRVLAHLSGDENLIRVFQEGKDIHTQTASWMFGLSAEAIDPLMRRAAKTINFGVLYGMSAFRLSQELGIPYEEAAAFIQKYFQSYPKVKAWIEKTLEEGRTRGYVETLFGRRRYVPDLNARVKSVREAAERMAFNMPVQGTAADLMKLAMVRLFPQLREVGARMLLQVHDELLLEAPKERAEEVAALAKEVMEGVWPLAVPLEVEVGIGEDWLAAKG

SEQ ID NO: 2783 - DNA, 2529 bp, synthetic construct
  misc_feature 1..2529: note = Variant of DNA polymerase I from Thermus sp. strain 2.9
  source 1..2529: mol_type = other DNA
atgcaccatcatcatcatcatggcggtagcggcgtgttaccggtgttcgagcctaaaggtcgcgtgcttctggttgatggccatcatctcgcgtatcgtaacttctttgccctgaaaggattaaccaccagccgtggcgagccggtacagggtgtctacggctttgcaaagtcgctcctgaaagctctgaaagaagacggtgatgtggtgattgttgtctttgatgcgaaagcgccaagttttcgccacgaagcgtacgaagcttacaaagccgggcgtgctccaacgccggaagactttcctcgccaattggcgcttatgaaggaattagtggatttgcttggcctcgaacgcttggaagttcccggtttcgaggcagacgacgtattagcgactctcgcaaagaaagccgaacgtgagggctatgaagtccagatcttgacagcagatcgcgatcttttccagcttttatctccgcgcatctcggtgttacacccggaagggcatcgtatcaccccggaatggctctgggagaaatatggtttgcgtcccgaacaatgggtggattttcgcgccttagcaggcgatccgagcgacaatattccgggagttaaaggtatcggcgagaagacggcgctcaagctccttaaagaatgggggtcgttggagaacttgcttaagaatttagatcaggtcaaaccagagtcagtgcgtgagaagattcttgcacacctcgaagacctcaaattaagccgcgaattgtcccgtgtacgcaccgatttgccgctcgaagttgatttccgtcgccgccgcttgcctgactgggagggtcttaaagcgtttttagagcgtcttgaatttggttcgctcttgcatgaattcggccttttagaaagcccgttaccagccgaagaagcaccttggccaccgcccgaaggcgcgtttttaggttaccgtttgagtcgcccggaaccgatgtgggccgaattattggctcttgcagcgtctgcccagggacgtgtgtatcgcgcggaagaccctcatggtgcgctccgcggcctcttcgaagtccgtggactccttgccaaagacttagctgttgttgcattgcgcgaaggtcttgatttacctccgactgatgatccaatgcttcttgcgtacctcttggacccgtcaaacacgacgcccgaaggcgtagcccgtcgttacggcggcgagtggaccgaagatgcagcgaaacgcgcgttattggccgaacgtttgcacgccaatttattaggacgtttgcaaggcgaggaacgtctcctctggctttacgaagaagtggagaaaccattgagtcgcgtgctcgcgcatatggaagctaccggtgtcaaattagacgtggcgtatttggaggctctcagccttgaagttgctgccgaaatgcgccgcttggaggaagaagtattccgtttagcaggccattcctttcgccttaattctcgcgatcagttagaacgtgtgttgttcgatgaacttggtctccctcctatcggcaagacagagaagaccggtaaacgtagcacttcagcggcggttttagaagctcttcgcgaagtccatcccattgtggacaagatcttgcagtaccgcgaactcgcgaaattgaaaggcacctatattgaccctcttccggcattagtccacccgaaaacgggacgcctccatacccgcttcaaccaaacagccacggcgaccggtcgtttgtcctcctctgatccaaaccttcagaatattccagtacgtaccccattgggccagaagatccgccgcgcgtttgtagctgaggagggttggcgtttagtggccctcgattatagccaaattgaattacgtgtccttgcccatctttctggcgatgagaacctcatccgcgtgtttcaggaaggcaaagacattcacactcaaacggcaagctggatgtttggattatcagctgaagcgatcgatcctttgatgcgtcgtgcagcgaagaccatcaatttcggtgttctctacggtatgagtgcctttcgtttgtcgcaggaattaggcattccctatgaagaagctgcggcgttcattcagaaatactttcaaagctatcccaaagttaaagcatggatcgagaagactctcgaagaaggccgcacacgtggttacgtagagaccttatttggacgtcgccgctatgttcccgatttaaacgctcgcgtgaaatctgtccgtgaagccgccgaacgcatggcgttcaacatgcctgtacagggcacggcagctgacctcatgaaacttgcaatggtgcgcctttttccacaattgcgtgaagttggtgcccgcatgctcttgcaggtccacgatgaactcttgttagaagcgccaaaagagcgtgcggaagaggtggcagccctcgcgaaagaggttatggaaggcgtgtggcccttagcggtgcctcttgaagtcgaagttggtattggcgaggattggctggctgccaaaggataatga

SEQ ID NO: 2784 - protein, 841 aa, synthetic construct
  REGION 1..841: note = Variant of DNA polymerase I from Thermus sp. strain 2.9
MHHHHHHGGSGVLPVFEPKGRVLLVDGHHLAYRNFFALKGLTTSRGEPVQGVYGFAKSLLKALKEDGDVVIVVFDAKAPSFRHEAYEAYKAGRAPTPEDFPRQLALMKELVDLLGLERLEVPGFEADDVLATLAKKAEREGYEVQILTADRDLFQLLSPRISVLHPEGHRITPEWLWEKYGLRPEQWVDFRALAGDPSDNIPGVKGIGEKTALKLLKEWGSLENLLKNLDQVKPESVREKILAHLEDLKLSRELSRVRTDLPLEVDFRRRRLPDWEGLKAFLERLEFGSLLHEFGLLESPLPAEEAPWPPPEGAFLGYRLSRPEPMWAELLALAASAQGRVYRAEDPHGALRGLFEVRGLLAKDLAVVALREGLDLPPTDDPMLLAYLLDPSNTTPEGVARRYGGEWTEDAAKRALLAERLHANLLGRLQGEERLLWLYEEVEKPLSRVLAHMEATGVKLDVAYLEALSLEVAAEMRRLEEEVFRLAGHSFRLNSRDQLERVLFDELGLPPIGKTEKTGKRSTSAAVLEALREVHPIVDKILQYRELAKLKGTYIDPLPALVHPKTGRLHTRFNQTATATGRLSSSDPNLQNIPVRTPLGQKIRRAFVAEEGWRLVALDYSQIELRVLAHLSGDENLIRVFQEGKDIHTQTASWMFGLSAEAIDPLMRRAAKTINFGVLYGMSAFRLSQELGIPYEEAAAFIQKYFQSYPKVKAWIEKTLEEGRTRGYVETLFGRRRYVPDLNARVKSVREAAERMAFNMPVQGTAADLMKLAMVRLFPQLREVGARMLLQVHDELLLEAPKERAEEVAALAKEVMEGVWPLAVPLEVEVGIGEDWLAAKG

SEQ ID NO: 2785 - DNA, 2529 bp, synthetic construct
  misc_feature 1..2529: note = Variant of DNA polymerase I from Thermus sp. strain 2.9
  source 1..2529: mol_type = other DNA
atgcaccatcatcatcatcatggcggtagcggcgtgttaccggtgttcgagcctaaaggtcgcgtgcttctggttgatggccatcatctcgcgtatcgtaacttctttgccctgaaaggattaaccaccagccgtggcgagccggtacagggtgtctacggctttgcaaagtcgctcctgaaagctctgaaagaagacggtgatgtggtgattgttgtctttgatgcgaaagcgccaagttttcgccacgaagcgtacgaagcttacaaagccgggcgtgctccaacgccggaagactttcctcgccaattggcgcttatgaaggaattagtggatttgcttggcctcgaacgcttggaagttcccggtttcgaggcagacgacgtattagcgactctcgcaaagaaagccgaacgtgagggctatgaagtccagatcttgacagcagatcgcgatcttttccagcttttatctccgcgcatctcggtgttacacccggaagggcatcgtatcaccccggaatggctctgggagaaatatggtttgcgtcccgaacaatgggtggattttcgcgccttagcaggcgatccgagcgacaatattccgggagttaaaggtatcggcgagaagacggcgctcaagctccttaaagaatgggggtcgttggagaacttgcttaagaatttagatcaggtcaaaccagagtcagtgcgtgagaagattcttgcacacctcgaagacctcaaattaagccgcgaattgtcccgtgtacgcaccgatttgccgctcgaagttgatttccgtatgcgccgcgaacctgactgggagggtcttaaagcgtttttagagcgtcttgaatttggttcgctcttgcatgaattcggccttttagaaagcccgttaccagccgaagaagcaccttggccaccgcccgaaggcgcgtttttaggttaccgtttgagtcgcccggaaccgatgtgggccgaattattggctcttgcagcgtctgcccagggacgtgtgtatcgcgcggaagaccctcatggtgcgctccgcggcctcttcgaagtccgtggactccttgccaaagacttagctgttgttgcattgcgcgaaggtcttgatttacctccgactgatgatccaatgcttcttgcgtacctcttggacccgtcaaacacgacgcccgaaggcgtagcccgtcgttacggcggcgagtggaccgaagatgcagcgaaacgcgcgttattggccgaacgtttgcacgccaatttattaggacgtttgcaaggcgaggaacgtctcctctggctttacgaagaagtggagaaaccattgagtcgcgtgctcgcgcatatggaagctaccggtgtcaaattagacgtggcgtatttggaggctctcagccttgaagttgctgccgaaatgcgccgcttggaggaagaagtattccgtttagcaggccattcctttcgccttaattctcgcgatcagttagaacgtgtgttgttcgatgaacttggtctccctcctatcggcaagacagagaagaccggtaaacgtagcacttcagcggcggttttagaagctcttcgcgaagtccatcccattgtggacaagatcttgcagtaccgcgaactcgcgaaattgaaaggcacctatattgaccctcttccggcattagtccacccgaaaacgggacgcctccatacccgcttcaaccaaacagccacggcgaccggtcgtttgtcctcctctgatccaaaccttcagaatattccagtacgtaccccattgggccagaagatccgccgcgcgtttgtagctgaggagggttggcgtttagtggccctcgattatagccaaattgaattacgtgtccttgcccatctttctggcgatgagaacctcatccgcgtgtttcaggaaggcaaagacattcacactcaaacggcaagctggatgtttggattatcagctgaagcgatcgatcctttgatgcgtcgtgcagcgaagaccatcaatttcggtgttctctacggtatgagtgcctttcgtttgtcgcaggaattaggcattccctatgaagaagctgcggcgttcattcagaaatactttcaaagctatcccaaagttaaagcatggatcgagaagactctcgaagaaggccgcacacgtggttacgtagagaccttatttggacgtcgccgctatgttcccgatttaaacgctcgcgtgaaatctgtccgtgaagccgccgaacgcatggcgttcaacatgcctgtacagggcacggcagctgacctcatgaaacttgcaatggtgcgcctttttccacaattgcgtgaagttggtgcccgcatgctcttgcaggtccacgatgaactcttgttagaagcgccaaaagagcgtgcggaagaggtggcagccctcgcgaaagaggttatggaaggcgtgtggcccttagcggtgcctcttgaagtcgaagttggtattggcgaggattggctggctgccaaaggataatga

SEQ ID NO: 2786 - protein, 841 aa, synthetic construct
  REGION 1..841: note = Variant of DNA polymerase I from Thermus sp. strain 2.9
MHHHHHHGGSGVLPVFEPKGRVLLVDGHHLAYRNFFALKGLTTSRGEPVQGVYGFAKSLLKALKEDGDVVIVVFDAKAPSFRHEAYEAYKAGRAPTPEDFPRQLALMKELVDLLGLERLEVPGFEADDVLATLAKKAEREGYEVQILTADRDLFQLLSPRISVLHPEGHRITPEWLWEKYGLRPEQWVDFRALAGDPSDNIPGVKGIGEKTALKLLKEWGSLENLLKNLDQVKPESVREKILAHLEDLKLSRELSRVRTDLPLEVDFRMRREPDWEGLKAFLERLEFGSLLHEFGLLESPLPAEEAPWPPPEGAFLGYRLSRPEPMWAELLALAASAQGRVYRAEDPHGALRGLFEVRGLLAKDLAVVALREGLDLPPTDDPMLLAYLLDPSNTTPEGVARRYGGEWTEDAAKRALLAERLHANLLGRLQGEERLLWLYEEVEKPLSRVLAHMEATGVKLDVAYLEALSLEVAAEMRRLEEEVFRLAGHSFRLNSRDQLERVLFDELGLPPIGKTEKTGKRSTSAAVLEALREVHPIVDKILQYRELAKLKGTYIDPLPALVHPKTGRLHTRFNQTATATGRLSSSDPNLQNIPVRTPLGQKIRRAFVAEEGWRLVALDYSQIELRVLAHLSGDENLIRVFQEGKDIHTQTASWMFGLSAEAIDPLMRRAAKTINFGVLYGMSAFRLSQELGIPYEEAAAFIQKYFQSYPKVKAWIEKTLEEGRTRGYVETLFGRRRYVPDLNARVKSVREAAERMAFNMPVQGTAADLMKLAMVRLFPQLREVGARMLLQVHDELLLEAPKERAEEVAALAKEVMEGVWPLAVPLEVEVGIGEDWLAAKG

SEQ ID NO: 2787 - DNA, 2529 bp, synthetic construct
  misc_feature 1..2529: note = Variant of DNA polymerase I from Thermus sp. strain 2.9
  source 1..2529: mol_type = other DNA
atgcaccatcatcatcatcatggcggtagcggcgtgttaccggtgttcgagcctaaaggtcgcgtgcttctggttgatggccatcatctcgcgtatcgtaacttctttgccctgaaaggattaaccaccagccgtggcgagccggtacagggtgtctacggctttgcaaagtcgctcctgaaagctctgaaagaagacggtgatgtggtgattgttgtctttgatgcgaaagcgccaagttttcgccacgaagcgtacgaagcttacaaagccgggcgtgctccaacgccggaagactttcctcgccaattggcgcttatgaaggaattagtggatttgcttggcctcgaacgcttggaagttcccggtttcgaggcagacgacgtattagcgactctcgcaaagaaagccgaacgtgagggctatgaagtccagatcttgacagcagatcgcgatcttttccagcttttatctccgcgcatctcggtgttacacccggaagggcatcgtatcaccccggaatggctctgggagaaatatggtttgcgtcccgaacaatgggtggattttcgcgccttagcaggcgatccgagcgacaatattccgggagttaaaggtatcggcgagaagacggcgctcaagctccttaaagaatgggggtcgttggagaacttgcttaagaatttagatcaggtcaaaccagagtcagtgcgtgagaagattcttgcacacctcgaagacctcaaattaagccgcgaattgtcccgtgtacgcaccgatttgccgctcgaagttgatttccgtcgccgccgcgaacctgactgggagggtcttaaagcgtttttagagcgtcttgaatttggttcgctcttgcatgaattcggccttttagaaagcccgttaccagccgaagaagcaccttggccaccgcccgaaggcgcgtttttaggttaccgtttgagtcgcccggaaccgatgtgggccgaattattggctcttgcagcgtctgcccagggacgtgtgtatcgcgcggaagaccctcatggtgcgctccgcggcctcttcgaagtccgtggactccttgccaaagacttagctgttgttgcattgcgcgaaggtcttgatttacctccgactgatgatccaatgcttcttgcgtacctcttggacccgtcaaacacgacgcccgaaggcgtagcccgtcgttacggcggcgagtggaccgaagatgcagcgaaacgcgcgttattggccgaacgtttgcacgccaatttattaggacgtttgcaaggcgaggaacgtctcctctggctttacgaagaagtggagaaaccattgagtcgcgtgctcgcgcatatggaagctaccggtgtcaaattagacgtggcgtatttggaggctctcagccttgaagttgctgccgaaatgcgccgcttggaggaagaagtattccgtttagcaggccattcctttcgccttaattctcgcgatcagttagaacgtgtgttgttcgatgaacttggtctccctcctatcggcaagacagagaagaccggtaaacgtagcacttcagcggcggttttagaagctcttcgcgaagtccatcccattgtggacaagatcttgcagtaccgcgaactcgcgaaattgaaaggcacctatattgaccctcttccggcattagtccacccgaaaacgggacgcctccatacccgcttcaaccaaacagccacggcgaccggtcgtttgtcctcctctgatccaaaccttcagaatattccagtacgtaccccattgggccagaagatccgccgcgcgtttgtagctgaggagggttggcgtttagtggccctcgattatagccaaattgaattacgtgtccttgcccatctttctggcgatgagaacctcatccgcgtgtttcaggaaggcaaagacattcacactcaaacggcaagctggatgtttggattatcagctgaagcgatcgatcctttgatgcgtcgtgcagcgaagaccatcaatttcggtgttctctacggtatgagtgcctttcgtttgtcgcaggaattaggcattccctatgaagaagctgcggcgttcattcagaaatactttcaaagctatcccaaagttaaagcatggatcgagaagactctcgaagaaggccgcacacgtggttacgtagagaccatgtttggacgtcgccgctatgttcccgatttaaacgctcgcgtgaaatctgtccgtgaagccgccgaacgcatggcgttcaacatgcctgtacagggcacggcagctgacctcatgaaacttgcaatggtgcgcctttttccacaattgcgtgaagttggtgcccgcatgctcttgcaggtccacgatgaactcttgttagaagcgccaaaagagcgtgcggaagaggtggcagccctcgcgaaagaggttatggaaggcgtgtggcccttagcggtgcctcttgaagtcgaagttggtattggcgaggattggctggctgccaaaggataatga

SEQ ID NO: 2788 - protein, 841 aa, synthetic construct
  REGION 1..841: note = Variant of DNA polymerase I from Thermus sp. strain 2.9
MHHHHHHGGSGVLPVFEPKGRVLLVDGHHLAYRNFFALKGLTTSRGEPVQGVYGFAKSLLKALKEDGDVVIVVFDAKAPSFRHEAYEAYKAGRAPTPEDFPRQLALMKELVDLLGLERLEVPGFEADDVLATLAKKAEREGYEVQILTADRDLFQLLSPRISVLHPEGHRITPEWLWEKYGLRPEQWVDFRALAGDPSDNIPGVKGIGEKTALKLLKEWGSLENLLKNLDQVKPESVREKILAHLEDLKLSRELSRVRTDLPLEVDFRRRREPDWEGLKAFLERLEFGSLLHEFGLLESPLPAEEAPWPPPEGAFLGYRLSRPEPMWAELLALAASAQGRVYRAEDPHGALRGLFEVRGLLAKDLAVVALREGLDLPPTDDPMLLAYLLDPSNTTPEGVARRYGGEWTEDAAKRALLAERLHANLLGRLQGEERLLWLYEEVEKPLSRVLAHMEATGVKLDVAYLEALSLEVAAEMRRLEEEVFRLAGHSFRLNSRDQLERVLFDELGLPPIGKTEKTGKRSTSAAVLEALREVHPIVDKILQYRELAKLKGTYIDPLPALVHPKTGRLHTRFNQTATATGRLSSSDPNLQNIPVRTPLGQKIRRAFVAEEGWRLVALDYSQIELRVLAHLSGDENLIRVFQEGKDIHTQTASWMFGLSAEAIDPLMRRAAKTINFGVLYGMSAFRLSQELGIPYEEAAAFIQKYFQSYPKVKAWIEKTLEEGRTRGYVETMFGRRRYVPDLNARVKSVREAAERMAFNMPVQGTAADLMKLAMVRLFPQLREVGARMLLQVHDELLLEAPKERAEEVAALAKEVMEGVWPLAVPLEVEVGIGEDWLAAKG

SEQ ID NO: 2789 - DNA, 2529 bp, synthetic construct
  misc_feature 1..2529: note = Variant of DNA polymerase I from Thermus sp. strain 2.9
  source 1..2529: mol_type = other DNA
atgcaccatcatcatcatcatggcggtagcggcgtgttaccggtgttcgagcctaaaggtcgcgtgcttctggttgatggccatcatctcgcgtatcgtaacttctttgccctgaaaggattaaccaccagccgtggcgagccggtacagggtgtctacggctttgcaaagtcgctcctgaaagctctgaaagaagacggtgatgtggtgattgttgtctttgatgcgaaagcgccaagttttcgccacgaagcgtacgaagcttacaaagccgggcgtgctccaacgccggaagactttcctcgccaattggcgcttatgaaggaattagtggatttgcttggcctcgaacgcttggaagttcccggtttcgaggcagacgacgtattagcgactctcgcaaagaaagccgaacgtgagggctatgaagtccagatcttgacagcagatcgcgatcttttccagcttttatctccgcgcatctcggtgttacacccggaagggcatcgtatcaccccggaatggctctgggagaaatatggtttgcgtcccgaacaatgggtggattttcgcgccttagcaggcgatccgagcgacaatattccgggagttaaaggtatcggcgagaagacggcgctcaagctccttaaagaatgggggtcgttggagaacttgcttaagaatttagatcaggtcaaaccagagtcagtgcgtgagaagattcttgcacacctcgaagacctcaaattaagccgcgaattgtcccgtgtacgcaccgatttgccgctcgaagttgatttccgtcgccgccgcgaacctgactgggagggtcttaaagcgtttttagagcgtcttgaatttggttcgctcttgtgggaattcggccttttagaaagcccgttaccagccgaagaagcaccttggccaccgcccgaaggcgcgtttttaggttaccgtttgagtcgcccggaaccgatgtgggccgaattattggctcttgcagcgtctgcccagggacgtgtgtatcgcgcggaagaccctcatggtgcgctccgcggcctcttcgaagtccgtggactccttgccaaagacttagctgttgttgcattgcgcgaaggtcttgatttacctccgactgatgatccaatgcttcttgcgtacctcttggacccgtcaaacacgacgcccgaaggcgtagcccgtcgttacggcggcgagtggaccgaagatgcagcgaaacgcgcgttattggccgaacgtttgcacgccaatttattaggacgtttgcaaggcgaggaacgtctcctctggctttacgaagaagtggagaaaccattgagtcgcgtgctcgcgcatatggaagctaccggtgtcaaattagacgtggcgtatttggaggctctcagccttgaagttgctgccgaaatgcgccgcttggaggaagaagtattccgtttagcaggccattcctttcgccttaattctcgcgatcagttagaacgtgtgttgttcgatgaacttggtctccctcctatcggcaagacagagaagaccggtaaacgtagcacttcagcggcggttttagaagctcttcgcgaagtccatcccattgtggacaagatcttgcagtaccgcgaactcgcgaaattgaaaggcacctatattgaccctcttccggcattagtccacccgaaaacgggacgcctccatacccgcttcaaccaaacagccacggcgaccggtcgtttgtcctcctctgatccaaaccttcagaatattccagtacgtaccccattgggccagaagatccgccgcgcgtttgtagctgaggagggttggcgtttagtggccctcgattatagccaaattgaattacgtgtccttgcccatctttctggcgatgagaacctcatccgcgtgtttcaggaaggcaaagacattcacactcaaacggcaagctggatgtttggattatcagctgaagcgatcgatcctttgatgcgtcgtgcagcgaagaccatcaatttcggtgttctctacggtatgagtgcctttcgtttgtcgcaggaattaggcattccctatgaagaagctgcggcgttcattcagaaatactttcaaagctatcccaaagttaaagcatggatcgagaagactctcgaagaaggccgcacacgtggttacgtagagaccttatttggacgtcgccgctatgttcccgatttaaacgctcgcgtgaaatctgtccgtgaagccgccgaacgcatggcgttcaacatgcctgtacagggcacggcagctgacctcatgaaacttgcaatggtgcgcctttttccacaattgcgtgaagttggtgcccgcatgctcttgcaggtccacgatgaactcttgttagaagcgccaaaagagcgtgcggaagaggtggcagccctcgcgaaagaggttatggaaggcgtgtggcccttagcggtgcctcttgaagtcgaagttggtattggcgaggattggctggctgccaaaggataatga

SEQ ID NO: 2790 - protein, 841 aa, synthetic construct
  REGION 1..841: note = Variant of DNA polymerase I from Thermus sp. strain 2.9
MHHHHHHGGSGVLPVFEPKGRVLLVDGHHLAYRNFFALKGLTTSRGEPVQGVYGFAKSLLKALKEDGDVVIVVFDAKAPSFRHEAYEAYKAGRAPTPEDFPRQLALMKELVDLLGLERLEVPGFEADDVLATLAKKAEREGYEVQILTADRDLFQLLSPRISVLHPEGHRITPEWLWEKYGLRPEQWVDFRALAGDPSDNIPGVKGIGEKTALKLLKEWGSLENLLKNLDQVKPESVREKILAHLEDLKLSRELSRVRTDLPLEVDFRRRREPDWEGLKAFLERLEFGSLLWEFGLLESPLPAEEAPWPPPEGAFLGYRLSRPEPMWAELLALAASAQGRVYRAEDPHGALRGLFEVRGLLAKDLAVVALREGLDLPPTDDPMLLAYLLDPSNTTPEGVARRYGGEWTEDAAKRALLAERLHANLLGRLQGEERLLWLYEEVEKPLSRVLAHMEATGVKLDVAYLEALSLEVAAEMRRLEEEVFRLAGHSFRLNSRDQLERVLFDELGLPPIGKTEKTGKRSTSAAVLEALREVHPIVDKILQYRELAKLKGTYIDPLPALVHPKTGRLHTRFNQTATATGRLSSSDPNLQNIPVRTPLGQKIRRAFVAEEGWRLVALDYSQIELRVLAHLSGDENLIRVFQEGKDIHTQTASWMFGLSAEAIDPLMRRAAKTINFGVLYGMSAFRLSQELGIPYEEAAAFIQKYFQSYPKVKAWIEKTLEEGRTRGYVETLFGRRRYVPDLNARVKSVREAAERMAFNMPVQGTAADLMKLAMVRLFPQLREVGARMLLQVHDELLLEAPKERAEEVAALAKEVMEGVWPLAVPLEVEVGIGEDWLAAKG

SEQ ID NO: 2791 - DNA, 2529 bp, synthetic construct
  misc_feature 1..2529: note = Variant of DNA polymerase I from Thermus sp. strain 2.9
  source 1..2529: mol_type = other DNA
atgcaccatcatcatcatcatggcggtagcggcgtgttaccggtgttcgagcctaaaggtcgcgtgcttctggttgatggccatcatctcgcgtatcgtaacttctttgccctgaaaggattaaccaccagccgtggcgagccggtacagggtgtctacggctttgcaaagtcgctcctgaaagctctgaaagaagacggtgatgtggtgattgttgtctttgatgcgaaagcgccaagttttcgccacgaagcgtacgaagcttacaaagccgggcgtgctccaacgccggaagactttcctcgtcaattggcgcttatgaaggaattagtggatttgcttggcctcgaacgcttggaagttcccggtttcgaggcagacgacgtattagcgactctcgcaaagaaagccgaacgtgagggctatgaagtccagatcttgacagcagatcgcgatcttttccagcttttatctccgcgcatctcggtgttacacccggaagggcatcgtatcaccccggaatggctctgggagaaatatggtttgcgtcccgaacaatgggtggattttcgcgccttagcaggcgatccgagcgacaatattccgggagttaaaggtatcggcgagaagacggcgctcaagctccttaaagaatgggggtcgttggagaacttgcttaagaatttagatcaggtcaaaccagagtcagtgcgtgagaagattcttgcacacctcgaagacctcaaattaagccgcgaattgtcccgtgtacgcaccgatttgccgctcgaagttgatttccgtcgccgccgcgaacctgactgggagggtcttaaagcgtttttagagcgtcttgaatttggttcgctcttgcatgaattcggccttttagaaagcccgttagttgccgaagaagcaccttggccaccgcccgaaggcgcgtttttaggttaccgtttgagtcgcccggaaccgatgtgggccgaattattggctcttgcagcgtctgcccagggacgtgtgtatcgcgcggaagaccctcatggtgcgctccgcggcctcttcgaagtccgtggactccttgccaaagacttagctgttgttgcattgcgcgaaggtcttgatttacctccgactgatgatccaatgcttcttgcgtacctcttggacccgtcaaacacgacgcccgaaggcgtagcccgtcgttacggcggcgagtggaccgaagatgcagcgaaacgcgcgttattggccgaacgtttgcacgccaatttattaggacgtttgcaaggcgaggaacgtctcctctggctttacgaagaagtggagaaaccattgagtcgcgtgctcgcgcatatggaagctaccggtgtcaaattagacgtggcgtatttggaggctctcagccttgaagttgctgccgaaatgcgccgcttggaggaagaagtattccgtttagcaggccattcctttcgccttgtatctcgcgatcagttagaacgtgtgttgttcgatgaacttggtctccctcctatcggcaagacagagaagaccggtaaacgtagcacttcagcggcggttttagaagctcttcgcgaagtccatcccattgtggacaagatcttgcagtaccgcgaactcgcgaaattgaaaggcacctatattgaccctcttccggcattagtccacccgaaaacgggacgcctccatacccgcttcaaccaaacagccacggcgaccggtcgtttgtcctcctctgatccaaaccttcagaatattccagtacgtaccccattgggccagaagatccgccgcgcgtttgtagctgaggagggttggcgtttagtggccctcgattatagccaaattgaattacgtgtccttgcccatctttctggcgatgagaacctcatccgcgtgtttcaggaaggcaaagacattcacactcaaacggcaagctggatgtttggattatcagctgaagcgatcgatcctttgatgcgtcgtgcagcgaagaccatcaatttcggtgttctctacggtatgagtgcctttcgtttgtcgcaggaattaggcattccctatgaagaagctgcggcgttcattcagaaatactttcaaagctatcccaaagttaaagcatggatcgagaagactctcgaagaaggccgcacacgtggttacgtagagaccttatttggacgtcgccgctatgttcccgatttaaacgctcgcgtgaaatctgtccgtgaagccgccgaacgcatggcgttcaacatgcctgtacagggcacggcagctgacctcatgaaacttgcaatggtgcgcctttttccacaattgcgtgaagttggtgcccgcatgctcttgcaggtccacgatgaactcttgttagaagcgccaaaagagcgtgcggaagaggtggcagccctcgcgaaagaggttatggaaggcgtgtggcccttagcggtgcctcttgaagtcgaagttggtattggcgaggattggctggctgccaaaggataatga

SEQ ID NO: 2792 - protein, 841 aa, synthetic construct
  REGION 1..841: note = Variant of DNA polymerase I from Thermus sp. strain 2.9
MHHHHHHGGSGVLPVFEPKGRVLLVDGHHLAYRNFFALKGLTTSRGEPVQGVYGFAKSLLKALKEDGDVVIVVFDAKAPSFRHEAYEAYKAGRAPTPEDFPRQLALMKELVDLLGLERLEVPGFEADDVLATLAKKAEREGYEVQILTADRDLFQLLSPRISVLHPEGHRITPEWLWEKYGLRPEQWVDFRALAGDPSDNIPGVKGIGEKTALKLLKEWGSLENLLKNLDQVKPESVREKILAHLEDLKLSRELSRVRTDLPLEVDFRRRREPDWEGLKAFLERLEFGSLLHEFGLLESPLVAEEAPWPPPEGAFLGYRLSRPEPMWAELLALAASAQGRVYRAEDPHGALRGLFEVRGLLAKDLAVVALREGLDLPPTDDPMLLAYLLDPSNTTPEGVARRYGGEWTEDAAKRALLAERLHANLLGRLQGEERLLWLYEEVEKPLSRVLAHMEATGVKLDVAYLEALSLEVAAEMRRLEEEVFRLAGHSFRLVSRDQLERVLFDELGLPPIGKTEKTGKRSTSAAVLEALREVHPIVDKILQYRELAKLKGTYIDPLPALVHPKTGRLHTRFNQTATATGRLSSSDPNLQNIPVRTPLGQKIRRAFVAEEGWRLVALDYSQIELRVLAHLSGDENLIRVFQEGKDIHTQTASWMFGLSAEAIDPLMRRAAKTINFGVLYGMSAFRLSQELGIPYEEAAAFIQKYFQSYPKVKAWIEKTLEEGRTRGYVETLFGRRRYVPDLNARVKSVREAAERMAFNMPVQGTAADLMKLAMVRLFPQLREVGARMLLQVHDELLLEAPKERAEEVAALAKEVMEGVWPLAVPLEVEVGIGEDWLAAKG

SEQ ID NO: 2793 - DNA, 2529 bp, synthetic construct
  misc_feature 1..2529: note = Variant of DNA polymerase I from Thermus sp. strain 2.9
  source 1..2529: mol_type = other DNA
atgcaccatcatcatcatcatggcggtagcggcgtgttaccggtgttcgagcctaaaggtcgcgtgcttctggttgatggccatcatctcgcgtatcgtaacttctttgccctgaaaggattaaccaccagccgtggcgagccggtacagggtgtctacggctttgcaaagtcgctcctgaaagctctgaaagaagacggtgatgtggtgattgttgtctttgatgcgaaagcgccaagttttcgccacgaagcgtacgaagcttacaaagccgggcgtgctccaacgccggaagactttcctcgccaattggcgcttatgaaggaattagtggatttgcttggcctcgaacgcttggaagttcccggtttcgaggcagacgacgtattagcgactctcgcaaagaaagccgaacgtgagggctatgaagtccagatcttgacagcagatcgcgatcttttccagcttttatctccgcgcatctcggtgttacacccggaagggcatcgtatcaccccggaatggctctgggagaaatatggtttgcgtcccgaacaatgggtggattttcgcgccttagcaggcgatccgagcgacaatattccgggagttaaaggtatcggcgagaagacggcgctcaagctccttaaagaatgggggtcgttggagaacttgcttaagaatttagatcaggtcaaaccagagtcagtgcgtgagaagattcttgcacacctcgaagacctcaaattaagccgcgaattgtcccgtgtacgcaccgatttgccgctcgaagttgatttccgtcgccgccgcgaacctgactgggagggtcttaaagcgtttttagagcgtcttgaatttggttcgctcttgcatgaattcggccttttagaaagcccgttaccagccgaagaagcaccttggccaccgcccgaaggcgcgtttttaggttaccgtttgagtcgcccggaaccgatgtgggccgaattattggctcttgcagcgtctgcccagggacgtgtgtatcgcgcggaagaccctcatggtgcgctccgcggcctcttcgaagtccgtggactccttgccaaagacttagctgttgttgcattgcgcgaaggtcttgatttacctccgactgatgatccaatgcttcttgcgtacctcttggacccgtcaaacacgacgcccgaaggcgtagcccgtcgttacggcggcgggtggaccgaagatgcagcgaaacgcgcgttattggccgaacgtttgcacgccaatttattaggacgtttgcaaggcgaggaacgtctcctctggctttacgaagaagtggagaaaccattgagtcgcgtgctcgcgcatatggaagctaccggtgtcaaattagacgtggcgtatttggaggctctcagccttgaagttgctgccgaaatgcgccgcttggaggaagaagtattccgtttagcaggccattcctttcgccttaattctcgcgatcagttagaacgtgtgttgttcgatgaacttggtctccctcctatcggcaagacagagaagaccggtaaacgtagcacttcagcggcggttttagaagctcttcgcgaagtccatcccattgtggacaagatcttgcagtaccgcgaactcgcgaaattgaaaggcacctatattgaccctcttccggcattagtccacccgaaaacgggacgcctccatacccgcttcaaccaaacagccacggcgaccggtcgtttgtcctcctctgatccaaaccttcagaatattccagtacgtaccccattgggccagaagatccgccgcgcgtttgtagctgaggagggttggcgtttagtggccctcgattatagccaaattgaattacgtgtccttgcccatctttctggcgatgagaacctcatccgcgtgtttcaggaaggcaaagacattcacactcaaacggcaagctggatgtttggattatcagctgaagcgatcgatcctttgatgcgtcgtgcagcgaagaccatcaatttcggtgttctctacggtatgagtgcctttcgtttgtcgcaggaattaggcattccctatgaagaagctgcggcgttcattcagaaatactttcaaagctatcccaaagttaaagcatggatcgagaagactctcgaagaaggccgcacacgtggttacgtagagaccttatttggacgtcgccgctatgttcccgatttaaacgctcgcgtgaaatctgtccgtgaagccgccgaacgcatggcgttcaacatgcctgtacagggcacggcagctgacctcatgaaacttgcaatggtgcgcctttttccacaattgcgtgaagttggtgcccgcatgctcttgcaggtccacgatgaactcttgttagaagcgccaaaagagcgtgcggaagaggtggcagccctcgcgaaagaggttatggaaggcgtgtggcccttagcggtgcctcttgaagtcgaagttggtattggcgaggattggctggctgccaaaggataatga

SEQ ID NO: 2794 - protein, 841 aa, synthetic construct
  REGION 1..841: note = Variant of DNA polymerase I from Thermus sp. strain 2.9
MHHHHHHGGSGVLPVFEPKGRVLLVDGHHLAYRNFFALKGLTTSRGEPVQGVYGFAKSLLKALKEDGDVVIVVFDAKAPSFRHEAYEAYKAGRAPTPEDFPRQLALMKELVDLLGLERLEVPGFEADDVLATLAKKAEREGYEVQILTADRDLFQLLSPRISVLHPEGHRITPEWLWEKYGLRPEQWVDFRALAGDPSDNIPGVKGIGEKTALKLLKEWGSLENLLKNLDQVKPESVREKILAHLEDLKLSRELSRVRTDLPLEVDFRRRREPDWEGLKAFLERLEFGSLLHEFGLLESPLPAEEAPWPPPEGAFLGYRLSRPEPMWAELLALAASAQGRVYRAEDPHGALRGLFEVRGLLAKDLAVVALREGLDLPPTDDPMLLAYLLDPSNTTPEGVARRYGGGWTEDAAKRALLAERLHANLLGRLQGEERLLWLYEEVEKPLSRVLAHMEATGVKLDVAYLEALSLEVAAEMRRLEEEVFRLAGHSFRLNSRDQLERVLFDELGLPPIGKTEKTGKRSTSAAVLEALREVHPIVDKILQYRELAKLKGTYIDPLPALVHPKTGRLHTRFNQTATATGRLSSSDPNLQNIPVRTPLGQKIRRAFVAEEGWRLVALDYSQIELRVLAHLSGDENLIRVFQEGKDIHTQTASWMFGLSAEAIDPLMRRAAKTINFGVLYGMSAFRLSQELGIPYEEAAAFIQKYFQSYPKVKAWIEKTLEEGRTRGYVETLFGRRRYVPDLNARVKSVREAAERMAFNMPVQGTAADLMKLAMVRLFPQLREVGARMLLQVHDELLLEAPKERAEEVAALAKEVMEGVWPLAVPLEVEVGIGEDWLAAKG

SEQ ID NO: 2795 - DNA, 2529 bp, synthetic construct
  misc_feature 1..2529: note = Variant of DNA polymerase I from Thermus sp. strain 2.9
  source 1..2529: mol_type = other DNA
atgcaccatcatcatcatcatggcggtagcggcgtgttaccggtgttcgagcctaaaggtcgcgtgcttctggttgatggccatcatctcgcgtatcgtaacttctttgccctgaaaggattaaccaccagccgtggcgagccggtacagggtgtctacggctttgcaaagtcgctcctgaaagctctgaaagaagacggtgatgtggtgattgttgtctttgatgcgaaagcgccaagttttcgccacgaagcgtacgaagcttacaaagccgggcgtgctccaacgccggaagactttcctcgccaattggcgcttatgaaggaattagtggatttgcttggcctcgaacgcttggaagttcccggtttcgaggcagacgacgtattagcgactctcgcaaagaaagccgaacgtgagggctatgaagtccagatcttgacagcagatcgcgatcttttccagcttttatctccgcgcatctcggtgttacacccggaagggcatcgtatcaccccggaatggctctgggagaaatatggtttgcgtcccgaaatgtgggtggattttcgcgccttagcaggcgatccgagcgacaatattccgggagttaaaggtatcggcgagaagacggcgctcaagctccttaaagaatgggggtcgttggagaacttgcttaagaatttagatcaggtcaaaccagagtcagtgcgtgagaagattcttgcacacctcgaagacctcaaattaagccgcgaattgtcccgtgtacgcaccgatttgccgctcgaagttgatttccgtcgccgccgcgaacctgactgggagggtcttaaagcgtttttagagcgtcttgaatttggttcgctcttgcatgaattcggccttttagaaagcccgttaccagccgaagaagcaccttggccaccgcccgaaggcgcgtttttaggttaccgtttgagtcgcccggaaccgatgtgggccgaattattggctcttgcagcgtctgcccagggacgtgtgtatcgcgcggaagaccctcatggtgcgctccgcggcctcttcgaagtccgtggactccttgccaaagacttagctgttgttgcattgcgcgaaggtcttgatttacctccgactgatgatccaatgcttcttgcgtacctcttggacccgtcaaacacgacgcccgaaggcgtagcccgtcgttacggcggcgagtggaccgaagatgcagcgaaacgcgcgttattggccgaacgtttgcacgccaatttattaggacgtttgcaaggcgaggaacgtctcctctggctttacgaagaagtggagaaaccattgagtcgcgtgctcgcgcatatggaagctaccggtgtcaaattagacgtggcgtatttggaggctctcagccttgaagttgctgccgaaatgcgccgcttggaggaagaagtattccgtttagcaggccattcctttcgccttaattctcgcgatcagttagaacgtgtgttgttcgatgaacttggtctccctcctatcggcaagacagagaagaccggtaaacgtagcacttcagcggcggttttagaagctcttcgcgaagtccatcccattgtggacaagatcttgcagtaccgcgaactcgcgaaattgaaaggcacctatattgaccctcttccggcattagtccacccgaaaacgggacgcctccatacccgcttcaaccaaacagccacggcgaccggtcgtttgtcctcctctgatccaaaccttcagaatattccagtacgtaccccattgggccagaagatccgccgcgcgtttgtagctgaggagggttggcgtttagtggccctcgattatagccaaattgaattacgtgtccttgcccatctttctggcgatgagaacctcatccgcgtgtttcaggaaggcaaagacattcacactcaaacggcaagctggatgtttggattatcagctgaagcgatcgatcctttgatgcgtcgtgcagcgaagaccatcaatttcggtgttctctacggtatgagtgcctttcgtttgtcgcaggaattaggcattccctatgaagaagctgcggcgttcattcagaaatactttcaaagctatcccaaagttaaagcatggatcgagaagactctcgaagaaggccgcacacgtggttacgtagagaccttatttggacgtcgccgctatgttcccgatttaaacgctcgcgtgaaatctgtccgtgaagccgccgaacgcatggcgttcaacatgcctgtacagggcacggcagctgacctcatgaaacttgcaatggtgcgcctttttccacaattgcgtgaagttggtgcccgcatgctcttgcaggtccacgatgaactcttgttagaagcgccaaaagagcgtgcggaagaggtggcagccctcgcgaaagaggttatggaaggcgtgtggcccttagcggtgcctcttgaagtcgaagttggtattggcgaggattggctggctgccaaaggataatga

SEQ ID NO: 2796 - protein, 841 aa, synthetic construct
  REGION 1..841: note = Variant of DNA polymerase I from Thermus sp. strain 2.9
MHHHHHHGGSGVLPVFEPKGRVLLVDGHHLAYRNFFALKGLTTSRGEPVQGVYGFAKSLLKALKEDGDVVIVVFDAKAPSFRHEAYEAYKAGRAPTPEDFPRQLALMKELVDLLGLERLEVPGFEADDVLATLAKKAEREGYEVQILTADRDLFQLLSPRISVLHPEGHRITPEWLWEKYGLRPEMWVDFRALAGDPSDNIPGVKGIGEKTALKLLKEWGSLENLLKNLDQVKPESVREKILAHLEDLKLSRELSRVRTDLPLEVDFRRRREPDWEGLKAFLERLEFGSLLHEFGLLESPLPAEEAPWPPPEGAFLGYRLSRPEPMWAELLALAASAQGRVYRAEDPHGALRGLFEVRGLLAKDLAVVALREGLDLPPTDDPMLLAYLLDPSNTTPEGVARRYGGEWTEDAAKRALLAERLHANLLGRLQGEERLLWLYEEVEKPLSRVLAHMEATGVKLDVAYLEALSLEVAAEMRRLEEEVFRLAGHSFRLNSRDQLERVLFDELGLPPIGKTEKTGKRSTSAAVLEALREVHPIVDKILQYRELAKLKGTYIDPLPALVHPKTGRLHTRFNQTATATGRLSSSDPNLQNIPVRTPLGQKIRRAFVAEEGWRLVALDYSQIELRVLAHLSGDENLIRVFQEGKDIHTQTASWMFGLSAEAIDPLMRRAAKTINFGVLYGMSAFRLSQELGIPYEEAAAFIQKYFQSYPKVKAWIEKTLEEGRTRGYVETLFGRRRYVPDLNARVKSVREAAERMAFNMPVQGTAADLMKLAMVRLFPQLREVGARMLLQVHDELLLEAPKERAEEVAALAKEVMEGVWPLAVPLEVEVGIGEDWLAAKG

SEQ ID NO: 2797 - DNA, 2529 bp, synthetic construct
  misc_feature 1..2529: note = Variant of DNA polymerase I from Thermus sp. strain 2.9
  source 1..2529: mol_type = other DNA
atgcaccatcatcatcatcatggcggtagcggcgtgttaccggtgttcgagcctaaaggtcgcgtgcttctggttgatggccatcatctcgcgtatcgtaacttctttgccctgaaaggattaaccaccagccgtggcgagccggtacagggtgtctacggctttgcaaagtcgctcctgaaagctctgaaagaagacggtgatgtggtgattgttgtctttgatgcgaaagcgccaagttttcgccacgaagcgtacgaagcttacaaagccgggcgtgctccaacgccggaagactttcctcgccaattggcgcttatgaagtatttagtggatttgcttggcctcgaacgcttggaagttcccggtttcgaggcagacgacgtattagcgactctcgcaaagaaagccgaacgtgagggctatgaagtccagatcttgacagcagatcgcgatcttttccagcttttatctccgcgcatctcggtgttacacccggaagggcatcgtatcaccccggaatggctctgggagaaatatggtttgcgtcccgaacaatgggtggattttcgcgccttagcaggcgatccgagcgacaatattccgggagttaaaggtatcggcgagaagacggcgctcaagctccttaaagaatgggggtcgttggagaacttgcttaagaatttagatcaggtcaaaccagagtcagtgcgtgagaagattcttgcacacctcgaagacctcaaattaagccgcgaattgtcccgtgtacgcaccgatttgccgctcgaagttgatttccgtcgccgccgcgaacctgactgggagggtcttaaagcgtttttagagcgtcttgaatttggttcgctcttgcatgaattcggccttttagaaagcccgttaccagccgaagaagcaccttggccaccgcccgaaggcgcgtttttaggttaccgtttgagtcgcccggaaccgatgtgggccgaattattggctcttgcagcgtctgcccagggacgtgtgtatcgcgcggaagaccctcatggtgcgctccgcggcctcttcgaagtccgtggactccttgccaaagacttagctgttgttgcattgcgcgaaggtcttgatttacctccgactgatgatccaatgcttcttgcgtacctcttggacccgtcaaacacgacgcccgaaggcgtagcccgtcgttacggcggcgagtggaccgaagatgcagcgaaacgcgcgttattggccgaacgtttgcacgccaatttattaggacgtttgcaaggcgaggaacgtctcctctggctttacgaagaagtggagaaaccattgagtcgcgtgctcgcgcatatggaagctaccggtgtcaaattagacgtggcgtatttggaggctctcagccttgaagttgctgccgaaatgcgccgcttggaggaagaagtattccgtttagcaggccattcctttcgccttaattctcgcgatcagttagaacgtgtgttgttcgatgaacttggtctccctcctatcggcaagacagagaagaccggtaaacgtagcacttcagcggcggttttagaagctcttcgcgaagtccatcccattgtggacaagatcttgcagtaccgcgaactcgcgaaattgaaaggcacctatattgaccctcttccggcattagtccacccgaaaacgggacgcctccatacccgcttcaaccaaacagccacggcgaccggtcgtttgtcctcctctgatccaaaccttcagaatattccagtacgtaccccattgggccagaagatccgccgcgcgtttgtagctgaggagggttggcgtttagtggccctcgattatagccaaattgaattacgtgtccttgcccatctttctggcgatgagaacctcatccgcgtgtttcaggaaggcaaagacattcacactcaaacggcaagctggatgtttggattatcagctgaagcgatcgatcctttgatgcgtcgtgcagcgaagaccatcaatttcggtgttctctacggtatgagtgcctttcgtttgtcgcaggaattaggcattccctatgaagaagctgcggcgttcattcagaaatactttcaaagctatcccaaagttaaagcatggatcgagaagactctcgaagaaggccgcacacgtggttacgtagagaccttatttggacgtcgccgctatgttcccgatttaaacgctcgcgtgaaatctgtccgtgaagccgccgaacgcatggcgttcaacatgcctgtacagggcacggcagctgacctcatgaaacttgcaatggtgcgcctttttccacaattgcgtgaagttggtgcccgcatgctcttgcaggtccacgatgaactcttgttagaagcgccaaaagagcgtgcggaagaggtggcagccctcgcgaaagaggttatggaaggcgtgtggcccttagcggtgcctcttgaagtcgaagttggtattggcgaggattggctggctgccaaaggataatga

SEQ ID NO: 2798 - protein, 841 aa, synthetic construct
  REGION 1..841: note = Variant of DNA polymerase I from Thermus sp. strain 2.9
MHHHHHHGGSGVLPVFEPKGRVLLVDGHHLAYRNFFALKGLTTSRGEPVQGVYGFAKSLLKALKEDGDVVIVVFDAKAPSFRHEAYEAYKAGRAPTPEDFPRQLALMKYLVDLLGLERLEVPGFEADDVLATLAKKAEREGYEVQILTADRDLFQLLSPRISVLHPEGHRITPEWLWEKYGLRPEQWVDFRALAGDPSDNIPGVKGIGEKTALKLLKEWGSLENLLKNLDQVKPESVREKILAHLEDLKLSRELSRVRTDLPLEVDFRRRREPDWEGLKAFLERLEFGSLLHEFGLLESPLPAEEAPWPPPEGAFLGYRLSRPEPMWAELLALAASAQGRVYRAEDPHGALRGLFEVRGLLAKDLAVVALREGLDLPPTDDPMLLAYLLDPSNTTPEGVARRYGGEWTEDAAKRALLAERLHANLLGRLQGEERLLWLYEEVEKPLSRVLAHMEATGVKLDVAYLEALSLEVAAEMRRLEEEVFRLAGHSFRLNSRDQLERVLFDELGLPPIGKTEKTGKRSTSAAVLEALREVHPIVDKILQYRELAKLKGTYIDPLPALVHPKTGRLHTRFNQTATATGRLSSSDPNLQNIPVRTPLGQKIRRAFVAEEGWRLVALDYSQIELRVLAHLSGDENLIRVFQEGKDIHTQTASWMFGLSAEAIDPLMRRAAKTINFGVLYGMSAFRLSQELGIPYEEAAAFIQKYFQSYPKVKAWIEKTLEEGRTRGYVETLFGRRRYVPDLNARVKSVREAAERMAFNMPVQGTAADLMKLAMVRLFPQLREVGARMLLQVHDELLLEAPKERAEEVAALAKEVMEGVWPLAVPLEVEVGIGEDWLAAKG

SEQ ID NO: 2799 - DNA, 2529 bp, synthetic construct
  misc_feature 1..2529: note = Variant of DNA polymerase I from Thermus sp. strain 2.9
  source 1..2529: mol_type = other DNA
atgcaccatcatcatcatcatggcggtagcggcgtgttaccggtgttcgagcctaaaggtcgcgtgcttctggttgatggccatcatctcgcgtatcgtaacttctttgccctgaaaggattaaccaccagccgtggcgagccggtacagggtgtctacggctttgcaaagtcgctcctgaaagctctgaaagaagacggtgatgtggtgattgttgtctttgatgcgaaagcgccaagttttcgccacgaagcgtacgaagcttacaaagccgggcgtgctccaacgccggaagactttcctcgccaattggcgcttatgaaggaattagtggatttgcttggcctcgaacgcttggaagttcccggtttcgaggcagacgacgtattagcgactctcgcaaagaaagccgaacgtgagggctatgaagtccagatcttgacagcagatcgcgatcttttccagcttttatctccgcgcatctcggtgttacacccggaagggcatcgtatcaccccggaatggctctgggagaaatatggtttgcgtcccgaacaatgggtggattttcgcgccttagcaggcgatccgagcgacaatattccgggagttaaaggtatcggcgagaagacggcgctcaagctccttaaagaatgggggtcgttggagaacttgcttaagaatttagatcaggtcaaaccagagtcagtgcgtgagaagattcttgcacacctcgaagacctcaaattaagccgcgaattgtcccgtgtacgcaccgatttgccgctcgaagttgatttccgtcgccgccgcgaacctgactgggagggtcttaaagcgtttttagagcgtcttgaatttggttcgctcttgcatgaattcggccttttagaaagcccgttaccagccgaagaagcaccttggccaccgcccgaaggcgcgtttttaggttaccgtttgagtcgcccggaaccgatgtgggccgaattattggctcttgcagcgtctgcccagggacgtgtgtatcgcgcggaagaccctcatggtgcgctccgcggcctcttcgaagtccgtggactccttgccaaagacttagctgttgttgcattgcgcgaaggtcttgatttacctccgactgatgatccaatgcttcttgcgtacctcttggacccgtcaaacacgacgcccgaaggcgtagcccgtcgttacggcggcgagtggaccgaagatgcagcgaaacgcgcgttattggccgaacgtttgcacgccaatttattaggacgtttgcaaggcgaggaacgtctcctctggctttacgaagaagtggagaaaccattgagtcgcgtgctcgcgcatatggaagctaccggtgtcaaattagacgtggcgtatttggaggctctcagccttgaagttgctgccgaaatgcgccgcttggaggaagaagtattccgtttagcaggccattcctttcgccttaattctcgcgatcagttagaacgtgtgttgttcgatgaacttggtctcatgcctatcggcaagacagagaagaccggtaaacgtagcacttcagcggcggttttagaagctcttcgcgaagtccatcccattgtggacaagatcttgcagtaccgcgaactcgcgaaattgaaaggcacctatattgaccctcttccggcattagtccacccgaaaacgggacgcctccatacccgcttcaaccaaacagccacggcgaccggtcgtttgtcctcctctgatccaaaccttcagaatattccagtacgtaccccattgggccagaagatccgccgcgcgtttgtagctgaggagggttggcgtttagtggccctcgattatagccaaattgaattacgtgtccttgcccatctttctggcgatgagaacctcatccgcgtgtttcaggaaggcaaagacattcacactcaaacggcaagctggatgtttggattatcagctgaagcgatcgatcctttgatgcgtcgtgcagcgaagaccatcaatttcggtgttctctacggtatgagtgcctttcgtttgtcgcaggaattaggcattccctatgaagaagctgcggcgttcattcagaaatactttcaaagctatcccaaagttaaagcatggatcgagaagactctcgaagaaggccgcacacgtggttacgtagagaccttatttggacgtcgccgctatgttcccgatttaaacgctcgcgtgaaatctgtccgtgaagccgccgaacgcatggcgttcaacatgcctgtacagggcacggcagctgacctcatgaaacttgcaatggtgcgcctttttccacaattgcgtgaagttggtgcccgcatgctcttgcaggtccacgatgaactcttgttagaagcgccaaaagagcgtgcggaagaggtggcagccctcgcgaaagaggttatggaaggcgtgtggcccttagcggtgcctcttgaagtcgaagttggtattggcgaggattggctggctgccaaaggataatga

SEQ ID NO: 2800 - protein, 841 aa, synthetic construct
  REGION 1..841: note = Variant of DNA polymerase I from Thermus sp. strain 2.9
MHHHHHHGGSGVLPVFEPKGRVLLVDGHHLAYRNFFALKGLTTSRGEPVQGVYGFAKSLLKALKEDGDVVIVVFDAKAPSFRHEAYEAYKAGRAPTPEDFPRQLALMKELVDLLGLERLEVPGFEADDVLATLAKKAEREGYEVQILTADRDLFQLLSPRISVLHPEGHRITPEWLWEKYGLRPEQWVDFRALAGDPSDNIPGVKGIGEKTALKLLKEWGSLENLLKNLDQVKPESVREKILAHLEDLKLSRELSRVRTDLPLEVDFRRRREPDWEGLKAFLERLEFGSLLHEFGLLESPLPAEEAPWPPPEGAFLGYRLSRPEPMWAELLALAASAQGRVYRAEDPHGALRGLFEVRGLLAKDLAVVALREGLDLPPTDDPMLLAYLLDPSNTTPEGVARRYGGEWTEDAAKRALLAERLHANLLGRLQGEERLLWLYEEVEKPLSRVLAHMEATGVKLDVAYLEALSLEVAAEMRRLEEEVFRLAGHSFRLNSRDQLERVLFDELGLMPIGKTEKTGKRSTSAAVLEALREVHPIVDKILQYRELAKLKGTYIDPLPALVHPKTGRLHTRFNQTATATGRLSSSDPNLQNIPVRTPLGQKIRRAFVAEEGWRLVALDYSQIELRVLAHLSGDENLIRVFQEGKDIHTQTASWMFGLSAEAIDPLMRRAAKTINFGVLYGMSAFRLSQELGIPYEEAAAFIQKYFQSYPKVKAWIEKTLEEGRTRGYVETLFGRRRYVPDLNARVKSVREAAERMAFNMPVQGTAADLMKLAMVRLFPQLREVGARMLLQVHDELLLEAPKERAEEVAALAKEVMEGVWPLAVPLEVEVGIGEDWLAAKG

SEQ ID NO: 2801 - DNA, 2529 bp, synthetic construct
  misc_feature 1..2529: note = Variant of DNA polymerase I from Thermus sp. strain 2.9
  source 1..2529: mol_type = other DNA
atgcaccatcatcatcatcatggcggtagcggcgtgttaccggtgttcgagcctaaaggtcgcgtgcttctggttgatggccatcatctcgcgtatcgtaacttctttgccctgaaaggattaaccaccagccgtggcgagccggtacagggtgtctacggctttgcaaagtcgctcctgaaagctctgaaagaagacggtgatgtggtgattgttgtctttgatgcgaaagcgccaagttttcgccacgaagcgtacgaagcttacaaagccgggcgtgctccaacgccggaagactttcctcgccaattggcgcttatgaaggaattagtggatttgcttggcctcgaacgcttggaagttcccggtttcgaggcagacgacgtattagcgactctcgcaaagaaagccgaacgtgagggctatgaagtccagatcttgacagcagatcgcgatcttttccagcttttatctccgcgcatctcggtgttacacccggaagggcatcgtatcaccccggaatggctctgggagaaatatggtttgcgtcccgaacaatgggtggattttcgcgccttagcaggcgatccgagcgacaatattccgggagttaaaggtatcggcgagaagacggcgctcaagctccttaaagaatgggggtcgttggagaacttgcttaagaatttagatcaggtcaaaccagagtcagtgcgtgagaagattcttgcacacctcgaagacctcaaattaagccgcgaattgtcccgtgtacgcaccgatttgccgctcgaagttgatttccgtcgccgccgcgaacctgactgggagggtcttaaagcgtttttagagcgtcttgaatttggttcgctcttgcatgaattcggccttttagaaagcccgttaccagccgaagaagcaccttggccaccgcccgaaggcgcgtttttaggttaccgtttgagtcgcccggaaccgatgtgggccgaattattggctcttgcagcgtctgcccagggacgtgtgtatcgcgcggaagaccctcatggtgcgctccgcggcctcttcgaagtccgtggactccttgccaaagacttagctgttgttgcattgcgcgaaggtcttgatttacctccgactgatgatccaatgcttcttgcgtacctcttggacccgtcaaacacgacgcccgaaggcgtagcccgtcgttacggcggcgagtggaccgaagatgcagcgaaacgcgcgttattggccgaacgtttgcacgccaatttattaggacgtttgcaaggcgaggaacgtctcctctggctttacgaagaagtggagaaaccattgagtcgcgtgctcgcgcatatggaagctaccggtgtcaaattagacgtggcgtatttggaggctctcagccttgaagttgctgccgaaatgcgccgcttggaggaagaagtattccgtttagcaggccattcctttcgccttaattctcgcgatcagttagaacgtgtgttgttcgatgaacttggtctccctcctatcggcaagacagagaagaccggtaaacgtagcacttcagcggcggttttagaagctcttcgcgaagtccatcccattgtggacaagatcttgcagtaccgcgaactcgcgaaattgaaaggcacctatattgaccctcttccggcattagtccacccgaaaacgggacgcctccatacccgcttcaaccaaacagccacggcgaccggtcgtttgtcctcctctgatccaaaccttcagaatattccagtacgtaccccattgggccagaagatccgccgcgcgtttgtagctgaggagggttggcgtttagtggccctcgattatagccaaattgaattacgtgtccttgcccatctttctggcgatgagaacctcatccgcgtgtttcaggaaggcaaagacattcacactcaaacggcaagctggatgtttggattatcagctgaagcgatcgatcctttgatgcgtcgtatggcgaagaccatcaatttcggtgttctctacggtatgagtgcctttcgtttgtcgcaggaattaggcattccctatgaagaagctgcggcgttcattcagaaatactttcaaagctatcccaaagttaaagcatggatcgagaagactctcgaagaaggccgcacacgtggttacgtagagaccttatttggacgtcgccgctatgttcccgatttaaacgctcgcgtgaaatctgtccgtgaagccgccgaacgcatggcgttcaacatgcctgtacagggcacggcagctgacctcatgaaacttgcaatggtgcgcctttttccacaattgcgtgaagttggtgcccgcatgctcttgcaggtccacgatgaactcttgttagaagcgccaaaagagcgtgcggaagaggtggcagccctcgcgaaagaggttatggaaggcgtgtggcccttagcggtgcctcttgaagtcgaagttggtattggcgaggattggctggctgccaaaggataatga

SEQ ID NO: 2802 - protein, 841 aa, synthetic construct
  REGION 1..841: note = Variant of DNA polymerase I from Thermus sp. strain 2.9
MHHHHHHGGSGVLPVFEPKGRVLLVDGHHLAYRNFFALKGLTTSRGEPVQGVYGFAKSLLKALKEDGDVVIVVFDAKAPSFRHEAYEAYKAGRAPTPEDFPRQLALMKELVDLLGLERLEVPGFEADDVLATLAKKAEREGYEVQILTADRDLFQLLSPRISVLHPEGHRITPEWLWEKYGLRPEQWVDFRALAGDPSDNIPGVKGIGEKTALKLLKEWGSLENLLKNLDQVKPESVREKILAHLEDLKLSRELSRVRTDLPLEVDFRRRREPDWEGLKAFLERLEFGSLLHEFGLLESPLPAEEAPWPPPEGAFLGYRLSRPEPMWAELLALAASAQGRVYRAEDPHGALRGLFEVRGLLAKDLAVVALREGLDLPPTDDPMLLAYLLDPSNTTPEGVARRYGGEWTEDAAKRALLAERLHANLLGRLQGEERLLWLYEEVEKPLSRVLAHMEATGVKLDVAYLEALSLEVAAEMRRLEEEVFRLAGHSFRLNSRDQLERVLFDELGLPPIGKTEKTGKRSTSAAVLEALREVHPIVDKILQYRELAKLKGTYIDPLPALVHPKTGRLHTRFNQTATATGRLSSSDPNLQNIPVRTPLGQKIRRAFVAEEGWRLVALDYSQIELRVLAHLSGDENLIRVFQEGKDIHTQTASWMFGLSAEAIDPLMRRMAKTINFGVLYGMSAFRLSQELGIPYEEAAAFIQKYFQSYPKVKAWIEKTLEEGRTRGYVETLFGRRRYVPDLNARVKSVREAAERMAFNMPVQGTAADLMKLAMVRLFPQLREVGARMLLQVHDELLLEAPKERAEEVAALAKEVMEGVWPLAVPLEVEVGIGEDWLAAKG

SEQ ID NO: 2803 - DNA, 2529 bp, synthetic construct
  misc_feature 1..2529: note = Variant of DNA polymerase I from Thermus sp. strain 2.9
  source 1..2529: mol_type = other DNA
atgcaccatcatcatcatcatggcggtagcggcgtgttaccggtgttcgagcctaaaggtcgcgtgcttctggttgatggccatcatctcgcgtatcgtaacttctttgccctgaaaggattaaccaccagccgtggcgagccggtacagggtgtctacggctttgcaaagtcgctcctgaaagctctgaaagaagacggtgatgtggtgattgttgtctttgatgcgaaagcgccaagttttcgccacgaagcgtacgaagcttacaaagccgggcgtgctccaacgccggaagactttcctcgccaattggcgcttatgaaggaattagtggatttgcttggcctcgaacgcttggaagttcccggtttcgaggcagacgacgtattagcgactctcgcaaagaaagccgaacgtgagggctatgaagtccagatcttgacagcagatcgcgatcttttccagcttttatctccgcgcatctcggtgttacacccggaagggcatcgtatcaccccggaatggctctgggagaaatatggtttgcgtcccgaacaatgggtggattttcgcgccttagcaggcgatccgagcgacaatattccgggagttaaaggtatcggcgagaagacggcgctcaagctccttaaagaatgggggtcgttggagaacttgcttaagaatttagatcaggtcaaaccagagtcagtgcgtgagaagattcttgcacacctcgaagacctcaaattaagccgcgaattgtcccgtgtacgcaccgatttgccgctcgaagttgatttccgtcgccgccgcgaacctgactgggagggtcttaaagcgtttttagagcgtcttgaatttggttcgctcttgcatgaattcggccttttagaaagcgagttaccagccgaagaagcaccttggccaccgcccgaaggcgcgtttttaggttaccgtttgagtcgcccggaaccgatgtgggccgaattattggctcttgcagcgtctgcccagggacgtgtgtatcgcgcggaagaccctcatggtgcgctccgcggcctcttcgaagtccgtggactccttgccaaagacttagctgttgttgcattgcgcgaaggtcttgatttacctccgactgatgatccaatgcttcttgcgtacctcttggacccgtcaaacacgacgcccgaaggcgtagcccgtcgttacggcggcgagtggaccgaagatgcagcgaaacgcgcgttattggccgaacgtttgcacgccaatttattaggacgtttgcaaggcgaggaacgtctcctctggctttacgaagaagtggagaaaccattgagtcgcgtgctcgcgcatatggaagctaccggtgtcaaattagacgtggcgtatttggaggctctcagccttgaagttgctgccgaaatgcgccgcttggaggaagaagtattccgtttagcaggccattcctttcgccttaattctcgcgatcagttagaacgtgtgttgttcgatgaacttggtctccctcctatcggcaagacagagaagaccggtaaacgtagcacttcagcggcggttttagaagctcttcgcgaagtccatcccattgtggacaagatcttgcagtaccgcgaactcgcgaaattgaaaggcacctatattgaccctcttccggcattagtccacccgaaaacgggacgcctccatacccgcttcaaccaaacagccacggcgaccggtcgtttgtcctcctctgatccaaaccttcagaatattccagtacgtaccccattgggccagaagatccgccgcgcgtttgtagctgaggagggttggcgtttagtggccctcgattatagccaaattgaattacgtgtccttgcccatctttctggcgatgagaacctcatccgcgtgtttcaggaaggcaaagacattcacactcaaacggcaagctggatgtttggattatcagctgaagcgatcgatcctttgatgcgtcgtgcagcgaagaccatcaatttcggtgttctctacggtatgagtgcctttcgtttgtcgcaggaattaggcattccctatgaagaagctgcggcgttcattcagaaatactttcaaagctatcccaaagttaaagcatggatcgagaagactctcgaagaaggccgcacacgtggttacgtagagaccttatttggacgtcgccgctatgttcccgatttaaacgctcgcgtgaaatctgtccgtgaagccgccgaacgcatggcgttcaacatgcctgtacagggcacggcagctgacctcatgaaacttgcaatggtgcgcctttttccacaattgcgtgaagttggtgcccgcatgctcttgcaggtccacgatgaactcttgttagaagcgccaaaagagcgtgcggaagaggtggcagccctcgcgaaagaggttatggaaggcgtgtggcccttagcggtgcctcttgaagtcgaagttggtattggcgaggattggctggctgccaaaggataatga

SEQ ID NO: 2804 - protein, 841 aa, synthetic construct
  REGION 1..841: note = Variant of DNA polymerase I from Thermus sp. strain 2.9
MHHHHHHGGSGVLPVFEPKGRVLLVDGHHLAYRNFFALKGLTTSRGEPVQGVYGFAKSLLKALKEDGDVVIVVFDAKAPSFRHEAYEAYKAGRAPTPEDFPRQLALMKELVDLLGLERLEVPGFEADDVLATLAKKAEREGYEVQILTADRDLFQLLSPRISVLHPEGHRITPEWLWEKYGLRPEQWVDFRALAGDPSDNIPGVKGIGEKTALKLLKEWGSLENLLKNLDQVKPESVREKILAHLEDLKLSRELSRVRTDLPLEVDFRRRREPDWEGLKAFLERLEFGSLLHEFGLLESELPAEEAPWPPPEGAFLGYRLSRPEPMWAELLALAASAQGRVYRAEDPHGALRGLFEVRGLLAKDLAVVALREGLDLPPTDDPMLLAYLLDPSNTTPEGVARRYGGEWTEDAAKRALLAERLHANLLGRLQGEERLLWLYEEVEKPLSRVLAHMEATGVKLDVAYLEALSLEVAAEMRRLEEEVFRLAGHSFRLNSRDQLERVLFDELGLPPIGKTEKTGKRSTSAAVLEALREVHPIVDKILQYRELAKLKGTYIDPLPALVHPKTGRLHTRFNQTATATGRLSSSDPNLQNIPVRTPLGQKIRRAFVAEEGWRLVALDYSQIELRVLAHLSGDENLIRVFQEGKDIHTQTASWMFGLSAEAIDPLMRRAAKTINFGVLYGMSAFRLSQELGIPYEEAAAFIQKYFQSYPKVKAWIEKTLEEGRTRGYVETLFGRRRYVPDLNARVKSVREAAERMAFNMPVQGTAADLMKLAMVRLFPQLREVGARMLLQVHDELLLEAPKERAEEVAALAKEVMEGVWPLAVPLEVEVGIGEDWLAAKG

SEQ ID NO: 2805 - DNA, 2529 bp, synthetic construct
  misc_feature 1..2529: note = Variant of DNA polymerase I from Thermus sp. strain 2.9
  source 1..2529: mol_type = other DNA
atgcaccatcatcatcatcatggcggtagcggcgtgttaccggtgttcgagcctaaaggtcgcgtgcttctggttgatggccatcatctcgcgtatcgtaacttctttgccctgaaaggattaaccaccagccgtggcgagccggtacagggtgtctacggctttgcaaagtcgctcctgaaagctctgaaagaagacggtgatgtggtgattgttgtctttgatgcgaaagcgccaagttttcgccacgaagcgtacgaagcttacaaagccgggcgtgctccaacgccggaagactttcctcgccaattggcgcttatgaaggaattagtggatttgcttggcctcgaacgcttggaagttcccggtttcgaggcagacgacgtattagcgactctcgcaaagaaagccgaacgtgagggctatgaagtccagatcttgacagcagatcgcgatcttttccagcttttatctccgcgcatctcggtgttacacccggaagggcatcgtatcaccccggaatggctctgggagaaatatggtttgcgtcccgaacaatgggtggattttcgcgccttagcaggcgatccgagcgacaatattccgggagttaaaggtatcggcgagaagacggcgctcaagctccttaaagaatgggggtcgttggagaacttgcttaagaatttagatcaggtcaaaccagagtcagtgcgtgagaagattcttgcacacctcgaagacctcaaattaagccgcgaattgtcccgtgtacgcaccgatttgccgctcgaagttgatttccgtcgccgccgcgaacctgactgggagggtcttaaagcgtttttagagcgtcttgaatttggttcgctcttgcatgaattcggccttttagaaagcccgttaccagccgaagaagcaccttggccaccgcccgaaggcgcgtttttaggttaccgtttgagtcgcccggaaccgatgtgggccgaattattggctcttgcagcgtctgcccagggacgtgtgtatcgcgcggaagaccctcatggtgcgctccgcggcctcttcgaagtccgtggactccttgccaaagacttagctgttgttgcattgcgcgaaggtcttgatttacctccgactgatgatccaatgcttcttgcgtacctcttggacccgtcaaacacgacgcccgaaggcgtagcccgtcgttacggcggcgagtggaccgaagatgcagcgaaacgcgcgttattggccgaacgtttgcacgccaatttattaggacgtttgcaaggcgaggaacgtctcctctggctttacgaagaagtggagaaaccattgagtcgcgtgctcgcgcatatggaagctaccggtgtcaaattagacgtggcgtatttggaggctctcagccttgaagttgctgccgaaatgcgccgcttggaggaagaagtattccgtttagcaggccattcctttcgccttaattctcgcgatcagttagaacgtgtgttgttcgatgaacttggtctccctcctatcggcaagacagagaagaccggtaaacgtagcacttcagcggcggttttagaagctcttcgcgaagtccatcccattgtggacaagatcttgcagtaccgcgaactcgcgaaattgaaaggcacctatattgaccctcttccggcattagtccacccgaaaacgggacgcctccatacccgcttcaaccaaacagccacggcgaccggtcgtttgtcctcctctgatccaaaccttcagaatattccagtacgtaccccattgggccagaagatccgccgcgcgtttgtagctgaggagggttggcgtttagtggccctcgattatagccaaattgaattacgtgtccttgcccatctttctggcgatgagaacctcatccgcgtgtttcaggaaggcaaagacattcacactcaaacggcaagctggatgtttggattatcagctgaagcgatcgatcctttgatgcgtcgtgcagcgaagaccatcaatttcggtgttctctacggtatgagtgcctttcgtttgtcgcaggaattaggcattccctatgaagaagctgcggcgttcattcagaaatactttcaaagctatcccaaagttaaagcatggatcgagaagactctcgaagaaggccgcacacgtggttacgtagagaccttatttggacgtcgccgctatgttcccgatttaaacgctcgcgtgaaatctgtccgtgaagccgccgaacgcatggcgttcaacatgcctgtacagggcacggcagctgacctcatgaaacttgcaatggtgcgcctttttccacaattgcgtgaagttggtgcccgcatgctcttgcaggtccacgatgaactcttgttagaagcgccaaaagagggggcggaagaggtggcagccctcgcgaaagaggttatggaaggcgtgtggcccttagcggtgcctcttgaagtcgaagttggtattggcgaggattggctggctgccaaaggataatga

SEQ ID NO: 2806 - protein, 841 aa, synthetic construct
  REGION 1..841: note = Variant of DNA polymerase I from Thermus sp. strain 2.9
MHHHHHHGGSGVLPVFEPKGRVLLVDGHHLAYRNFFALKGLTTSRGEPVQGVYGFAKSLLKALKEDGDVVIVVFDAKAPSFRHEAYEAYKAGRAPTPEDFPRQLALMKELVDLLGLERLEVPGFEADDVLATLAKKAEREGYEVQILTADRDLFQLLSPRISVLHPEGHRITPEWLWEKYGLRPEQWVDFRALAGDPSDNIPGVKGIGEKTALKLLKEWGSLENLLKNLDQVKPESVREKILAHLEDLKLSRELSRVRTDLPLEVDFRRRREPDWEGLKAFLERLEFGSLLHEFGLLESPLPAEEAPWPPPEGAFLGYRLSRPEPMWAELLALAASAQGRVYRAEDPHGALRGLFEVRGLLAKDLAVVALREGLDLPPTDDPMLLAYLLDPSNTTPEGVARRYGGEWTEDAAKRALLAERLHANLLGRLQGEERLLWLYEEVEKPLSRVLAHMEATGVKLDVAYLEALSLEVAAEMRRLEEEVFRLAGHSFRLNSRDQLERVLFDELGLPPIGKTEKTGKRSTSAAVLEALREVHPIVDKILQYRELAKLKGTYIDPLPALVHPKTGRLHTRFNQTATATGRLSSSDPNLQNIPVRTPLGQKIRRAFVAEEGWRLVALDYSQIELRVLAHLSGDENLIRVFQEGKDIHTQTASWMFGLSAEAIDPLMRRAAKTINFGVLYGMSAFRLSQELGIPYEEAAAFIQKYFQSYPKVKAWIEKTLEEGRTRGYVETLFGRRRYVPDLNARVKSVREAAERMAFNMPVQGTAADLMKLAMVRLFPQLREVGARMLLQVHDELLLEAPKEGAEEVAALAKEVMEGVWPLAVPLEVEVGIGEDWLAAKG

SEQ ID NO: 2807 - DNA, 2529 bp, synthetic construct
  misc_feature 1..2529: note = Variant of DNA polymerase I from Thermus sp. strain 2.9
  source 1..2529: mol_type = other DNA
atgcaccatcatcatcatcatggcggtagcggcgtgttaccggtgttcgagcctaaaggtcgcgtgcttctggttgatggccatcatctcgcgtatcgtaacttctttgccctgaaaggattaaccaccagccgtggcgagccggtacagggtgtctacggctttgcaaagtcgctcctgaaagctctgaaagaagacggtgatgtggtgattgttgtctttgatgcgaaagcgccaagttttcgccacgaagcgtacgaagcttacaaagccgggcgtgctccaacgccggaagactttcctcgccaattggcgcttatgaaggaattagtggatttgcttggcctcgaacgcttggaagttcccggtttcgaggcagacgacgtattagcgactctcgcaaagaaagccgaacgtgagggctatgaagtccagatcttgacagcagatcgcgatcttttccagcttttatctccgcgcatctcggtgttacacccggaagggcatcgtatcaccccggaatggctctgggagaaatatggtttgcgtcccgaacaatgggtggattttcgcgccttagcaggcgatccgagcgacaatattccgggagttaaaggtatcggcgagaagacggcgctcaagctccttaaagaatgggggtcgttggagaacttgcttaagaatttagatcaggtcgaaccagagtcagtgcgtgagaagattcttgcacacctcgaagacctcaaattaagccgcgaattgtcccgtgtacgcaccgatttgccgctcgaagttgatttccgtcgccgccgcgaacctgactgggagggtcttaaagcgtttttagagcgtcttgaatttggttcgctcttgcatgaattcggccttttagaaagcccgttaccagccgaagaagcaccttggccaccgcccgaaggcgcgtttttaggttaccgtttgagtcgcccggaaccgatgtgggccgaattattggctcttgcagcgtctgcccagggacgtgtgtatcgcgcggaagaccctcatggtgcgctccgcggcctcttcgaagtccgtggactccttgccaaagacttagctgttgttgcattgcgcgaaggtcttgatttacctccgactgatgatccaatgcttcttgcgtacctcttggacccgtcaaacacgacgcccgaaggcgtagcccgtcgttacggcggcgagtggaccgaagatgcagcgaaacgcgcgttattggccgaacgtttgcacgccaatttattaggacgtttgcaaggcgaggaacgtctcctctggctttacgaagaagtggagaaaccattgagtcgcgtgctcgcgcatatggaagctaccggtgtcaaattagacgtggcgtatttggaggctctcagccttgaagttgctgccgaaatgcgccgcttggaggaagaagtattccgtttagcaggccattcctttcgccttaattctcgcgatcagttagaacgtgtgttgttcgatgaacttggtctccctcctatcggcaagacagagaagaccggtaaacgtagcacttcagcggcggttttagaagctcttcgcgaagtccatcccattgtggacaagatcttgcagtaccgcgaactcgcgaaattgaaaggcacctatattgaccctcttccggcattagtccacccgaaaacgggacgcctccatacccgcttcaaccaaacagccacggcgaccggtcgtttgtcctcctctgatccaaaccttcagaatattccagtacgtaccccattgggccagaagatccgccgcgcgtttgtagctgaggagggttggcgtttagtggccctcgattatagccaaattgaattacgtgtccttgcccatctttctggcgatgagaacctcatccgcgtgtttcaggaaggcaaagacattcacactcaaacggcaagctggatgtttggattatcagctgaagcgatcgatcctttgatgcgtcgtgcagcgaagaccatcaatttcggtgttctctacggtatgagtgcctttcgtttgtcgcaggaattaggcattccctatgaagaagctgcggcgttcattcagaaatactttcaaagctatcccaaagttaaagcatggatcgagaagactctcgaagaaggccgcacacgtggttacgtagagaccttatttggacgtcgccgctatgttcccgatttaaacgctcgcgtgaaatctgtccgtgaagccgccgaacgcatggcgttcaacatgcctgtacagggcacggcagctgacctcatgaaacttgcaatggtgcgcctttttccacaattgcgtgaagttggtgcccgcatgctcttgcaggtccacgatgaactcttgttagaagcgccaaaagagcgtgcggaagaggtggcagccctcgcgaaagaggttatggaaggcgtgtggcccttagcggtgcctcttgaagtcgaagttggtattggcgaggattggctggctgccaaaggataatga

SEQ ID NO: 2808 - protein, 841 aa, synthetic construct
  REGION 1..841: note = Variant of DNA polymerase I from Thermus sp. strain 2.9
MHHHHHHGGSGVLPVFEPKGRVLLVDGHHLAYRNFFALKGLTTSRGEPVQGVYGFAKSLLKALKEDGDVVIVVFDAKAPSFRHEAYEAYKAGRAPTPEDFPRQLALMKELVDLLGLERLEVPGFEADDVLATLAKKAEREGYEVQILTADRDLFQLLSPRISVLHPEGHRITPEWLWEKYGLRPEQWVDFRALAGDPSDNIPGVKGIGEKTALKLLKEWGSLENLLKNLDQVEPESVREKILAHLEDLKLSRELSRVRTDLPLEVDFRRRREPDWEGLKAFLERLEFGSLLHEFGLLESPLPAEEAPWPPPEGAFLGYRLSRPEPMWAELLALAASAQGRVYRAEDPHGALRGLFEVRGLLAKDLAVVALREGLDLPPTDDPMLLAYLLDPSNTTPEGVARRYGGEWTEDAAKRALLAERLHANLLGRLQGEERLLWLYEEVEKPLSRVLAHMEATGVKLDVAYLEALSLEVAAEMRRLEEEVFRLAGHSFRLNSRDQLERVLFDELGLPPIGKTEKTGKRSTSAAVLEALREVHPIVDKILQYRELAKLKGTYIDPLPALVHPKTGRLHTRFNQTATATGRLSSSDPNLQNIPVRTPLGQKIRRAFVAEEGWRLVALDYSQIELRVLAHLSGDENLIRVFQEGKDIHTQTASWMFGLSAEAIDPLMRRAAKTINFGVLYGMSAFRLSQELGIPYEEAAAFIQKYFQSYPKVKAWIEKTLEEGRTRGYVETLFGRRRYVPDLNARVKSVREAAERMAFNMPVQGTAADLMKLAMVRLFPQLREVGARMLLQVHDELLLEAPKERAEEVAALAKEVMEGVWPLAVPLEVEVGIGEDWLAAKG

SEQ ID NO: 2809 - DNA, 2529 bp, synthetic construct
  misc_feature 1..2529: note = Variant of DNA polymerase I from Thermus sp. strain 2.9
  source 1..2529: mol_type = other DNA
atgcaccatcatcatcatcatggcggtagcggcgtgttaccggtgttcgagcctaaaggtcgcgtgcttctggttgatggccatcatctcgcgtatcgtaacttctttgccctgaaaggattaaccaccagccgtggcgagccggtacagggtgtctacggctttgcaaagtcgctcctgaaagctctgaaagaagacggtgatgtggtgattgttgtctttgatgcgaaagcgccaagttttcgccacgaagcgtacgaagcttacaaagccgggcgtgctccaacgccggaagactttcctcgccaattggcgcttatgaaggaattagtggatttgcttggcctcgaacgcttggaagttcccggtttcgaggcagacgacgtattagcgactctcgcaaagaaagccgaacgtgagggctatgaagtccagatcttgacagcagatcgcgatcttttccagcttttatctccgcgcatctcggtgttacacccggaagggcatcgtatcaccccggaatggctctgggagaaatatggtttgcgtcccgaacaatgggtggattttcgcgccttagcaggcgatccgagcgacaatattccgggagttaaaggtatcggcgagaagacggcgctcaagctccttaaagaatgggggtcgttggagaacttgcttaagaatttagatcaggtcaaaccagagtcagtgcgtgagaagattcttgcacacctcgaagacctcaaattaagccgcgaattgtcccgtgtacgcaccgatttgccgctcgaagttgatttccgtcgccgccgcgaacctgactgggagggtcttaaagcgtttttagagcgtcttgaatttggttcgctcttgcatgaattcggccttttagaaagcccgttaccggccgaagaagcaccttggccaccgcccgaaggcgcgtttttaggttaccgtttgagtcgcccggaaccgatgtgggccgaattattggctcttgcagcgtctgcccagggaaccgtgtatcgcgcggaagaccctcatggtgcgctccgcggcctcttcgaagtccgtggactccttgccaaagacttagctgttgttgcattgcgcgaaggtcttgatttacctccgactgatgatccaatgcttcttgcgtacctcttggacccgtcaaacacgacgcccgaaggcgtagcccgtcgttacggcggcgagtggaccgaagatgcagcgaaacgcgcgttattggccgaacgtttgcacgccaatttattaggacgtttgcaaggcgaggaacgtctcctctggctttacgaagaagtggagaaaccattgagtcgcgtgctcgcgcatatggaagctaccggtgtcaaattagacgtggcgtatttggaggctctcagccttgaagttgctgccgaaatgcgccgcttggaggaagaagtattccgtttagcaggccgttcctttcgccttgtatctcgcgatcagttagaacgtgtgttgttcgatgaacttggtctccctcctatcggcaagacagagaagaccggtaaacgtagcacttcagctgcggttttagaagctcttcgcgaagtccatcccattgtggacaagatcttggcgtaccgcgaactcgcgaaattgaaaggcacctatattgaccctcttccggcattagtccacccgaaaacgggacgcctccatacccgcttcaaccaaacagccacggcgaccggtcgtttgtcctcctctgatccaaaccttcagaatattccagtacgtaccccattgggccagaagatccgccgcgcgtttgtagctgaggagggttggcgtttagtggccctcgattatagccaaattgaattacgtgtccttgcccatctttctggcgatgagaacctcatccgcgtgtttcaggaaggcaaagacattcacactcaaacggcaagctggatgtttggattaggcgctgaagcgatcgatcctttgatgcgtcgtgcagcgaagaccatcaatttcggtgttctctacggtatgagtgcctttcgtttgtcgcaggaattaggcattccctatgaagaagctgcggcgttcattcagaaatactttcaaagctatcccaaagttaaagcatggatcgagaagactctcgaggaaggccgcacacgtggttacgtagagaccttatttggacgtcgccgctatgttcccgatttaaacgctcgcgtgaaatctgtccgtgaagccgccgaacgcatggcgttcaacatgcctgtacagggcacggcagctgacctcatgaaacttgcaatggtgcgcctttttccacaattgcgtgaagttggtgcccgcatgctcttgcaggtccacgatgaactcttgttagaagcgccaaaagagcgtgcggaagaggtggcagccctcgcgaaaaccgttatggaaggcgtgtggcccttagcggtgcctcttgaagtcgaagttggtattggcgaggattggctggctgccaaaggataatga

SEQ ID NO: 2810 - protein, 841 aa, synthetic construct
  REGION 1..841: note = Variant of DNA polymerase I from Thermus sp. strain 2.9
MHHHHHHGGSGVLPVFEPKGRVLLVDGHHLAYRNFFALKGLTTSRGEPVQGVYGFAKSLLKALKEDGDVVIVVFDAKAPSFRHEAYEAYKAGRAPTPEDFPRQLALMKELVDLLGLERLEVPGFEADDVLATLAKKAEREGYEVQILTADRDLFQLLSPRISVLHPEGHRITPEWLWEKYGLRPEQWVDFRALAGDPSDNIPGVKGIGEKTALKLLKEWGSLENLLKNLDQVKPESVREKILAHLEDLKLSRELSRVRTDLPLEVDFRRRREPDWEGLKAFLERLEFGSLLHEFGLLESPLPAEEAPWPPPEGAFLGYRLSRPEPMWAELLALAASAQGTVYRAEDPHGALRGLFEVRGLLAKDLAVVALREGLDLPPTDDPMLLAYLLDPSNTTPEGVARRYGGEWTEDAAKRALLAERLHANLLGRLQGEERLLWLYEEVEKPLSRVLAHMEATGVKLDVAYLEALSLEVAAEMRRLEEEVFRLAGRSFRLVSRDQLERVLFDELGLPPIGKTEKTGKRSTSAAVLEALREVHPIVDKILAYRELAKLKGTYIDPLPALVHPKTGRLHTRFNQTATATGRLSSSDPNLQNIPVRTPLGQKIRRAFVAEEGWRLVALDYSQIELRVLAHLSGDENLIRVFQEGKDIHTQTASWMFGLGAEAIDPLMRRAAKTINFGVLYGMSAFRLSQELGIPYEEAAAFIQKYFQSYPKVKAWIEKTLEEGRTRGYVETLFGRRRYVPDLNARVKSVREAAERMAFNMPVQGTAADLMKLAMVRLFPQLREVGARMLLQVHDELLLEAPKERAEEVAALAKTVMEGVWPLAVPLEVEVGIGEDWLAAKG

SEQ ID NO: 2811 - DNA, 2529 bp, synthetic construct
  misc_feature 1..2529: note = Variant of DNA polymerase I from Thermus sp. strain 2.9
  source 1..2529: mol_type = other DNA
atgcaccatcatcatcatcatggcggtagcggcgtgttaccggtgttcgagcctaaaggtcgcgtgcttctggttgatggccatcatctcgcgtatcgtaacttctttgccctgaaaggattaaccaccagccgtggcgagccggtacagggtgtctacggctttgcaaagtcgctcctgaaagctctgaaagaagacggtgatgtggtgattgttgtctttgatgcgaaagcgccaagttttcgccacgaagcgtacgaagcttacaaagccgggcgtgctccaacgccggaagactttcctcgccaattggcgcttatgaaggaattagtggatttgcttggcctcgaacgcttggaagttcccggtttcgaggcagacgacgtattagcgactctcgcaaagaaagccgaacgtgagggctatgaagtccagatcttgacagcagatcgcgatcttttccagcttttatctccgcgcatctcggtgttacacccggaagggcatcgtatcaccccggaatggctctgggagaaatatggtttgcgtcccgaacaatgggtggattttcgcgccttagcaggcgatccgagcgacaatattccgggagttaaaggtatcggcgagaagacggcgctcaagctccttaaagaatgggggtcgttggagaacttgcttaagaatttagatcaggtcaaaccagagtcagtgcgtgagaagattcttgcacacctcgaagacctcaaattaagccgcgaattgtcccgtgtacgcaccgatttgccgctcgaagttgatttccgtcgccgccgcgaacctgactgggagggtcttaaagcgtttttagagcgtcttgaatttggttcgctcttgcatgaattcggccttttagaaagcccgttaccagccgaagaagcaccttggccaccgcccgaaggcgcgtttttaggttaccgtttgagtcgcccggaaccgatgtgggccgaattattggctcttgcagcgtctgcccagggacgtgtgtatcgcgcggaagaccctcatggtgcgctccgcggcctcttcgaagtccgtggactccttgccaaagacttagctgttgttgcattgcgcgaaggtcttgatttacctccgactgatgatccaatgcttcttgcgtacctcttggacccgtcaaacacgacgcccgaaggcgtagcccgtcgttacggcggcgagtggaccgaagatgcagcgaaacgcgcgttattggccgaacgtttgcacgccaatttattaggacgtttgcaaggcgaggaacgtctcctctggctttacgaagaagtggagaaaccattgagtcgcgtgctcgcgcatatggaagctaccggtgtcaaattagacgtggcgtatttggaggctctcagccttgaagttgctgccgaaatgcgccgcttggaggcggaagtattccgtttagcaggccattcctttcgccttaattctcgcgatcagttagaacgtgtgttgttcgatgaacttggtctccctcctatcggcaagacagagaagaccggtaaacgtagcacttcagcggcggttttagaagctcttcgcgaagtccatcccattgtggacaagatcttgcagtaccgcgaactcgcgaaattgaaaggcacctatattgaccctcttccggcattagtccacccgaaaacgggacgcctccatacccgcttcaaccaaacagccacggcgaccggtcgtttgtcctcctctgatccaaaccttcagaatattccagtacgtaccccattgggccagaagatccgccgcgcgtttgtagctgaggagggttggcgtttagtggccctcgattatagccaaattgaattacgtgtccttgcccatctttctggcgatgagaacctcatccgcgtgtttcaggaaggcaaagacattcacactcaaacggcaagctggatgtttggattatcagctgaagcgatcgatcctttgatgcgtcgtgcagcgaagaccatcaatttcggtgttctctacggtatgagtgcctttcgtttgtcgcaggaattaggcattccctatgaagaagctgcggcgttcattcagaaatactttcaaagctatcccaaagttaaagcatggatcgagaagactctcgaagaaggccgcacacgtggttacgtagagaccttatttggacgtcgccgctatgttcccgatttaaacgctcgcgtgaaatctgtccgtgaagccgccgaacgcatggcgttcaacatgcctgtacagggcacggcagctgacctcatgaaacttgcaatggtgcgcctttttccacaattgcgtgaagttggtgcccgcatgctcttgcaggtccacgatgaactcttgttagaagcgccaaaagagcgtgcggaagaggtggcagccctcgcgaaagaggttatggaaggcgtgtggcccttagcggtgcctcttgaagtcgaagttggtattggcgaggattggctggctgccaaaggataatga

SEQ ID NO: 2812 - protein, 841 aa, synthetic construct
  REGION 1..841: note = Variant of DNA polymerase I from Thermus sp. strain 2.9
MHHHHHHGGSGVLPVFEPKGRVLLVDGHHLAYRNFFALKGLTTSRGEPVQGVYGFAKSLLKALKEDGDVVIVVFDAKAPSFRHEAYEAYKAGRAPTPEDFPRQLALMKELVDLLGLERLEVPGFEADDVLATLAKKAEREGYEVQILTADRDLFQLLSPRISVLHPEGHRITPEWLWEKYGLRPEQWVDFRALAGDPSDNIPGVKGIGEKTALKLLKEWGSLENLLKNLDQVKPESVREKILAHLEDLKLSRELSRVRTDLPLEVDFRRRREPDWEGLKAFLERLEFGSLLHEFGLLESPLPAEEAPWPPPEGAFLGYRLSRPEPMWAELLALAASAQGRVYRAEDPHGALRGLFEVRGLLAKDLAVVALREGLDLPPTDDPMLLAYLLDPSNTTPEGVARRYGGEWTEDAAKRALLAERLHANLLGRLQGEERLLWLYEEVEKPLSRVLAHMEATGVKLDVAYLEALSLEVAAEMRRLEAEVFRLAGHSFRLNSRDQLERVLFDELGLPPIGKTEKTGKRSTSAAVLEALREVHPIVDKILQYRELAKLKGTYIDPLPALVHPKTGRLHTRFNQTATATGRLSSSDPNLQNIPVRTPLGQKIRRAFVAEEGWRLVALDYSQIELRVLAHLSGDENLIRVFQEGKDIHTQTASWMFGLSAEAIDPLMRRAAKTINFGVLYGMSAFRLSQELGIPYEEAAAFIQKYFQSYPKVKAWIEKTLEEGRTRGYVETLFGRRRYVPDLNARVKSVREAAERMAFNMPVQGTAADLMKLAMVRLFPQLREVGARMLLQVHDELLLEAPKERAEEVAALAKEVMEGVWPLAVPLEVEVGIGEDWLAAKG

SEQ ID NO: 2813 - DNA, 2529 bp, synthetic construct
  misc_feature 1..2529: note = Variant of DNA polymerase I from Thermus sp. strain 2.9
  source 1..2529: mol_type = other DNA
atgcaccatcatcatcatcatggcggtagcggcgtgttaccggtgttcgagcctaaaggtcgcgtgcttctggttgatggccatcatctcgcgtatcgtaacttctttgccctgaaaggattaaccaccagccgtggcgagccggtacagggtgtctacggctttgcaaagtcgctcctgaaagctctgaaagaagacggtgatgtggtgattgttgtctttgatgcgaaagcgccaagttttcgccacgaagcgtacgaagcttacaaagccgggcgtgctccaacgccggaagactttcctcgccaattggcgcttatgaaggaattagtggatttgcttggcctcgaacgcttggaagttcccggtttcgaggcagacgacgtattagcgactctcgcaaagaaagccgaacgtgagggctatgaagtccagatcttgacagcagatcgcgatcttttccagcttttatctccgcgcatctcggtgttacacccggaagggcatcgtatcaccccggaatggctctgggagaaatatggtttgcgtcccgaacaatgggtggattttcgcgccttagcaggcgatccgagcgacaatattccgggagttaaaggtatcggcgagaagacggcgctcaagctccttaaagaatgggggtcgttggagaacttgcttaagaatttagatcaggtcaaaccagagtcagtgcgtgagaagattcttgcacacctcgaagacctcaaattaagccgcgaattgtcccgtgtacgcaccgatttgccgctcgaagttgatttccgtcgccgccgcgaacctgactgggagggtcttaaagcgtttttagagcgtcttgaatttggtgagctcttgcatgaattcggccttttagaaagcccgttaccagccgaagaagcaccttggccaccgcccgaaggcgcgtttttaggttaccgtttgagtcgcccggaaccgatgtgggccgaattattggctcttgcagcgtctgcccagggacgtgtgtatcgcgcggaagaccctcatggtgcgctccgcggcctcttcgaagtccgtggactccttgccaaagacttagctgttgttgcattgcgcgaaggtcttgatttacctccgactgatgatccaatgcttcttgcgtacctcttggacccgtcaaacacgacgcccgaaggcgtagcccgtcgttacggcggcgagtggaccgaagatgcagcgaaacgcgcgttattggccgaacgtttgcacgccaatttattaggacgtttgcaaggcgaggaacgtctcctctggctttacgaagaagtggagaaaccattgagtcgcgtgctcgcgcatatggaagctaccggtgtcaaattagacgtggcgtatttggaggctctcagccttgaagttgctgccgaaatgcgccgcttggaggaagaagtattccgtttagcaggccattcctttcgccttaattctcgcgatcagttagaacgtgtgttgttcgatgaacttggtctccctcctatcggcaagacagagaagaccggtaaacgtagcacttcagcggcggttttagaagctcttcgcgaagtccatcccattgtggacaagatcttgcagtaccgcgaactcgcgaaattgaaaggcacctatattgaccctcttccggcattagtccacccgaaaacgggacgcctccatacccgcttcaaccaaacagccacggcgaccggtcgtttgtcctcctctgatccaaaccttcagaatattccagtacgtaccccattgggccagaagatccgccgcgcgtttgtagctgaggagggttggcgtttagtggccctcgattatagccaaattgaattacgtgtccttgcccatctttctggcgatgagaacctcatccgcgtgtttcaggaaggcaaagacattcacactcaaacggcaagctggatgtttggattatcagctgaagcgatcgatcctttgatgcgtcgtgcagcgaagaccatcaatttcggtgttctctacggtatgagtgcctttcgtttgtcgcaggaattaggcattccctatgaagaagctgcggcgttcattcagaaatactttcaaagctatcccaaagttaaagcatggatcgagaagactctcgaagaaggccgcacacgtggttacgtagagaccttatttggacgtcgccgctatgttcccgatttaaacgctcgcgtgaaatctgtccgtgaagccgccgaacgcatggcgttcaacatgcctgtacagggcacggcagctgacctcatgaaacttgcaatggtgcgcctttttccacaattgcgtgaagttggtgcccgcatgctcttgcaggtccacgatgaactcttgttagaagcgccaaaagagcgtgcggaagaggtggcagccctcgcgaaagaggttatggaaggcgtgtggcccttagcggtgcctcttgaagtcgaagttggtattggcgaggattggctggctgccaaaggataatga

SEQ ID NO: 2814 - protein, 841 aa, synthetic construct
  REGION 1..841: note = Variant of DNA polymerase I from Thermus sp. strain 2.9
MHHHHHHGGSGVLPVFEPKGRVLLVDGHHLAYRNFFALKGLTTSRGEPVQGVYGFAKSLLKALKEDGDVVIVVFDAKAPSFRHEAYEAYKAGRAPTPEDFPRQLALMKELVDLLGLERLEVPGFEADDVLATLAKKAEREGYEVQILTADRDLFQLLSPRISVLHPEGHRITPEWLWEKYGLRPEQWVDFRALAGDPSDNIPGVKGIGEKTALKLLKEWGSLENLLKNLDQVKPESVREKILAHLEDLKLSRELSRVRTDLPLEVDFRRRREPDWEGLKAFLERLEFGELLHEFGLLESPLPAEEAPWPPPEGAFLGYRLSRPEPMWAELLALAASAQGRVYRAEDPHGALRGLFEVRGLLAKDLAVVALREGLDLPPTDDPMLLAYLLDPSNTTPEGVARRYGGEWTEDAAKRALLAERLHANLLGRLQGEERLLWLYEEVEKPLSRVLAHMEATGVKLDVAYLEALSLEVAAEMRRLEEEVFRLAGHSFRLNSRDQLERVLFDELGLPPIGKTEKTGKRSTSAAVLEALREVHPIVDKILQYRELAKLKGTYIDPLPALVHPKTGRLHTRFNQTATATGRLSSSDPNLQNIPVRTPLGQKIRRAFVAEEGWRLVALDYSQIELRVLAHLSGDENLIRVFQEGKDIHTQTASWMFGLSAEAIDPLMRRAAKTINFGVLYGMSAFRLSQELGIPYEEAAAFIQKYFQSYPKVKAWIEKTLEEGRTRGYVETLFGRRRYVPDLNARVKSVREAAERMAFNMPVQGTAADLMKLAMVRLFPQLREVGARMLLQVHDELLLEAPKERAEEVAALAKEVMEGVWPLAVPLEVEVGIGEDWLAAKG

SEQ ID NO: 2815 - DNA, 2529 bp, synthetic construct
  misc_feature 1..2529: note = Variant of DNA polymerase I from Thermus sp. strain 2.9
  source 1..2529: mol_type = other DNA
atgcaccatcatcatcatcatggcggtagcggcgtgttaccggtgttcgagcctaaaggtcgcgtgcttctggttgatggccatcatctcgcgtatcgtaacttctttgccctgaaaggattaaccaccagccgtggcgagccggtacagggtgtctacggctttgcaaagtcgctcctgaaagctctgaaagaagacggtgatgtggtgattgttgtctttgatgcgaaagcgccaagttttcgccacgaagcgtacgaagcttacaaagccgggcgtgctccaacgccggaagactttcctcgccaattggcgcttatgaaggaattagtggatttgcttggcctcgaacgcttggaagttcccggtttcgaggcagacgacgtattagcgactctcgcaaagaaagccgaacgtgagggctatgaagtccagatcttgacagcagatcgcgatcttttccagcttttatctccgcgcatctcggtgttacacccggaagggcatcgtatcaccccggaatggctctgggagaaatatggtttgcgtcccgaacaatgggtggattttcgcgccttagcaggcgatccgagcgacaatattccgggagttaaaggtatcggcgagaagacggcgctcaagctccttaaagaatgggggtcgttggagaacttgcttaagaatttagatcaggtcaaaccagagtcagtgcgtgagaagattcttgcacacctcgaagacctcaaattaagccgcgaattgtcccgtgtacgcaccgatttgccgctcgaagttgatttccgtcgccgccgcgaacctgactgggagggtcttaaagcgtttttagagcgtcttgaatttggttcgctcttgcatgaattcggccttttagaaagcccgttaccagccgaagaagcaccttggccaccgcccgaaggcgcgtttttaggttaccgtttgagtcgcccggaaccgatgtgggccgaattattggctcttgcagcgtctgcccagggacgtgtgtatcgcgcggaagaccctcatggtgcgctccgcggcctcttcgaagtccgtggactccttgccaaagacttagctgttgttgcattgcgcgaaggtcttgatttacctccgactgatgatccaatgcttcttgcgtacctcttggacccgtcaaacacgacgcccgaaggcgtagcccgtcgttacggcggcgagtggaccgaagatgcagcgaaacgcgcgttattggccgaacgtttgcacgccaatttattaggacgtttgcaaggcgaggaacgtctcctctggctttacgaagaagtggagaaaccattgagtcgcgtgctcgcgcatatggaagctaccggtgtcaaattagacgtggcgtatttggaggctctcagccttgaagttgctgccgaaatgcgccgcttggaggaagaagtattccgtttagcaggccattcctttcgccttaattctcgcgatcagttagaacgtgtgttgttcgatgaacttggtctccctcctatcggcaagacagagaagaccggtaaacgtagcacttcagcggcggttttagaagctcttcgcgaaaggcatcccattgtggacaagatcttgcagtaccgcgaactcgcgaaattgaaaggcacctatattgaccctcttccggcattagtccacccgaaaacgggacgcctccatacccgcttcaaccaaacagccacggcgaccggtcgtttgtcctcctctgatccaaaccttcagaatattccagtacgtaccccattgggccagaagatccgccgcgcgtttgtagctgaggagggttggcgtttagtggccctcgattatagccaaattgaattacgtgtccttgcccatctttctggcgatgagaacctcatccgcgtgtttcaggaaggcaaagacattcacactcaaacggcaagctggatgtttggattatcagctgaagcgatcgatcctttgatgcgtcgtgcagcgaagaccatcaatttcggtgttctctacggtatgagtgcctttcgtttgtcgcaggaattaggcattccctatgaagaagctgcggcgttcattcagaaatactttcaaagctatcccaaagttaaagcatggatcgagaagactctcgaagaaggccgcacacgtggttacgtagagaccttatttggacgtcgccgctatgttcccgatttaaacgctcgcgtgaaatctgtccgtgaagccgccgaacgcatggcgttcaacatgcctgtacagggcacggcagctgacctcatgaaacttgcaatggtgcgcctttttccacaattgcgtgaagttggtgcccgcatgctcttgcaggtccacgatgaactcttgttagaagcgccaaaagagcgtgcggaagaggtggcagccctcgcgaaagaggttatggaaggcgtgtggcccttagcggtgcctcttgaagtcgaagttggtattggcgaggattggctggctgccaaaggataatga

SEQ ID NO: 2816 - protein, 841 aa, synthetic construct
  REGION 1..841: note = Variant of DNA polymerase I from Thermus sp. strain 2.9
MHHHHHHGGSGVLPVFEPKGRVLLVDGHHLAYRNFFALKGLTTSRGEPVQGVYGFAKSLLKALKEDGDVVIVVFDAKAPSFRHEAYEAYKAGRAPTPEDFPRQLALMKELVDLLGLERLEVPGFEADDVLATLAKKAEREGYEVQILTADRDLFQLLSPRISVLHPEGHRITPEWLWEKYGLRPEQWVDFRALAGDPSDNIPGVKGIGEKTALKLLKEWGSLENLLKNLDQVKPESVREKILAHLEDLKLSRELSRVRTDLPLEVDFRRRREPDWEGLKAFLERLEFGSLLHEFGLLESPLPAEEAPWPPPEGAFLGYRLSRPEPMWAELLALAASAQGRVYRAEDPHGALRGLFEVRGLLAKDLAVVALREGLDLPPTDDPMLLAYLLDPSNTTPEGVARRYGGEWTEDAAKRALLAERLHANLLGRLQGEERLLWLYEEVEKPLSRVLAHMEATGVKLDVAYLEALSLEVAAEMRRLEEEVFRLAGHSFRLNSRDQLERVLFDELGLPPIGKTEKTGKRSTSAAVLEALRERHPIVDKILQYRELAKLKGTYIDPLPALVHPKTGRLHTRFNQTATATGRLSSSDPNLQNIPVRTPLGQKIRRAFVAEEGWRLVALDYSQIELRVLAHLSGDENLIRVFQEGKDIHTQTASWMFGLSAEAIDPLMRRAAKTINFGVLYGMSAFRLSQELGIPYEEAAAFIQKYFQSYPKVKAWIEKTLEEGRTRGYVETLFGRRRYVPDLNARVKSVREAAERMAFNMPVQGTAADLMKLAMVRLFPQLREVGARMLLQVHDELLLEAPKERAEEVAALAKEVMEGVWPLAVPLEVEVGIGEDWLAAKG

SEQ ID NO: 2817 - DNA, 2529 bp, synthetic construct
  misc_feature 1..2529: note = Variant of DNA polymerase I from Thermus sp. strain 2.9
  source 1..2529: mol_type = other DNA
atgcaccatcatcatcatcatggcggtagcggcgtgttaccggtgttcgagcctaaaggtcgcgtgcttctggttgatggccatcatctcgcgtatcgtaacttctttgccctgaaaggattaaccaccagccgtggcgagccggtacagggtgtctacggctttgcaaagtcgctcctgaaagctctgaaagaagacggtgatgtggtgattgttgtctttgatgcgaaagcgccaagttttcgccacgaagcgtacgaagcttacaaagccgggcgtctgccaacgccggaagactttcctcgccaattggcgcttatgaaggaattagtggatttgcttggcctcgaacgcttggaagttcccggtttcgaggcagacgacgtattagcgactctcgcaaagaaagccgaacgtgagggctatgaagtccagatcttgacagcagatcgcgatcttttccagcttttatctccgcgcatctcggtgttacacccggaagggcatcgtatcaccccggaatggctctgggagaaatatggtttgcgtcccgaacaatgggtggattttcgcgccttagcaggcgatccgagcgacaatattccgggagttaaaggtatcggcgagaagacggcgctcaagctccttaaagaatgggggtcgttggagaacttgcttaagaatttagatcaggtcaaaccagagtcagtgcgtgagaagattcttgcacacctcgaagacctcaaattaagccgcgaattgtcccgtgtacgcaccgatttgccgctcgaagttgatttccgtcgccgccgcgaacctgactgggagggtcttaaagcgtttttagagcgtcttgaatttggttcgctcttgcatgaattcggccttttagaaagcccgttaccagccgaagaagcaccttggccaccgcccgaaggcgcgtttttaggttaccgtttgagtcgcccggaaccgatgtgggccgaattattggctcttgcagcgtctgcccagggacgtgtgtatcgcgcggaagaccctcatggtgcgctccgcggcctcttcgaagtccgtggactccttgccaaagacttagctgttgttgcattgcgcgaaggtcttgatttacctccgactgatgatccaatgcttcttgcgtacctcttggacccgtcaaacacgacgcccgaaggcgtagcccgtcgttacggcggcgagtggaccgaagatgcagcgaaacgcgcgttattggccgaacgtttgcacgccaatttattaggacgtttgcaaggcgaggaacgtctcctctggctttacgaagaagtggagaaaccattgagtcgcgtgctcgcgcatatggaagctaccggtgtcaaattagacgtggcgtatttggaggctctcagccttgaagttgctgccgaaatgcgccgcttggaggaagaagtattccgtttagcaggccattcctttcgccttaattctcgcgatcagttagaacgtgtgttgttcgatgaacttggtctccctcctatcggcaagacagagaagaccggtaaacgtagcacttcagcggcggttttagaagctcttcgcgaagtccatcccattgtggacaagatcttgcagtaccgcgaactcgcgaaattgaaaggcacctatattgaccctcttccggcattagtccacccgaaaacgggacgcctccatacccgcttcaaccaaacagccacggcgaccggtcgtttgtcctcctctgatccaaaccttcagaatattccagtacgtaccccattgggccagaagatccgccgcgcgtttgtagctgaggagggttggcgtttagtggccctcgattatagccaaattgaattacgtgtccttgcccatctttctggcgatgagaacctcatccgcgtgtttcaggaaggcaaagacattcacactcaaacggcaagctggatgtttggattatcagctgaagcgatcgatcctttgatgcgtcgtgcagcgaagaccatcaatttcggtgttctctacggtatgagtgcctttcgtttgtcgcaggaattaggcattccctatgaagaagctgcggcgttcattcagaaatactttcaaagctatcccaaagttaaagcatggatcgagaagactctcgaagaaggccgcacacgtggttacgtagagaccttatttggacgtcgccgctatgttcccgatttaaacgctcgcgtgaaatctgtccgtgaagccgccgaacgcatggcgttcaacatgcctgtacagggcacggcagctgacctcatgaaacttgcaatggtgcgcctttttccacaattgcgtgaagttggtgcccgcatgctcttgcaggtccacgatgaactcttgttagaagcgccaaaagagcgtgcggaagaggtggcagccctcgcgaaagaggttatggaaggcgtgtggcccttagcggtgcctcttgaagtcgaagttggtattggcgaggattggctggctgccaaaggataatga

SEQ ID NO: 2818 - protein, 841 aa, synthetic construct
  REGION 1..841: note = Variant of DNA polymerase I from Thermus sp. strain 2.9
MHHHHHHGGSGVLPVFEPKGRVLLVDGHHLAYRNFFALKGLTTSRGEPVQGVYGFAKSLLKALKEDGDVVIVVFDAKAPSFRHEAYEAYKAGRLPTPEDFPRQLALMKELVDLLGLERLEVPGFEADDVLATLAKKAEREGYEVQILTADRDLFQLLSPRISVLHPEGHRITPEWLWEKYGLRPEQWVDFRALAGDPSDNIPGVKGIGEKTALKLLKEWGSLENLLKNLDQVKPESVREKILAHLEDLKLSRELSRVRTDLPLEVDFRRRREPDWEGLKAFLERLEFGSLLHEFGLLESPLPAEEAPWPPPEGAFLGYRLSRPEPMWAELLALAASAQGRVYRAEDPHGALRGLFEVRGLLAKDLAVVALREGLDLPPTDDPMLLAYLLDPSNTTPEGVARRYGGEWTEDAAKRALLAERLHANLLGRLQGEERLLWLYEEVEKPLSRVLAHMEATGVKLDVAYLEALSLEVAAEMRRLEEEVFRLAGHSFRLNSRDQLERVLFDELGLPPIGKTEKTGKRSTSAAVLEALREVHPIVDKILQYRELAKLKGTYIDPLPALVHPKTGRLHTRFNQTATATGRLSSSDPNLQNIPVRTPLGQKIRRAFVAEEGWRLVALDYSQIELRVLAHLSGDENLIRVFQEGKDIHTQTASWMFGLSAEAIDPLMRRAAKTINFGVLYGMSAFRLSQELGIPYEEAAAFIQKYFQSYPKVKAWIEKTLEEGRTRGYVETLFGRRRYVPDLNARVKSVREAAERMAFNMPVQGTAADLMKLAMVRLFPQLREVGARMLLQVHDELLLEAPKERAEEVAALAKEVMEGVWPLAVPLEVEVGIGEDWLAAKG

SEQ ID NO: 2819 - DNA, 2529 bp, synthetic construct
  misc_feature 1..2529: note = Variant of DNA polymerase I from Thermus sp. strain 2.9
  source 1..2529: mol_type = other DNA
atgcaccatcatcatcatcatggcggtagcggcgtgttaccggtgttcgagcctaaaggtcgcgtgcttctggttgatggccatcatctcgcgtatcgtaacttctttgccctgaaaggattaaccaccagccgtggcgagccggtacagggtgtctacggctttgcaatttcgctcctgaaagctctgaaagaagacggtgatgtggtgattgttgtctttgatgcgaaagcgccaagttttcgccacgaagcgtacgaagcttacaaagccgggcgtgctccaacgccggaagactttcctcgccaattggcgcttatgaaggaattagtggatttgcttggcctcgaacgcttggaagttcccggtttcgaggcagacgacgtattagcgactctcgcaaagaaagccgaacgtgagggctatgaagtccagatcttgacagcagatcgcgatcttttccagcttttatctccgcgcatctcggtgttacacccggaagggcatcgtatcaccccggaatggctctgggagaaatatggtttgcgtcccgaacaatgggtggattttcgcgccttagcaggcgatccgagcgacaatattccgggagttaaaggtatcggcgagaagacggcgctcaagctccttaaagaatgggggtcgttggagaacttgcttaagaatttagatcaggtcaaaccagagtcagtgcgtgagaagattcttgcacacctcgaagacctcaaattaagccgcgaattgtcccgtgtacgcaccgatttgccgctcgaagttgatttccgtcgccgccgcgaacctgactgggagggtcttaaagcgtttttagagcgtcttgaatttggttcgctcttgcatgaattcggccttttagaaagcccgttaccagccgaagaagcaccttggccaccgcccgaaggcgcgtttttaggttaccgtttgagtcgcccggaaccgatgtgggccgaattattggctcttgcagcgtctgcccagggacgtgtgtatcgcgcggaagaccctcatggtgcgctccgcggcctcttcgaagtccgtggactccttgccaaagacttagctgttgttgcattgcgcgaaggtcttgatttacctccgactgatgatccaatgcttcttgcgtacctcttggacccgtcaaacacgacgcccgaaggcgtagcccgtcgttacggcggcgagtggaccgaagatgcagcgaaacgcgcgttattggccgaacgtttgcacgccaatttattaggacgtttgcaaggcgaggaacgtctcctctggctttacgaagaagtggagaaaccattgagtcgcgtgctcgcgcatatggaagctaccggtgtcaaattagacgtggcgtatttggaggctctcagccttgaagttgctgccgaaatgcgccgcttggaggaagaagtattccgtttagcaggccattcctttcgccttaattctcgcgatcagttagaacgtgtgttgttcgatgaacttggtctccctcctatcggcaagacagagaagaccggtaaacgtagcacttcagcggcggttttagaagctcttcgcgaagtccatcccattgtggacaagatcttgcagtaccgcgaactcgcgaaattgaaaggcacctatattgaccctcttccggcattagtccacccgaaaacgggacgcctccatacccgcttcaaccaaacagccacggcgaccggtcgtttgtcctcctctgatccaaaccttcagaatattccagtacgtaccccattgggccagaagatccgccgcgcgtttgtagctgaggagggttggcgtttagtggccctcgattatagccaaattgaattacgtgtccttgcccatctttctggcgatgagaacctcatccgcgtgtttcaggaaggcaaagacattcacactcaaacggcaagctggatgtttggattatcagctgaagcgatcgatcctttgatgcgtcgtgcagcgaagaccatcaatttcggtgttctctacggtatgagtgcctttcgtttgtcgcaggaattaggcattccctatgaagaagctgcggcgttcattcagaaatactttcaaagctatcccaaagttaaagcatggatcgagaagactctcgaagaaggccgcacacgtggttacgtagagaccttatttggacgtcgccgctatgttcccgatttaaacgctcgcgtgaaatctgtccgtgaagccgccgaacgcatggcgttcaacatgcctgtacagggcacggcagctgacctcatgaaacttgcaatggtgcgcctttttccacaattgcgtgaagttggtgcccgcatgctcttgcaggtccacgatgaactcttgttagaagcgccaaaagagcgtgcggaagaggtggcagccctcgcgaaagaggttatggaaggcgtgtggcccttagcggtgcctcttgaagtcgaagttggtattggcgaggattggctggctgccaaaggataatga

SEQ ID NO: 2820 - protein, 841 aa, synthetic construct
  REGION 1..841: note = Variant of DNA polymerase I from Thermus sp. strain 2.9
MHHHHHHGGSGVLPVFEPKGRVLLVDGHHLAYRNFFALKGLTTSRGEPVQGVYGFAISLLKALKEDGDVVIVVFDAKAPSFRHEAYEAYKAGRAPTPEDFPRQLALMKELVDLLGLERLEVPGFEADDVLATLAKKAEREGYEVQILTADRDLFQLLSPRISVLHPEGHRITPEWLWEKYGLRPEQWVDFRALAGDPSDNIPGVKGIGEKTALKLLKEWGSLENLLKNLDQVKPESVREKILAHLEDLKLSRELSRVRTDLPLEVDFRRRREPDWEGLKAFLERLEFGSLLHEFGLLESPLPAEEAPWPPPEGAFLGYRLSRPEPMWAELLALAASAQGRVYRAEDPHGALRGLFEVRGLLAKDLAVVALREGLDLPPTDDPMLLAYLLDPSNTTPEGVARRYGGEWTEDAAKRALLAERLHANLLGRLQGEERLLWLYEEVEKPLSRVLAHMEATGVKLDVAYLEALSLEVAAEMRRLEEEVFRLAGHSFRLNSRDQLERVLFDELGLPPIGKTEKTGKRSTSAAVLEALREVHPIVDKILQYRELAKLKGTYIDPLPALVHPKTGRLHTRFNQTATATGRLSSSDPNLQNIPVRTPLGQKIRRAFVAEEGWRLVALDYSQIELRVLAHLSGDENLIRVFQEGKDIHTQTASWMFGLSAEAIDPLMRRAAKTINFGVLYGMSAFRLSQELGIPYEEAAAFIQKYFQSYPKVKAWIEKTLEEGRTRGYVETLFGRRRYVPDLNARVKSVREAAERMAFNMPVQGTAADLMKLAMVRLFPQLREVGARMLLQVHDELLLEAPKERAEEVAALAKEVMEGVWPLAVPLEVEVGIGEDWLAAKG

SEQ ID NO: 2821 - DNA, 2529 bp, synthetic construct
  misc_feature 1..2529: note = Variant of DNA polymerase I from Thermus sp. strain 2.9
  source 1..2529: mol_type = other DNA
atgcaccatcatcatcatcatggcggtagcggcgtgttaccggtgttcgagcctaaaggtcgcgtgcttctggttgatggccatcatctcgcgtatcgtaacttctttgccctgaaaggattaaccaccagccgtggcgagccggtacagggtgtctacggctttgcaaagtcgctcctgaaagctctgaaagaagacggtgatgtggtgattgttgtctttgatgcgaaagcgccaagttttcgccacgaagcgtacgaagcttacaaagccgggcgtgctccaacgccggaagactttcctcgccaattggcgcttatgaaggaattagtggatttgcttggcctcgaacgcttggaagttcccggtttcgaggcagacgacgtattagcgactctcgcaaagaaagccgaacgtgagggctatgaagtccagatcttgacagcagatcgcgatcttttccagcttttatctccgcgcatctcggtgttacacccggaagggcatcgtatcaccccggaatggctctgggagaaatatggtttgcgtcccgaacaatgggtggattttcgcgccttagcaggcgatccgagcgacaatattccgggagttaaaggtatcggcgagaagacggcgctcaagctccttaaagaatgggggtcgttggagaacttgcttaagaatttagatcaggtcaaaccagagtcagtgcgtgagaagattcttgcacacctcgaagacctcaaattaagccgcgaattgtcccgtgtacgcaccgatttgccgctcgaagttgatttccgtcgccgccgcgaacctgactgggagggtcttaaagcgtttttagagcgtcttgaatttggttcgctcttgcatgaattcggccttttagaaagcccgttaccagccgaagaagcaccttggccaccgcccgaaggcgcgtttttaggttaccgtttgagtcgcccggaaccgatgtgggccgaattattggctcttgcagcgtctgcccagggacgtgtgtatcgcgcggaagaccctcatggtgcgctccgcggcctcttcgaagtccgtggactccttgccaaagacttagctgttgttgcattgcgcgaaggtcttgatttacctccgactgatgatccaatgcttcttgcgtacctcttggacccgtcaaacacgacgcccgaaggcgtagcccgtcgttacggcggcgagtggaccgaagatgcagcgaaacgcgcgttattggccgaacgtttgcacgccaatttattaggacgtttgcaaggcgaggaacgtctcctctggctttacgaagaagtggagaaaccattgagtcgcgtgctcgcgcatatggaagctaccggtgtcaaattagacgtggcgtatttggaggctctcagccttgaagttgctgccgaaatgcgccgcttggaggaagaagtattccgtttagcaggccattcctttcgccttaattctcgcgatcagttagaacgtgtgttgttcgatgaacttggtctccctcctatcggcaagacagagaagaccggtaaacgtagcacttcagcggcggttttagaagctcttcgcgaagtccatcccattgtggacaagatcttgcagtaccgcgaactcgcgaaattgaaaggcacctatattgaccctcttccggcattagtccacccgaaaacgggacgcctccatacccgcttcaaccaaacagccacggcgaccggtcgtttgtcctcctctgatccaaaccttcagaatattccagtacgtaccccattgggccagaagatccgccgcgcgtttgtagctgaggagggttggcgtttagtggccctcgattatgagcaaattgaattacgtgtccttgcccatctttctggcgatgagaacctcatccgcgtgtttcaggaaggcaaagacattcacactcaaacggcaagctggatgtttggattatcagctgaagcgatcgatcctttgatgcgtcgtgcagcgaagaccatcaatttcggtgttctctacggtatgagtgcctttcgtttgtcgcaggaattaggcattccctatgaagaagctgcggcgttcattcagaaatactttcaaagctatcccaaagttaaagcatggatcgagaagactctcgaagaaggccgcacacgtggttacgtagagaccttatttggacgtcgccgctatgttcccgatttaaacgctcgcgtgaaatctgtccgtgaagccgccgaacgcatggcgttcaacatgcctgtacagggcacggcagctgacctcatgaaacttgcaatggtgcgcctttttccacaattgcgtgaagttggtgcccgcatgctcttgcaggtccacgatgaactcttgttagaagcgccaaaagagcgtgcggaagaggtggcagccctcgcgaaagaggttatggaaggcgtgtggcccttagcggtgcctcttgaagtcgaagttggtattggcgaggattggctggctgccaaaggataatga

SEQ ID NO: 2822 - protein, 841 aa, synthetic construct
  REGION 1..841: note = Variant of DNA polymerase I from Thermus sp. strain 2.9
MHHHHHHGGSGVLPVFEPKGRVLLVDGHHLAYRNFFALKGLTTSRGEPVQGVYGFAKSLLKALKEDGDVVIVVFDAKAPSFRHEAYEAYKAGRAPTPEDFPRQLALMKELVDLLGLERLEVPGFEADDVLATLAKKAEREGYEVQILTADRDLFQLLSPRISVLHPEGHRITPEWLWEKYGLRPEQWVDFRALAGDPSDNIPGVKGIGEKTALKLLKEWGSLENLLKNLDQVKPESVREKILAHLEDLKLSRELSRVRTDLPLEVDFRRRREPDWEGLKAFLERLEFGSLLHEFGLLESPLPAEEAPWPPPEGAFLGYRLSRPEPMWAELLALAASAQGRVYRAEDPHGALRGLFEVRGLLAKDLAVVALREGLDLPPTDDPMLLAYLLDPSNTTPEGVARRYGGEWTEDAAKRALLAERLHANLLGRLQGEERLLWLYEEVEKPLSRVLAHMEATGVKLDVAYLEALSLEVAAEMRRLEEEVFRLAGHSFRLNSRDQLERVLFDELGLPPIGKTEKTGKRSTSAAVLEALREVHPIVDKILQYRELAKLKGTYIDPLPALVHPKTGRLHTRFNQTATATGRLSSSDPNLQNIPVRTPLGQKIRRAFVAEEGWRLVALDYEQIELRVLAHLSGDENLIRVFQEGKDIHTQTASWMFGLSAEAIDPLMRRAAKTINFGVLYGMSAFRLSQELGIPYEEAAAFIQKYFQSYPKVKAWIEKTLEEGRTRGYVETLFGRRRYVPDLNARVKSVREAAERMAFNMPVQGTAADLMKLAMVRLFPQLREVGARMLLQVHDELLLEAPKERAEEVAALAKEVMEGVWPLAVPLEVEVGIGEDWLAAKG

SEQ ID NO: 2823 - DNA, 2529 bp, synthetic construct
  misc_feature 1..2529: note = Variant of DNA polymerase I from Thermus sp. strain 2.9
  source 1..2529: mol_type = other DNA
atgcaccatcatcatcatcatggcggtagcggcgtgttaccggtgttcgagcctaaaggtcgcgtgcttctggttgatggccatcatctcgcgtatcgtaacttctttgccctgaaaggattaaccaccagccgtggcgagccggtacagggtgtctacggctttgcaaagtcgctcctgaaagctctgaaagaagacggtgatgtggtgattgttgtctttgatgcgaaagcgccaagttttcgccacgaagcgtacgaagcttacaaagccgggcgtgctccaacgccggaagactttcctcgccaattggcgcttatgaaggaattagtggatttgcttggcctcgaacgcttggaagttcccggtttcgaggcagacgacgtattagcgactctcgcaaagaaagccgaacgtgagggctatgaagtccagatcttgacagcagatcgcgatcttttccagcttttatctccgcgcatctcggtgttacacccggaagggcatcgtatcaccccggaatggctctgggagaaatatggtttgcgtcccgaacaatgggtggattttcgcgccttagcaggcgatccgagcgacaatattccgggagttaaaggtatcggcgagaagacggcgctcaagctccttaaagaatgggggtcgttggagaacttgcttaagaatttagatcaggtcaaaccagagtcagtgcgtgagaagattcttgcacacctcgaagacctcaaattaagccgcgaattgtcccgtgtacgcaccgatttgccgctcgaagttgatttccgtcgccgccgcgaacctgactgggagggtcttaaagcgtttttagagcgtcttgaatttggttcgctcttgcatgaattcggccttttaattagcccgttaccagccgaagaagcaccttggccaccgcccgaaggcgcgtttttaggttaccgtttgagtcgcccggaaccgatgtgggccgaattattggctcttgcagcgtctgcccagggacgtgtgtatcgcgcggaagaccctcatggtgcgctccgcggcctcttcgaagtccgtggactccttgccaaagacttagctgttgttgcattgcgcgaaggtcttgatttacctccgactgatgatccaatgcttcttgcgtacctcttggacccgtcaaacacgacgcccgaaggcgtagcccgtcgttacggcggcgagtggaccgaagatgcagcgaaacgcgcgttattggccgaacgtttgcacgccaatttattaggacgtttgcaaggcgaggaacgtctcctctggctttacgaagaagtggagaaaccattgagtcgcgtgctcgcgcatatggaagctaccggtgtcaaattagacgtggcgtatttggaggctctcagccttgaagttgctgccgaaatgcgccgcttggaggaagaagtattccgtttagcaggccattcctttcgccttaattctcgcgatcagttagaacgtgtgttgttcgatgaacttggtctccctcctatcggcaagacagagaagaccggtaaacgtagcacttcagcggcggttttagaagctcttcgcgaagtccatcccattgtggacaagatcttgcagtaccgcgaactcgcgaaattgaaaggcacctatattgaccctcttccggcattagtccacccgaaaacgggacgcctccatacccgcttcaaccaaacagccacggcgaccggtcgtttgtcctcctctgatccaaaccttcagaatattccagtacgtaccccattgggccagaagatccgccgcgcgtttgtagctgaggagggttggcgtttagtggccctcgattatagccaaattgaattacgtgtccttgcccatctttctggcgatgagaacctcatccgcgtgtttcaggaaggcaaagacattcacactcaaacggcaagctggatgtttggattatcagctgaagcgatcgatcctttgatgcgtcgtgcagcgaagaccatcaatttcggtgttctctacggtatgagtgcctttcgtttgtcgcaggaattaggcattccctatgaagaagctgcggcgttcattcagaaatactttcaaagctatcccaaagttaaagcatggatcgagaagactctcgaagaaggccgcacacgtggttacgtagagaccttatttggacgtcgccgctatgttcccgatttaaacgctcgcgtgaaatctgtccgtgaagccgccgaacgcatggcgttcaacatgcctgtacagggcacggcagctgacctcatgaaacttgcaatggtgcgcctttttccacaattgcgtgaagttggtgcccgcatgctcttgcaggtccacgatgaactcttgttagaagcgccaaaagagcgtgcggaagaggtggcagccctcgcgaaagaggttatggaaggcgtgtggcccttagcggtgcctcttgaagtcgaagttggtattggcgaggattggctggctgccaaaggataatga

SEQ ID NO: 2824 - protein, 841 aa, synthetic construct
  REGION 1..841: note = Variant of DNA polymerase I from Thermus sp. strain 2.9
MHHHHHHGGSGVLPVFEPKGRVLLVDGHHLAYRNFFALKGLTTSRGEPVQGVYGFAKSLLKALKEDGDVVIVVFDAKAPSFRHEAYEAYKAGRAPTPEDFPRQLALMKELVDLLGLERLEVPGFEADDVLATLAKKAEREGYEVQILTADRDLFQLLSPRISVLHPEGHRITPEWLWEKYGLRPEQWVDFRALAGDPSDNIPGVKGIGEKTALKLLKEWGSLENLLKNLDQVKPESVREKILAHLEDLKLSRELSRVRTDLPLEVDFRRRREPDWEGLKAFLERLEFGSLLHEFGLLISPLPAEEAPWPPPEGAFLGYRLSRPEPMWAELLALAASAQGRVYRAEDPHGALRGLFEVRGLLAKDLAVVALREGLDLPPTDDPMLLAYLLDPSNTTPEGVARRYGGEWTEDAAKRALLAERLHANLLGRLQGEERLLWLYEEVEKPLSRVLAHMEATGVKLDVAYLEALSLEVAAEMRRLEEEVFRLAGHSFRLNSRDQLERVLFDELGLPPIGKTEKTGKRSTSAAVLEALREVHPIVDKILQYRELAKLKGTYIDPLPALVHPKTGRLHTRFNQTATATGRLSSSDPNLQNIPVRTPLGQKIRRAFVAEEGWRLVALDYSQIELRVLAHLSGDENLIRVFQEGKDIHTQTASWMFGLSAEAIDPLMRRAAKTINFGVLYGMSAFRLSQELGIPYEEAAAFIQKYFQSYPKVKAWIEKTLEEGRTRGYVETLFGRRRYVPDLNARVKSVREAAERMAFNMPVQGTAADLMKLAMVRLFPQLREVGARMLLQVHDELLLEAPKERAEEVAALAKEVMEGVWPLAVPLEVEVGIGEDWLAAKG

SEQ ID NO: 2825 - DNA, 2529 bp, synthetic construct
  misc_feature 1..2529: note = Variant of DNA polymerase I from Thermus sp. strain 2.9
  source 1..2529: mol_type = other DNA
atgcaccatcatcatcatcatggcggtagcggcgtgttaccggtgttcgagcctaaaggtcgcgtgcttctggttgatggccatcatctcgcgtatcgtaacttctttgccctgaaaggattaaccaccagccgtggcgagccggtacagggtgtctacggctttgcaaagtcgctcctgaaagctctgaaagaagacggtgatgtggtgattgttgtctttgatgcgaaagcgccaagttttcgccacgaagcgtacgaagcttacaaagccgggcgtgctccaacgccggaagactttcctcgccaattggcgcttatgaaggaattagtggatttgcttggcctcgaacgcttggaagttcccggtttcgaggcagacgacgtattagcgactctcgcaaagaaagccgaacgtgagggctatgaagtccagatcttgacagcagatcgcgatcttttccagcttttatctccgcgcatctcggtgttacacccggaagggcatcgtatcaccccggaatggctctgggagaaatatggtttgcgtcccgaacaatgggtggattttcgcgccttagcaggcgatccgagcgacaatattccgggagttaaaggtatcggcgagaagacggcgctcaagctccttaaagaatgggggtcgttggagaacttgcttaagaatttagatcaggtcaaaccagagtcagtgcgtgagaagattcttgcacacctcgaagacctcaaattaagccgcgaattgtcccgtgtacgcaccgatttgccgctcgaagttgatttccgtcgccgccgcgaacctgactgggagggtcttaaagcgtttttagagcgtcttgaatttggttcgctcttgcatgaattcggccttttagaaagcccgttaccagccgaagaagcaccttggccaccgcccgaaggcgcgtttttaggttaccgtttgagtcgcccggaaccgatgtgggccgaattattggctcttgcagcgtctgcccagggacgtgtgtatcgcgcggaagaccctcatggtgcgctccgcggcctcttcgaagtccgtggactccttgccaaagacttagctgttgttgcattgcgcgaaggtcttgatttacctccgactgatgatccaatgcttcttgcgtacctcttggacccgtcaaacacgacgcccgaaggcgtagcccgtcgttacggcggcgagtggaccgaagatgcagcgaaacgcgcgttattggccgaacgtttgcacgccaatttattaggacgtttgcaaggcgaggaacgtctcctctggctttacgaagaagtggagaaaccattgagtcgcgtgctcgcgcatatggaagctaccggtgtcaaattagacgtggcgtatttgcatgctctcagccttgaagttgctgccgaaatgcgccgcttggaggaagaagtattccgtttagcaggccattcctttcgccttaattctcgcgatcagttagaacgtgtgttgttcgatgaacttggtctccctcctatcggcaagacagagaagaccggtaaacgtagcacttcagcggcggttttagaagctcttcgcgaagtccatcccattgtggacaagatcttgcagtaccgcgaactcgcgaaattgaaaggcacctatattgaccctcttccggcattagtccacccgaaaacgggacgcctccatacccgcttcaaccaaacagccacggcgaccggtcgtttgtcctcctctgatccaaaccttcagaatattccagtacgtaccccattgggccagaagatccgccgcgcgtttgtagctgaggagggttggcgtttagtggccctcgattatagccaaattgaattacgtgtccttgcccatctttctggcgatgagaacctcatccgcgtgtttcaggaaggcaaagacattcacactcaaacggcaagctggatgtttggattatcagctgaagcgatcgatcctttgatgcgtcgtgcagcgaagaccatcaatttcggtgttctctacggtatgagtgcctttcgtttgtcgcaggaattaggcattccctatgaagaagctgcggcgttcattcagaaatactttcaaagctatcccaaagttaaagcatggatcgagaagactctcgaagaaggccgcacacgtggttacgtagagaccttatttggacgtcgccgctatgttcccgatttaaacgctcgcgtgaaatctgtccgtgaagccgccgaacgcatggcgttcaacatgcctgtacagggcacggcagctgacctcatgaaacttgcaatggtgcgcctttttccacaattgcgtgaagttggtgcccgcatgctcttgcaggtccacgatgaactcttgttagaagcgccaaaagagcgtgcggaagaggtggcagccctcgcgaaagaggttatggaaggcgtgtggcccttagcggtgcctcttgaagtcgaagttggtattggcgaggattggctggctgccaaaggataatga

SEQ ID NO: 2826 - protein, 841 aa, synthetic construct
  REGION 1..841: note = Variant of DNA polymerase I from Thermus sp. strain 2.9
MHHHHHHGGSGVLPVFEPKGRVLLVDGHHLAYRNFFALKGLTTSRGEPVQGVYGFAKSLLKALKEDGDVVIVVFDAKAPSFRHEAYEAYKAGRAPTPEDFPRQLALMKELVDLLGLERLEVPGFEADDVLATLAKKAEREGYEVQILTADRDLFQLLSPRISVLHPEGHRITPEWLWEKYGLRPEQWVDFRALAGDPSDNIPGVKGIGEKTALKLLKEWGSLENLLKNLDQVKPESVREKILAHLEDLKLSRELSRVRTDLPLEVDFRRRREPDWEGLKAFLERLEFGSLLHEFGLLESPLPAEEAPWPPPEGAFLGYRLSRPEPMWAELLALAASAQGRVYRAEDPHGALRGLFEVRGLLAKDLAVVALREGLDLPPTDDPMLLAYLLDPSNTTPEGVARRYGGEWTEDAAKRALLAERLHANLLGRLQGEERLLWLYEEVEKPLSRVLAHMEATGVKLDVAYLHALSLEVAAEMRRLEEEVFRLAGHSFRLNSRDQLERVLFDELGLPPIGKTEKTGKRSTSAAVLEALREVHPIVDKILQYRELAKLKGTYIDPLPALVHPKTGRLHTRFNQTATATGRLSSSDPNLQNIPVRTPLGQKIRRAFVAEEGWRLVALDYSQIELRVLAHLSGDENLIRVFQEGKDIHTQTASWMFGLSAEAIDPLMRRAAKTINFGVLYGMSAFRLSQELGIPYEEAAAFIQKYFQSYPKVKAWIEKTLEEGRTRGYVETLFGRRRYVPDLNARVKSVREAAERMAFNMPVQGTAADLMKLAMVRLFPQLREVGARMLLQVHDELLLEAPKERAEEVAALAKEVMEGVWPLAVPLEVEVGIGEDWLAAKG

SEQ ID NO: 2827 - DNA, 2529 bp, synthetic construct
  misc_feature 1..2529: note = Variant of DNA polymerase I from Thermus sp. strain 2.9
  source 1..2529: mol_type = other DNA
atgcaccatcatcatcatcatggcggtagcggcgtgttaccggtgttcgagcctaaaggtcgcgtgcttctggttgatggccatcatctcgcgtatcgtaacttctttgccctgaaaggattaaccaccagccgtggcgagccggtacagggtgtctacggctttgcaaagtcgctcctgaaagctctgaaagaagacggtgatgtggtgattgttgtctttgatgcgaaagcgccaagttttcgccacgaagcgtacgaagcttacaaagccgggcgtgctccaacgccggaagactttcctcgccaattggcgcttatgaaggaattagtggatttgcttggcctcgaacgcttggaagttcccggtttcgaggcagacgacgtattagcgactctcgcaaagaaagccgaacgtgagggctatgaagtccagatcttgacagcagatcgcgatcttttccagcttttatctccgcgcatctcggtgttacacccggaagggcatcgtatcaccccggaatggctctgggagaaatatggtttgcgtcccgaacaatgggtggattttcgcgccttagcaggcgatccgagcgacaatattccgggagttaaaggtatcggcgagaagacggcgctcaagctccttaaagaatgggggtcgttggagaacttgcttaagaatttagatcaggtcaaaccagagtcagtgcgtgagaagattcttgcacacctcgaagacctcaaattaagccgcgaattgtcccgtgtacgcaccgatttgccgctcgaagttgatttccgtcgccgccgcgaacctgactgggagggtcttaaagcgtttttagagcgtcttgaatttggttcgctcttgcatgaattcggccttttagaaagcccggggccagccgaagaagcaccttggccaccgcccgaaggcgcgtttttaggttaccgtttgagtcgcccggaaccgatgtgggccgaattattggctcttgcagcgtctgcccagggacgtgtgtatcgcgcggaagaccctcatggtgcgctccgcggcctcttcgaagtccgtggactccttgccaaagacttagctgttgttgcattgcgcgaaggtcttgatttacctccgactgatgatccaatgcttcttgcgtacctcttggacccgtcaaacacgacgcccgaaggcgtagcccgtcgttacggcggcgagtggaccgaagatgcagcgaaacgcgcgttattggccgaacgtttgcacgccaatttattaggacgtttgcaaggcgaggaacgtctcctctggctttacgaagaagtggagaaaccattgagtcgcgtgctcgcgcatatggaagctaccggtgtcaaattagacgtggcgtatttggaggctctcagccttgaagttgctgccgaaatgcgccgcttggaggaagaagtattccgtttagcaggccattcctttcgccttaattctcgcgatcagttagaacgtgtgttgttcgatgaacttggtctccctcctatcggcaagacagagaagaccggtaaacgtagcacttcagcggcggttttagaagctcttcgcgaagtccatcccattgtggacaagatcttgcagtaccgcgaactcgcgaaattgaaaggcacctatattgaccctcttccggcattagtccacccgaaaacgggacgcctccatacccgcttcaaccaaacagccacggcgaccggtcgtttgtcctcctctgatccaaaccttcagaatattccagtacgtaccccattgggccagaagatccgccgcgcgtttgtagctgaggagggttggcgtttagtggccctcgattatagccaaattgaattacgtgtccttgcccatctttctggcgatgagaacctcatccgcgtgtttcaggaaggcaaagacattcacactcaaacggcaagctggatgtttggattatcagctgaagcgatcgatcctttgatgcgtcgtgcagcgaagaccatcaatttcggtgttctctacggtatgagtgcctttcgtttgtcgcaggaattaggcattccctatgaagaagctgcggcgttcattcagaaatactttcaaagctatcccaaagttaaagcatggatcgagaagactctcgaagaaggccgcacacgtggttacgtagagaccttatttggacgtcgccgctatgttcccgatttaaacgctcgcgtgaaatctgtccgtgaagccgccgaacgcatggcgttcaacatgcctgtacagggcacggcagctgacctcatgaaacttgcaatggtgcgcctttttccacaattgcgtgaagttggtgcccgcatgctcttgcaggtccacgatgaactcttgttagaagcgccaaaagagcgtgcggaagaggtggcagccctcgcgaaagaggttatggaaggcgtgtggcccttagcggtgcctcttgaagtcgaagttggtattggcgaggattggctggctgccaaaggataatga

SEQ ID NO: 2828 - protein, 841 aa, synthetic construct
  REGION 1..841: note = Variant of DNA polymerase I from Thermus sp. strain 2.9
MHHHHHHGGSGVLPVFEPKGRVLLVDGHHLAYRNFFALKGLTTSRGEPVQGVYGFAKSLLKALKEDGDVVIVVFDAKAPSFRHEAYEAYKAGRAPTPEDFPRQLALMKELVDLLGLERLEVPGFEADDVLATLAKKAEREGYEVQILTADRDLFQLLSPRISVLHPEGHRITPEWLWEKYGLRPEQWVDFRALAGDPSDNIPGVKGIGEKTALKLLKEWGSLENLLKNLDQVKPESVREKILAHLEDLKLSRELSRVRTDLPLEVDFRRRREPDWEGLKAFLERLEFGSLLHEFGLLESPGPAEEAPWPPPEGAFLGYRLSRPEPMWAELLALAASAQGRVYRAEDPHGALRGLFEVRGLLAKDLAVVALREGLDLPPTDDPMLLAYLLDPSNTTPEGVARRYGGEWTEDAAKRALLAERLHANLLGRLQGEERLLWLYEEVEKPLSRVLAHMEATGVKLDVAYLEALSLEVAAEMRRLEEEVFRLAGHSFRLNSRDQLERVLFDELGLPPIGKTEKTGKRSTSAAVLEALREVHPIVDKILQYRELAKLKGTYIDPLPALVHPKTGRLHTRFNQTATATGRLSSSDPNLQNIPVRTPLGQKIRRAFVAEEGWRLVALDYSQIELRVLAHLSGDENLIRVFQEGKDIHTQTASWMFGLSAEAIDPLMRRAAKTINFGVLYGMSAFRLSQELGIPYEEAAAFIQKYFQSYPKVKAWIEKTLEEGRTRGYVETLFGRRRYVPDLNARVKSVREAAERMAFNMPVQGTAADLMKLAMVRLFPQLREVGARMLLQVHDELLLEAPKERAEEVAALAKEVMEGVWPLAVPLEVEVGIGEDWLAAKG

SEQ ID NO: 2829 - DNA, 2529 bp, synthetic construct
  misc_feature 1..2529: note = Variant of DNA polymerase I from Thermus sp. strain 2.9
  source 1..2529: mol_type = other DNA
atgcaccatcatcatcatcatggcggtagcggcgtgttaccggtgttcgagcctaaaggtcgcgtgcttctggttgatggccatcatctcgcgtatcgtaacttctttgccctgaaaggattaaccaccagccgtggcgagccggtacagggtgtctacggctttgcaaagtcgctcctgaaagctctgaaagaagacggtgatgtggtgattgttgtctttgatgcgaaagcgccaagttttcgccacgaagcgtacgaagcttacaaagccgggcgtgctccaacgccggaagactttcctcgccaattggcgcttatgaaggaattagtggatttgcttggcctcgaacgcttggaagttcccggtttcgaggcagacgacgtattagcgactctcgcaaagaaagccgaacgtgagggctatgaagtccagatcttgacagcagatcgcgatcttttccagcttttatctccgcgcatctcggtgttacacccggaagggcatcgtatcaccccggaatggctctgggagaaatatggtttgcgtcccgaacaatgggtggattttcgcgccttagcaggcgatccgagcgacaatattccgggagttaaaggtatcggcgagaagacggcgctcaagctccttaaagaatgggggtcgttggagaacttgcttaagaatttagatcaggtcaaaccagagtcagtgcgtgagaagattcttgcacacctcgaagacctcaaattaagccgcgaattgtcccgtgtacgcaccgatttgccgctcgaagttgatttccgtcgccgccgcgaacctgactgggagggtcttaaagcgtttttagagcgtcttgaatttggttcgctcttgcatgaattcggccttttagaaagcccgttaccagccgaagaagcaccttggccaccgcccgaaggcgcgtttttaggttaccgtttgagtcgcccggaaccgatgtgggccgaattattggctcttgcagcgtctgcccagggacgtgtgtatcgcgcggaagaccctcatggtgcgctccgcggcctcttcgaagtccgtggactccttgccaaagacttagctgttgttgcattgtgtgaaggtcttgatttacctccgactgatgatccaatgcttcttgcgtacctcttggacccgtcaaacacgacgcccgaaggcgtagcccgtcgttacggcggcgagtggaccgaagatgcagcgaaacgcgcgttattggccgaacgtttgcacgccaatttattaggacgtttgcaaggcgaggaacgtctcctctggctttacgaagaagtggagaaaccattgagtcgcgtgctcgcgcatatggaagctaccggtgtcaaattagacgtggcgtatttggaggctctcagccttgaagttgctgccgaaatgcgccgcttggaggaagaagtattccgtttagcaggccattcctttcgccttaattctcgcgatcagttagaacgtgtgttgttcgatgaacttggtctccctcctatcggcaagacagagaagaccggtaaacgtagcacttcagcggcggttttagaagctcttcgcgaagtccatcccattgtggacaagatcttgcagtaccgcgaactcgcgaaattgaaaggcacctatattgaccctcttccggcattagtccacccgaaaacgggacgcctccatacccgcttcaaccaaacagccacggcgaccggtcgtttgtcctcctctgatccaaaccttcagaatattccagtacgtaccccattgggccagaagatccgccgcgcgtttgtagctgaggagggttggcgtttagtggccctcgattatagccaaattgaattacgtgtccttgcccatctttctggcgatgagaacctcatccgcgtgtttcaggaaggcaaagacattcacactcaaacggcaagctggatgtttggattatcagctgaagcgatcgatcctttgatgcgtcgtgcagcgaagaccatcaatttcggtgttctctacggtatgagtgcctttcgtttgtcgcaggaattaggcattccctatgaagaagctgcggcgttcattcagaaatactttcaaagctatcccaaagttaaagcatggatcgagaagactctcgaagaaggccgcacacgtggttacgtagagaccttatttggacgtcgccgctatgttcccgatttaaacgctcgcgtgaaatctgtccgtgaagccgccgaacgcatggcgttcaacatgcctgtacagggcacggcagctgacctcatgaaacttgcaatggtgcgcctttttccacaattgcgtgaagttggtgcccgcatgctcttgcaggtccacgatgaactcttgttagaagcgccaaaagagcgtgcggaagaggtggcagccctcgcgaaagaggttatggaaggcgtgtggcccttagcggtgcctcttgaagtcgaagttggtattggcgaggattggctggctgccaaaggataatga

SEQ ID NO: 2830 - protein, 841 aa, synthetic construct
  REGION 1..841: note = Variant of DNA polymerase I from Thermus sp. strain 2.9
MHHHHHHGGSGVLPVFEPKGRVLLVDGHHLAYRNFFALKGLTTSRGEPVQGVYGFAKSLLKALKEDGDVVIVVFDAKAPSFRHEAYEAYKAGRAPTPEDFPRQLALMKELVDLLGLERLEVPGFEADDVLATLAKKAEREGYEVQILTADRDLFQLLSPRISVLHPEGHRITPEWLWEKYGLRPEQWVDFRALAGDPSDNIPGVKGIGEKTALKLLKEWGSLENLLKNLDQVKPESVREKILAHLEDLKLSRELSRVRTDLPLEVDFRRRREPDWEGLKAFLERLEFGSLLHEFGLLESPLPAEEAPWPPPEGAFLGYRLSRPEPMWAELLALAASAQGRVYRAEDPHGALRGLFEVRGLLAKDLAVVALCEGLDLPPTDDPMLLAYLLDPSNTTPEGVARRYGGEWTEDAAKRALLAERLHANLLGRLQGEERLLWLYEEVEKPLSRVLAHMEATGVKLDVAYLEALSLEVAAEMRRLEEEVFRLAGHSFRLNSRDQLERVLFDELGLPPIGKTEKTGKRSTSAAVLEALREVHPIVDKILQYRELAKLKGTYIDPLPALVHPKTGRLHTRFNQTATATGRLSSSDPNLQNIPVRTPLGQKIRRAFVAEEGWRLVALDYSQIELRVLAHLSGDENLIRVFQEGKDIHTQTASWMFGLSAEAIDPLMRRAAKTINFGVLYGMSAFRLSQELGIPYEEAAAFIQKYFQSYPKVKAWIEKTLEEGRTRGYVETLFGRRRYVPDLNARVKSVREAAERMAFNMPVQGTAADLMKLAMVRLFPQLREVGARMLLQVHDELLLEAPKERAEEVAALAKEVMEGVWPLAVPLEVEVGIGEDWLAAKG

SEQ ID NO: 2831 - DNA, 2529 bp, synthetic construct
  misc_feature 1..2529: note = Variant of DNA polymerase I from Thermus sp. strain 2.9
  source 1..2529: mol_type = other DNA
atgcaccatcatcatcatcatggcggtagcggcgtgttaccggtgttcgagcctaaaggtcgcgtgcttctggttgatggccatcatctcgcgtatcgtaacttctttgccctgaaaggattaaccaccagccgtggcgagccggtacagggtgtctacggctttgcaaagtcgctcctgaaagctctgaaagaagacggtgatgtggtgattgttgtctttgatgcgaaagcgccaagttttcgccacgaagcgtacgaagcttacaaagccgggcgtgctccaacgccggaagactttcctcgccaattggcgcttatgaaggaattagtggatttgcttggcctcgaacgcttggaagttcccggtttcgaggcagacgacgtattagcgactctcgcaaagaaagccgaacgtgagggctatgaagtccagatcttgacagcagatcgcgatcttttccagcttttatctccgcgcatctcggtgttacacccggaagggcatcgtatcaccccggaatggctctgggagaaatatggtttgcgtcccgaacaatgggtggattttcgcgccttagcaggcgatccgagcgacaatattccgggagttaaaggtatcggcgagaagacggcgctcaagctccttaaagaatgggggtcgttggagaacttgcttaagaatttagatcaggtcaaaccagagtcagtgcgtgagaagattcttgcacacctcgaagacctcaaattaagccgcgaattgtcccgtgtacgcaccgatttgccgctcgaagttgatttccgtcgccgccgcgaacctgactgggagggtcttaaagcgtttttagagcgtcttgaatttggttcgctcttgcatgaattcggccttttagaaagcccgttaccagccgaagaagcaccttggccaccgcccgaaggcgcgtttttaggttaccgtttgagtcgctgtgaaccgatgtgggccgaattattggctcttgcagcgtctgcccagggacgtgtgtatcgcgcggaagaccctcatggtgcgctccgcggcctcttcgaagtccgtggactccttgccaaagacttagctgttgttgcattgcgcgaaggtcttgatttacctccgactgatgatccaatgcttcttgcgtacctcttggacccgtcaaacacgacgcccgaaggcgtagcccgtcgttacggcggcgagtggaccgaagatgcagcgaaacgcgcgttattggccgaacgtttgcacgccaatttattaggacgtttgcaaggcgaggaacgtctcctctggctttacgaagaagtggagaaaccattgagtcgcgtgctcgcgcatatggaagctaccggtgtcaaattagacgtggcgtatttggaggctctcagccttgaagttgctgccgaaatgcgccgcttggaggaagaagtattccgtttagcaggccattcctttcgccttaattctcgcgatcagttagaacgtgtgttgttcgatgaacttggtctccctcctatcggcaagacagagaagaccggtaaacgtagcacttcagcggcggttttagaagctcttcgcgaagtccatcccattgtggacaagatcttgcagtaccgcgaactcgcgaaattgaaaggcacctatattgaccctcttccggcattagtccacccgaaaacgggacgcctccatacccgcttcaaccaaacagccacggcgaccggtcgtttgtcctcctctgatccaaaccttcagaatattccagtacgtaccccattgggccagaagatccgccgcgcgtttgtagctgaggagggttggcgtttagtggccctcgattatagccaaattgaattacgtgtccttgcccatctttctggcgatgagaacctcatccgcgtgtttcaggaaggcaaagacattcacactcaaacggcaagctggatgtttggattatcagctgaagcgatcgatcctttgatgcgtcgtgcagcgaagaccatcaatttcggtgttctctacggtatgagtgcctttcgtttgtcgcaggaattaggcattccctatgaagaagctgcggcgttcattcagaaatactttcaaagctatcccaaagttaaagcatggatcgagaagactctcgaagaaggccgcacacgtggttacgtagagaccttatttggacgtcgccgctatgttcccgatttaaacgctcgcgtgaaatctgtccgtgaagccgccgaacgcatggcgttcaacatgcctgtacagggcacggcagctgacctcatgaaacttgcaatggtgcgcctttttccacaattgcgtgaagttggtgcccgcatgctcttgcaggtccacgatgaactcttgttagaagcgccaaaagagcgtgcggaagaggtggcagccctcgcgaaagaggttatggaaggcgtgtggcccttagcggtgcctcttgaagtcgaagttggtattggcgaggattggctggctgccaaaggataatga

SEQ ID NO: 2832 - protein, 841 aa, synthetic construct
  REGION 1..841: note = Variant of DNA polymerase I from Thermus sp. strain 2.9
MHHHHHHGGSGVLPVFEPKGRVLLVDGHHLAYRNFFALKGLTTSRGEPVQGVYGFAKSLLKALKEDGDVVIVVFDAKAPSFRHEAYEAYKAGRAPTPEDFPRQLALMKELVDLLGLERLEVPGFEADDVLATLAKKAEREGYEVQILTADRDLFQLLSPRISVLHPEGHRITPEWLWEKYGLRPEQWVDFRALAGDPSDNIPGVKGIGEKTALKLLKEWGSLENLLKNLDQVKPESVREKILAHLEDLKLSRELSRVRTDLPLEVDFRRRREPDWEGLKAFLERLEFGSLLHEFGLLESPLPAEEAPWPPPEGAFLGYRLSRCEPMWAELLALAASAQGRVYRAEDPHGALRGLFEVRGLLAKDLAVVALREGLDLPPTDDPMLLAYLLDPSNTTPEGVARRYGGEWTEDAAKRALLAERLHANLLGRLQGEERLLWLYEEVEKPLSRVLAHMEATGVKLDVAYLEALSLEVAAEMRRLEEEVFRLAGHSFRLNSRDQLERVLFDELGLPPIGKTEKTGKRSTSAAVLEALREVHPIVDKILQYRELAKLKGTYIDPLPALVHPKTGRLHTRFNQTATATGRLSSSDPNLQNIPVRTPLGQKIRRAFVAEEGWRLVALDYSQIELRVLAHLSGDENLIRVFQEGKDIHTQTASWMFGLSAEAIDPLMRRAAKTINFGVLYGMSAFRLSQELGIPYEEAAAFIQKYFQSYPKVKAWIEKTLEEGRTRGYVETLFGRRRYVPDLNARVKSVREAAERMAFNMPVQGTAADLMKLAMVRLFPQLREVGARMLLQVHDELLLEAPKERAEEVAALAKEVMEGVWPLAVPLEVEVGIGEDWLAAKG

SEQ ID NO: 2833 - DNA, 2529 bp, synthetic construct
  misc_feature 1..2529: note = Variant of DNA polymerase I from Thermus sp. strain 2.9
  source 1..2529: mol_type = other DNA
atgcaccatcatcatcatcatggcggtagcggcgtgttaccggtgttcgagcctaaaggtcgcgtgcttctggttgatggccatcatctcgcgtatcgtaacttctttgccctgaaaggattaaccaccagccgtggcgagccggtacagggtgtctacggctttgcaaagtcgctcctgaaagctctgaaagaagacggtgatgtggtgattgttgtctttgatgcgaaagcgccaagttttcgccacgaagcgtacgaagcttacaaagccgggcgtgctccaacgccggaagactttcctcgccaattggcgcttatgaaggaattagtggatttgcttggcctcgaacgcttggaagttcccggtttcgaggcagacgacgtattagcgactctcgcaaagaaagccgaacgtgagggctatgaagtccagatcttgacagcagatcgcgatcttttccagcttttatctccgcgcatctcggtgttacacccggaagggcatcgtatcaccccggaatggctctgggagaaatatggtttgcgtcccgaacaatgggtggattttcgcgccttagcaggcgatccgagcgacaatattccgggagttaaaggtatcggcgagaagacggcgctcaagctccttaaagaatgggggtcgttggagaacttgcttaagaatttagatcaggtcaaaccagagtcagtgcgtgagaagattcttgcacacctcgaagacctcaaattaagccgcgaattgtcccgtgtacgcaccgatttgccgctcgaagttgatttccgtcgccgccgcgaacctgactgggagggtcttaaagcgtttttagagcgtcttgaatttggttcgctcttgcatgaattcggccttttagaaagcccgttaccagccgaagaagcaccttggccaccgcccgaaggcgcgtttttaggttaccgtttgagtcgcccggaaccgatgtgggccgaattattggctcttgcagcgtctgcccagggacgtgtgtatcgcgcggaagaccctcatggtgcgctccgcggcctcttcgaagtccgtggactccttgccaaagacttagctgttgttgcattgcgcgaaggtcttgatttacctccgactgatgatccaatgcttcttgcgtacctcttggacccgtcaaacacgacgcccgaaggcgtagcccgtcgttacggcggcgagtggaccgaagatgcagcgaaacgcgcgttattggccgaacgtttgcacgccaatttattaggacgtttgcaaggcgaggaacgtctcctctggctttacgaagaagtggagaaaccattgagtcgcgtgctcgcgcatatggaagctaccggtgtcaaattagacgtggcgtatttggaggctctcagccttgaagttgctgccgaaatgcgccgcttggaggaagaagtattccgtttagcaggccattcctttcgccttaattctcgcgatcagttagaacgtgtgttgttcgatgaacttggtctccctcctatcggcaagacagagaagaccggtaaacgtagcacttcagcggcggttttagaagctcttcgcgaagtccatcccattgtggacaagatcttgcagtaccgcgaactcgcgaaattgaaaggcacctatattgaccctcttccggcattagtccacccgaaaacgggacgcctccatacccgcttcaaccaaacagccacggcgaccggtcgtttgtcctcctctgatccaaaccttcagaatattccagtacgtaccccattgggccagaagatccgccgcgcgtttgtagctgaggagggttggcgtttagtggccctcgattatagccaaattgaattacgtgtccttgcccatctttctggcgatgagaacctcatccgcgtgtttcaggaaggcaaagacattcacactcaaacggcaagctggatgtttggattatcagctgaagcgatcgatcctttgatgcgtcgtgcagcgaagaccatcaatttcggtgttctctacggtatgagtgcctttcgtttgtcgcaggaattaggcattccctatgaagaagctgcggcgttcattcagaaatactttcaaagctatcccaaagttaaagcatggatcgagaagactctcgaagaaggccgcacaatgggttacgtagagaccttatttggacgtcgccgctatgttcccgatttaaacgctcgcgtgaaatctgtccgtgaagccgccgaacgcatggcgttcaacatgcctgtacagggcacggcagctgacctcatgaaacttgcaatggtgcgcctttttccacaattgcgtgaagttggtgcccgcatgctcttgcaggtccacgatgaactcttgttagaagcgccaaaagagcgtgcggaagaggtggcagccctcgcgaaagaggttatggaaggcgtgtggcccttagcggtgcctcttgaagtcgaagttggtattggcgaggattggctggctgccaaaggataatga

SEQ ID NO: 2834 - protein, 841 aa, synthetic construct
  REGION 1..841: note = Variant of DNA polymerase I from Thermus sp. strain 2.9
MHHHHHHGGSGVLPVFEPKGRVLLVDGHHLAYRNFFALKGLTTSRGEPVQGVYGFAKSLLKALKEDGDVVIVVFDAKAPSFRHEAYEAYKAGRAPTPEDFPRQLALMKELVDLLGLERLEVPGFEADDVLATLAKKAEREGYEVQILTADRDLFQLLSPRISVLHPEGHRITPEWLWEKYGLRPEQWVDFRALAGDPSDNIPGVKGIGEKTALKLLKEWGSLENLLKNLDQVKPESVREKILAHLEDLKLSRELSRVRTDLPLEVDFRRRREPDWEGLKAFLERLEFGSLLHEFGLLESPLPAEEAPWPPPEGAFLGYRLSRPEPMWAELLALAASAQGRVYRAEDPHGALRGLFEVRGLLAKDLAVVALREGLDLPPTDDPMLLAYLLDPSNTTPEGVARRYGGEWTEDAAKRALLAERLHANLLGRLQGEERLLWLYEEVEKPLSRVLAHMEATGVKLDVAYLEALSLEVAAEMRRLEEEVFRLAGHSFRLNSRDQLERVLFDELGLPPIGKTEKTGKRSTSAAVLEALREVHPIVDKILQYRELAKLKGTYIDPLPALVHPKTGRLHTRFNQTATATGRLSSSDPNLQNIPVRTPLGQKIRRAFVAEEGWRLVALDYSQIELRVLAHLSGDENLIRVFQEGKDIHTQTASWMFGLSAEAIDPLMRRAAKTINFGVLYGMSAFRLSQELGIPYEEAAAFIQKYFQSYPKVKAWIEKTLEEGRTMGYVETLFGRRRYVPDLNARVKSVREAAERMAFNMPVQGTAADLMKLAMVRLFPQLREVGARMLLQVHDELLLEAPKERAEEVAALAKEVMEGVWPLAVPLEVEVGIGEDWLAAKG

SEQ ID NO: 2835 - DNA, 2529 bp, synthetic construct
  misc_feature 1..2529: note = Variant of DNA polymerase I from Thermus sp. strain 2.9
  source 1..2529: mol_type = other DNA
atgcaccatcatcatcatcatggcggtagcggcgtgttaccggtgttcgagcctaaaggtcgcgtgcttctggttgatggccatcatctcgcgtatcgtaacttctttgccctgaaaggattaaccaccagccgtggcgagccggtacagggtgtctacggctttgcaaagtcgctcctgaaagctctgaaagaagacggtgatgtggtgattgttgtctttgatgcgaaagcgccaagttttcgccacgaagcgtacgaagcttacaaagccgggcgtgctccaacgccggaagactttcctcgccaattggcgcttatgaaggaattagtggatttgcttggcctcgaacgcttggaagttcccggtttcgaggcagacgacgtattagcgactctcgcaaagaaagccgaacgtgagggctatgaagtccagatcttgacagcagatcgcgatcttttccagcttttatctccgcgcatctcggtgttacacccggaagggcatcgtatcaccccggaatggctctgggagaaatatggtttgcgtcccgaacaatgggtggattttcgcgccttagcaggcgatccgagcgacaatattccgggagttaaaggtatcggcgagaagacggcgctcaagctccttaaagaatgggggtcgttggagaacttgcttaagaatttagatcaggtcaaaccagagtcagtgcgtgagaagattcttgcacacctcgaagacctcaaattaagccgcgaattgtcccgtgtacgcaccgatttgccgctcgaagttgatttccgtcgccgccgcgaacctgactgggagggtcttaaagcgtttttagagcgtcttgaatttggttcgctcttgcatgaattcggccttttagaaagcccgttaccagccgaagaagcaccttggccaccgcccgaaggcgcgtttttaggttaccgtttgagtcgcccggaaccgatgtgggccgaattattggctcttgcagcgtctgcccagggacgtgtgtatcgcgcggaagaccctcatggtgcgctccgcggcctcttcgaagtccgtggactccttgccaaagacttagctgttgttgcattgcgcgaaggtcttgatttacctccgactgatgatccaatgcttcttgcgtacctcttggacccgtcaaacacgacgcccgaaggcgtagcccgtcgttacggcggcgagtggaccgaagatgcagcgaaacgcgcgttattggccgaacgtttgcacgccaatttattaggacgtttgcaaggcgaggaacgtctcctctggctttacgaagaagtggagaaaccattgagtcgcgtgctcgcgcatatggaagctaccggtgtcaaattagacgtggcgtatttggaggctctcagccttgaagttgctgccgaaatgcgccgcttggaggaagaagtattccgtttagcaggccattcctttcgccttaattctcgcgatcagttagaacgtgtgttgttcgatgaacttggtctccctcctatcggcaagacagagaagaccggtaaacgtagcacttcagcggcggttttagaagctcttcgcgaagtccatcccattgtggacaagatcttgcagtaccgcgaactcgcgaaattgaaaggcacctatattgaccctcttccggtgttagtccacccgaaaacgggacgcctccatacccgcttcaaccaaacagccacggcgaccggtcgtttgtcctcctctgatccaaaccttcagaatattccagtacgtaccccattgggccagaagatccgccgcgcgtttgtagctgaggagggttggcgtttagtggccctcgattatagccaaattgaattacgtgtccttgcccatctttctggcgatgagaacctcatccgcgtgtttcaggaaggcaaagacattcacactcaaacggcaagctggatgtttggattatcagctgaagcgatcgatcctttgatgcgtcgtgcagcgaagaccatcaatttcggtgttctctacggtatgagtgcctttcgtttgtcgcaggaattaggcattccctatgaagaagctgcggcgttcattcagaaatactttcaaagctatcccaaagttaaagcatggatcgagaagactctcgaagaaggccgcacacgtggttacgtagagaccttatttggacgtcgccgctatgttcccgatttaaacgctcgcgtgaaatctgtccgtgaagccgccgaacgcatggcgttcaacatgcctgtacagggcacggcagctgacctcatgaaacttgcaatggtgcgcctttttccacaattgcgtgaagttggtgcccgcatgctcttgcaggtccacgatgaactcttgttagaagcgccaaaagagcgtgcggaagaggtggcagccctcgcgaaagaggttatggaaggcgtgtggcccttagcggtgcctcttgaagtcgaagttggtattggcgaggattggctggctgccaaaggataatga

SEQ ID NO: 2836 - protein, 841 aa, synthetic construct
  REGION 1..841: note = Variant of DNA polymerase I from Thermus sp. strain 2.9
MHHHHHHGGSGVLPVFEPKGRVLLVDGHHLAYRNFFALKGLTTSRGEPVQGVYGFAKSLLKALKEDGDVVIVVFDAKAPSFRHEAYEAYKAGRAPTPEDFPRQLALMKELVDLLGLERLEVPGFEADDVLATLAKKAEREGYEVQILTADRDLFQLLSPRISVLHPEGHRITPEWLWEKYGLRPEQWVDFRALAGDPSDNIPGVKGIGEKTALKLLKEWGSLENLLKNLDQVKPESVREKILAHLEDLKLSRELSRVRTDLPLEVDFRRRREPDWEGLKAFLERLEFGSLLHEFGLLESPLPAEEAPWPPPEGAFLGYRLSRPEPMWAELLALAASAQGRVYRAEDPHGALRGLFEVRGLLAKDLAVVALREGLDLPPTDDPMLLAYLLDPSNTTPEGVARRYGGEWTEDAAKRALLAERLHANLLGRLQGEERLLWLYEEVEKPLSRVLAHMEATGVKLDVAYLEALSLEVAAEMRRLEEEVFRLAGHSFRLNSRDQLERVLFDELGLPPIGKTEKTGKRSTSAAVLEALREVHPIVDKILQYRELAKLKGTYIDPLPVLVHPKTGRLHTRFNQTATATGRLSSSDPNLQNIPVRTPLGQKIRRAFVAEEGWRLVALDYSQIELRVLAHLSGDENLIRVFQEGKDIHTQTASWMFGLSAEAIDPLMRRAAKTINFGVLYGMSAFRLSQELGIPYEEAAAFIQKYFQSYPKVKAWIEKTLEEGRTRGYVETLFGRRRYVPDLNARVKSVREAAERMAFNMPVQGTAADLMKLAMVRLFPQLREVGARMLLQVHDELLLEAPKERAEEVAALAKEVMEGVWPLAVPLEVEVGIGEDWLAAKG

SEQ ID NO: 2837 - DNA, 2529 bp, synthetic construct
  misc_feature 1..2529: note = Variant of DNA polymerase I from Thermus sp. strain 2.9
  source 1..2529: mol_type = other DNA
atgcaccatcatcatcatcatggcggtagcggcgtgttaccggtgttcgagcctaaaggtcgcgtgcttctggttgatggccatcatctcgcgtatcgtaacttctttgccctgaaaggattaaccaccagccgtggcgagccggtacagggtgtctacggctttgcaaagtcgctcctgaaagctctgaaagaagacggtgatgtggtgattgttgtctttgatgcgaaagcgccaagttttcgccacgaagcgtacgaagcttacaaagccgggcgtgctccaacgccggaagactttcctcgccaattggcgcttatgaaggaattagtggatttgcttggcctcgaacgcttggaagttcccggtttcgaggcagacgacgtattagcgactctcgcaaagaaagccgaacgtgagggctatgaagtccagatcttgacagcagatcgcgatcttttccagcttttatctccgcgcatctcggtgttacacccggaagggcatcgtatcaccccggaatggctctgggagaaatatggtttgcgtcccgaacaatgggtggattttcgcgccttagtaggcgatccgagcgacaatattccgggagttaaaggtatcggcgagaagacggcgctcaagctccttaaagaatgggggtcgttggagaacttgcttaagaatttagatcaggtcaaaccagagtcagtgcgtgagaagattcttgcacacctcgaagacctcaaattaagccgcgaattgtcccgtgtacgcaccgatttgccgctcgaagttgatttccgtggccgccgcgaacctgactgggagggtcttaaagcgtttttagagcgtcttgaatttggttcgctcttgcatgaattcggccttttagaaagcccgttaccagccgaagaagcaccttggccaccgcccgaaggcgcgtttttaggttaccgtttgagtcgcccggaaccgatgtgggccgaattattggctcttgcagcgtctgcccagggacgcgtgtatcgcgcggaagaccctcatggtgcgctccgcggcctcttcgaagtccgtggactccttgccaaagacttagctgttgttgcattgcgcgaaggtcttgatttacctccgactgatgatccaatgcttcttgcgtacctcttggacccgtcaaacacgacgcccgaaggcgtagcccgtcgttacggcggcgagtggaccgaagatgcagcgaaacgcgcgttattggccgaacgtttgcacgccaatttattaggacgtttgcaaggcgaggaacgtctcctctggctttacgaagaagtggagaaaccattgagtcgcgtgctcgcgcatatggaagctaccggtgtcaaattagacgtggcgtatttggaggctctcagccttgaagttgctgccgaaatgcgccgcttggaggaagaagtattccgtttagcaggccgctcctttcgccttaattctcgcgatcagttagaacgtgtgttgttcgatgaacttggtctccctcctatcggcaagacagagaagaccggtaaacgtagcacttcagcggcggttttagaagctcttcgcgaagtccatcccattgtggacaagatcttgcaataccgcgaactcgcgaaattgaaaggcacctatattgaccctcttccggcattagtccacccgaaaacgggacgcctccatacccgcttcaaccaaacagccacggcgaccggtcgtttgtcctcctctgatccaaaccttcagaatattccagtacgtaccccattgggccagaagatccgccgcgcgtttgtagctgaggagggttggcgtttagtggccctcgattatagccaaattgaattacgtgtccttgcccatctttctggcgatgagaacctcatccgcgtgtttcaggaaggcaaagacattcacactcaaacggcaagctggatgtttggattatcagctgaagcgatcgatcctttgatgcgtcgtgcagcgaagaccatcaatttcggtgttctctacggtatgagtgcctttcgtttgtcgcaggaattaggcattccctatgaagaagctgcggcgttcattcagaaatactttcaaagctatcccaaagttaaagcatggatcgagaagactctcgaagaaggccgcacacgtggttacgtagagaccttatttggacgtcgccgctatgttcccgatttaaacgctcgcgtgaaatctgtccgtgaagccgccgaacgcatggcgttcaacatgcctgtacagggcacggcagctgacctcatgaaacttgcaatggtgcgcctttttccacaattgcgtgaagttggtgcccgcatgctcttgcaggtccacgatgaactcttgttagaagcgccaaaagagcgtgcggaagaggtggcagccctcgcgaaagaggttatggaaggcgtgtggcccttagcggtgcctcttgaagtcgaagttggtattggcgaggattggctggctgccaaaggataatga

SEQ ID NO: 2838 - protein, 841 aa, synthetic construct
  REGION 1..841: note = Variant of DNA polymerase I from Thermus sp. strain 2.9
MHHHHHHGGSGVLPVFEPKGRVLLVDGHHLAYRNFFALKGLTTSRGEPVQGVYGFAKSLLKALKEDGDVVIVVFDAKAPSFRHEAYEAYKAGRAPTPEDFPRQLALMKELVDLLGLERLEVPGFEADDVLATLAKKAEREGYEVQILTADRDLFQLLSPRISVLHPEGHRITPEWLWEKYGLRPEQWVDFRALVGDPSDNIPGVKGIGEKTALKLLKEWGSLENLLKNLDQVKPESVREKILAHLEDLKLSRELSRVRTDLPLEVDFRGRREPDWEGLKAFLERLEFGSLLHEFGLLESPLPAEEAPWPPPEGAFLGYRLSRPEPMWAELLALAASAQGRVYRAEDPHGALRGLFEVRGLLAKDLAVVALREGLDLPPTDDPMLLAYLLDPSNTTPEGVARRYGGEWTEDAAKRALLAERLHANLLGRLQGEERLLWLYEEVEKPLSRVLAHMEATGVKLDVAYLEALSLEVAAEMRRLEEEVFRLAGRSFRLNSRDQLERVLFDELGLPPIGKTEKTGKRSTSAAVLEALREVHPIVDKILQYRELAKLKGTYIDPLPALVHPKTGRLHTRFNQTATATGRLSSSDPNLQNIPVRTPLGQKIRRAFVAEEGWRLVALDYSQIELRVLAHLSGDENLIRVFQEGKDIHTQTASWMFGLSAEAIDPLMRRAAKTINFGVLYGMSAFRLSQELGIPYEEAAAFIQKYFQSYPKVKAWIEKTLEEGRTRGYVETLFGRRRYVPDLNARVKSVREAAERMAFNMPVQGTAADLMKLAMVRLFPQLREVGARMLLQVHDELLLEAPKERAEEVAALAKEVMEGVWPLAVPLEVEVGIGEDWLAAKG

SEQ ID NO: 2839 - DNA, 2529 bp, synthetic construct
  misc_feature 1..2529: note = Variant of DNA polymerase I from Thermus sp. strain 2.9
  source 1..2529: mol_type = other DNA
atgcaccatcatcatcatcatggcggtagcggcgtgttaccggtgttcgagcctaaaggtcgcgtgcttctggttgatggccatcatctcgcgtatcgtaacttctttgccctgaaaggattaaccaccagccgtggcgagccggtacagggtgtctacggctttgcaaagtcgctcctgaaagctctgaaagaagacggtgatgtggtgattgttgtctttgatgcgaaagcgccaagttttcgccacgaagcgtacgaagcttacaaagccgggcgtgctccaacgccggaagactttcctcgccaattggcgcttatgaaggaattagtggatttgcttggcctcgaacgcttggaagttcccggtttcgaggcagacgacgtattagcgactctcgcaaagaaagccgaacgtgagggctatgaagtccagatcttgacagcagatcgcgatcttttccagcttttatctccgcgcatctcggtgttacacccggaagggcatcgtatcaccccggaatggctctgggagaaatatggtttgcgtcccgaacaatgggtggattttcgcgccttagcaggcgatccgagcgacaatattccgggagttaaaggtatcggcgagaagacggcgctcaagctccttaaagaatgggggtcgttggataacttgcttaagaatttagatcaggtcaaaccagagtcagtgcgtgagaagattcttgcacacctcgaagacctcaaattaagccgcgaattgtcccgtgtacgcaccgatttgccgctcgaagttgatttccgtcgccgccgcgaacctgactgggagggtcttaaagcgtttttagagcgtcttgaatttggttcgctcttgcatgaattcggccttttagaaagcccgttaccagccgaagaagcaccttggccaccgcccgaaggcgcgtttttaggttaccgtttgagtcgcccggaaccgatgtgggccgaattattggctcttgcagcgtctgcccagggacgtgtgtatcgcgcggaagaccctcatggtgcgctccgcggcctcttcgaagtccgtggactccttgccaaagacttagctgttgttgcattgcgcgaaggtcttgatttacctccgactgatgatccaatgcttcttgcgtacctcttggacccgtcaaacacgacgcccgaaggcgtagcccgtcgttacggcggcgagtggaccgaagatgcagcgaaacgcgcgttattggccgaacgtttgcacgccaatttattaggacgtttgcaaggcgaggaacgtctcctctggctttacgaagaagtggagaaaccattgagtcgcgtgctcgcgcatatggaagctaccggtgtcaaattagacgtggcgtatttggaggctctcagccttgaagttgctgccgaaatgcgccgcttggaggaagaagtattccgtttagcaggccattcctttcgccttaattctcgcgatcagttagaacgtgtgttgttcgatgaacttggtctccctcctatcggcaagacagagaagaccggtaaacgtagcacttcagcggcggttttagaagctcttcgcgaagtccatcccattgtggacaagatcttgcagtaccgcgaactcgcgaaattgaaaggcacctatattgaccctcttccggcattagtccacccgaaaacgggacgcctccatacccgcttcaaccaaacagccacggcgaccggtcgtttgtcctcctctgatccaaaccttcagaatattccagtacgtaccccattgggccagaagatccgccgcgcgtttgtagctgaggagggttggcgtttagtggccctcgattatagccaaattgaattacgtgtccttgcccatctttctggcgatgagaacctcatccgcgtgtttcaggaaggcaaagacattcacactcaaacggcaagctggatgtttggattatcagctgaagcgatcgatcctttgatgcgtcgtgcagcgaagaccatcaatttcggtgttctctacggtatgagtgcctttcgtttgtcgcaggaattaggcattccctatgaagaagctgcggcgttcattcagaaatactttcaaagctatcccaaagttaaagcatggatcgagaagactctcgaagaaggccgcacacgtggttacgtagagaccttatttggacgtcgccgctatgttcccgatttaaacgctcgcgtgaaatctgtccgtgaagccgccgaacgcatggcgttcaacatgcctgtacagggcacggcagctgacctcatgaaacttgcaatggtgcgcctttttccacaattgcgtgaagttggtgcccgcatgctcttgcaggtccacgatgaactcttgttagaagcgccaaaagagcgtgcggaagaggtggcagccctcgcgaaagaggttatggaaggcgtgtggcccttagcggtgcctcttgaagtcgaagttggtattggcgaggattggctggctgccaaaggataatga

SEQ ID NO: 2840 - protein, 841 aa, synthetic construct
  REGION 1..841: note = Variant of DNA polymerase I from Thermus sp. strain 2.9
MHHHHHHGGSGVLPVFEPKGRVLLVDGHHLAYRNFFALKGLTTSRGEPVQGVYGFAKSLLKALKEDGDVVIVVFDAKAPSFRHEAYEAYKAGRAPTPEDFPRQLALMKELVDLLGLERLEVPGFEADDVLATLAKKAEREGYEVQILTADRDLFQLLSPRISVLHPEGHRITPEWLWEKYGLRPEQWVDFRALAGDPSDNIPGVKGIGEKTALKLLKEWGSLDNLLKNLDQVKPESVREKILAHLEDLKLSRELSRVRTDLPLEVDFRRRREPDWEGLKAFLERLEFGSLLHEFGLLESPLPAEEAPWPPPEGAFLGYRLSRPEPMWAELLALAASAQGRVYRAEDPHGALRGLFEVRGLLAKDLAVVALREGLDLPPTDDPMLLAYLLDPSNTTPEGVARRYGGEWTEDAAKRALLAERLHANLLGRLQGEERLLWLYEEVEKPLSRVLAHMEATGVKLDVAYLEALSLEVAAEMRRLEEEVFRLAGHSFRLNSRDQLERVLFDELGLPPIGKTEKTGKRSTSAAVLEALREVHPIVDKILQYRELAKLKGTYIDPLPALVHPKTGRLHTRFNQTATATGRLSSSDPNLQNIPVRTPLGQKIRRAFVAEEGWRLVALDYSQIELRVLAHLSGDENLIRVFQEGKDIHTQTASWMFGLSAEAIDPLMRRAAKTINFGVLYGMSAFRLSQELGIPYEEAAAFIQKYFQSYPKVKAWIEKTLEEGRTRGYVETLFGRRRYVPDLNARVKSVREAAERMAFNMPVQGTAADLMKLAMVRLFPQLREVGARMLLQVHDELLLEAPKERAEEVAALAKEVMEGVWPLAVPLEVEVGIGEDWLAAKG

SEQ ID NO: 2841 - DNA, 2529 bp, synthetic construct
  misc_feature 1..2529: note = Variant of DNA polymerase I from Thermus sp. strain 2.9
  source 1..2529: mol_type = other DNA
atgcaccatcatcatcatcatggcggtagcggcgtgttaccggtgttcgagcctaaaggtcgcgtgcttctggttgatggccatcatctcgcgtatcgtaacttctttgccctgaaaggattaaccaccagcagcggcgagccggtacagggtgtctacggctttgcaaagtcgctcctgaaagctctgaaagaagacggtgatgtggtgattgttgtctttgatgcgaaagcgccaagttttcgccacgaagcgtacgaagcttacaaagccgggcgtgctccaacgccggaagactttcctcgccaattggcgcttatgaagcatttagtggatttgcttggcctcgaacgcttggaagttcccggtttcgaggcagacgacgtattagcgactctcgcaaagaaagccgaacgtgagggctatgaagtccagatcttgacagcagatcgcgatcttttccagcttttatctccgcgcatctcggtgttacacccggaagggcatcgtatcaccccggaatggctctgggagaaatatggtttgcgtcccgaacaatgggtggattttcgcgccttagcaggcgatccgagcgacaatattccgggagttaaaggtatcggcgagaagacggcgctcaagctccttaaagaatgggggtcgttggagaacttgcttaagaatttagatcaggtcaaaccagagtcagtgcgtgagaagattcttaatcacctcgaagacctcaaattaagccgcgaattgtcccgtgtacgcaccgatttgccgctcgaagttgatttccgtcgccgccgcgaacctgactgggagggtcttaaagcgtttttagagcgtcttgaatttggttcgctcttgcatgaattcggccttttagaaagcccgttaccagccgaagaagcaccttggccaccgcccgagggcgcgtttttaggttaccgtttgagtcgcccggaaccgatgtgggccgaattactggctcttgcagcgtctgcccagggacgcgtgtatcgcgcggaagaccctcatggtgcgctccgcggcctcttcgaagtccgtggactccttgccaaagacttagctgttgttgcattgcgcgaaggtcttgatttacctccgactgatgatccaatgcttcttgcgtacctcttggacccgtcaaacacgacgcccgaaggcgtagcccgtcgttacggcggcgagtggaccgaagatgcagcgaaacgcgcgttattggccgaacgtttgcacgagaatttattaggacgtttgcaaggcgaggaacgtctcctctggctttacgaagaagtggagaaaccattgagtcgcgtgctcgcgcatatggaagctaccggtgtcaaattagacgtggcgtatttggaggctctcagccttgaagttgctgccgaaatgcgccgcttggaggaagaagtattccgtttagcaggccactcctttcgccttaattctcgcgatcagttagaacgtgtgttgttcgatgaacttggtctccctcctatcggcaagacagagaagaccggtaaacgtagcacttcagcggcggttttagaagctcttcgcgaagtccatcccattgtggacaagatcttggtgtaccgcgaactcgcgaaattgaaaggcacctatattgaccctcttccggcattagtccacccgaaaacgggacgcctccatacccgcttcaaccaaacagccacggcgaccggtcgtttgtcctcctctgatccaaaccttcagaatattccagtacgtaccccattgggccagaagatccgcaaggcgtttgtagctgaggagggttggcgtttagtggccctcgattatagccaaattgaattacgtgtccttgcccatctttctggcgatgagaacctcatccgcgtgtttcaggaaggcaaagacattcacactcaaacggcaagctggatgtttggattaagtgctgaagcgatcgatcctttgatgcgtcgtgcagcgaagaccatcaatttcggtgttctctacggtatgagtgcctttcgtttgtcgcaggaattaggcattccctatgaagaagctcaggcgttcattcagaaatactttcaaagctatcccaaagttaaagcatggatcgagaagactctcgaagaaggccgcacacgtggttacgtagagaccttatttggacgtcgccgctatgttcccgatttaaacgctcgcgtgaaaggcaagcgtgaagccgccgaacgcatggcgttcaacatgcctgtacagggcacggcagctgacctcatgaaacttgcaatggtgcgcctttttccacaattgcgtgaagttggtgcccgcatgctcttgcaggtccacgatgaactcttgttagaagcgccaaaagagcgtgcggaagaggtggcagccctcgcgaaaacggttatggaaggcgtgtggcccttagcggtgcctcttgaagtcgaagttggtattggcgaggattggctggctgccaaaggataatga

SEQ ID NO: 2842 - protein, 841 aa, synthetic construct
  REGION 1..841: note = Variant of DNA polymerase I from Thermus sp. strain 2.9
MHHHHHHGGSGVLPVFEPKGRVLLVDGHHLAYRNFFALKGLTTSSGEPVQGVYGFAKSLLKALKEDGDVVIVVFDAKAPSFRHEAYEAYKAGRAPTPEDFPRQLALMKHLVDLLGLERLEVPGFEADDVLATLAKKAEREGYEVQILTADRDLFQLLSPRISVLHPEGHRITPEWLWEKYGLRPEQWVDFRALAGDPSDNIPGVKGIGEKTALKLLKEWGSLENLLKNLDQVKPESVREKILNHLEDLKLSRELSRVRTDLPLEVDFRRRREPDWEGLKAFLERLEFGSLLHEFGLLESPLPAEEAPWPPPEGAFLGYRLSRPEPMWAELLALAASAQGRVYRAEDPHGALRGLFEVRGLLAKDLAVVALREGLDLPPTDDPMLLAYLLDPSNTTPEGVARRYGGEWTEDAAKRALLAERLHENLLGRLQGEERLLWLYEEVEKPLSRVLAHMEATGVKLDVAYLEALSLEVAAEMRRLEEEVFRLAGHSFRLNSRDQLERVLFDELGLPPIGKTEKTGKRSTSAAVLEALREVHPIVDKILVYRELAKLKGTYIDPLPALVHPKTGRLHTRFNQTATATGRLSSSDPNLQNIPVRTPLGQKIRKAFVAEEGWRLVALDYSQIELRVLAHLSGDENLIRVFQEGKDIHTQTASWMFGLSAEAIDPLMRRAAKTINFGVLYGMSAFRLSQELGIPYEEAQAFIQKYFQSYPKVKAWIEKTLEEGRTRGYVETLFGRRRYVPDLNARVKGKREAAERMAFNMPVQGTAADLMKLAMVRLFPQLREVGARMLLQVHDELLLEAPKERAEEVAALAKTVMEGVWPLAVPLEVEVGIGEDWLAAKG

SEQ ID NO: 2843 - DNA, 2529 bp, synthetic construct
  misc_feature 1..2529: note = Variant of DNA polymerase I from Thermus sp. strain 2.9
  source 1..2529: mol_type = other DNA
atgcaccatcatcatcatcatggcggtagcggcgtgttaccggtgttcgagcctaaaggtcgcgtgcttctggttgatggccatcatctcgcgtatcgtaacttctttgccctgaaaggattaaccaccagcagcggcgagccggtacagggtgtctacggctttgcaaagtcgctcctgaaagctctgaaagaagacggtgatgtggtgattgttgtctttgatgcgaaagcgccaagttttcgccacgaagcgtacgaagcttacaaagccgggcgtgctccaacgccggaagactttcctcgccaattggcgcttatgaaggaattagtggatttgcttggcctcgaacgcttggaagttcccggtttcgaggcagacgacgtattagcgactctcgcaaagaaagccgaacgtgagggctatgaagtccagatcttgacagcagatcgcgatcttttccagcttttatctccgcgcatctcggtgttacacccggaagggcatcgtatcaccccggaatggctctgggagaaatatggtttgcgtcccgaacaatgggtggattttcgcgccttagcaggcgatccgagcgacaatattccgggagttaaaggtatcggcgagaagacggcgctcaagctccttaaagaatgggggtcgttggagaacttgcttaagaatttagatcaggtcaaaccagagtcagtgcgtgagaagattcttgcacacctcgaagacctcaaattaagccgcgaattgtcccgtgtacgcaccgatttgccgctcgaagttgatttccagcgccgccgcgaacctgactgggagggtcttaaagcgtttttagagcgtcttgaatttggttcgctcttgcatgaattcggccttttagaaagcccgttaccagccgaagaagcaccttggccaccgcccgaaggcgcgtttttaggttaccgtttgagtcgcccggaaccgatgtgggccgaattattggctcttgcagcgtctgcccagggacgtgtgtatcgcgcggaagaccctcatggtgcgctccgcggcctcttcgaagtccgtggactccttgccaaagacttagctgttgttgcattgcgcgaaggtcttgatttacctccgactgatgatccaatgcttcttgcgtacctcttggacccgtcaaacacgacgcccgaaggcgtagcccgtcgttacggcggcgagtggaccgaagatgcagcgaaacgcgcgttattggccgaacgtttgcacgccaatttattaggacgtttgcaaggcgaggaacgtctcctctggctttacgaagaagtggagaaaccattgagtcgcgtgctcgcgcatatggaagctaccggtgtcaaattagacgtggcgtatttggaggctctcagccttgaagttgctgccgaaatgcgccgcttggaggaagaagtattccgtttagcaggccgctcctttcgccttaattctcgcgatcagttagaacgtgtgttgttcgatgaacttggtctccctcctatcggcaagacagagaagaccggtaaacgtagcacttcagcggcggttttagaagctcttcgcgaagtccatcccattgtggacaagatcttggtgtaccgcgaactcgcgaaattgaaaggcacctatattgaccgtcttccggcattagtccacccgaaaacgggacgcctccatacccgcttcaaccaaacagccacggcgaccggtcgtttgtcctcctctgatccaaaccttcagaatattccagtacgtaccccattgggccagaagatccgccgtgcgtttgtagctgaggagggttggcgtttagtggccctcgattatagccaaattgaattacgtgtccttgcccatctttctggcgatgagaacctcatccgcgtgtttcaggaaggcaaagacattcacactcaaacggcaagctggatgtttggattaactgctgaagcgatcgatcctttgatgcgtcgtgcagcgaagaccatcaatttcggtgttctctacggtatgagtgcctttcgtttgtcgcaggaattaggcattccctatgaagaagctgcggcgttcattcagaaatactttcaaagctatcccaaagttaaagcatggatcgagaagactctccgtgaaggccgcacacgtggttacgtagagaccttatttggacgtcgccgctatgttcccgatttaaacgctcgcgtgaaatctgtccgtgaagccgccgaacgcatggcgttcaacatgcctgtacagggcacggcagctgacctcatgaaacttgcaatggtgcgcctttttccacaattgcgtgaagttggtgcccgcatgctcttgcaggtccacgatgaactcttgttagaagcgccaaaagagcgtgcggaagaggtggcagccctcgcgaaagaagttatggaaggcgtgtggcccttagcggtgcctcttgaagtcgaagttggtattggcgaggattggctggctgccaaaggataatga

SEQ ID NO: 2844 - protein, 841 aa, synthetic construct
  REGION 1..841: note = Variant of DNA polymerase I from Thermus sp. strain 2.9
MHHHHHHGGSGVLPVFEPKGRVLLVDGHHLAYRNFFALKGLTTSSGEPVQGVYGFAKSLLKALKEDGDVVIVVFDAKAPSFRHEAYEAYKAGRAPTPEDFPRQLALMKELVDLLGLERLEVPGFEADDVLATLAKKAEREGYEVQILTADRDLFQLLSPRISVLHPEGHRITPEWLWEKYGLRPEQWVDFRALAGDPSDNIPGVKGIGEKTALKLLKEWGSLENLLKNLDQVKPESVREKILAHLEDLKLSRELSRVRTDLPLEVDFQRRREPDWEGLKAFLERLEFGSLLHEFGLLESPLPAEEAPWPPPEGAFLGYRLSRPEPMWAELLALAASAQGRVYRAEDPHGALRGLFEVRGLLAKDLAVVALREGLDLPPTDDPMLLAYLLDPSNTTPEGVARRYGGEWTEDAAKRALLAERLHANLLGRLQGEERLLWLYEEVEKPLSRVLAHMEATGVKLDVAYLEALSLEVAAEMRRLEEEVFRLAGRSFRLNSRDQLERVLFDELGLPPIGKTEKTGKRSTSAAVLEALREVHPIVDKILVYRELAKLKGTYIDRLPALVHPKTGRLHTRFNQTATATGRLSSSDPNLQNIPVRTPLGQKIRRAFVAEEGWRLVALDYSQIELRVLAHLSGDENLIRVFQEGKDIHTQTASWMFGLTAEAIDPLMRRAAKTINFGVLYGMSAFRLSQELGIPYEEAAAFIQKYFQSYPKVKAWIEKTLREGRTRGYVETLFGRRRYVPDLNARVKSVREAAERMAFNMPVQGTAADLMKLAMVRLFPQLREVGARMLLQVHDELLLEAPKERAEEVAALAKEVMEGVWPLAVPLEVEVGIGEDWLAAKG

SEQ ID NO: 2845 - DNA, 2529 bp, synthetic construct
  misc_feature 1..2529: note = Variant of DNA polymerase I from Thermus sp. strain 2.9
  source 1..2529: mol_type = other DNA
atgcaccatcatcatcatcatggcggtagcggcgtgttaccggtgttcgagcctaaaggtcgcgtgcttctggttgatggccatcatctcgcgtatcgtaacttctttgccctgaaaggattaaccaccagccgtggcgagccggtacagggtgtctacggctttgcaaagtcgctcctgaaagctctgaaagaagacggtgatgtggtgattgttgtctttgatgcgaaagcgccaagttttcgccacgaagcgtacgaagcttacaaagccgggcgtgctccaacgccggaagactttcctcgccaattggcgcttatgaaggaattagtggatttgcttggcctcgaacgcttggaagttcccggtttcgaggcagacgacgtattagcgactctcgcaaagaaagccgaacgtgagggctatgaagtccagatcttgacagcagatcgcgatcttttccagcttttatctccgcgcatctcggtgttacacccggaagggcatcgtatcaccccggaatggctctgggagaaatatggtttgcgtcccgaacaatgggtggattttcgcgccttagcaggcgatccgagcgacaatattccgggagttaaaggtatcggcgagaagacggcgctcaagctccttaaagaatgggggtcgttggagaacttgcttaagaatttagatcaggtcaaaccagagtcagtgcgtgagaagattcttgcacacctcgaagacctcaaattaagccgcgaattgtcccgtgtacgcaccgatttgccgctcgaagttgatttccgtcgccgccgcgaacctgactgggagggtcttaaagcgtttttagagcgtcttgaatttggttcgctcttgcatgaattcggccttttagaaagcccgttaccagccgaagaagcaccttggccaccgcccgaaggcgcgtttttaggttaccgtttgagtcgcccggaaccgatgtgggccgaattattggctcttgcagcgtctgcccagggacgtgtgtatcgcgcggaagaccctcatggtgcgctccgcggcctcttcgaagtccgtggactccttgccaaagacttagctgttgttgcattgcgcgaaggtcttgatttacctccgactgatgatccaatgcttcttgcgtacctcttggacccgtcaaacacgacgcccgaaggcgtagcccgtcgttacggcggcgagtggaccgaagatgcagcgaaacgcgcgttattggccgaacgtttgcacgccaatttattaggacgtttgcaaggcgaggaacgtctcctctggctttacgaagaagtggagaaaccattgagtcgcgtgctcgcgcatatggaagctaccggtgtcaaattagacgtggcgtatttggaggctctcagccttgaagttgctgccgaaatgcgccgcttggaggaagaagtattccgtttagcaggccattcctttcgccttaattctcgcgatcagttagaacgtgtgttgttcgatgaacttggtctccctcctatcggcaagacagagaagaccggtaaacgtagcacttcagcggcggttttagaagctcttcgcgaagtccatcccattgtggacaagatcttgcagtaccgcgaactcgcgaaattgaaaggcacctatattgaccctcttccggcattagtccacccgaaaacgggacgcctccatacccgcttcaaccaaacagccacggcgaccggtcgtttgtcctcctctgatccaaaccttcagaatattccagtacgtaccccattgggccagaagatccgccgcgcgtttgtagctgaggagggttggcgtttagtggccctcgattatagccaaattgaattacgtgtccttgcccatctttctggcgatgagaacctcatccgcgtgtttcaggaaggcaaagacattcacactcaaacggcaagctggatgtttggattatcagctgaagcgatcgatcctttgatgcgtcgtgcagcgaagaccatcaatttcggtgttctctacggtatgagtgcctttcgtttgtcgcaggaattaggcattccctatcaagaagctgcggcgttcattcagaaatactttcaaagctatcccaaagttaaagcatggatcgagaagactctcgaagaaggccgcacacgtggttacgtagagaccttatttggacgtcgccgctatgttcccgatttaaacgctcgcgtgaaatctgtccgtgaagccgccgaacgcatggcgttcaacatgcctgtacagggcacggcagctgacctcatgaaacttgcaatggtgcgcctttttccacaattgcgtgaagttggtgcccgcatgctcttgcaggtccacgatgaactcttgttagaagcgccaaaagagcgtgcggaagaggtggcagccctcgcgaaagaggttatggaaggcgtgtggcccttagcggtgcctcttgaagtcgaagttggtattggcgaggattggctggctgccaaaggataatga

SEQ ID NO: 2846 - protein, 841 aa, synthetic construct; identical to SEQ ID NO: 2272
  REGION 1..841: note = Variant of DNA polymerase I from Thermus sp. strain 2.9

SEQ ID NO: 2847 - DNA, 2529 bp, synthetic construct
  misc_feature 1..2529: note = Variant of DNA polymerase I from Thermus sp. strain 2.9
  source 1..2529: mol_type = other DNA
atgcaccatcatcatcatcatggcggtagcggcgtgttaccggtgttcgagcctaaaggtcgcgtgcttctggttgatggccatcatctcgcgtatcgtaacttctttgccctgaaaggattaaccaccagccgtggcgagccggtacagggtgtctacggctttgcaaagtcgctcctgaaagctctgaaagaagacggtgatgtggtgattgttgtctttgatgcgaaagcgccaagttttcgccacgaagcgtacgaagcttacaaagccgggcgtgctccaacgccggaagactttcctcgtcaattggcgcttatgaaggaattagtggatttgcttggcctcgaacgcttggaagttcccggtttcgaggcagacgacgtattagcgactctcgcaaagaaagccgaacgtgagggctatgaagtccagatcttgacagcagatcgcgatcttttccagcttttatctccgcgcatctcggtgttacacccggaagggcatcgtatcaccccggaatggctctgggagaaatatggtttgcgtcccgaacaatgggtggattttcgcgccttagcaggcgatccgagcgacaatattccgggagttaaaggtatcggcgagaagacggcgctcaagctccttaaagaatgggggtcgttggagaacttgcttaagaatttagatcaggtcaaaccagagtcagtgcgtgagaagattcttgcacacctcgaagacctcaaattaagccgcgaattgtcccgtgtacgcaccgatttgccgctcgaagttgatttccgtcgccgccgcgaacctgactgggagggtcttaaagcgtttttagagcgtcttgaatttggttcgctcttgcatgaattcggccttttagaaagcccgttactggccgaagaagcaccttggccaccgcccgagggcgcgtttttaggttaccgtttgagtcgcccggaaccgatgtgggccgaattattggctcttgcagcgtctgcccagggaaccgtgtatcgcgcggaagaccctcatggtgcgctccgcggcctcttcgaagtccgtggactccttgccaaagacttagctgttgttgcattgcgcgaaggtcttgatttacctccgactgatgatccaatgcttcttgcgtacctcttggacccgtcaaacacgacgcccgaaggcgtagcccgtcgttacggcggcgagtggaccgaagatgcagcgaaacgcgcgttattggccgaacgtttgcacgccaatttattaggacgtttgcaaggcgaggaacgtctcctctggctttacgaagaagtggagaaaccattgagtcgcgtgctcgcgcatatggaagctaccggtgtcaaattagacgtggcgtatttggaggctctcagccttgaagttgctgccgaaatgcgccgcttggaggaagaagtattccgtttagcaggccgttcctttcgccttgtatctcgcgatcagttagaacgtgtgttgttcgatgaacttggtctccctcctatcggcaagacagagaagaccggtaaacgtagcacttcacgtgcggttttagaagctcttcgcgaagtccatcccattgtggacaagatcttgcagtaccgcgaactcgcgaaattgaaaggcacctatattgaccctcttccggcattagtccacccgaaaacgggacgcctccatacccgcttcaaccaaacagccacggcgaccggtcgtttgtcctcctctgatccaaaccttcagaatattccagtacgtaccccattgggccagaagatccgccgcgcgtttgtagctgaggagggttggcgtttagtggccctcgattatagccaaattgaattacgtgtccttgcccatctttctggcgatgagaacctcatccgcgtgtttcaggaaggcaaagacattcacactcaaacggcaagctggatgtttggattatcagctgaagcgatcgatcctttgatgcgtcgtgcagcgaagaccatcaatttcggtgttctctacggtatgagtgcctttcgtttgtcgcaggaattaggcattccctatgaagaagctgcggcgttcattcagaaatactttcaaagctatcccaaagttaaagcatggatcgagaagactctcgaggaaggccgcacacgtggttacgtagagaccttatttggacgtcgccgctatgttcccgatttaaacgctcgcgtgaaaagcgtccgtgaagccgccgaacgcatggcgttcaacatgcctgtacagggcacggcagctgacctcatgaaacttgcaatggtgcgcctttttccacaattgcgtgaagttggtgcccgcatgctcttgcaggtccacgatgaactcttgttagaagcgccaaaagagcgtgcggaagaggtggcagccctcgcgaaagaggttatggaaggcgtgtggcccttagcggtgcctcttgaagtcgaagttggtattggcgaggattggctggctgccaaaggataatga

SEQ ID NO: 2848 - protein, 841 aa, synthetic construct
  REGION 1..841: note = Variant of DNA polymerase I from Thermus sp. strain 2.9
MHHHHHHGGSGVLPVFEPKGRVLLVDGHHLAYRNFFALKGLTTSRGEPVQGVYGFAKSLLKALKEDGDVVIVVFDAKAPSFRHEAYEAYKAGRAPTPEDFPRQLALMKELVDLLGLERLEVPGFEADDVLATLAKKAEREGYEVQILTADRDLFQLLSPRISVLHPEGHRITPEWLWEKYGLRPEQWVDFRALAGDPSDNIPGVKGIGEKTALKLLKEWGSLENLLKNLDQVKPESVREKILAHLEDLKLSRELSRVRTDLPLEVDFRRRREPDWEGLKAFLERLEFGSLLHEFGLLESPLLAEEAPWPPPEGAFLGYRLSRPEPMWAELLALAASAQGTVYRAEDPHGALRGLFEVRGLLAKDLAVVALREGLDLPPTDDPMLLAYLLDPSNTTPEGVARRYGGEWTEDAAKRALLAERLHANLLGRLQGEERLLWLYEEVEKPLSRVLAHMEATGVKLDVAYLEALSLEVAAEMRRLEEEVFRLAGRSFRLVSRDQLERVLFDELGLPPIGKTEKTGKRSTSRAVLEALREVHPIVDKILQYRELAKLKGTYIDPLPALVHPKTGRLHTRFNQTATATGRLSSSDPNLQNIPVRTPLGQKIRRAFVAEEGWRLVALDYSQIELRVLAHLSGDENLIRVFQEGKDIHTQTASWMFGLSAEAIDPLMRRAAKTINFGVLYGMSAFRLSQELGIPYEEAAAFIQKYFQSYPKVKAWIEKTLEEGRTRGYVETLFGRRRYVPDLNARVKSVREAAERMAFNMPVQGTAADLMKLAMVRLFPQLREVGARMLLQVHDELLLEAPKERAEEVAALAKEVMEGVWPLAVPLEVEVGIGEDWLAAKG

SEQ ID NO: 2849 - DNA, 2529 bp, synthetic construct
  misc_feature 1..2529: note = Variant of DNA polymerase I from Thermus sp. strain 2.9
  source 1..2529: mol_type = other DNA
atgcaccatcatcatcatcatggcggtagcggcgtgttaccggtgttcgagcctaaaggtcgcgtgcttctggttgatggccatcatctcgcgtatcgtaacttctttgccctgaaaggattaaccaccagccgtggcgagccggtacagggtgtctacggctttgcaaagtcgctcctgaaagctctgaaagaagacggtgatgtggtgattgttgtctttgatgcgaaagcgccaagttttcgccacgaagcgtacgaagcttacaaagccgggcgtgctccaacgccggaagactttcctcgccaattggcgcttatgaaggaattagtggatttgcttggcctcgaacgcttggaagttcccggtttcgaggcagacgacgtattagcgactctcgcaaagaaagccgaacgtgagggctatgaagtccagatcttgacagcagatcgcgatcttttccagcttttatctccgcgcatctcggtgttacacccggaagggcatcgtatcaccccggaatggctctgggagaaatatggtttgcgtcccgaacaatgggtggattttcgcgccttagcaggcgatccgagcgacaatattccgggagttaaaggtatcggcgagaagacggcgctcaagctccttaaagaatgggggtcgttggagaacttgcttaagaatttagatcaggtcaaaccagagtcagtgcgtgagaagattcttgcacacctcgaagacctcaaattaagccgcgaattgtcccgtgtacgcaccgatttgccgctcgaagttgatttccgtcgccgccgcgaacctgactgggagggtcttaaagcgtttttagagcgtcttgaatttggttcgctcttgcatgaattcggccttttagaaagcccgttaccagccgaagaagcaccttggccaccgccccagggcgcgtttttaggttaccgtttgagtcgcccggaaccgatgtgggccgaattattggctcttgcagcgtctgcccagggacgtgtgtatcgcgcggaagaccctcatggtgcgctccgcggcctcttcgaagtccgtggactccttgccaaagacttagctgttgttgcattgcgcgaaggtcttgatttacctccgactgatgatccaatgcttcttgcgtacctcttggacccgtcaaacacgacgcccgaaggcgtagcccgtcgttacggcggcgagtggaccgaagatgcagcgaaacgcgcgttattggccgaacgtttgcacgccaatttattaggacgtttgcaaggcgaggaacgtctcctctggctttacgaagaagtggagaaaccattgagtcgcgtgctcgcgcatatggaagctaccggtgtcaaattagacgtggcgtatttggaggctctcagccttgaagttgctgccgaaatgcgccgcttggaggaagaagtattccgtttagcaggccattcctttcgccttgtatctcgcgatcagttagaacgtgtgttgttcgatgaacttggtctccctcctatcggcaagacagagaagaccggtaaacgtagcacttcacgtgcggttttagaagctcttcgcgaagtccatcccattgtggacaagatcttggtgtaccgcgaactcgcgaaattgaaaggcacctatattgaccctcttccggcattagtccacccgaaaacgggacgcctccatacccgcttcaaccaaacagccacggcgaccggtcgtttgtcctcctctgatccaaaccttcagaatattccagtacgtaccccattgggccagaagatccgccgcgcgtttgtagctgaggagggttggcgtttagtggccctcgattatagccaaattgaattacgtgtccttgcccatctttctggcgatgagaacctcatccgcgtgtttcaggaaggcaaagacattcacactcaaacggcaagctggatgtttggattaggcgctgaagcgatcgatcctttgatgcgtcgtgcagcgaagaccatcaatttcggtgttctctacggtatgagtgcctttcgtttgtcgcaggaattaggcattccctatgaagaagctgcggcgttcattcagaaatactttcaaagctatcccaaagttaaagcatggatcgagaagactctcgaagaaggccgcacacgtggttacgtagagaccttatttggacgtcgccgctatgttcccgatttaaacgctcgcgtgaaaggcgtccgtgaagccgccgaacgcatggcgttcaacatgcctgtacagggcacggcagctgacctcatgaaacttgcaatggtgcgcctttttccacaattgcgtgaagttggtgcccgcatgctcttgcaggtccacgatgaactcttgttagaagcgccaaaagagcgtgcggaagaggtggcagccctcgcgaaaaccgttatggaaggcgtgtggcccttagcggtgcctcttgaagtcgaagttggtattggcgaggattggctggctgccaaaggataatga

SEQ ID NO: 2850 - protein, 841 aa, synthetic construct
  REGION 1..841: note = Variant of DNA polymerase I from Thermus sp. strain 2.9
MHHHHHHGGSGVLPVFEPKGRVLLVDGHHLAYRNFFALKGLTTSRGEPVQGVYGFAKSLLKALKEDGDVVIVVFDAKAPSFRHEAYEAYKAGRAPTPEDFPRQLALMKELVDLLGLERLEVPGFEADDVLATLAKKAEREGYEVQILTADRDLFQLLSPRISVLHPEGHRITPEWLWEKYGLRPEQWVDFRALAGDPSDNIPGVKGIGEKTALKLLKEWGSLENLLKNLDQVKPESVREKILAHLEDLKLSRELSRVRTDLPLEVDFRRRREPDWEGLKAFLERLEFGSLLHEFGLLESPLPAEEAPWPPPQGAFLGYRLSRPEPMWAELLALAASAQGRVYRAEDPHGALRGLFEVRGLLAKDLAVVALREGLDLPPTDDPMLLAYLLDPSNTTPEGVARRYGGEWTEDAAKRALLAERLHANLLGRLQGEERLLWLYEEVEKPLSRVLAHMEATGVKLDVAYLEALSLEVAAEMRRLEEEVFRLAGHSFRLVSRDQLERVLFDELGLPPIGKTEKTGKRSTSRAVLEALREVHPIVDKILVYRELAKLKGTYIDPLPALVHPKTGRLHTRFNQTATATGRLSSSDPNLQNIPVRTPLGQKIRRAFVAEEGWRLVALDYSQIELRVLAHLSGDENLIRVFQEGKDIHTQTASWMFGLGAEAIDPLMRRAAKTINFGVLYGMSAFRLSQELGIPYEEAAAFIQKYFQSYPKVKAWIEKTLEEGRTRGYVETLFGRRRYVPDLNARVKGVREAAERMAFNMPVQGTAADLMKLAMVRLFPQLREVGARMLLQVHDELLLEAPKERAEEVAALAKTVMEGVWPLAVPLEVEVGIGEDWLAAKG

SEQ ID NO: 2851 - DNA, 2529 bp, synthetic construct
  misc_feature 1..2529: note = Variant of DNA polymerase I from Thermus sp. strain 2.9
  source 1..2529: mol_type = other DNA
atgcaccatcatcatcatcatggcggtagcggcgtgttaccggtgttcgagcctaaaggtcgcgtgcttctggttgatggccatcatctcgcgtatcgtaacttctttgccctgaaaggattaaccaccagccgcggcgagccggtacagggtgtctacggctttgcaaagtcgctcctgaaagctctgaaagaagacggtgatgtggtgattgttgtctttgatgcgaaagcgccaagttttcgccacgaagcgtacgaagcttacaaagccgggcgtgctccaacgccggaagactttcctcgccaattggcgcttatgaaggaattagtggatttgcttggcctcgaacgcttggaagttcccggtttcgaggcagacgacgtattagcgactctcgcaaagaaagccgaacgtgagggctatgaagtccagatcttgacagcagatcgcgatcttttccagcttttatctccgcgcatctcggtgttacacccggaagggcatcgtatcaccccggaatggctctgggagaaatatggtttgcgtcccgaacaatgggtggattttcgcgccttagcaggcgatccgagcgacaatattccgggagttaaaggtatcggcgagaagacggcgctcaagctccttaaagaatgggggtcgttggagaacttgcttaagaatttagatcaggtcaaaccagagtcagtgcgtgagaagattcttgcacacctcgaagacctcaaattaagccgcgaattgtcccgtgtacgcaccgatttgccgctcgaagttgatttccgtcgccgccgcgaacctgactgggagggtcttaaagcgtttttagagcgtcttgaatttggttcgctcttgcatgaattcggccttttagaaagcccgttaccagccgaagaagcaccttggccaccgccccagggcgcgtttttaggttaccgtttgagtcgcccggaaccgatgtgggccgaattactggctcttgcagcgtctgcccagggacgcgtgtatcgcgcggaagaccctcatggtgcgctccgcggcctcttcgaagtccgtggactccttgccaaagacttagctgttgttgcattgcgcgaaggtcttgatttacctccgactgatgatccaatgcttcttgcgtacctcttggacccgtcaaacacgacgcccgaaggcgtagcccgtcgttacggcggcgagtggaccgaagatgcagcgaaacgcgcgttattggccgaacgtttgcacgagaatttattaggacgtttgcaaaccgaggaacgtctcctctggctttacgaagaagtggagaaaccattgagtcgcgtgctcgggcatatggaagctaccggtgtcaaattagacgtggcgtatttggaggctctcagccttgaagttgctgccgaaatgcgccgcttggaggaagaagtattccgtttagcaggccgctcctttcgccttaattctcgcgatcagttagaacgtgtgttgttcgatgaacttggtctccctcctatcggcaagacagagaagaccggtaaacgtagcacttcagcggcggttttagaagctcttcgcgaagtccatcccattgtggacaagatcttgcaataccgcgaactcgcgaaattgaaaggcacctatattgaccctcttccggcattagtccacccgaaaacgggacgcctccatacccgcttcaaccaaacagccacggcgaccggtcgtttgtcctcctctgatccaaaccttcagaatattccagtacgtaccccattgggccagaagatccgccgcgcgtttgtagctgaggagggttggcgtttagtggccctcgattatagccaaattgaattacgtgtccttgcccatctttctggcgatgagaacctcatccgcgtgtttcaggaaggcaaagacattcacactcaaacggcaagctggatgtttggattatcagctgaagcgatcgatcctttgatgcgtcgtgcagcgaagaccatcaatttcggtgttctctacggtatgagtgcctttcgtttgtcgcaggaattaggcattccctatgaagaagctgcggcgttcattcagaaatactttcaaagctatcccaaagttaaagcatggatcgagaagactctcgaagaaggccgcacacgtggttacgtagagaccttatttggacgtcgccgctatgttcccgatttaaacgctcgcgtgaaatctgtccgtgaagccgccgaacgcatggcgttcaacatgcctgtacagggcacggcagctgacctcatgaaacttgcaatggtgcgcctttttccacaattgcgtgaagttggtgcccgcatgctcttgcaggtccacgatgaactcttgttagaagcgccaaaagagcgtgcggaagaggtggcagccctcgcgaaagaggttatggaaggcgtgtggcccttagcggtgcctcttgaagtcgaagttggtattggcgaggattggctggctgccaaaggataatga

SEQ ID NO: 2852 - protein, 841 aa, synthetic construct
  REGION 1..841: note = Variant of DNA polymerase I from Thermus sp. strain 2.9
MHHHHHHGGSGVLPVFEPKGRVLLVDGHHLAYRNFFALKGLTTSRGEPVQGVYGFAKSLLKALKEDGDVVIVVFDAKAPSFRHEAYEAYKAGRAPTPEDFPRQLALMKELVDLLGLERLEVPGFEADDVLATLAKKAEREGYEVQILTADRDLFQLLSPRISVLHPEGHRITPEWLWEKYGLRPEQWVDFRALAGDPSDNIPGVKGIGEKTALKLLKEWGSLENLLKNLDQVKPESVREKILAHLEDLKLSRELSRVRTDLPLEVDFRRRREPDWEGLKAFLERLEFGSLLHEFGLLESPLPAEEAPWPPPQGAFLGYRLSRPEPMWAELLALAASAQGRVYRAEDPHGALRGLFEVRGLLAKDLAVVALREGLDLPPTDDPMLLAYLLDPSNTTPEGVARRYGGEWTEDAAKRALLAERLHENLLGRLQTEERLLWLYEEVEKPLSRVLGHMEATGVKLDVAYLEALSLEVAAEMRRLEEEVFRLAGRSFRLNSRDQLERVLFDELGLPPIGKTEKTGKRSTSAAVLEALREVHPIVDKILQYRELAKLKGTYIDPLPALVHPKTGRLHTRFNQTATATGRLSSSDPNLQNIPVRTPLGQKIRRAFVAEEGWRLVALDYSQIELRVLAHLSGDENLIRVFQEGKDIHTQTASWMFGLSAEAIDPLMRRAAKTINFGVLYGMSAFRLSQELGIPYEEAAAFIQKYFQSYPKVKAWIEKTLEEGRTRGYVETLFGRRRYVPDLNARVKSVREAAERMAFNMPVQGTAADLMKLAMVRLFPQLREVGARMLLQVHDELLLEAPKERAEEVAALAKEVMEGVWPLAVPLEVEVGIGEDWLAAKG

SEQ ID NO: 2853 - DNA, 2529 bp, synthetic construct
  misc_feature 1..2529: note = Variant of DNA polymerase I from Thermus sp. strain 2.9
  source 1..2529: mol_type = other DNA
atgcaccatcatcatcatcatggcggtagcggcgtgttaccggtgttcgagcctaaaggtcgcgtgcttctggttgatggccatcatctcgcgtatcgtaacttctttgccctgaaaggattaaccaccagccgtggcgagccggtacagggtgtctacggctttgcaaagtcgctcctgaaagctctgaaagaagacggtgatgtggtgattgttgtctttgatgcgaaagcgccaagttttcgccacgaagcgtacgaagcttacaaagccgggcgtgctccaacgccggaagactttcctcgccaattggcgcttatgaaggaattagtggatttgcttggcctcgaacgcttggaagttcccggtttcgaggcagacgacgtattagcgactctcgcaaagaaagccgaacgtgagggctatgaagtccagatcttgacagcagatcgcgatcttttccagcttttatctccgcgcatctcggtgttacacccggaagggcatcgtatcaccccggaatggctctgggagaaatatggtttgcgtcccgaacaatgggtggattttcgcgccttagcaggcgatccgagcgacaatattccgggagttaaaggtatcggcgagaagacggcgctcaagctccttaaagaatgggggtcgttggagaacttgcttaagaatttagatcaggtcaaaccagagtcagtgcgtgagaagattcttgctcacctcgaagacctcaaattaagccgcgaattgtcccgtgtacgcaccgatttgccgctcgaagttgatttccgtcgccgccgcgaacctgactgggagggtcttaaagcgtttttagagcgtcttgaatttggttcgctcttgcatgaattcggccttttagaaagcccgttaccagccgaagaagcaccttggccaccgcccgaaggcgcgtttttaggttaccgtttgagtcgcccggaaccgatgtgggccgaattattggctcttgcagcgtctgcccagggacgtgtgtatcgcgcggaagaccctcatggtgcgctccgcggcctcttcgaagtccgtggactccttgccaaagacttagctgttgttgcattgcgcgaaggtcttgatttacctccgactgatgatccaatgcttcttgcgtacctcttggacccgtcaaacacgacgcccgaaggcgtagcccgtcgttacggcggcgagtggaccgaagatgcagcgaaacgcgcgttattggccgaacgtttgcacgagaatttattaggacgtttgcaaggcgaggaacgtctcctctggctttacgaagaagtggagaaaccattgagtcgcgtgctcgcgcatatggaagctaccggtgtcaaattagacgtgtggtatttggaggctctcagccttgaagttgctgccgaaatgcgccgcttggaggaagaagtattccgtttagcaggccattcctttcgccttaattctcgcgatcagttagaacgtgtgttgttcgatgaacttggtctccctcctatcggcaagacagagaagaccggtaaacgtagcacttcagcggcggttttagaagctcttcgcgaagtccatcccattgtggacaagatcttgcagtaccgcgaactcgcgaaattgaaaggcacctatattgaccctcttccggcattagtccacccgaaaacgggacgcctccatacccgcttcaaccaaacagccacggcgaccggtcgtttgtcctcctctgatccaaaccttcagaatattccagtacgtaccccattgggccagaagatccgcaaggcgtttgtagctgaggagggttggcgtttagtggccctcgattatagccaaattgaattacgtgtccttgcccatctttctggcgatgagaacctcatccgcgtgtttcaggaaggcaaagacattcacactcaaacggcaagctggatgtttggattatcagctgaagcgatcgatcctttgatgcgtcgtgcagcgaagaccatcaatttcggtgttctctacggtatgagtgcctttcgtttgtcgcaggaattaggcattccctatgaagaagctgcggcgttcattcagaaatactttcaaagctatcccaaagttaaagcatggatcgagaagactctcgaagaaggccgcacacgtggttacgtagagaccttatttggacgtcgccgctatgttcccgatttaaacgctcgcgtgaaatctgtccgtgaagccgccgaacgcatggcgttcaacatgcctgtacagggcacggcagctgacctcatgaaacttgcaatggtgcgcctttttccacaattgcgtgaagttggtgcccgcatgctcttgcaggtccacgatgaactcttgttagaagcgccaaaagagcgtgcggaagaggtggcagccctcgcgaaagaggttatggaaggcgtgtggcccttagcggtgcctcttgaagtcgaagttggtattggcgaggattggctggctgccaaaggataatga

SEQ ID NO: 2854 - protein, 841 aa, synthetic construct
  REGION 1..841: note = Variant of DNA polymerase I from Thermus sp. strain 2.9
MHHHHHHGGSGVLPVFEPKGRVLLVDGHHLAYRNFFALKGLTTSRGEPVQGVYGFAKSLLKALKEDGDVVIVVFDAKAPSFRHEAYEAYKAGRAPTPEDFPRQLALMKELVDLLGLERLEVPGFEADDVLATLAKKAEREGYEVQILTADRDLFQLLSPRISVLHPEGHRITPEWLWEKYGLRPEQWVDFRALAGDPSDNIPGVKGIGEKTALKLLKEWGSLENLLKNLDQVKPESVREKILAHLEDLKLSRELSRVRTDLPLEVDFRRRREPDWEGLKAFLERLEFGSLLHEFGLLESPLPAEEAPWPPPEGAFLGYRLSRPEPMWAELLALAASAQGRVYRAEDPHGALRGLFEVRGLLAKDLAVVALREGLDLPPTDDPMLLAYLLDPSNTTPEGVARRYGGEWTEDAAKRALLAERLHENLLGRLQGEERLLWLYEEVEKPLSRVLAHMEATGVKLDVWYLEALSLEVAAEMRRLEEEVFRLAGHSFRLNSRDQLERVLFDELGLPPIGKTEKTGKRSTSAAVLEALREVHPIVDKILQYRELAKLKGTYIDPLPALVHPKTGRLHTRFNQTATATGRLSSSDPNLQNIPVRTPLGQKIRKAFVAEEGWRLVALDYSQIELRVLAHLSGDENLIRVFQEGKDIHTQTASWMFGLSAEAIDPLMRRAAKTINFGVLYGMSAFRLSQELGIPYEEAAAFIQKYFQSYPKVKAWIEKTLEEGRTRGYVETLFGRRRYVPDLNARVKSVREAAERMAFNMPVQGTAADLMKLAMVRLFPQLREVGARMLLQVHDELLLEAPKERAEEVAALAKEVMEGVWPLAVPLEVEVGIGEDWLAAKG

SEQ ID NO: 2855 - DNA, 2529 bp, synthetic construct
  misc_feature 1..2529: note = Variant of DNA polymerase I from Thermus sp. strain 2.9
  source 1..2529: mol_type = other DNA
atgcaccatcatcatcatcatggcggtagcggcgtgttaccggtgttcgagcctaaaggtcgcgtgcttctggttgatggccatcatctcgcgtatcgtaacttctttgccctgaaaggattaaccaccagcagcggcgagccggtacagggtgtctacggctttgcaaagtcgctcctgaaagctctgaaagaagacggtgatgtggtgattgttgtctttgatgcgaaagcgccaagttttcgccacgaagcgtacgaagcttacaaagccgggcgtgctccaacgccggaagactttcctcgccaattggcgcttatgaaggaattagtggatttgcttggcctcgaacgcttggaagttcccggtttcgaggcagacgacgtattagcgactctcgcaaagaaagccgaacgtgagggctatgaagtccagatcttgacagcagatcgcgatcttttccagcttttatctccgcgcatctcggtgttacacccggaagggcatcgtatcaccccggaatggctctgggagaaatatggtttgcgtcccgaacaatgggtggattttcgcgccttagcaggcgatccgagcgacaatattccgggagttaaaggtatcggcgagaagacggcgctcaagctccttaaagaatgggggtcgttggagaacttgcttaagaatttagatcaggtcaaaccagagtcagtgcgtgagaagattcttaatcacctcgaagacctcaaattaagccgcgaattgtcccgtgtacgcaccgatttgccgctcgaagttgatttccgtcgccgccgcgaacctgactgggagggtcttaaagcgtttttagagcgtcttgaatttggttcgctcttgcatgaattcggccttttagaaagcccgttaccagccgaagaagcaccttggccaccgccccagggcgcgtttttaggttaccgtttgagtcgcccggaaccgatgtgggccgaattattggctcttgcagcgtctgcccagggacgtgtgtatcgcgcggaagaccctcatggtgcgctccgcggcctcttcgaagtccgtggactccttgccaaagacttagctgttgttgcattgcgcgaaggtcttgatttacctccgactgatgatccaatgcttcttgcgtacctcttggacccgtcaaacacgacgcccgaaggcgtagcccgtcgttacggcggcgagtggaccgaagatgcagcgaaacgcgcgttattggccgaacgtttgcacgcgaatttattaggacgtttgcaaggcgaggaacgtctcctctggctttacgaagaagtggagaaaccattgagtcgcgtgctcgcgcatatggaagctaccggtgtcaaattagacgtggcgtatttggaggctctcagccttgaagttgctgccgaaatgcgccgcttggaggaagaagtattccgtttagcaggccattcctttcgccttaattctcgcgatcagttagaacgtgtgttgttcgatgaacttggtctccctcctatcggcaagacagagaagaccggtaaacgtagcacttcagcggcggttttagaagctcttcgcgaagtccatcccattgtggacaagatcttgcagtaccgcgaactcgcgaaattgaaaggcacctatattgaccctcttccggcattagtccacccgaaaacgggacgcctccatacccgcttcaaccaaacagccacggcgaccggtcgtttgtcctcctctgatccaaaccttcagaatattccagtacgtaccccattgggccagaagatccgcaaggcgtttgtagctgaggagggttggcgtttagtggccctcgattatagccaaattgaattacgtgtccttgcccatctttctggcgatgagaacctcatccgcgtgtttcaggaaggcaaagacattcacactcaaacggcaagctggatgtttggattaagtgctgaagcgatcgatcctttgatgcgtcgtgcagcgaagaccatcaatttcggtgttctctacggtatgagtgcctttcgtttgtcgcaggaattaggcattccctatgaagaagctgcggcgttcattcagaaatactttcaaagctatcccaaagttaaagcatggatcgagaagactctcgaagaaggccgcacacgtggttacgtagagaccttatttggacgtcgccgctatgttcccgatttaaacgctcgcgtgaaaagcgtgcgtgaagccgccgaacgcatggcgttcaacatgcctgtacagggcacggcagctgacctcatgaaacttgcaatggtgcgcctttttccacaattgcgtgaagttggtgcccgcatgctcttgcaggtccacgatgaactcttgttagaagcgccaaaagagcgtgcggaagaggtggcagccctcgcgaaagaggttatggaaggcgtgtggcccttagcggtgcctcttgaagtcgaagttggtattggcgaggattggctggctgccaaaggataatga

SEQ ID NO: 2856 - protein, 841 aa, synthetic construct
  REGION 1..841: note = Variant of DNA polymerase I from Thermus sp. strain 2.9
MHHHHHHGGSGVLPVFEPKGRVLLVDGHHLAYRNFFALKGLTTSSGEPVQGVYGFAKSLLKALKEDGDVVIVVFDAKAPSFRHEAYEAYKAGRAPTPEDFPRQLALMKELVDLLGLERLEVPGFEADDVLATLAKKAEREGYEVQILTADRDLFQLLSPRISVLHPEGHRITPEWLWEKYGLRPEQWVDFRALAGDPSDNIPGVKGIGEKTALKLLKEWGSLENLLKNLDQVKPESVREKILNHLEDLKLSRELSRVRTDLPLEVDFRRRREPDWEGLKAFLERLEFGSLLHEFGLLESPLPAEEAPWPPPQGAFLGYRLSRPEPMWAELLALAASAQGRVYRAEDPHGALRGLFEVRGLLAKDLAVVALREGLDLPPTDDPMLLAYLLDPSNTTPEGVARRYGGEWTEDAAKRALLAERLHANLLGRLQGEERLLWLYEEVEKPLSRVLAHMEATGVKLDVAYLEALSLEVAAEMRRLEEEVFRLAGHSFRLNSRDQLERVLFDELGLPPIGKTEKTGKRSTSAAVLEALREVHPIVDKILQYRELAKLKGTYIDPLPALVHPKTGRLHTRFNQTATATGRLSSSDPNLQNIPVRTPLGQKIRKAFVAEEGWRLVALDYSQIELRVLAHLSGDENLIRVFQEGKDIHTQTASWMFGLSAEAIDPLMRRAAKTINFGVLYGMSAFRLSQELGIPYEEAAAFIQKYFQSYPKVKAWIEKTLEEGRTRGYVETLFGRRRYVPDLNARVKSVREAAERMAFNMPVQGTAADLMKLAMVRLFPQLREVGARMLLQVHDELLLEAPKERAEEVAALAKEVMEGVWPLAVPLEVEVGIGEDWLAAKG

SEQ ID NO: 2857 - DNA, 2529 bp, synthetic construct; identical to SEQ ID NO: 2337
  misc_feature 1..2529: note = Variant of DNA polymerase I from Thermus sp. strain 2.9
  source 1..2529: mol_type = other DNA

SEQ ID NO: 2858 - protein, 841 aa, synthetic construct; identical to SEQ ID NO: 2338
  REGION 1..841: note = Variant of DNA polymerase I from Thermus sp. strain 2.9

SEQ ID NO: 2859 - DNA, 2529 bp, synthetic construct
  misc_feature 1..2529: note = Variant of DNA polymerase I from Thermus sp. strain 2.9
  source 1..2529: mol_type = other DNA
atgcaccatcatcatcatcatggcggtagcggcgtgttaccggtgttcgagcctaaaggtcgcgtgcttctggttgatggccatcatctcgcgtatcgtaacttctttgccctgaaaggattaaccaccagcagcggcgagccggtacagggtgtctacggctttgcaaagtcgctcctgaaagctctgaaagaagacggtgatgtggtgattgttgtctttgatgcgaaagcgccaagttttcgccacgaagcgtacgaagcttacaaagccgggcgtgctccaacgccggaagactttcctcgccaattggcgcttatgaaggaattagtggatttgcttggcctcgaacgcttggaagttcccggtttcgaggcagacgacgtattagcgactctcgcaaagaaagccgaacgtgagggctatgaagtccagatcttgacagcagatcgcgatcttttccagcttttatctccgcgcatctcggtgttacacccggaagggcatcgtatcaccccggaatggctctgggagaaatatggtttgcgtcccgaacaatgggtggattttcgcgccttagcaggcgatccgagcgacaatattccgggagttaaaggtatcggcgagaagacggcgctcaagctccttaaagaatgggggtcgttggagaacttgcttaagaatttagatcaggtcaaaccagagtcagtgcgtgagaagattcttgcacacctcgaagacctcaaattaagccgcgaattgtcccgtgtacgcaccgatttgccgctcgaagttgatttccgtcgccgccgcgaacctgactgggagggtcttaaagcgtttttagagcgtcttgaatttggttcgctcttgcatgaattcggccttttagaaagcccgttaccagccgaagaagcaccttggccaccgcccgaaggcgcgtttttaggttaccgtttgagtcgcccggaaccgatgtgggccgaattactggctcttgcagcgtctgcccagggaacggtgtatcgcgcggaagaccctcatggtgcgctccgcggcctcttcgaagtccgtggactccttgccaaagacttagctgttgttgcattgcgcgaaggtcttgatttacctccgactgatgatccaatgcttcttgcgtacctcttggacccgtcaaacacgacgcccgaaggcgtagcccgtcgttacggcggcgagtggaccgaagatgcagcgaaacgcgcgttattggccgaacgtttgcacgccaatttattaggacgtttgcaaggcgaggaacgtctcctctggctttacgaagaagtggagaaaccattgagtcgcgtgctcgcgcatatggaagctaccggtgtcaaattagacgtggcgtatttggaggctctcagccttgaagttgctgcccacatgcgccgcttggaggaagaagtattccgtttagcaggccattcctttcgccttaattctcgcgatcagttagaacgtgtgttgttcgatgaacttggtctccctcctatcggcaagacagagaagaccggtaaacgtagcacttcagcggcggttttagaagctcttcgcgaagtccatcccattgtggacaagatcttgcagtaccgcgaactcgcgaaattgaaaggcacctatattgaccgtcttccggcattagtccacccgaaaacgggacgcctccatacccgcttcaaccaaacagccacggcgaccggtcgtttgtcctcctctgatccaaaccttcagaatattccagtacgtaccccattgggccagaagatccgccgcgcgtttgtagctgaggagggttggcgtttagtggccctcgattatagccaaattgaattacgtgtccttgcccatctttctggcgatgagaacctcatccgcgtgtttcaggaaggcaaagacattcacactcaaacggcaagctggatgtttggattaagtgctgaagcgatcgatcctttgatgcgtcgtgcagcgaagaccatcaatttcggtgttctctacggtatgagtgcctttcgtttgtcgcaggaattaggcattccctatgaagaagctgcggcgttcattcagaaatactttcaaagctatcccaaagttaaagcatggatcgagaagactctcgaagaaggccgcacacgtggttacgtagagaccttatttggacgtcgccgctatgttcccgatttaaacgctcgcgtgaaatctgtccgtgaagccgccgaacgcatggcgttcaacatgcctgtacagggcacggcagctgacctcatgaaacttgcaatggtgcgcctttttccacaattgcgtgaagttggtgcccgcatgctcttgcaggtccacgatgaactcttgttagaagcgccaaaagagcgtgcggaagaggtggcagccctcgcgaaaacggttatggaaggcgtgtggcccttagcggtgcctcttgaagtcgaagttggtattggcgaggattggctggctgccaaaggataatga

SEQ ID NO: 2860 - protein, 841 aa, synthetic construct
  REGION 1..841: note = Variant of DNA polymerase I from Thermus sp. strain 2.9
MHHHHHHGGSGVLPVFEPKGRVLLVDGHHLAYRNFFALKGLTTSSGEPVQGVYGFAKSLLKALKEDGDVVIVVFDAKAPSFRHEAYEAYKAGRAPTPEDFPRQLALMKELVDLLGLERLEVPGFEADDVLATLAKKAEREGYEVQILTADRDLFQLLSPRISVLHPEGHRITPEWLWEKYGLRPEQWVDFRALAGDPSDNIPGVKGIGEKTALKLLKEWGSLENLLKNLDQVKPESVREKILAHLEDLKLSRELSRVRTDLPLEVDFRRRREPDWEGLKAFLERLEFGSLLHEFGLLESPLPAEEAPWPPPEGAFLGYRLSRPEPMWAELLALAASAQGTVYRAEDPHGALRGLFEVRGLLAKDLAVVALREGLDLPPTDDPMLLAYLLDPSNTTPEGVARRYGGEWTEDAAKRALLAERLHANLLGRLQGEERLLWLYEEVEKPLSRVLAHMEATGVKLDVAYLEALSLEVAAHMRRLEEEVFRLAGHSFRLNSRDQLERVLFDELGLPPIGKTEKTGKRSTSAAVLEALREVHPIVDKILQYRELAKLKGTYIDRLPALVHPKTGRLHTRFNQTATATGRLSSSDPNLQNIPVRTPLGQKIRRAFVAEEGWRLVALDYSQIELRVLAHLSGDENLIRVFQEGKDIHTQTASWMFGLSAEAIDPLMRRAAKTINFGVLYGMSAFRLSQELGIPYEEAAAFIQKYFQSYPKVKAWIEKTLEEGRTRGYVETLFGRRRYVPDLNARVKSVREAAERMAFNMPVQGTAADLMKLAMVRLFPQLREVGARMLLQVHDELLLEAPKERAEEVAALAKTVMEGVWPLAVPLEVEVGIGEDWLAAKG

SEQ ID NO: 2861 - DNA, 2529 bp, synthetic construct
  misc_feature 1..2529: note = Variant of DNA polymerase I from Thermus sp. strain 2.9
  source 1..2529: mol_type = other DNA
atgcaccatcatcatcatcatggcggtagcggcgtgttaccggtgttcgagcctaaaggtcgcgtgcttctggttgatggccatcatctcgcgtatcgtaacttctttgccctgaaaggattaaccaccagccgtggcgagccggtacagggtgtctacggctttgcaaagtcgctcctgaaagctctgaaagaagacggtgatgtggtgattgttgtctttgatgcgaaagcgccaagttttcgccacgaagcgtacgaagcttacaaagccgggcgtgctccaacgccggaagactttcctcgccaattggcgcttatgaaggaattagtggatttgcttggcctcgaacgcttggaagttcccggtttcgaggcagacgacgtattagcgactctcgcaaagaaagccgaacgtgagggctatgaagtccagatcttgacagcagatcgcgatcttttccagcttttatctccgcgcatctcggtgttacacccggaagggcatcgtatcaccccggaatggctctgggagaaatatggtttgcgtcccgaacaatgggtggattttcgcgccttagcaggcgatccgagcgacaatattccgggagttaaaggtatcggcgagaagacggcgctcaagctccttaaagaatgggggtcgttggagaacttgcttaagaatttagatcaggtcaaaccagagtcagtgcgtgagaagattcttgcacacctcgaagacctcaaattaagccgcgaattgtcccgtgtacgcaccgatttgccgctcgaagttgatttccgtcgccgccgcgaacctgactgggagggtcttaaagcgtttttagagcgtcttgaatttggttcgctcttgcatgaattcggccttttagaaagcccgttaccagccgaagaagcaccttggccaccgcccgaaggcgcgtttttaggttaccgtttgagtcgcccggaaccgatgtgggccgaattattggctcttgcagcgtctgcccagggacgtgtgtatcgcgcggaagaccctcatggtgcgctccgcggcctcttcgaagtccgtggactccttgccaaagacttagctgttgttgcattgcgcgaaggtcttgatttacctccgactgatgatccaatgcttcttgcgtacctcttggacccgtcaaacacgacgcccgaaggcgtagcccgtcgttacggcggcgagtggaccgaagatgcagcgaaacgcgcgttattggccgaacgtttgcacgccaatttattaggacgtttgcaaggcgaggaacgtctcctctggctttacgaagaagtggagaaaccattgagtcgcgtgctcgcgcatatggaagctaccggtgtcaaattagacgtggcgtatttggaggctctcagccttgaagttgctgccgaaatgcgccgcttggaggaagaagtattccgtttagcaggccattcctttcgccttaattctcgcgatcagttagaacgtgtgttgttcgatgaacttggtctccctcctatcggcaagacagagaagaccggtaaacgtagcacttcagcggcggttttagaagctcttcgcgaagtccatcccattatggacaagatcttgcagtaccgcgaactcgcgaaattgaaaggcacctatattgaccctcttccggcattagtccacccgaaaacgggacgcctccatacccgcttcaaccaaacagccacggcgaccggtcgtttgtcctcctctgatccaaaccttcagaatattccagtacgtaccccattgggccagaagatccgccgcgcgtttgtagctgaggagggttggcgtttagtggccctcgattatagccaaattgaattacgtgtccttgcccatctttctggcgatgagaacctcatccgcgtgtttcaggaaggcaaagacattcacactcaaacggcaagctggatgtttggattatcagctgaagcgatcgatcctttgatgcgtcgtgcagcgaagaccatcaatttcggtgttctctacggtatgagtgcctttcgtttgtcgcaggaattaggcattccctatgaagaagctgcggcgttcattcagaaatactttcaaagctatcccaaagttaaagcatggatcgagaagactctcgaagaaggccgcacacgtggttacgtagagaccttatttggacgtcgccgctatgttcccgatttaaacgctcgcgtgaaatctgtccgtgaagccgccgaacgcatggcgttcaacatgcctgtacagggcacggcagctgacctcatgaaacttgcaatggtgcgcctttttccacaattgcgtgaagttggtgcccgcatgctcttgcaggtccacgatgaactcttgttagaagcgccaaaagagcgtgcggaagaggtggcagccctcgcgaaagaggttatggaaggcgtgtggcccttagcggtgcctcttgaagtcgaagttggtattggcgaggattggctggctgccaaaggataatga

SEQ ID NO: 2862 - protein, 841 aa, synthetic construct; identical to SEQ ID NO: 2296
  REGION 1..841: note = Variant of DNA polymerase I from Thermus sp. strain 2.9

SEQ ID NO: 2863 - DNA, 2529 bp, synthetic construct
  misc_feature 1..2529: note = Variant of DNA polymerase I from Thermus sp. strain 2.9
  source 1..2529: mol_type = other DNA
atgcaccatcatcatcatcatggcggtagcggcgtgttaccggtgttcgagcctaaaggtcgcgtgcttctggttgatggccatcatctcgcgtatcgtaacttctttgccctgaaaggattaaccaccagccgtggcgagccggtacagggtgtctacggctttgcaaagtcgctcctgaaagctctgaaagaagacggtgatgtggtgattgttgtctttgatgcgaaagcgccaagttttcgccacgaagcgtacgaagcttacaaagccgggcgtgctccaacgccggaagactttcctcgccaattggcgcttatgaaggaattagtggatttgcttggcctcgaacgcttggaagttcccggtttcgaggcagacgacgtattagcgactctcgcaaagaaagccgaacgtgagggctatgaagtccagatcttgacagcagatcgcgatcttttccagcttttatctccgcgcatctcggtgttacacccggaagggcatcgtatcaccccggaatggctctgggagaaatatggtttgcgtcccgaacaatgggtggattttcgcgccttagcaggcgatccgagcgacaatattccgggagttaaaggtatcggcgagaagacggcgctcaagctccttaaagaatgggggtcgttggagaacttgcttaagaatttagatcaggtcaaaccagagtcagtgcgtgagaagattcttgcacacctcgaagacctcaaattaagccgcgaattgtcccgtgtacgcaccgatttgccgctcgaagttgatttccgtcgccgccgcgaacctgactgggagggtcttaaagcgtttttagagcgtcttgaatttggttcgctcttgcatgaattcggccttttagaaagcccgttaccagccgaagaagcaccttggccaccgcccgaaggcgcgtttttaggttaccgtttgagtcgcccggaaccgatgtgggccgaattattggctcttgcagcgtctgcccagggacgtgtgtatcgcgcggaagaccctcatggtgcgctccgcggcctcttcgaagtccgtggactccttgccaaagacttagctgttgttgcattgcgcgaaggtcttgatttacctccgactgatgatccaatgcttcttgcgtacctcttggacccgtcaaacacgacgcccgaaggcgtagcccgtcgttacggcggcgagtggaccgaagatgcagcgaaacgcgcgttattggccgaacgtttgcacgccaatttattaggacgtttgcaaggcgaggaacgtctcctctggctttacgaagaagtggagaaaccattgagtcgcgtgctcgcgcatatggaagctaccggtgtcaaattagacgtggcgtatttggaggctctcagccttgaagttgctgccgaaatgcgccgcttggaggaagaagtattccgtttagcaggccattcctttcgccttaattctcgcgatcagttagaacgtgtgttgttcgatgaacttggtctccctcctatcggcaagacagagaagaccggtaaacgtagcacttcagcggcggttttagaagctcttcgcgaagtccatcccattgtggacaagatcttggtgtaccgcgaactcgcgaaattgaaaggcacctatattgaccctcttccggcattagtccacccgaaaacgggacgcctccatacccgcttcaaccaaacagccacggcgaccggtcgtttgtcctcctctgatccaaaccttcagaatattccagtacgtaccccattgggccagaagatccgccgcgcgtttgtagctgaggagggttggcgtttagtggccctcgattatagccaaattgaattacgtgtccttgcccatctttctggcgatgagaacctcatccgcgtgtttcaggaaggcaaagacattcacactcaaacggcaagctggatgtttggattatcagctgaagcgatcgatcctttgatgcgtcgtgcagcgaagaccatcaatttcggtgttctctacggtatgagtgcctttcgtttgtcgcaggaattaggcattccctatgaagaagctgcggcgttcattcagaaatactttcaaagctatcccaaagttaaagcatggatcgagaagactctcgaagaaggccgcacacgtggttacgtagagaccttatttggacgtcgccgctatgttcccgatttaaacgctcgcgtgaaatctgtccgtgaagccgccgaacgcatggcgttcaacatgcctgtacagggcacggcagctgacctcatgaaacttgcaatggtgcgcctttttccacaattgcgtgaagttggtgcccgcatgctcttgcaggtccacgatgaactcttgttagaagcgccaaaagagcgtgcggaagaggtggcagccctcgcgaaagaggttatggaaggcgtgtggcccttagcggtgcctcttgaagtcgaagttggtattggcgaggattggctggctgccaaaggataatga

SEQ ID NO: 2864 - protein, 841 aa, synthetic construct
  REGION 1..841: note = Variant of DNA polymerase I from Thermus sp. strain 2.9
MHHHHHHGGSGVLPVFEPKGRVLLVDGHHLAYRNFFALKGLTTSRGEPVQGVYGFAKSLLKALKEDGDVVIVVFDAKAPSFRHEAYEAYKAGRAPTPEDFPRQLALMKELVDLLGLERLEVPGFEADDVLATLAKKAEREGYEVQILTADRDLFQLLSPRISVLHPEGHRITPEWLWEKYGLRPEQWVDFRALAGDPSDNIPGVKGIGEKTALKLLKEWGSLENLLKNLDQVKPESVREKILAHLEDLKLSRELSRVRTDLPLEVDFRRRREPDWEGLKAFLERLEFGSLLHEFGLLESPLPAEEAPWPPPEGAFLGYRLSRPEPMWAELLALAASAQGRVYRAEDPHGALRGLFEVRGLLAKDLAVVALREGLDLPPTDDPMLLAYLLDPSNTTPEGVARRYGGEWTEDAAKRALLAERLHANLLGRLQGEERLLWLYEEVEKPLSRVLAHMEATGVKLDVAYLEALSLEVAAEMRRLEEEVFRLAGHSFRLNSRDQLERVLFDELGLPPIGKTEKTGKRSTSAAVLEALREVHPIVDKILVYRELAKLKGTYIDPLPALVHPKTGRLHTRFNQTATATGRLSSSDPNLQNIPVRTPLGQKIRRAFVAEEGWRLVALDYSQIELRVLAHLSGDENLIRVFQEGKDIHTQTASWMFGLSAEAIDPLMRRAAKTINFGVLYGMSAFRLSQELGIPYEEAAAFIQKYFQSYPKVKAWIEKTLEEGRTRGYVETLFGRRRYVPDLNARVKSVREAAERMAFNMPVQGTAADLMKLAMVRLFPQLREVGARMLLQVHDELLLEAPKERAEEVAALAKEVMEGVWPLAVPLEVEVGIGEDWLAAKG

SEQ ID NO: 2865 - DNA, 2529 bp, synthetic construct
  misc_feature 1..2529: note = Variant of DNA polymerase I from Thermus sp. strain 2.9
  source 1..2529: mol_type = other DNA
atgcaccatcatcatcatcatggcggtagcggcgtgttaccggtgttcgagcctaaaggtcgcgtgcttctggttgatggccatcatctcgcgtatcgtaacttctttgccctgaaaggattaaccaccagccgtggcgagccggtacagggtgtctacggctttgcaaagtcgctcctgaaagctctgaaagaagacggtgatgtggtgattgttgtctttgatgcgaaagcgccaagttttcgccacgaagcgtacgaagcttacaaagccgggcgtgctccaacgccggaagactttcctcgccaattggcgcttatgaaggaattagtggatttgcttggcctcgaacgcttggaagttcccggtttcgaggcagacgacgtattagcgactctcgcaaagaaagccgaacgtgagggctatgaagtccagatcttgacagcagatcgcgatcttttccagcttttatctccgcgcatctcggtgttacacccggaagggcatcgtatcaccccggaatggctctgggagaaatatggtttgcgtcccgaacaatgggtggattttcgcgccttagcaggcgatccgagcgacaatattccgggagttaaaggtatcggcgagaagacggcgctcaagctccttaaagaatgggggtcgttggagaacttgcttaagaatttagatcaggtcaaaccagagtcagtgcgtgagaagattcttgcacacctcgaagacctcaaattaagccgcgaattgtcccgtgtacgcaccgatttgccgctcgaagttgatttccgtcgccgccgcgaacctgactgggagggtcttaaagcgtttttagagcgtcttgaatttggttcgctcttgcatgaattcggccttttagaaagcccgttaccagccgaagaagcaccttggccaccgcccgaaggcgcgtttttaggttaccgtttgagtcgcccggaaccgatgtgggccgaattactggctcttgcagcgtctgcccagggacgtgtgtatcgcgcggaagaccctcatggtgcgctccgcggcctcttcgaagtccgtggactccttgccaaagacttagctgttgttgcattgcgcgaaggtcttgatttacctccgactgatgatccaatgcttcttgcgtacctcttggacccgtcaaacacgacgcccgaaggcgtagcccgtcgttacggcggcgagtggaccgaagatgcagcgaaacgcgcgttattggccgaacgtttgcacgccaatttattaggacgtttgcaaggcgaggaacgtctcctctggctttacgaagaagtggagaaaccattgagtcgcgtgctcgcgcatatggaagctaccggtgtcaaattagacgtggcgtatttggaggctctcagccttgaagttgctgccgaaatgcgccgcttggaggaagaagtattccgtttagcaggccgctcctttcgccttaattctcgcgatcagttagaacgtgtgttgttcgatgaacttggtctccctcctatcggcaagacagagaagaccggtaaacgtagcacttcagcggcggttttagaagctcttcgcgaagtccatcccattgtggacaagatcttgcaataccgcgaactcgcgaaattgaaaggcacctatattgaccctcttccggcattagtccacccgaaaacgggacgcctccatacccgcttcaaccaaacagccacggcgaccggtcgtttgtcctcctctgatccaaaccttcagaatattccagtacgtaccccattgggccagaagatccgccgcgcgtttgtagctgaggagggttggcgtttagtggccctcgattatagccaaattgaattacgtgtccttgcccatctttctggcgatgagaacctcatccgcgtgtttcaggaaggcaaagacattcacactcaaacggcaagctggatgtttggactgtcagctgaagcgatcgatcctttgatgcgtcgtgcagcgaagaccatcaatttcggtgttctctacggtatgagtgcctttcgtttgtcgcaggaattaggcattccctatgaagaagctgcggcgttcattcagaaatactttcaaagctatcccaaagttaaagcatggatcgagaagactctcgaagaaggccgcacacgtggttacgtagagaccttatttggacgtcgccgctatgttcccgatttaaacgctcgcgtgaaatctgtccgtgaagccgccgaacgcatggcgttcaacatgcctgtacagggcacggcagctgacctcatgaaacttgcaatggtgcgcctttttccacaattgcgtgaagttggtgcccgcatgctcttgcaggtccacgatgaactcttgttagaagcgccaaaagagcgtgcggaagaggtggcagccctcgcgaaagaggttatggaaggcgtgtggcccttagcggtgcctcttgaagtcgaagttggtattggcgaggattggctggctgccaaaggataatga

SEQ ID NO: 2866 - protein, 841 aa, synthetic construct; identical to SEQ ID NO: 2268
  REGION 1..841: note = Variant of DNA polymerase I from Thermus sp. strain 2.9

SEQ ID NO: 2867 - DNA, 2529 bp, synthetic construct
  misc_feature 1..2529: note = Variant of DNA polymerase I from Thermus sp. strain 2.9
  source 1..2529: mol_type = other DNA
atgcaccatcatcatcatcatggcggtagcggcgtgttaccggtgttcgagcctaaaggtcgcgtgcttctggttgatggccatcatctcgcgtatcgtaacttctttgccctgaaaggattaaccaccagccgtggcgagccggtacagggtgtctacggctttgcaaagtcgctcctgaaagctctgaaagaagacggtgatgtggtgattgttgtctttgatgcgaaagcgccaagttttcgccacgaagcgtacgaagcttacaaagccgggcgtgctccaacgccggaagactttcctcgccaattggcgcttatgaaggaattagtggatttgcttggcctcgaacgcttggaagttcccggtttcgaggcagacgacgtattagcgactctcgcaaagaaagccgaacgtgagggctatgaagtccagatcttgacagcagatcgcgatcttttccagcttttatctccgcgcatctcggtgttacacccggaagggcatcgtatcaccccggaatggctctgggagaaatatggtttgcgtcccgaacaatgggtggattttcgcgccttagcaggcgatccgagcgacaatattccgggagttaaaggtatcggcgagaagacggcgctcaagctccttaaagaatgggggtcgttggagaacttgcttaagaatttagatcaggtcaaaccagagtcagtgcgtgagaagattcttgcacacctcgaagacctcaaattaagccgcgaattgtcccgtgtacgcaccgatttgccgctcgaagttgatttccgtcgccgccgcgaacctgactgggagggtcttaaagcgtttttagagcgtcttgaatttggttcgctcttgcatgaattcggccttttagaaagcccgttaccagccgaagaagcaccttggccaccgcccgaaggcgcgtttttaggttaccgtttgagtcgcccggaaccgatgtgggccgaattattggctcttgcagcgtctgcccagggacgtgtgtatcgcgcggaagaccctcatggtgcgctccgcggcctcttcgaagtccgtggactccttgccaaagacttagctgttgttgcattgcgcgaaggtcttgatttacctccgactgatgatccaatgcttcttgcgtacctcttggacccgtcaaacacgacgcccgaaggcgtagcccgtcgttacggcggcgagtggaccgaagatgcagcgaaacgcgcgttattggccgaacgtttgcacgccaatttattaggacgtttgcaaggcgaggaacgtctcctctggctttacgaagaagtggagaaaccattgagtcgcgtgctcgcgcatatggaagctaccggtgtcaaattagacgtggcgtatttggaggctctcagccttgaagttgctgccgaaatgcgccgcttggaggaagaagtattccgtttagcaggccattcctttcgccttaattctcgcgatcagttagaacgtgtgttgttcgatgaacttggtctccctcctatcggcaagacagagaagaccggtaaacgtagcacttcagcggcggttttagaagctcttcgcgaagtccatcccattgtggacaagatcttgcagtaccgcgaactcgcgaaattgaaaggcacctatattgaccctcttccggcattagtccacccgaaaacgggacgcctccatacccgcttcaaccaaacagccacggcgaccggtcgtttgtcctcctctgatccaaaccttcagaatattccagtacgtaccccattgggccagaagatccgccgcgcgtttgtagctgaggagggttggcgtttagtggccctcgattatcggcaaattgaattacgtgtccttgcccatctttctggcgatgagaacctcatccgcgtgtttcaggaaggcaaagacattcacactcaaacggcaagctggatgtttggattatcagctgaagcgatcgatcctttgatgcgtcgtgcagcgaagaccatcaatttcggtgttctctacggtatgagtgcctttcgtttgtcgcaggaattaggcattccctatgaagaagctgcggcgttcattcagaaatactttcaaagctatcccaaagttaaagcatggatcgagaagactctcgaagaaggccgcacacgtggttacgtagagaccttatttggacgtcgccgctatgttcccgatttaaacgctcgcgtgaaatctgtccgtgaagccgccgaacgcatggcgttcaacatgcctgtacagggcacggcagctgacctcatgaaacttgcaatggtgcgcctttttccacaattgcgtgaagttggtgcccgcatgctcttgcaggtccacgatgaactcttgttagaagcgccaaaagagcgtgcggaagaggtggcagccctcgcgaaagaggttatggaaggcgtgtggcccttagcggtgcctcttgaagtcgaagttggtattggcgaggattggctggctgccaaaggataatga

SEQ ID NO: 2868 - protein, 841 aa, synthetic construct; identical to SEQ ID NO: 2284
  REGION 1..841: note = Variant of DNA polymerase I from Thermus sp. strain 2.9

SEQ ID NO: 2869 - DNA, 2529 bp, synthetic construct
  misc_feature 1..2529: note = Variant of DNA polymerase I from Thermus sp. strain 2.9
  source 1..2529: mol_type = other DNA
atgcaccatcatcatcatcatggcggtagcggcgtgttaccggtgttcgagcctaaaggtcgcgtgcttctggttgatggccatcatctcgcgtatcgtaacttctttgccctgaaaggattaaccaccagccgtggcgagccggtacagggtgtctacggctttgcaaagtcgctcctgaaagctctgaaagaagacggtgatgtggtgattgttgtctttgatgcgaaagcgccaagttttcgccacgaagcgtacgaagcttacaaagccgggcgtgctccaacgccggaagactttcctcgccaattggcgcttatgaaggaattagtggatttgcttggcctcgaacgcttggaagttcccggtttcgaggcagacgacgtattagcgactctcgcaaagaaagccgaacgtgagggctatgaagtccagatcttgacagcagatcgcgatcttttccagcttttatctccgcgcatctcggtgttacacccggaagggcatcgtatcaccccggaatggctctgggagaaatatggtttgcgtcccgaacaatgggtggattttcgcgccttagcaggcgatccgagcgacaatattccgggagttaaaggtatcggcgagaagacggcgctcaagctccttaaagaatgggggtcgttggagaacttgcttaagaatttagatcaggtcaaaccagagtcagtgcgtgagaagattcttgcacacctcgaagacctcaaattaagccgcgaattgtcccgtgtacgcaccgatttgccgctcgaagttgatttccgtcgccgccgcgaacctgactgggagggtcttaaagcgtttttagagcgtcttgaatttggttcgctcttgagggaattcggccttttagaaagcccgttaccagccgaagaagcaccttggccaccgcccgaaggcgcgtttttaggttaccgtttgagtcgcccggaaccgatgtgggccgaattattggctcttgcagcgtctgcccagggacgtgtgtatcgcgcggaagaccctcatggtgcgctccgcggcctcttcgaagtccgtggactccttgccaaagacttagctgttgttgcattgcgcgaaggtcttgatttacctccgactgatgatccaatgcttcttgcgtacctcttggacccgtcaaacacgacgcccgaaggcgtagcccgtcgttacggcggcgagtggaccgaagatgcagcgaaacgcgcgttattggccgaacgtttgcacgccaatttattaggacgtttgcaaggcgaggaacgtctcctctggctttacgaagaagtggagaaaccattgagtcgcgtgctcgcgcatatggaagctaccggtgtcaaattagacgtggcgtatttggaggctctcagccttgaagttgctgccgaaatgcgccgcttggaggaagaagtattccgtttagcaggccattcctttcgccttaattctcgcgatcagttagaacgtgtgttgttcgatgaacttggtctccctcctatcggcaagacagagaagaccggtaaacgtagcacttcagcggcggttttagaagctcttcgcgaagtccatcccattgtggacaagatcttgcagtaccgcgaactcgcgaaattgaaaggcacctatattgaccctcttccggcattagtccacccgaaaacgggacgcctccatacccgcttcaaccaaacagccacggcgaccggtcgtttgtcctcctctgatccaaaccttcagaatattccagtacgtaccccattgggccagaagatccgccgcgcgtttgtagctgaggagggttggcgtttagtggccctcgattatagccaaattgaattacgtgtccttgcccatctttctggcgatgagaacctcatccgcgtgtttcaggaaggcaaagacattcacactcaaacggcaagctggatgtttggattatcagctgaagcgatcgatcctttgatgcgtcgtgcagcgaagaccatcaatttcggtgttctctacggtatgagtgcctttcgtttgtcgcaggaattaggcattccctatgaagaagctgcggcgttcattcagaaatactttcaaagctatcccaaagttaaagcatggatcgagaagactctcgaagaaggccgcacacgtggttacgtagagaccttatttggacgtcgccgctatgttcccgatttaaacgctcgcgtgaaatctgtccgtgaagccgccgaacgcatggcgttcaacatgcctgtacagggcacggcagctgacctcatgaaacttgcaatggtgcgcctttttccacaattgcgtgaagttggtgcccgcatgctcttgcaggtccacgatgaactcttgttagaagcgccaaaagagcgtgcggaagaggtggcagccctcgcgaaagaggttatggaaggcgtgtggcccttagcggtgcctcttgaagtcgaagttggtattggcgaggattggctggctgccaaaggataatga

SEQ ID NO: 2870 - protein, 841 aa, synthetic construct; identical to SEQ ID NO: 2318
  REGION 1..841: note = Variant of DNA polymerase I from Thermus sp. strain 2.9

SEQ ID NO: 2871 - DNA, 2529 bp, synthetic construct; identical to SEQ ID NO: 2247
  misc_feature 1..2529: note = Variant of DNA polymerase I from Thermus sp. strain 2.9
  source 1..2529: mol_type = other DNA

SEQ ID NO: 2872 - protein, 841 aa, synthetic construct; identical to SEQ ID NO: 2196
  REGION 1..841: note = Variant of DNA polymerase I from Thermus sp. strain 2.9

SEQ ID NO: 2873 - DNA, 2529 bp, synthetic construct
  misc_feature 1..2529: note = Variant of DNA polymerase I from Thermus sp. strain 2.9
  source 1..2529: mol_type = other DNA
atgcaccatcatcatcatcatggcggtagcggcgtgttaccggtgttcgagcctaaaggtcgcgtgcttctggttgatggccatcatctcgcgtatcgtaacttctttgccctgaaaggattaaccaccagccgtggcgagccggtacagggtgtctacggctttgcaaagtcgctcctgaaagctctgaaagaagacggtgatgtggtgattgttgtctttgatgcgaaagcgccaagttttcgccacgaagcgtacgaagcttacaaagccgggcgtgctccaacgccggaagactttcctcctcaattggcgcttatgaaggaattagtggatttgcttggcctcgaacgcttggaagttcccggtttcgaggcagacgacgtattagcgactctcgcaaagaaagccgaacgtgagggctatgaagtccagatcttgacagcagatcgcgatcttttccagcttttatctccgcgcatctcggtgttacacccggaagggcatcgtatcaccccggaatggctctgggagaaatatggtttgcgtcccgaacaatgggtggattttcgcgccttagcaggcgatccgagcgacaatattccgggagttaaaggtatcggcgagaagacggcgctcaagctccttaaagaatgggggtcgttggagaacttgcttaagaatttagatcaggtcaaaccagagtcagtgcgtgagaagattcttgcacacctcgaagacctcaaattaagccgcgaattgtcccgtgtacgcaccgatttgccgctcgaagttgatttccgtcgccgccgcgaacctgactgggagggtcttaaagcgtttttagagcgtcttgaatttggttcgctcttgcatgaattcggccttttagaaagcccgttaccggccgaagaagcaccttggccaccgcccgaaggcgcgtttttaggttaccgtttgagtcgcccggaaccgatgtgggccgaattattggctcttgcagcgtctgcccagggacgtgtgtatcgcgcggaagaccctcatggtgcgctccgcggcctcttcgaagtccgtggactccttgccaaagacttagctgttgttgcattgcgcgaaggtcttgatttacctccgactgatgatccaatgcttcttgcgtacctcttggacccgtcaaacacgacgcccgaaggcgtagcccgtcgttacggcggcgagtggaccgaagatgcagcgaaacgcgcgttattggccgaacgtttgcacgccaatttattaggacgtttgcaaggcgaggaacgtctcctctggctttacgaagaagtggagaaaccattgagtcgcgtgctcgcgcatatggaagctaccggtgtcaaattagacgtggcgtatttggaggctctcagccttgaagttgctgccgaaatgcgccgcttggaggaagaagtattccgtttagcaggccattcctttcgccttaattctcgcgatcagttagaacgtgtgttgttcgatgaacttggtctccctcctatcggcaagacagagaagaccggtaaacgtagcacttcagctgcggttttagaagctcttcgcgaagtccatcccattgtggacaagatcttgcagtaccgcgaactcgcgaaattgaaaggcacctatattgaccctcttccggcattagtccacccgaaaacgggacgcctccatacccgcttcaaccaaacagccacggcgaccggtcgtttgtcctcctctgatccaaaccttcagaatattccagtacgtaccccattgggccagaagatccgccgcgcgtttgtagctgaggagggttggcgtttagtggccctcgattatagccaaattgaattacgtgtccttgcccatctttctggcgatgagaacctcatccgcgtgtttcaggaaggcaaagacattcacactcaaacggcaagctggatgtttggattatcagctgaagcgatcgatcctttgatgcgtcgtgcagcgaagaccatcaatttcggtgttctctacggtatgagtgcctttcgtttgtcgcaggaattaggcattccctatgaagaagctgcggcgttcattcagaaatactttcaaagctatcccaaagttaaagcatggatcgagaagactctcgaagaaggccgcacacgtggttacgtagagaccttatttggacgtcgccgctatgttcccgatttaaacgctcgcgtgaaatctgtccgtgaagccgccgaacgcatggcgttcaacatgcctgtacagggcacggcagctgacctcatgaaacttgcaatggtgcgcctttttccacaattgcgtgaagttggtgcccgcatgctcttgcaggtccacgatgaactcttgttagaagcgccaaaagagcgtgcggaagaggtggcagccctcgcgaaagaggttatggaaggcgtgtggcccttagcggtgcctcttgaagtcgaagttggtattggcgaggattggctggctgccaaaggataatga

SEQ ID NO: 2874 - protein, 841 aa, synthetic construct
  REGION 1..841: note = Variant of DNA polymerase I from Thermus sp. strain 2.9
MHHHHHHGGSGVLPVFEPKGRVLLVDGHHLAYRNFFALKGLTTSRGEPVQGVYGFAKSLLKALKEDGDVVIVVFDAKAPSFRHEAYEAYKAGRAPTPEDFPPQLALMKELVDLLGLERLEVPGFEADDVLATLAKKAEREGYEVQILTADRDLFQLLSPRISVLHPEGHRITPEWLWEKYGLRPEQWVDFRALAGDPSDNIPGVKGIGEKTALKLLKEWGSLENLLKNLDQVKPESVREKILAHLEDLKLSRELSRVRTDLPLEVDFRRRREPDWEGLKAFLERLEFGSLLHEFGLLESPLPAEEAPWPPPEGAFLGYRLSRPEPMWAELLALAASAQGRVYRAEDPHGALRGLFEVRGLLAKDLAVVALREGLDLPPTDDPMLLAYLLDPSNTTPEGVARRYGGEWTEDAAKRALLAERLHANLLGRLQGEERLLWLYEEVEKPLSRVLAHMEATGVKLDVAYLEALSLEVAAEMRRLEEEVFRLAGHSFRLNSRDQLERVLFDELGLPPIGKTEKTGKRSTSAAVLEALREVHPIVDKILQYRELAKLKGTYIDPLPALVHPKTGRLHTRFNQTATATGRLSSSDPNLQNIPVRTPLGQKIRRAFVAEEGWRLVALDYSQIELRVLAHLSGDENLIRVFQEGKDIHTQTASWMFGLSAEAIDPLMRRAAKTINFGVLYGMSAFRLSQELGIPYEEAAAFIQKYFQSYPKVKAWIEKTLEEGRTRGYVETLFGRRRYVPDLNARVKSVREAAERMAFNMPVQGTAADLMKLAMVRLFPQLREVGARMLLQVHDELLLEAPKERAEEVAALAKEVMEGVWPLAVPLEVEVGIGEDWLAAKG

SEQ ID NO: 2875 - DNA, 2529 bp, synthetic construct
  misc_feature 1..2529: note = Variant of DNA polymerase I from Thermus sp. strain 2.9
  source 1..2529: mol_type = other DNA
atgcaccatcatcatcatcatggcggtagcggcgtgttaccggtgttcgagcctaaaggtcgcgtgcttctggttgatggccatcatctcgcgtatcgtaacttctttgccctgaaaggattaaccaccagccgtggcgagccggtacagggtgtctacggctttgcaaagtcgctcctgaaagctctgaaagaagacggtgatgtggtgattgttgtctttgatgcgaaagcgccaagttttcgccacgaagcgtacgaagcttacaaagccgggcgtgctccaacgccggaagactttcctcgccaattggcgcttatgaaggaattagtggatttgcttggcctcgaacgcttggaagttcccggtttcgaggcagacgacgtattagcgactctcgcaaagaaagccgaacgtgagggctatgaagtccagatcttgacagcagatcgcgatcttttccagcttttatctccgcgcatctcggtgttacacccggaagggcatcgtatcaccccggaatggctctgggagaaatatggtttgcgtcccgaacaatgggtggattttcgcgccttagcaggcgatccgagcgacaatattccgggagttaaaggtatcggcgagaagacggcgctcaagctccttaaagaatgggggtcgttggagaacttgcttaagaatttagatcaggtcaaaccagagtcagtgcgtgagaagattcttgcacacctcgaagacctcaaattaagccgcgaattgtcccgtgtacgcaccgatttgccgctcgaagttgatttccgtcgccgccgcgaacctgactgggagggtcttaaagcgtttttagagcgtcttgaatttggttcgctcttgcatgaattcggccttttagaaagcccgttaccagccgaagaagcaccttggccaccgcccgaaggcgcgtttttaggttaccgtttgagtcgcccggaaccgatgtgggccgaattattggctcttgcagcgtctgcccagggacgtgtgtatcgcgcggaagaccctcatggtgcgctccgcggcctcttcgaagtccgtggactccttgccaaagacttagctgttgttgcattgcgcgaaggtcttgatttacctccgactgatgatccaatgcttcttgcgtacctcttggacccgtcaaacacgacgcccgaaggcgtagcccgtcgttacggcggcgagtggaccgaagatgcagcgaaacgcgcgttattggccgaacgtttgcacgccaatttattaggacgtttgcaaggcgaggaacgtctcctctggctttacgaagaagtggagaaaccattgagtcgcgtgctcgcgcatatggaagctaccggtgtcaaattagacgtggcgtatttggaggctctcagccttgaagttgctgccgaaatgcgccgcttggaggaagaagtattccgtttagcaggccattcctttcgccttaattctcgcgatcagttagaacgtgtgttgttcgatgaacttggtctccctcctatcggcaagacagagaagaccggtaaacgtagcacttcagcggcggttttagaagctcttcgcgaagtccatcccattgtggacaagatcttgcagtaccgcgaactcgcgaaattgaaaggcacctatattgaccggcttccggcattagtccacccgaaaacgggacgcctccatacccgcttcaaccaaacagccacggcgaccggtcgtttgtcctcctctgatccaaaccttcagaatattccagtacgtaccccattgggccagaagatccgccgcgcgtttgtagctgaggagggttggcgtttagtggccctcgattatagccaaattgaattacgtgtccttgcccatctttctggcgatgagaacctcatccgcgtgtttcaggaaggcaaagacattcacactcaaacggcaagctggatgtttggattatcagctgaagcgatcgatcctttgatgcgtcgtgcagcgaagaccatcaatttcggtgttctctacggtatgagtgcctttcgtttgtcgcaggaattaggcattccctatgaagaagctgcggcgttcattcagaaatactttcaaagctatcccaaagttaaagcatggatcgagaagactctcgaagaaggccgcacacgtggttacgtagagaccttatttggacgtcgccgctatgttcccgatttaaacgctcgcgtgaaatctgtccgtgaagccgccgaacgcatggcgttcaacatgcctgtacagggcacggcagctgacctcatgaaacttgcaatggtgcgcctttttccacaattgcgtgaagttggtgcccgcatgctcttgcaggtccacgatgaactcttgttagaagcgccaaaagagcgtgcggaagaggtggcagccctcgcgaaagaggttatggaaggcgtgtggcccttagcggtgcctcttgaagtcgaagttggtattggcgaggattggctggctgccaaaggataatga

SEQ ID NO: 2876 - protein, 841 aa, synthetic construct; identical to SEQ ID NO: 2348
  REGION 1..841: note = Variant of DNA polymerase I from Thermus sp. strain 2.9

SEQ ID NO: 2877 - DNA, 2529 bp, synthetic construct
  misc_feature 1..2529: note = Variant of DNA polymerase I from Thermus sp. strain 2.9
  source 1..2529: mol_type = other DNA
atgcaccatcatcatcatcatggcggtagcggcgtgttaccggtgttcgagcctaaaggtcgcgtgcttctggttgatggccatcatctcgcgtatcgtaacttctttgccctgaaaggattaaccaccagccgtggcgagccggtacagggtgtctacggctttgcaaagtcgctcctgaaagctctgaaagaagacggtgatgtggtgattgttgtctttgatgcgaaagcgccaagttttcgccacgaagcgtacgaagcttacaaagccgggcgtgctccaacgccggaagactttcctcgccaattggcgcttatgaaggaattagtggatttgcttggcctcgaacgcttggaagttcccggtttcgaggcagacgacgtattagcgactctcgcaaagaaagccgaacgtgagggctatgaagtccagatcttgacagcagatcgcgatcttttccagcttttatctccgcgcatctcggtgttacacccggaagggcatcgtatcaccccggaatggctctgggagaaatatggtttgcgtcccgaacaatgggtggattttcgcgccttagcaggcgatccgagcgacaatattccgggagttaaaggtatcggcgagaagacggcgctcaagctccttaaagaatgggggtcgttggagaacttgcttaagaatttagatcaggtcaaaccagagtcagtgcgtgagaagattcttgcacacctcgaagacctcaaattaagccgcgaattgtcccgtgtacgcaccgatttgccgctcgaagttgatttccgtcgccgccgcgaacctgactgggagggtcttaaagcgtttttagagcgtcttgaatttggttcgctcttgcatgaattcggccttttagaaagcccgttaccagccgaagaagcaccttggccaccgcccgaaggcgcgtttttaggttaccgtttgagtcgcccggaaccgatgtgggccgaattattggctcttgcagcgtctgcccagggacgtgtgtatcgcgcggaagaccctcatggtgcgctccgcggcctcttcgaagtccgtggactccttgccaaagacttagctgttgttgcattgcgcgaaggtcttgatttacctccgactgatgatccaatgcttcttgcgtacctcttggacccgtcaaacacgacgcccgaaggcgtagcccgtcgttacggcggcgagtggaccgaagatgcagcgaaacgcgcgttattggccgaacgtttgcacgccaatttattaggacgtttgcaaggcgaggaacgtctcctctggctttacgaagaagtggagaaaccattgagtcgcgtgctcgcgcatatggaagctaccggtgtcaaattagacgtggcgtatttggaggctctcagccttgaagttgctgccgaaatgcgccgcttggaggaagaagtattccgtttagcaggccattcctttcgccttaattctcgcgatcagttagaacgtgtgttgttcgatgaacttggtctccctcctatcggcaagacagagaagaccggtaaacgtagcacttcagcggcggttttagaagctcttcgcgaagtccatcccattgtggacaagatcttgcagtaccgcgaactcgcgaaattgaaaggcacctatattgaccctcttccggcattagtccacccgaaaacgggacgcctccatacccgcttcaaccaaacagccacggcgaccggtcgtttgtcctcctctgatccaaaccttcagaatattccagtacgtaccccattgggccagaagatccgccgcgcgtttgtagctgaggagggttggcgtttagtggccctcgattatagccaaattgaattacgtgtccttgcccatctttctggcgatgagaacctcatccgcgtgtttcaggaaggcaaagacattcacactcaaacggcaagctggatgtttggattatcagctgaagcgatcgatcctttgatgcgtcgtgcagcgaagaccatcaatttcggtgttctctacggtatgagtgcctttcgtttgtcgcaggaattaggcattccctatgaagaagctgcggcgttcattcagaaatactttcaaagctatcccaaagttaaagcatggatcgagaagactctcgaagaaggccgcacacgtggttacgtagagaccttatttggacgtcgccgctatgttcccgatttaaacgctcgcgtgaaatctgggcgtgaagccgccgaacgcatggcgttcaacatgcctgtacagggcacggcagctgacctcatgaaacttgcaatggtgcgcctttttccacaattgcgtgaagttggtgcccgcatgctcttgcaggtccacgatgaactcttgttagaagcgccaaaagagcgtgcggaagaggtggcagccctcgcgaaagaggttatggaaggcgtgtggcccttagcggtgcctcttgaagtcgaagttggtattggcgaggattggctggctgccaaaggataatga

SEQ ID NO: 2878 - protein, 841 aa, synthetic construct; identical to SEQ ID NO: 2590
  REGION 1..841: note = Variant of DNA polymerase I from Thermus sp. strain 2.9

SEQ ID NO: 2879 - DNA, 2529 bp, synthetic construct; identical to SEQ ID NO: 2639
  misc_feature 1..2529: note = Variant of DNA polymerase I from Thermus sp. strain 2.9
  source 1..2529: mol_type = other DNA

SEQ ID NO: 2880 - protein, 841 aa, synthetic construct; identical to SEQ ID NO: 2640
  REGION 1..841: note = Variant of DNA polymerase I from Thermus sp. strain 2.9

SEQ ID NO: 2881 - DNA, 2529 bp, synthetic construct
  misc_feature 1..2529: note = Variant of DNA polymerase I from Thermus sp. strain 2.9
  source 1..2529: mol_type = other DNA
atgcaccatcatcatcatcatggcggtagcggcgtgttaccggtgttcgagcctaaaggtcgcgtgcttctggttgatggccatcatctcgcgtatcgtaacttctttgccctgaaaggattaaccaccagccgtggcgagccggtacagggtgtctacggctttgcaaagtcgctcctgaaagctctgaaagaagacggtgatgtggtgattgttgtctttgatgcgaaagcgccaagttttcgccacgaagcgtacgaagcttacaaagccgggcgtgctccaacgccggaagactttcctcgccaattggcgcttatgaaggaattagtggatttgcttggcctcgaacgcttggaagttcccggtttcgaggcagacgacgtattagcgactctcgcaaagaaagccgaacgtgagggctatgaagtccagatcttgacagcagatcgcgatcttttccagcttttatctccgcgcatctcggtgttacacccggaagggcatcgtatcaccccggaatggctctgggagaaatatggtttgcgtcccgaacaatgggtggattttcgcgccttagcaggcgatccgagcgacaatattccgggagttaaaggtatcggcgagaagacggcgctcaagctccttaaagaatgggggtcgttggagaacttgcttaagaatttagatcaggtcaaaccagagtcagtgcgtgagaagattcttgcacacctcgaagacctcaaattaagccgcgaattgtcccgtgtacgcaccgatttgccgctcgaagttgatttccgtcgccgccgcgaacctgactgggagggtcttaaagcgtttttagagcgtcttgaatttggttcgctcttgcatgaattcggccttttagaaagcttgttaccagccgaagaagcaccttggccaccgcccgaaggcgcgtttttaggttaccgtttgagtcgcccggaaccgatgtgggccgaattattggctcttgcagcgtctgcccagggacgtgtgtatcgcgcggaagaccctcatggtgcgctccgcggcctcttcgaagtccgtggactccttgccaaagacttagctgttgttgcattgcgcgaaggtcttgatttacctccgactgatgatccaatgcttcttgcgtacctcttggacccgtcaaacacgacgcccgaaggcgtagcccgtcgttacggcggcgagtggaccgaagatgcagcgaaacgcgcgttattggccgaacgtttgcacgccaatttattaggacgtttgcaaggcgaggaacgtctcctctggctttacgaagaagtggagaaaccattgagtcgcgtgctcgcgcatatggaagctaccggtgtcaaattagacgtggcgtatttggaggctctcagccttgaagttgctgccgaaatgcgccgcttggaggaagaagtattccgtttagcaggccattcctttcgccttaattctcgcgatcagttagaacgtgtgttgttcgatgaacttggtctccctcctatcggcaagacagagaagaccggtaaacgtagcacttcagcggcggttttagaagctcttcgcgaagtccatcccattgtggacaagatcttgcagtaccgcgaactcgcgaaattgaaaggcacctatattgaccctcttccggcattagtccacccgaaaacgggacgcctccatacccgcttcaaccaaacagccacggcgaccggtcgtttgtcctcctctgatccaaaccttcagaatattccagtacgtaccccattgggccagaagatccgccgcgcgtttgtagctgaggagggttggcgtttagtggccctcgattatagccaaattgaattacgtgtccttgcccatctttctggcgatgagaacctcatccgcgtgtttcaggaaggcaaagacattcacactcaaacggcaagctggatgtttggattatcagctgaagcgatcgatcctttgatgcgtcgtgcagcgaagaccatcaatttcggtgttctctacggtatgagtgcctttcgtttgtcgcaggaattaggcattccctatgaagaagctgcggcgttcattcagaaatactttcaaagctatcccaaagttaaagcatggatcgagaagactctcgaagaaggccgcacacgtggttacgtagagaccttatttggacgtcgccgctatgttcccgatttaaacgctcgcgtgaaatctgtccgtgaagccgccgaacgcatggcgttcaacatgcctgtacagggcacggcagctgacctcatgaaacttgcaatggtgcgcctttttccacaattgcgtgaagttggtgcccgcatgctcttgcaggtccacgatgaactcttgttagaagcgccaaaagagcgtgcggaagaggtggcagccctcgcgaaagaggttatggaaggcgtgtggcccttagcggtgcctcttgaagtcgaagttggtattggcgaggattggctggctgccaaaggataatga

SEQ ID NO: 2882 - protein, 841 aa, synthetic construct; identical to SEQ ID NO: 2460
  REGION 1..841: note = Variant of DNA polymerase I from Thermus sp. strain 2.9

SEQ ID NO: 2883 - DNA, 2529 bp, synthetic construct
  misc_feature 1..2529: note = Variant of DNA polymerase I from Thermus sp. strain 2.9
  source 1..2529: mol_type = other DNA
atgcaccatcatcatcatcatggcggtagcggcgtgttaccggtgttcgagcctaaaggtcgcgtgcttctggttgatggccatcatctcgcgtatcgtaacttctttgccctgaaaggattaaccaccagcagcggcgagccggtacagggtgtctacggctttgcaaagtcgctcctgaaagctctgaaagaagacggtgatgtggtgattgttgtctttgatgcgaaagcgccaagttttcgccacgaagcgtacgaagcttacaaagccgggcgtgctccaacgccggaagactttcctcgccaattggcgcttatgaaggaattagtggatttgcttggcctcgaacgcttggaagttcccggtttcgaggcagacgacgtattagcgactctcgcaaagaaagccgaacgtgagggctatgaagtccagatcttgacagcagatcgcgatcttttccagcttttatctccgcgcatctcggtgttacacccggaagggcatcgtatcaccccggaatggctctgggagaaatatggtttgcgtcccgaacaatgggtggattttcgcgccttagcaggcgatccgagcgacaatattccgggagttaaaggtatcggcgagaagacggcgctcaagctccttaaagaatgggggtcgttggagaacttgcttaagaatttagatcaggtcaaaccagagtcagtgcgtgagaagattcttgcacacctcgaagacctcaaattaagccgcgaattgtcccgtgtacgcaccgatttgccgctcgaagttgatttccgtcgccgccgcgaacctgactgggagggtcttaaagcgtttttagagcgtcttgaatttggttcgctcttgcatgaattcggccttttagaaagcccgttaccagccgaagaagcaccttggccaccgccccagggcgcgtttttaggttaccgtttgagtcgcccggaaccgatgtgggccgaattattggctcttgcagcgtctgcccagggacgtgtgtatcgcgcggaagaccctcatggtgcgctccgcggcctcttcgaagtccgtggactccttgccaaagacttagctgttgttgcattgcgcgaaggtcttgatttacctccgactgatgatccaatgcttcttgcgtacctcttggacccgtcaaacacgacgcccgaaggcgtagcccgtcgttacggcggcgagtggaccgaagatgcagcgaaacgcgcgttattggccgaacgtttgcacgccaatttattaggacgtttgcaaggcgaggaacgtctcctctggctttacgaagaagtggagaaaccattgagtcgcgtgctcgcgcatatggaagctaccggtgtcaaattagacgtggcgtatttggaggctctcagccttgaagttgctgccgaaatgcgccgcttggaggaagaagtattccgtttagcaggccattcctttcgccttaattctcgcgatcagttagaacgtgtgttgttcgatgaacttggtctccctcctatcggcaagacagagaagaccggtaaacgtagcacttcagcggcggttttagaagctcttcgcgaagtccatcccattgtggacaagatcttgcagtaccgcgaactcgcgaaattgaaaggcacctatattgaccctcttccggcattagtccacccgaaaacgggacgcctccatacccgcttcaaccaaacagccacggcgaccggtcgtttgtcctcctctgatccaaaccttcagaatattccagtacgtaccccattgggccagaagatccgccgcgcgtttgtagctgaggagggttggcgtttagtggccctcgattatagccaaattgaattacgtgtccttgcccatctttctggcgatgagaacctcatccgcgtgtttcaggaaggcaaagacattcacactcaaacggcaagctggatgtttggattatcagctgaagcgatcgatcctttgatgcgtcgtgcagcgaagaccatcaatttcggtgttctctacggtatgagtgcctttcgtttgtcgcaggaattaggcattccctatgaagaagctgcggcgttcattcagaaatactttcaaagctatcccaaagttaaagcatggatcgagaagactctcgaagaaggccgcacacgtggttacgtagagaccttatttggacgtcgccgctatgttcccgatttaaacgctcgcgtgaaatctgtccgtgaagccgccgaacgcatggcgttcaacatgcctgtacagggcacggcagctgacctcatgaaacttgcaatggtgcgcctttttccacaattgcgtgaagttggtgcccgcatgctcttgcaggtccacgatgaactcttgttagaagcgccaaaagagcgtgcggaagaggtggcagccctcgcgaaagaggttatggaaggcgtgtggcccttagcggtgcctcttgaagtcgaagttggtattggcgaggattggctggctgccaaaggataatga

SEQ ID NO: 2884 - protein, 841 aa, synthetic construct
  REGION 1..841: note = Variant of DNA polymerase I from Thermus sp. strain 2.9
MHHHHHHGGSGVLPVFEPKGRVLLVDGHHLAYRNFFALKGLTTSSGEPVQGVYGFAKSLLKALKEDGDVVIVVFDAKAPSFRHEAYEAYKAGRAPTPEDFPRQLALMKELVDLLGLERLEVPGFEADDVLATLAKKAEREGYEVQILTADRDLFQLLSPRISVLHPEGHRITPEWLWEKYGLRPEQWVDFRALAGDPSDNIPGVKGIGEKTALKLLKEWGSLENLLKNLDQVKPESVREKILAHLEDLKLSRELSRVRTDLPLEVDFRRRREPDWEGLKAFLERLEFGSLLHEFGLLESPLPAEEAPWPPPQGAFLGYRLSRPEPMWAELLALAASAQGRVYRAEDPHGALRGLFEVRGLLAKDLAVVALREGLDLPPTDDPMLLAYLLDPSNTTPEGVARRYGGEWTEDAAKRALLAERLHANLLGRLQGEERLLWLYEEVEKPLSRVLAHMEATGVKLDVAYLEALSLEVAAEMRRLEEEVFRLAGHSFRLNSRDQLERVLFDELGLPPIGKTEKTGKRSTSAAVLEALREVHPIVDKILQYRELAKLKGTYIDPLPALVHPKTGRLHTRFNQTATATGRLSSSDPNLQNIPVRTPLGQKIRRAFVAEEGWRLVALDYSQIELRVLAHLSGDENLIRVFQEGKDIHTQTASWMFGLSAEAIDPLMRRAAKTINFGVLYGMSAFRLSQELGIPYEEAAAFIQKYFQSYPKVKAWIEKTLEEGRTRGYVETLFGRRRYVPDLNARVKSVREAAERMAFNMPVQGTAADLMKLAMVRLFPQLREVGARMLLQVHDELLLEAPKERAEEVAALAKEVMEGVWPLAVPLEVEVGIGEDWLAAKG

SEQ ID NO: 2885 - DNA, 2529 bp, synthetic construct; identical to SEQ ID NO: 2547
  misc_feature 1..2529: note = Variant of DNA polymerase I from Thermus sp. strain 2.9
  source 1..2529: mol_type = other DNA

SEQ ID NO: 2886 - protein, 841 aa, synthetic construct; identical to SEQ ID NO: 2548
  REGION 1..841: note = Variant of DNA polymerase I from Thermus sp. strain 2.9

SEQ ID NO: 2887 - DNA, 2529 bp, synthetic construct; identical to SEQ ID NO: 2259
  misc_feature 1..2529: note = Variant of DNA polymerase I from Thermus sp. strain 2.9
  source 1..2529: mol_type = other DNA

SEQ ID NO: 2888 - protein, 841 aa, synthetic construct; identical to SEQ ID NO: 2260
  REGION 1..841: note = Variant of DNA polymerase I from Thermus sp. strain 2.9

SEQ ID NO: 2889 - DNA, 2529 bp, synthetic construct
  misc_feature 1..2529: note = Variant of DNA polymerase I from Thermus sp. strain 2.9
  source 1..2529: mol_type = other DNA
atgcaccatcatcatcatcatggcggtagcggcgtgttaccggtgttcgagcctaaaggtcgcgtgcttctggttgatggccatcatctcgcgtatcgtaacttctttgccctgaaaggattaaccaccagccgtggcgagccggtacagggtgtctacggctttgcaaagtcgctcctgaaagctctgaaagaagacggtgatgtggtgattgttgtctttgatgcgaaagcgccaagttttcgccacgaagcgtacgaagcttacaaagccgggcgtgctccaacgccggaagactttcctcgccaattggcgcttatgaaggaattagtggatttgcttggcctcgaacgcttggaagttcccggtttcgaggcagacgacgtattagcgactctcgcaaagaaagccgaacgtgagggctatgaagtccagatcttgacagcagatcgcgatcttttccagcttttatctccgcgcatctcggtgttacacccggaagggcatcgtatcaccccggaatggctctgggagaaatatggtttgcgtcccgaacaatgggtggattttcgcgccttagcaggcgatccgagcgacaatattccgggagttaaaggtatcggcgagaagacggcgctcaagctccttaaagaatgggggtcgttggagaacttgcttaagaatttagatcaggtcaaaccagagtcagtgcgtgagaagattcttgcacacctcgaagacctcaaattaagccgcgaattgtcccgtgtacgcaccgatttgccgctcgaagttgatttccgtcgccgccgcgaacctgactgggagggtcttaaagcgtttttagagcgtcttgaatttggttcgctcttgcatgaattcggccttttagaaagcccgttaccagccgaagaagcaccttggccaccgcccgaaggcgcgtttttaggttaccgtttgagtcgctgggaaccgatgtgggccgaattattggctcttgcagcgtctgcccagggacgtgtgtatcgcgcggaagaccctcatggtgcgctccgcggcctcttcgaagtccgtggactccttgccaaagacttagctgttgttgcattgcgcgaaggtcttgatttacctccgactgatgatccaatgcttcttgcgtacctcttggacccgtcaaacacgacgcccgaaggcgtagcccgtcgttacggcggcgagtggaccgaagatgcagcgaaacgcgcgttattggccgaacgtttgcacgccaatttattaggacgtttgcaaggcgaggaacgtctcctctggctttacgaagaagtggagaaaccattgagtcgcgtgctcgcgcatatggaagctaccggtgtcaaattagacgtggcgtatttggaggctctcagccttgaagttgctgccgaaatgcgccgcttggaggaagaagtattccgtttagcaggccattcctttcgccttaattctcgcgatcagttagaacgtgtgttgttcgatgaacttggtctccctcctatcggcaagacagagaagaccggtaaacgtagcacttcagcggcggttttagaagctcttcgcgaagtccatcccattgtggacaagatcttgcagtaccgcgaactcgcgaaattgaaaggcacctatattgaccctcttccggcattagtccacccgaaaacgggacgcctccatacccgcttcaaccaaacagccacggcgaccggtcgtttgtcctcctctgatccaaaccttcagaatattccagtacgtaccccattgggccagaagatccgccgcgcgtttgtagctgaggagggttggcgtttagtggccctcgattatagccaaattgaattacgtgtccttgcccatctttctggcgatgagaacctcatccgcgtgtttcaggaaggcaaagacattcacactcaaacggcaagctggatgtttggattatcagctgaagcgatcgatcctttgatgcgtcgtgcagcgaagaccatcaatttcggtgttctctacggtatgagtgcctttcgtttgtcgcaggaattaggcattccctatgaagaagctgcggcgttcattcagaaatactttcaaagctatcccaaagttaaagcatggatcgagaagactctcgaagaaggccgcacacgtggttacgtagagaccttatttggacgtcgccgctatgttcccgatttaaacgctcgcgtgaaatctgtccgtgaagccgccgaacgcatggcgttcaacatgcctgtacagggcacggcagctgacctcatgaaacttgcaatggtgcgcctttttccacaattgcgtgaagttggtgcccgcatgctcttgcaggtccacgatgaactcttgttagaagcgccaaaagagcgtgcggaagaggtggcagccctcgcgaaagaggttatggaaggcgtgtggcccttagcggtgcctcttgaagtcgaagttggtattggcgaggattggctggctgccaaaggataatga

SEQ ID NO: 2890 - protein, 841 aa, synthetic construct
  REGION 1..841: note = Variant of DNA polymerase I from Thermus sp. strain 2.9
MHHHHHHGGSGVLPVFEPKGRVLLVDGHHLAYRNFFALKGLTTSRGEPVQGVYGFAKSLLKALKEDGDVVIVVFDAKAPSFRHEAYEAYKAGRAPTPEDFPRQLALMKELVDLLGLERLEVPGFEADDVLATLAKKAEREGYEVQILTADRDLFQLLSPRISVLHPEGHRITPEWLWEKYGLRPEQWVDFRALAGDPSDNIPGVKGIGEKTALKLLKEWGSLENLLKNLDQVKPESVREKILAHLEDLKLSRELSRVRTDLPLEVDFRRRREPDWEGLKAFLERLEFGSLLHEFGLLESPLPAEEAPWPPPEGAFLGYRLSRWEPMWAELLALAASAQGRVYRAEDPHGALRGLFEVRGLLAKDLAVVALREGLDLPPTDDPMLLAYLLDPSNTTPEGVARRYGGEWTEDAAKRALLAERLHANLLGRLQGEERLLWLYEEVEKPLSRVLAHMEATGVKLDVAYLEALSLEVAAEMRRLEEEVFRLAGHSFRLNSRDQLERVLFDELGLPPIGKTEKTGKRSTSAAVLEALREVHPIVDKILQYRELAKLKGTYIDPLPALVHPKTGRLHTRFNQTATATGRLSSSDPNLQNIPVRTPLGQKIRRAFVAEEGWRLVALDYSQIELRVLAHLSGDENLIRVFQEGKDIHTQTASWMFGLSAEAIDPLMRRAAKTINFGVLYGMSAFRLSQELGIPYEEAAAFIQKYFQSYPKVKAWIEKTLEEGRTRGYVETLFGRRRYVPDLNARVKSVREAAERMAFNMPVQGTAADLMKLAMVRLFPQLREVGARMLLQVHDELLLEAPKERAEEVAALAKEVMEGVWPLAVPLEVEVGIGEDWLAAKG

SEQ ID NO: 2891 - DNA, 2529 bp, synthetic construct; identical to SEQ ID NO: 2491
  misc_feature 1..2529: note = Variant of DNA polymerase I from Thermus sp. strain 2.9
  source 1..2529: mol_type = other DNA

SEQ ID NO: 2892 - protein, 841 aa, synthetic construct; identical to SEQ ID NO: 2492
  REGION 1..841: note = Variant of DNA polymerase I from Thermus sp. strain 2.9

SEQ ID NO: 2893 - DNA, 2529 bp, synthetic construct
  misc_feature 1..2529: note = Variant of DNA polymerase I from Thermus sp. strain 2.9
  source 1..2529: mol_type = other DNA
atgcaccatcatcatcatcatggcggtagcggcgtgttaccggtgttcgagcctaaaggtcgcgtgcttctggttgatggccatcatctcgcgtatcgtaacttctttgccctgaaaggattaaccaccagccgtggcgagccggtacagggtgtctacggctttgcaaagtcgctcctgaaagctctgaaagaagacggtgatgtggtgattgttgtctttgatgcgaaagcgccaagttttcgccacgaagcgtacgaagcttacaaagccgggcgtgctccaacgccggaagactttcctcgccaattggcgcttatgaaggaattagtggatttgcttggcctcgaacgcttggaagttcccggtttcgaggcagacgacgtattagcgactctcgcaaagaaagccgaacgtgagggctatgaagtccagatcttgacagcagatcgcgatcttttccagcttttatctccgcgcatcactgtgttacacccggaagggcatcgtatcaccccggaatggctctgggagaaatatggtttgcgtcccgaacaatgggtggattttcgcgccttagcaggcgatccgagcgacaatattccgggagttaaaggtatcggcgagaagacggcgctcaagctccttaaagaatgggggtcgttggagaacttgcttaagaatttagatcaggtcaaaccagagtcagtgcgtgagaagattcttgcacacctcgaagacctcaaattaagccgcgaattgtcccgtgtacgcaccgatttgccgctcgaagttgatttccgtcgccgccgcgaacctgactgggagggtcttaaagcgtttttagagcgtcttgaatttggttcgctcttgcatgaattcggccttttagaaagcccgttaccagccgaagaagcaccttggccaccgcccgaaggcgcgtttttaggttaccgtttgagtcgcccggaaccgatgtgggccgaattattggctcttgcagcgtctgcccagggacgtgtgtatcgcgcggaagaccctcatggtgcgctccgcggcctcttcgaagtccgtggactccttgccaaagacttagctgttgttgcattgcgcgaaggtcttgatttacctccgactgatgatccaatgcttcttgcgtacctcttggacccgtcaaacacgacgcccgaaggcgtagcccgtcgttacggcggcgagtggaccgaagatgcagcgaaacgcgcgttattggccgaacgtttgcacgccaatttattaggacgtttgcaaggcgaggaacgtctcctctggctttacgaagaagtggagaaaccattgagtcgcgtgctcgcgcatatggaagctaccggtgtcaaattagacgtggcgtatttggaggctctcagccttgaagttgctgccgaaatgcgccgcttggaggaagaagtattccgtttagcaggccattcctttcgccttaattctcgcgatcagttagaacgtgtgttgttcgatgaacttggtctccctcctatcggcaagacagagaagaccggtaaacgtagcacttcagcggcggttttagaagctcttcgcgaagtccatcccattgtggacaagatcttgcagtaccgcgaactcgcgaaattgaaaggcacctatattgaccctcttccggcattagtccacccgaaaacgggacgcctccatacccgcttcaaccaaacagccacggcgaccggtcgtttgtcctcctctgatccaaaccttcagaatattccagtacgtaccccattgggccagaagatccgccgcgcgtttgtagctgaggagggttggcgtttagtggccctcgattatagccaaattgaattacgtgtccttgcccatctttctggcgatgagaacctcatccgcgtgtttcaggaaggcaaagacattcacactcaaacggcaagctggatgtttggattatcagctgaagcgatcgatcctttgatgcgtcgtgcagcgaagaccatcaatttcggtgttctctacggtatgagtgcctttcgtttgtcgcaggaattaggcattccctatgaagaagctgcggcgttcattcagaaatactttcaaagctatcccaaagttaaagcatggatcgagaagactctcgaagaaggccgcacacgtggttacgtagagaccttatttggacgtcgccgctatgttcccgatttaaacgctcgcgtgaaatctgtccgtgaagccgccgaacgcatggcgttcaacatgcctgtacagggcacggcagctgacctcatgaaacttgcaatggtgcgcctttttccacaattgcgtgaagttggtgcccgcatgctcttgcaggtccacgatgaactcttgttagaagcgccaaaagagcgtgcggaagaggtggcagccctcgcgaaagaggttatggaaggcgtgtggcccttagcggtgcctcttgaagtcgaagttggtattggcgaggattggctggctgccaaaggataatga

SEQ ID NO: 2894 - protein, 841 aa, synthetic construct
  REGION 1..841: note = Variant of DNA polymerase I from Thermus sp. strain 2.9
MHHHHHHGGSGVLPVFEPKGRVLLVDGHHLAYRNFFALKGLTTSRGEPVQGVYGFAKSLLKALKEDGDVVIVVFDAKAPSFRHEAYEAYKAGRAPTPEDFPRQLALMKELVDLLGLERLEVPGFEADDVLATLAKKAEREGYEVQILTADRDLFQLLSPRITVLHPEGHRITPEWLWEKYGLRPEQWVDFRALAGDPSDNIPGVKGIGEKTALKLLKEWGSLENLLKNLDQVKPESVREKILAHLEDLKLSRELSRVRTDLPLEVDFRRRREPDWEGLKAFLERLEFGSLLHEFGLLESPLPAEEAPWPPPEGAFLGYRLSRPEPMWAELLALAASAQGRVYRAEDPHGALRGLFEVRGLLAKDLAVVALREGLDLPPTDDPMLLAYLLDPSNTTPEGVARRYGGEWTEDAAKRALLAERLHANLLGRLQGEERLLWLYEEVEKPLSRVLAHMEATGVKLDVAYLEALSLEVAAEMRRLEEEVFRLAGHSFRLNSRDQLERVLFDELGLPPIGKTEKTGKRSTSAAVLEALREVHPIVDKILQYRELAKLKGTYIDPLPALVHPKTGRLHTRFNQTATATGRLSSSDPNLQNIPVRTPLGQKIRRAFVAEEGWRLVALDYSQIELRVLAHLSGDENLIRVFQEGKDIHTQTASWMFGLSAEAIDPLMRRAAKTINFGVLYGMSAFRLSQELGIPYEEAAAFIQKYFQSYPKVKAWIEKTLEEGRTRGYVETLFGRRRYVPDLNARVKSVREAAERMAFNMPVQGTAADLMKLAMVRLFPQLREVGARMLLQVHDELLLEAPKERAEEVAALAKEVMEGVWPLAVPLEVEVGIGEDWLAAKG

SEQ ID NO: 2895 - DNA, 2529 bp, synthetic construct
  misc_feature 1..2529: note = Variant of DNA polymerase I from Thermus sp. strain 2.9
  source 1..2529: mol_type = other DNA
atgcaccatcatcatcatcatggcggtagcggcgtgttaccggtgttcgagcctaaaggtcgcgtgcttctggttgatggccatcatctcgcgtatcgtaacttctttgccctgaaaggattaaccaccagccgtggcgagccggtacagggtgtctacggctttgcaaagtcgctcctgaaagctctgaaagaagacggtgatgtggtgattgttgtctttgatgcgaaagcgccaagttttcgccacgaagcgtacgaagcttacaaagccgggcgtgctccaacgccggaagactttcctcgccaattggcgcttatgaaggaattagtggatttgcttggcctcgaacgcttggaagttcccggtttcgaggcagacgacgtattagcgactctcgcaaagaaagccgaacgtgagggctatgaagtccagatcttgacagcagatcgcgatcttttccagcttttatctccgcgcatctcggtgttacacccggaagggcatcgtatcaccccggaatggctctgggagaaatatggtttgcgtcccgaacaatgggtggattttcgcgccttagcaggcgatccgagcgacaatattccgggagttaaaggtatcggcgagaagacggcgctcaagctccttaaagaatgggggtcgttggagaacttgcttaagaatttagatcaggtcaaaccagagtcagtgcgtgagaagattcttgcacacctcgaagacctcaaattaagccgcgaattgtcccgtgtacgcaccgatttgccgctcgaagttgatttccgtcgccgccgcgaacctgactgggagggtcttaaagcgtttttagagcgtcttgaatttggttcgctcttgcatgaattcggccttttagaaagcccgttaccggccgaagaagcaccttggccaccgcccgaaggcgcgtttttaggttaccgtttgagtcgcccggaaccgatgtgggccgaattattggctcttgcagcgtctgcccagggacgtgtgtatcgcgcggaagaccctcatggtgcgctccgcggcctcttcgaagtccgtggactccttgccaaagacttagctgttgttgcattgcgcgaaggtcttgatttacctccgactgatgatccaatgcttcttgcgtacctcttggacccgtcaaacacgacgcccgaaggcgtagcccgtcgttacggcggcgagtggaccgaagatgcagcgaaacgcgcgttattggccgaacgtttgcacgccaatttattaggacgtttgcaaggcgaggaacgtctcctctggctttacgaagaagtggagaaaccattgagtcgcgtgctcgcgcatatggaagctaccggtgtcaaattagacgtggcgtatttggaggctctcagccttgaagttgctgccgaaatgcgccgcttggaggaagaagtattccgtttagcaggccgttcctttcgccttgtatctcgcgatcagttagaacgtgtgttgttcgatgaacttggtctccctcctatcggcaagacagagaagaccggtaaacgtagcacttcagctgcggttttagaagctcttcgcgaagtccatcccattgtggacaagatcttgcagtaccgcgaactcgcgaaattgaaaggcacctatattgaccctcttccggcattagtccacccgaaaacgggacgcctccatacccgcttcaaccaaacagccacggcgaccggtcgtttgtcctcctctgatccaaaccttcagaatattccagtacgtaccccattgggccagaagatccgccgcgcgtttgtagctgaggagggttggcgtttagtggccctcgattatagccaaattgaattacgtgtccttgcccatctttctggcgatgagaacctcatccgcgtgtttcaggaaggcaaagacattcacactcaaacggcaagctggatgtttggattaggcgctgaagcgatcgatcctttgatgcgtcgtgcagcgaagaccatcaatttcggtgttctctacggtatgagtgcctttcgtttgtcgcaggaattaggcattccctatgaagaagctgcggcgttcattcagaaatactttcaaagctatcccaaagttaaagcatggatcgagaagactctcgaagaaggccgcacacgtggttacgtagagaccttatttggacgtcgccgctatgttcccgatttaaacgctcgcgtgaaaagcgtccgtgaagccgccgaacgcatggcgttcaacatgcctgtacagggcacggcagctgacctcatgaaacttgcaatggtgcgcctttttccacaattgcgtgaagttggtgcccgcatgctcttgcaggtccacgatgaactcttgttagaagcgccaaaagagcgtgcggaagaggtggcagccctcgcgaaagaggttatggaaggcgtgtggcccttagcggtgcctcttgaagtcgaagttggtattggcgaggattggctggctgccaaaggataatga

SEQ ID NO: 2896 - protein, 841 aa, synthetic construct
  REGION 1..841: note = Variant of DNA polymerase I from Thermus sp. strain 2.9
MHHHHHHGGSGVLPVFEPKGRVLLVDGHHLAYRNFFALKGLTTSRGEPVQGVYGFAKSLLKALKEDGDVVIVVFDAKAPSFRHEAYEAYKAGRAPTPEDFPRQLALMKELVDLLGLERLEVPGFEADDVLATLAKKAEREGYEVQILTADRDLFQLLSPRISVLHPEGHRITPEWLWEKYGLRPEQWVDFRALAGDPSDNIPGVKGIGEKTALKLLKEWGSLENLLKNLDQVKPESVREKILAHLEDLKLSRELSRVRTDLPLEVDFRRRREPDWEGLKAFLERLEFGSLLHEFGLLESPLPAEEAPWPPPEGAFLGYRLSRPEPMWAELLALAASAQGRVYRAEDPHGALRGLFEVRGLLAKDLAVVALREGLDLPPTDDPMLLAYLLDPSNTTPEGVARRYGGEWTEDAAKRALLAERLHANLLGRLQGEERLLWLYEEVEKPLSRVLAHMEATGVKLDVAYLEALSLEVAAEMRRLEEEVFRLAGRSFRLVSRDQLERVLFDELGLPPIGKTEKTGKRSTSAAVLEALREVHPIVDKILQYRELAKLKGTYIDPLPALVHPKTGRLHTRFNQTATATGRLSSSDPNLQNIPVRTPLGQKIRRAFVAEEGWRLVALDYSQIELRVLAHLSGDENLIRVFQEGKDIHTQTASWMFGLGAEAIDPLMRRAAKTINFGVLYGMSAFRLSQELGIPYEEAAAFIQKYFQSYPKVKAWIEKTLEEGRTRGYVETLFGRRRYVPDLNARVKSVREAAERMAFNMPVQGTAADLMKLAMVRLFPQLREVGARMLLQVHDELLLEAPKERAEEVAALAKEVMEGVWPLAVPLEVEVGIGEDWLAAKG

SEQ ID NO: 2897 - DNA, 2529 bp, synthetic construct
  misc_feature 1..2529: note = Variant of DNA polymerase I from Thermus sp. strain 2.9
  source 1..2529: mol_type = other DNA
atgcaccatcatcatcatcatggcggtagcggcgtgttaccggtgttcgagcctaaaggtcgcgtgcttctggttgatggccatcatctcgcgtatcgtaacttctttgccctgaaaggattaaccaccagccgtggcgagccggtacagggtgtctacggctttgcaaagtcgctcctgaaagctctgcatgaggacggtgatgtggtgattgttgtctttgatgcgaaagcgccaagttttcgccacgaagcgtacgaagcttacaaagccgggcgtgctccaacgccggaagactttcctcgccaattggcgcttatgaaggaattagtggatttgcttggcctcgaacgcttggaagttcccggtttcgaggcagacgacgtattagcgactctcgcaaagaaagccgaacgtgagggctatgaagtccagatcttgacagcagatcgcgatcttttccagcttttatctccgcgcatctcggtgttacacccggaagggcatcgtatcaccccggaatggctctgggagaaatatggtttgcgtcccgaacaatgggtggattttcgcgccttagcaggcgatccgagcgacaatattccgggagttaaaggtatcggcgagaagacggcgctcaagctccttaaagaatgggggtcgttggagaacttgcttaagaatttagatcaggtcaaaccagagtcagtgcgtgagaagattcttgcacacctcgaagacctcaaattaagccgcgaattgtcccgtgtacgcaccgatttgccgctcgaagttgatttccgtcgccgccgcgaacctgactgggagggtcttaaagcgtttttagagcgtcttgaatttggttcgctcttgcatgatttcggccttttagaaagcccgttaccagccgaagaagcaccttggccaccgcccgaaggcgcgtttttaggttaccgtttgagtcgcccggaaccgatgtgggccgaattattggctcttgcagcgtctgcccagggacgtgtgtatcgcgcggaagaccctcatggtgcgctccgcggcctcttcgaagtccgtggactccttgccaaagacttagctgttgttgcattgcgcgaaggtcttgatttacctccgactgatgatccaatgcttcttgcgtacctcttggacccgtcaaacacgacgcccgaaggcgtagcccgtcgttacggcggcgagtggaccgaagatgcagcgaaacgcgcgttattggccgaacgtttgcacgccaatttattaggacgtttgcaaggcgaggaacgtctcctctggctttacgaagaagtggagaaaccattgagtcgcgtgctcgcgcatatggaagctaccggtgtcaaattagacgtggcgtatttggaggctctcagccttgaagttgctgccgaaatgcgccgcttggaggaagaagtattccgtttagcaggccattcctttcgccttaattctcgcgatcagttagaacgtgtgttgttcgatgaacttggtctccctcctatcggcaagacagagaagaccggtaaacgtagcacttcagcggcggttttagaagctcttcgcgaagtccatcccattgtggacaagatcttgcagtaccgcgaactcgcgaaattgaaaggcacctatattgaccctcttccggcattagtccacccgaaaacgggacgcctccatacccgcttcaaccaaacagccacggcgaccggtcgtttgtcctcctctgatccaaaccttcagaatattccagtacgtaccccattgggccagaagatccgccgcgcgtttgtagctgaggagggttggcgtttagtggccctcgattatagccaaattgaattacgtgtccttgcccatctttctggcgatgagaacctcatccgcgtgtttcaggaaggcaaagacattcacactcaaacggcaagctggatgtttggattatcagctgaagcgatcgatcctttgatgcgtcgtgcagcgaagaccatcaatttcggtgttctctacggtatgagtgcctttcgtttgtcgcaggaattaggcattccctatgaagaagctgcggcgttcattcagaaatactttcaaagctatcccaaagttaaagcatggatcgagaagactctcgaagaaggccgcacacgtggttacgtagagaccttatttggacgtcgccgctatgttcccgatttaaacgctcgcgtgaaatctgtccgtgaagccgccgaacgcatggcgttcaacatgcctgtacagggcacggcagctgacctcatgaaacttgcaatggtgcgcctttttccacaattgcgtgaagttggtgcccgcatgctcttgcaggtccacgatgaactcttgttagaagcgccaaaagagcgtgcggaagaggtggcagccctcgcgaaagaggttatggaaggcgtgtggcccttagcggtgcctcttgaagtcgaagttggtattggcgaggattggctggctgccaaaggataatga

SEQ ID NO: 2898 - protein, 841 aa, synthetic construct
  REGION 1..841: note = Variant of DNA polymerase I from Thermus sp. strain 2.9
MHHHHHHGGSGVLPVFEPKGRVLLVDGHHLAYRNFFALKGLTTSRGEPVQGVYGFAKSLLKALHEDGDVVIVVFDAKAPSFRHEAYEAYKAGRAPTPEDFPRQLALMKELVDLLGLERLEVPGFEADDVLATLAKKAEREGYEVQILTADRDLFQLLSPRISVLHPEGHRITPEWLWEKYGLRPEQWVDFRALAGDPSDNIPGVKGIGEKTALKLLKEWGSLENLLKNLDQVKPESVREKILAHLEDLKLSRELSRVRTDLPLEVDFRRRREPDWEGLKAFLERLEFGSLLHDFGLLESPLPAEEAPWPPPEGAFLGYRLSRPEPMWAELLALAASAQGRVYRAEDPHGALRGLFEVRGLLAKDLAVVALREGLDLPPTDDPMLLAYLLDPSNTTPEGVARRYGGEWTEDAAKRALLAERLHANLLGRLQGEERLLWLYEEVEKPLSRVLAHMEATGVKLDVAYLEALSLEVAAEMRRLEEEVFRLAGHSFRLNSRDQLERVLFDELGLPPIGKTEKTGKRSTSAAVLEALREVHPIVDKILQYRELAKLKGTYIDPLPALVHPKTGRLHTRFNQTATATGRLSSSDPNLQNIPVRTPLGQKIRRAFVAEEGWRLVALDYSQIELRVLAHLSGDENLIRVFQEGKDIHTQTASWMFGLSAEAIDPLMRRAAKTINFGVLYGMSAFRLSQELGIPYEEAAAFIQKYFQSYPKVKAWIEKTLEEGRTRGYVETLFGRRRYVPDLNARVKSVREAAERMAFNMPVQGTAADLMKLAMVRLFPQLREVGARMLLQVHDELLLEAPKERAEEVAALAKEVMEGVWPLAVPLEVEVGIGEDWLAAKG

SEQ ID NO: 2899 - DNA, 2529 bp, synthetic construct
  misc_feature 1..2529: note = Variant of DNA polymerase I from Thermus sp. strain 2.9
  source 1..2529: mol_type = other DNA
atgcaccatcatcatcatcatggcggtagcggcgtgttaccggtgttcgagcctaaaggtcgcgtgcttctggttgatggccatcatctcgcgtatcgtaacttctttgccctgaaaggattaaccaccagccgtggcgagccggtacagggtgtctacggctttgcaaagtcgctcctgaaagctctgaaagaagacggtgatgtggtgattgttgtctttgatgcgaaagcgccaagttttcgccacgaagcgtacgaagcttacaaagccgggcgtgctccaacgccggaagactttcctcgccaattggcgcttatgaaggaattagtggatttgcttggcctcgaacgcttggaagttcccggtttcgaggcagacgacgtattagcgactctcgcaaagaaagccgaacgtgagggctatgaagtccagatcttgacagcagatcgcgatcttttccagcttttatctccgcgcatctcggtgttacacccggaagggcatcgtatcaccccggaatggctctgggagaaatatggtttgcgtcccgaacaatgggtggattttcgcgccttagcaggcgatccgagcgacaatattccgggagttaaaggtatcggcgagaagacggcgctcaagctccttaaagaatgggggtcgttggagaacttgcttaagaatttagatcaggtcaaaccagagtcagtgcgtgagaagattcttgcacacctcgaagacctcaaattaagccgcgaattgtcccgtgtacgcaccgatttgccgctcgaagttgatttccgtggccgccgcgaacctgactgggagggtcttaaagcgtttttagagcgtcttgaatttggttcgctcttgcatgaattcggccttttagaaagcccgttaccagccgaagaagcaccttggccaccgcccgaaggcgcgtttttaggttaccgtttgagtcgcccggaaccgatgtgggccgaattattggctcttgcagcgtctgcccagggacgtgtgtatcgcgcggaagaccctcatggtgcgctccgcggcctcttcgaagtccgtggactccttgccaaagacttagctgttgttgcattgcgcgaaggtcttgatttacctccgactgatgatccaatgcttcttgcgtacctcttggacccgtcaaacacgacgcccgaaggcgtagcccgtcgttacggcggcgagtggaccgaagatgcagcgaaacgcgcgttattggccgaacgtttgcacgccaatttattaggacgtttgcaaggcgaggaacgtctcctctggctttacgaagaagtggagaaaccattgagtcgcgtgctcgcgcatatggaagctaccggtgtcaaattagacgtggcgtatttggaggctctcagccttgaagttgctgccgaaatgcgccgcttggaggaagaagtattccgtttagcaggccactcctttcgccttaattctcgcgatcagttagaacgtgtgttgttcgatgaacttggtctccctcctatcggcaagacagagaagaccggtaaacgtagcacttcagcggcggttttagaagctcttcgcgaagtccatcccattgtggacaagatcttgcaataccgcgaactcgcgaaattgaaaggcacctatattgaccctcttccggcattagtccacccgaaaacgggacgcctccatacccgcttcaaccaaacagccacggcgaccggtcgtttgtcctcctctgatccaaaccttcagaatattccagtacgtaccccattgggccagaagatccgccgcgcgtttgtagctgaggagggttggcgtttagtggccctcgattatagccaaattgaattacgtgtccttgcccatctttctggcgatgagaacctcatccgcgtgtttcaggaaggcaaagacattcacactcaaacggcaagctggatgtttggactgtcagctgaagcgatcgatcctttgatgcgtcgtgcagcgaagaccatcaatttcggtgttctctacggtatgagtgcctttcgtttgtcgcaggaattaggcattccctatgaagaagctgcggcgttcattcagaaatactttcaaagctatcccaaagttaaagcatggatcgagaagactctcgaagaaggccgcacacgtggttacgtagagaccttatttggacgtcgccgctatgttcccgatttaaacgctcgcgtgaaatctgtccgtgaagccgccgaacgcatggcgttcaacatgcctgtacagggcacggcagctgacctcatgaaacttgcaatggtgcgcctttttccacaattgcgtgaagttggtgcccgcatgctcttgcaggtccacgatgaactcttgttagaagcgccaaaagagcgtgcggaagaggtggcagccctcgcgaaagaggttatggaaggcgtgtggcccttagcggtgcctcttgaagtcgaagttggtattggcgaggattggctggctgccaaaggataatga

SEQ ID NO: 2900 - protein, 841 aa, synthetic construct; identical to SEQ ID NO: 2632
  REGION 1..841: note = Variant of DNA polymerase I from Thermus sp. strain 2.9

SEQ ID NO: 2901 - DNA, 2529 bp, synthetic construct
  misc_feature 1..2529: note = Variant of DNA polymerase I from Thermus sp. strain 2.9
  source 1..2529: mol_type = other DNA
atgcaccatcatcatcatcatggcggtagcggcgtgttaccggtgttcgagcctaaaggtcgcgtgcttctggttgatggccatcatctcgcgtatcgtaacttctttgccctgaaaggattaaccaccagccgtggcgagccggtacagggtgtctacggctttgcaaagtcgctcctgaaagctctgaaagaagacggtgatgtggtgattgttgtctttgatgcgaaagcgccaagttttcgccacgaagcgtacgaagcttacaaagccgggcgtgctccaacgccggaagactttcctcgccaattggcgcttatgaaggaattagtggatttgcttggcctcgaacgcttggaagttcccggtttcgaggcagacgacgtattagcgactctcgcaaagaaagccgaacgtgagggctatgaagtccagatcttgacagcagatcgcgatcttttccagcttttatctccgcgcatctcggtgttacacccggaagggcatcgtatcaccccggaatggctctgggagaaatatggtttgcgtcccgaacaatgggtggattttcgcgccttagcaggcgatccgagcgacaatattccgggagttaaaggtatcggcgagaagacggcgctcaagctccttaaagaatgggggtcgttggagaacttgcttaagaatttagatcaggtcaaaccagagtcagtgcgtgagaagattcttgcacacctcgaagacctcaaattaagccgcgaattgtcccgtgtacgcaccgatttgccgctcgaagttgatttccgtggccgccgcgaacctgactgggagggtcttaaagcgtttttagagcgtcttgaatttggttcgctcttgcatgaattcggccttttagaaagcccgttaccagccgaagaagcaccttggccaccgcccgaaggcgcgtttttaggttaccgtttgagtcgcccggaaccgatgtgggccgaattactggctcttgcagcgtctgcccagggacgtgtgtatcgcgcggaagaccctcatggtgcgctccgcggcctcttcgaagtccgtggactccttgccaaagacttagctgttgttgcattgcgcgaaggtcttgatttacctccgactgatgatccaatgcttcttgcgtacctcttggacccgtcaaacacgacgcccgaaggcgtagcccgtcgttacggcggcgagtggaccgaagatgcagcgaaacgcgcgttattggccgaacgtttgcacgccaatttattaggacgtttgcaaggcgaggaacgtctcctctggctttacgaagaagtggagaaaccattgagtcgcgtgctcgcgcatatggaagctaccggtgtcaaattagacgtggcgtatttggaggctctcagccttgaagttgctgccgaaatgcgccgcttggaggaagaagtattccgtttagcaggccattcctttcgccttaattctcgcgatcagttagaacgtgtgttgttcgatgaacttggtctccctcctatcggcaagacagagaagaccggtaaacgtagcacttcagcggcggttttagaagctcttcgcgaagtccatcccattgtggacaagatcttgcaataccgcgaactcgcgaaattgaaaggcacctatattgaccctcttccggcattagtccacccgaaaacgggacgcctccatacccgcttcaaccaaacagccacggcgaccggtcgtttgtcctcctctgatccaaaccttcagaatattccagtacgtaccccattgggccagaagatccgccgcgcgtttgtagctgaggagggttggcgtttagtggccctcgattatagccaaattgaattacgtgtccttgcccatctttctggcgatgagaacctcatccgcgtgtttcaggaaggcaaagacattcacactcaaacggcaagctggatgtttggagaatcagctgaagcgatcgatcctttgatgcgtcgtgcagcgaagaccatcaatttcggtgttctctacggtatgagtgcctttcgtttgtcgcaggaattaggcattccctatgaagaagctgcggcgttcattcagaaatactttcaaagctatcccaaagttaaagcatggatcgagaagactctcgaagaaggccgcacacgtggttacgtagagaccttatttggacgtcgccgctatgttcccgatttaaacgctcgcgtgaaatctgtccgtgaagccgccgaacgcatggcgttcaacatgcctgtacagggcacggcagctgacctcatgaaacttgcaatggtgcgcctttttccacaattgcgtgaagttggtgcccgcatgctcttgcaggtccacgatgaactcttgttagaagcgccaaaagagcgtgcggaagaggtggcagccctcgcgaaagaggttatggaaggcgtgtggcccttagcggtgcctcttgaagtcgaagttggtattggcgaggattggctggctgccaaaggataatga

SEQ ID NO: 2902 - protein, 841 aa, synthetic construct; identical to SEQ ID NO: 2504
  REGION 1..841: note = Variant of DNA polymerase I from Thermus sp. strain 2.9

SEQ ID NO: 2903 - DNA, 2529 bp, synthetic construct
  misc_feature 1..2529: note = Variant of DNA polymerase I from Thermus sp. strain 2.9
  source 1..2529: mol_type = other DNA
atgcaccatcatcatcatcatggcggtagcggcgtgttaccggtgttcgagcctaaaggtcgcgtgcttctggttgatggccatcatctcgcgtatcgtaacttctttgccctgaaaggattaaccaccagccgtggcgagccggtacagggtgtctacggctttgcaaagtcgctcctgaaagctctgaaagaagacggtgatgtggtgattgttgtctttgatgcgaaagcgccaagttttcgccacgaagcgtacgaagcttacaaagccgggcgtgctccaacgccggaagactttcctcgccaattggcgcttatgaaggaattagtggatttgcttggcctcgaacgcttggaagttcccggtttcgaggcagacgacgtattagcgactctcgcaaagaaagccgaacgtgagggctatgaagtccagatcttgacagcagatcgcgatcttttccagcttttatctccgcgcatctcggtgttacacccggaagggcatcgtatcaccccggaatggctctgggagaaatatggtttgcgtcccgaacaatgggtggattttcgcgccttagcaggcgatccgagcgacaatattccgggagttaaaggtatcggcgagaagacggcgctcaagctccttaaagaatgggggtcgttggagaacttgcttaagaatttagatcaggtcaaaccagagtcagtgcgtgagaagattcttgcacacctcgaagacctcaaattaagccgcgaattgtcccgtgtacgcaccgatttgccgctcgaagttgatttccgtcgccgccgcgaacctgactgggagggtcttaaagcgtttttactgcgtcttgaatttggttcgctcttgcatgaattcggccttttagaaagcccgttaccagccgaagaagcaccttggccaccgcccgaaggcgcgtttttaggttaccgtttgagtcgcccggaaccgatgtgggccgaattattggctcttgcagcgtctgcccagggacgtgtgtatcgcgcggaagaccctcatggtgcgctccgcggcctcttcgaagtccgtggactccttgccaaagacttagctgttgttgcattgcgcgaaggtcttgatttacctccgactgatgatccaatgcttcttgcgtacctcttggacccgtcaaacacgacgcccgaaggcgtagcccgtcgttacggcggcgagtggaccgaagatgcagcgaaacgcgcgttattggccgaacgtttgcacgccaatttattaggacgtttgcaaggcgaggaacgtctcctctggctttacgaagaagtggagaaaccattgagtcgcgtgctcgcgcatatggaagctaccggtgtcaaattagacgtggcgtatttggaggctctcagccttgaagttgctgccgaaatgcgccgcttggaggaagaagtattccgtttagcaggccattcctttcgccttaattctcgcgatcagttagaacgtgtgttgttcgatgaacttggtctccctcctatcggcaagacagagaagaccggtaaacgtagcacttcagcggcggttttagaagctcttcgcgaagtccatcccattgtggacaagatcttgcagtaccgcgaactcgcgaaattgaaaggcacctatattgaccctcttccggcattagtccacccgaaaacgggacgcctccatacccgcttcaaccaaacagccacggcgaccggtcgtttgtcctcctctgatccaaaccttcagaatattccagtacgtaccccattgggccagaagatccgccgcgcgtttgtagctgaggagggttggcgtttagtggccctcgattatagccaaattgaattacgtgtccttgcccatctttctggcgatgagaacctcatccgcgtgtttcaggaaggcaaagacattcacactcaaacggcaagctggatgtttggattatcagctgaagcgatcgatcctttgatgcgtcgtgcagcgaagaccatcaatttcggtgttctctacggtatgagtgcctttcgtttgtcgcaggaattaggcattccctatgaagaagctgcggcgttcattcagaaatactttcaaagctatcccaaagttaaagcatggatcgagaagactctcgaagaaggccgcacacgtggttacgtagagaccttatttggacgtcgccgctatgttcccgatttaaacgctcgcgtgaaatctgtccgtgaagccgccgaacgcatggcgttcaacatgcctgtacagggcacggcagctgacctcatgaaacttgcaatggtgcgcctttttccacaattgcgtgaagttggtgcccgcatgctcttgcaggtccacgatgaactcttgttagaagcgccaaaagagcgtgcggaagaggtggcagccctcgcgaaagaggttatggaaggcgtgtggcccttagcggtgcctcttgaagtcgaagttggtattggcgaggattggctggctgccaaaggataatga

SEQ ID NO: 2904 - protein, 841 aa, synthetic construct
  REGION 1..841: note = Variant of DNA polymerase I from Thermus sp. strain 2.9
MHHHHHHGGSGVLPVFEPKGRVLLVDGHHLAYRNFFALKGLTTSRGEPVQGVYGFAKSLLKALKEDGDVVIVVFDAKAPSFRHEAYEAYKAGRAPTPEDFPRQLALMKELVDLLGLERLEVPGFEADDVLATLAKKAEREGYEVQILTADRDLFQLLSPRISVLHPEGHRITPEWLWEKYGLRPEQWVDFRALAGDPSDNIPGVKGIGEKTALKLLKEWGSLENLLKNLDQVKPESVREKILAHLEDLKLSRELSRVRTDLPLEVDFRRRREPDWEGLKAFLLRLEFGSLLHEFGLLESPLPAEEAPWPPPEGAFLGYRLSRPEPMWAELLALAASAQGRVYRAEDPHGALRGLFEVRGLLAKDLAVVALREGLDLPPTDDPMLLAYLLDPSNTTPEGVARRYGGEWTEDAAKRALLAERLHANLLGRLQGEERLLWLYEEVEKPLSRVLAHMEATGVKLDVAYLEALSLEVAAEMRRLEEEVFRLAGHSFRLNSRDQLERVLFDELGLPPIGKTEKTGKRSTSAAVLEALREVHPIVDKILQYRELAKLKGTYIDPLPALVHPKTGRLHTRFNQTATATGRLSSSDPNLQNIPVRTPLGQKIRRAFVAEEGWRLVALDYSQIELRVLAHLSGDENLIRVFQEGKDIHTQTASWMFGLSAEAIDPLMRRAAKTINFGVLYGMSAFRLSQELGIPYEEAAAFIQKYFQSYPKVKAWIEKTLEEGRTRGYVETLFGRRRYVPDLNARVKSVREAAERMAFNMPVQGTAADLMKLAMVRLFPQLREVGARMLLQVHDELLLEAPKERAEEVAALAKEVMEGVWPLAVPLEVEVGIGEDWLAAKG

SEQ ID NO: 2905 - DNA, 2529 bp, synthetic construct
  misc_feature 1..2529: note = Variant of DNA polymerase I from Thermus sp. strain 2.9
  source 1..2529: mol_type = other DNA
atgcaccatcatcatcatcatggcggtagcggcgtgttaccggtgttcgagcctaaaggtcgcgtgcttctggttgatggccatcatctcgcgtatcgtaacttctttgccctgaaaggattaaccaccagccgtggcgagccggtacagggtgtctacggctttgcaaagtcgctcctgaaagctctgaaagaagacggtgatgtggtgattgttgtctttgatgcgaaagcgccaagttttcgccacgaagcgtacgaagcttacaaagccgggcgtgctccaacgccggaagactttcctcgccaattggcgcttatgaaggaattagtggatttgcttggcctcgaacgcttggaagttcccggtttcgaggcagacgacgtattagcgactctcgcaaagaaagccgaacgtgagggctatgaagtccagatcttgacagcagatcgcgatcttttccagcttttatctccgcgcatctcggtgttacacccggaagggcatcgtatcaccccggaatggctctgggagaaatatggtttgcgtcccgaacaatgggtggattttcgcgccttagcaggcgatccgagcgacaatattccgggagttaaaggtatcggcgagaagacggcgctcaagctccttaaagaatgggggtcgttggagaacttgcttaagaatttagatcaggtcaaaccagagtcagtgcgtgagaagattcttgcacacctcgaagacctcaaattaagccgcgaattgtcccgtgtacgcaccgatttgccgctcgaagttgatttccgtcgccgccgcgaacctgactgggagggtcttaaagcgtttttagctcgtcttgaatttggttcgctcttgcatgaattcggccttttagaaagcccgttaccagccgaagaagcaccttggccaccgcccgaaggcgcgtttttaggttaccgtttgagtcgcccggaaccgatgtgggccgaattattggctcttgcagcgtctgcccagggacgtgtgtatcgcgcggaagaccctcatggtgcgctccgcggcctcttcgaagtccgtggactccttgccaaagacttagctgttgttgcattgcgcgaaggtcttgatttacctccgactgatgatccaatgcttcttgcgtacctcttggacccgtcaaacacgacgcccgaaggcgtagcccgtcgttacggcggcgagtggaccgaagatgcagcgaaacgcgcgttattggccgaacgtttgcacgccaatttattaggacgtttgcaaggcgaggaacgtctcctctggctttacgaagaagtggagaaaccattgagtcgcgtgctcgcgcatatggaagctaccggtgtcaaattagacgtggcgtatttggaggctctcagccttgaagttgctgccgaaatgcgccgcttggaggaagaagtattccgtttagcaggccattcctttcgccttaattctcgcgatcagttagaacgtgtgttgttcgatgaacttggtctccctcctatcggcaagacagagaagaccggtaaacgtagcacttcagcggcggttttagaagctcttcgcgaagtccatcccattgtggacaagatcttgcagtaccgcgaactcgcgaaattgaaaggcacctatattgaccctcttccggcattagtccacccgaaaacgggacgcctccatacccgcttcaaccaaacagccacggcgaccggtcgtttgtcctcctctgatccaaaccttcagaatattccagtacgtaccccattgggccagaagatccgccgcgcgtttgtagctgaggagggttggcgtttagtggccctcgattatagccaaattgaattacgtgtccttgcccatctttctggcgatgagaacctcatccgcgtgtttcaggaaggcaaagacattcacactcaaacggcaagctggatgtttggattatcagctgaagcgatcgatcctttgatgcgtcgtgcagcgaagaccatcaatttcggtgttctctacggtatgagtgcctttcgtttgtcgcaggaattaggcattccctatgaagaagctgcggcgttcattcagaaatactttcaaagctatcccaaagttaaagcatggatcgagaagactctcgaagaaggccgcacacgtggttacgtagagaccttatttggacgtcgccgctatgttcccgatttaaacgctcgcgtgaaatctgtccgtgaagccgccgaacgcatggcgttcaacatgcctgtacagggcacggcagctgacctcatgaaacttgcaatggtgcgcctttttccacaattgcgtgaagttggtgcccgcatgctcttgcaggtccacgatgaactcttgttagaagcgccaaaagagcgtgcggaagaggtggcagccctcgcgaaagaggttatggaaggcgtgtggcccttagcggtgcctcttgaagtcgaagttggtattggcgaggattggctggctgccaaaggataatga

SEQ ID NO: 2906 - protein, 841 aa, synthetic construct
  REGION 1..841: note = Variant of DNA polymerase I from Thermus sp. strain 2.9
MHHHHHHGGSGVLPVFEPKGRVLLVDGHHLAYRNFFALKGLTTSRGEPVQGVYGFAKSLLKALKEDGDVVIVVFDAKAPSFRHEAYEAYKAGRAPTPEDFPRQLALMKELVDLLGLERLEVPGFEADDVLATLAKKAEREGYEVQILTADRDLFQLLSPRISVLHPEGHRITPEWLWEKYGLRPEQWVDFRALAGDPSDNIPGVKGIGEKTALKLLKEWGSLENLLKNLDQVKPESVREKILAHLEDLKLSRELSRVRTDLPLEVDFRRRREPDWEGLKAFLARLEFGSLLHEFGLLESPLPAEEAPWPPPEGAFLGYRLSRPEPMWAELLALAASAQGRVYRAEDPHGALRGLFEVRGLLAKDLAVVALREGLDLPPTDDPMLLAYLLDPSNTTPEGVARRYGGEWTEDAAKRALLAERLHANLLGRLQGEERLLWLYEEVEKPLSRVLAHMEATGVKLDVAYLEALSLEVAAEMRRLEEEVFRLAGHSFRLNSRDQLERVLFDELGLPPIGKTEKTGKRSTSAAVLEALREVHPIVDKILQYRELAKLKGTYIDPLPALVHPKTGRLHTRFNQTATATGRLSSSDPNLQNIPVRTPLGQKIRRAFVAEEGWRLVALDYSQIELRVLAHLSGDENLIRVFQEGKDIHTQTASWMFGLSAEAIDPLMRRAAKTINFGVLYGMSAFRLSQELGIPYEEAAAFIQKYFQSYPKVKAWIEKTLEEGRTRGYVETLFGRRRYVPDLNARVKSVREAAERMAFNMPVQGTAADLMKLAMVRLFPQLREVGARMLLQVHDELLLEAPKERAEEVAALAKEVMEGVWPLAVPLEVEVGIGEDWLAAKG

SEQ ID NO: 2907 - DNA, 2529 bp, synthetic construct
  misc_feature 1..2529: note = Variant of DNA polymerase I from Thermus sp. strain 2.9
  source 1..2529: mol_type = other DNA
atgcaccatcatcatcatcatggcggtagcggcgtgttaccggtgttcgagcctaaaggtcgcgtgcttctggttgatggccatcatctcgcgtatcgtaacttctttgccctgaaaggattaaccaccagccgtggcgagccggtacagggtgtctacggctttgcaaagtcgctcctgaaagctctgaaagaggacggtgatgtggtgattgttgtctttgatgcgaaagcgccaagttttcgccacgaagcgtacgaagcttacaaagccgggcgtgctccaacgccggaagactttcctcgccaattggcgcttatgaagcatttagtggatttgcttggcctcgaacgcttggaagttcccggtttcgaggcagacgacgtattagcgactctcgcaaagaaagccgaacgtgagggctatgaagtccagatcttgacagcagatcgcgatcttttccagcttttatctccgcgcatctcggtgttacacccggaagggcatcgtatcaccccggaatggctctgggagaaatatggtttgcgtcccgaacaatgggtggattttcgcgccttagcaggcgatccgagcgacaatattccgggagttaaaggtatcggcgagaagacggcgctcaagctccttaaagaatgggggtcgttggagaacttgcttaagaatttagatcaggtcaaaccagagtcagtgcgtgagaagattcttgcacacctcgaagacctcaaattaagccgcgaattgtcccgtgtacgcaccgatttgccgctcgaagttgatttccgtcgccgccgcgaacctgactgggagggtcttaaagcgtttttagagcgtcttgaatttggttcgctcttgcatgaattcggccttttagaaagcccgttaccagccgaagaagcaccttggccaccgcccgaaggcgcgtttttaggttaccgtttgagtcgcccggaaccgatgtgggccgaattactggctcttgcagcgtctgcccagggacgtgtgtatcgcgcggaagaccctcatggtgcgctccgcggcctcttcgaagtccgtggactccttgccaaagacttagctgttgttgcattgcgcgaaggtcttgatttacctccgactgatgatccaatgcttcttgcgtacctcttggacccgtcaaacacgacgcccgaaggcgtagcccgtcgttacggcggcgagtggaccgaagatgcagcgaaacgcgcgttattggccgaacgtttgcacgagaatttattaggacgtttgcaaggcgaggaacgtctcctctggctttacgaagaagtggagaaaccattgagtcgcgtgctcgcgcatatggaagctaccggtgtcaaattagacgtggcgtatttggaggctctcagccttgaagttgctgccgaaatgcgccgcttggaggaagaagtattccgtttagcaggccactcctttcgccttaattctcgcgatcagttagaacgtgtgttgttcgatgaacttggtctccctcctatcggcaagacagagaagaccggtaaacgtagcacttcagcggcggttttagaagctcttcgcgaagtccatcccattgtggacaagatcttgcagtaccgcgaactcgcgaaattgaaaggcacctatattgaccctcttccggcattagtccacccgaaaacgggacgcctccatacccgcttcaaccaaacagccacggcgaccggtcgtttgtcctcctctgatccaaaccttcagaatattccagtacgtaccccattgggccagaagatccgccgcgcgtttgtagctgaggagggttggcgtttagtggccctcgattatagccaaattgaattacgtgtccttgcccatctttctggcgatgagaacctcatccgcgtgtttcaggaaggcaaagacattcacactcaaacggcaagctggatgtttggattatcagctgaagcgatcgatcctttgatgcgtcgtgcagcgaagaccatcaatttcggtgttctctacggtatgagtgcctttcgtttgtcgcaggaattaggcattccctatgaagaagctgcggcgttcattcagaaatactttcaaagctatcccaaagttaaagcatggatcgagaagactctcgaagaaggccgcacacgtggttacgtagagaccttatttggacgtcgccgctatgttcccgatttaaacgctcgcgtgaaatctgtccgtgaagccgccgaacgcatggcgttcaacatgcctgtacagggcacggcagctgacctcatgaaacttgcaatggtgcgcctttttccacaattgcgtgaagttggtgcccgcatgctcttgcaggtccacgatgaactcttgttagaagcgccaaaagagcgtgcggaagaggtggcagccctcgcgaaagaagttatggaaggcgtgtggcccttagcggtgcctcttgaagtcgaagttggtattggcgaggattggctggctgccaaaggataatga

SEQ ID NO: 2908 - protein, 841 aa, synthetic construct
  REGION 1..841: note = Variant of DNA polymerase I from Thermus sp. strain 2.9
MHHHHHHGGSGVLPVFEPKGRVLLVDGHHLAYRNFFALKGLTTSRGEPVQGVYGFAKSLLKALKEDGDVVIVVFDAKAPSFRHEAYEAYKAGRAPTPEDFPRQLALMKHLVDLLGLERLEVPGFEADDVLATLAKKAEREGYEVQILTADRDLFQLLSPRISVLHPEGHRITPEWLWEKYGLRPEQWVDFRALAGDPSDNIPGVKGIGEKTALKLLKEWGSLENLLKNLDQVKPESVREKILAHLEDLKLSRELSRVRTDLPLEVDFRRRREPDWEGLKAFLERLEFGSLLHEFGLLESPLPAEEAPWPPPEGAFLGYRLSRPEPMWAELLALAASAQGRVYRAEDPHGALRGLFEVRGLLAKDLAVVALREGLDLPPTDDPMLLAYLLDPSNTTPEGVARRYGGEWTEDAAKRALLAERLHENLLGRLQGEERLLWLYEEVEKPLSRVLAHMEATGVKLDVAYLEALSLEVAAEMRRLEEEVFRLAGHSFRLNSRDQLERVLFDELGLPPIGKTEKTGKRSTSAAVLEALREVHPIVDKILQYRELAKLKGTYIDPLPALVHPKTGRLHTRFNQTATATGRLSSSDPNLQNIPVRTPLGQKIRRAFVAEEGWRLVALDYSQIELRVLAHLSGDENLIRVFQEGKDIHTQTASWMFGLSAEAIDPLMRRAAKTINFGVLYGMSAFRLSQELGIPYEEAAAFIQKYFQSYPKVKAWIEKTLEEGRTRGYVETLFGRRRYVPDLNARVKSVREAAERMAFNMPVQGTAADLMKLAMVRLFPQLREVGARMLLQVHDELLLEAPKERAEEVAALAKEVMEGVWPLAVPLEVEVGIGEDWLAAKG

SEQ ID NO: 2909 - DNA, 2529 bp, synthetic construct
  misc_feature 1..2529: note = Variant of DNA polymerase I from Thermus sp. strain 2.9
  source 1..2529: mol_type = other DNA
atgcaccatcatcatcatcatggcggtagcggcgtgttaccggtgttcgagcctaaaggtcgcgtgcttctggttgatggccatcatctcgcgtatcgtaacttctttgccctgaaaggattaaccaccagccgtggcgagccggtacagggtgtctacggctttgcaaagtcgctcctgaaagctctgaaagaagacggtgatgtggtgattgttgtctttgatgcgaaagcgccaagttttcgccacgaagcgtacgaagcttacaaagccgggcgtgctccaacgccggaagactttcctcgccaattggcgcttatgaaggaattagtggatttgcttggcctcgaacgcttggaagttcccggtttcgaggcagacgacgtattagcgactctcgcaaagaaagccgaacgtgagggctatgaagtccagatcttgacagcagatcgcgatcttttccagcttttatctccgcgcatctcggtgttacacccggaagggcatcgtatcaccccggaatggctctgggagaaatatggtttgcgtcccgaacaatgggtggattttcgcgccttagcaggcgatccgagcgacaatattccgggagttaaaggtatcggcgagaagacggcgctcaagctccttaaagaatgggggtcgttggagaacttgcttaagaatttagatcaggtcaaaccagagtcagtgcgtgagaagattcttgcacacctcgaagacctcaaattaagccgcgaattgtcccgtgtacgcaccgatttgccgctcgaagttgatttccgtcgccgccgcgaacctgactgggagggtcttaaagcgtttttagagcgtcttgaatttggttcgctcttgcatgaattcggccttttagaaagcccgttaccagccgaagaagcaccttggccaccgcccgaaggcgcgtttttaggttaccgtttgagtcgcccggaaccgatgtgggccgaattattggctcttgcagcgtctgcccagggacgtgtgtatcgcgcggaagaccctcatggtgcgctccgcggcctcttcgaagtccgtggactccttgccaaagacttagctgttgttgcattgcgcgaaggtcttgatttacctccgactgatgatccaatgcttcttgcgtacctcttggacccgtcaaacacgacgcccgaaggcgtagcccgtcgttacggcggcgagtggaccgaagatgcagcgaaacgcgcgttattggccgaacgtttgcacgccaatttattaggacgtttgcaaggcgaggaacgtctcctctggctttacgaagaagtggagaaaccattgagtcgcgtgctcgcgcatatggaagctaccggtgtcaaattagacgtggcgtatttggagaacctcagccttgaagttgctgccgaaatgcgccgcttggaggaagaagtattccgtttagcaggccattcctttcgccttaattctcgcgatcagttagaacgtgtgttgttcgatgaacttggtctccctcctatcggcaagacagagaagaccggtaaacgtagcacttcagcggcggttttagaagctcttcgcgaagtccatcccattgtggacaagatcttgcagtaccgcgaactcgcgaaattgaaaggcacctatattgaccctcttccggcattagtccacccgaaaacgggacgcctccatacccgcttcaaccaaacagccacggcgaccggtcgtttgtcctcctctgatccaaaccttcagaatattccagtacgtaccccattgggccagaagatccgccgcgcgtttgtagctgaggagggttggcgtttagtggccctcgattatagccaaattgaattacgtgtccttgcccatctttctggcgatgagaacctcatccgcgtgtttcaggaaggcaaagacattcacactcaaacggcaagctggatgtttggattatcagctgaagcgatcgatcctttgatgcgtcgtgcagcgaagaccatcaatttcggtgttctctacggtatgagtgcctttcgtttgtcgcaggaattaggcattccctatgaagaagctgcggcgttcattcagaaatactttcaaagctatcccaaagttaaagcatggatcgagaagactctcgaagaaggccgcacacgtggttacgtagagaccttatttggacgtcgccgctatgttcccgatttaaacgctcgcgtgaaatctgtccgtgaagccgccgaacgcatggcgttcaacatgcctgtacagggcacggcagctgacctcatgaaacttgcaatggtgcgcctttttccacaattgcgtgaagttggtgcccgcatgctcttgcaggtccacgatgaactcttgttagaagcgccaaaagagcgtgcggaagaggtggcagccctcgcgaaagaggttatggaaggcgtgtggcccttagcggtgcctcttgaagtcgaagttggtattggcgaggattggctggctgccaaaggataatga

SEQ ID NO: 2910 - protein, 841 aa, synthetic construct
  REGION 1..841: note = Variant of DNA polymerase I from Thermus sp. strain 2.9
MHHHHHHGGSGVLPVFEPKGRVLLVDGHHLAYRNFFALKGLTTSRGEPVQGVYGFAKSLLKALKEDGDVVIVVFDAKAPSFRHEAYEAYKAGRAPTPEDFPRQLALMKELVDLLGLERLEVPGFEADDVLATLAKKAEREGYEVQILTADRDLFQLLSPRISVLHPEGHRITPEWLWEKYGLRPEQWVDFRALAGDPSDNIPGVKGIGEKTALKLLKEWGSLENLLKNLDQVKPESVREKILAHLEDLKLSRELSRVRTDLPLEVDFRRRREPDWEGLKAFLERLEFGSLLHEFGLLESPLPAEEAPWPPPEGAFLGYRLSRPEPMWAELLALAASAQGRVYRAEDPHGALRGLFEVRGLLAKDLAVVALREGLDLPPTDDPMLLAYLLDPSNTTPEGVARRYGGEWTEDAAKRALLAERLHANLLGRLQGEERLLWLYEEVEKPLSRVLAHMEATGVKLDVAYLENLSLEVAAEMRRLEEEVFRLAGHSFRLNSRDQLERVLFDELGLPPIGKTEKTGKRSTSAAVLEALREVHPIVDKILQYRELAKLKGTYIDPLPALVHPKTGRLHTRFNQTATATGRLSSSDPNLQNIPVRTPLGQKIRRAFVAEEGWRLVALDYSQIELRVLAHLSGDENLIRVFQEGKDIHTQTASWMFGLSAEAIDPLMRRAAKTINFGVLYGMSAFRLSQELGIPYEEAAAFIQKYFQSYPKVKAWIEKTLEEGRTRGYVETLFGRRRYVPDLNARVKSVREAAERMAFNMPVQGTAADLMKLAMVRLFPQLREVGARMLLQVHDELLLEAPKERAEEVAALAKEVMEGVWPLAVPLEVEVGIGEDWLAAKG

SEQ ID NO: 2911 - DNA, 2529 bp, synthetic construct
  misc_feature 1..2529: note = Variant of DNA polymerase I from Thermus sp. strain 2.9
  source 1..2529: mol_type = other DNA
atgcaccatcatcatcatcatggcggtagcggcgtgttaccggtgttcgagcctaaaggtcgcgtgcttctggttgatggccatcatctcgcgtatcgtaacttctttgccctgaaaggattaaccaccagccgtggcgagccggtacagggtgtctacggctttgcaaagtcgctcctgaaagctctgaaagaagacggtgatgtggtgattgttgtctttgatgcgaaagcgccaagttttcgccacgaagcgtacgaagcttacaaagccgggcgtgctccaacgccggaagactttcctcgccaattggcgcttatgaaggaattagtggatttgcttggcctcgaacgcttggaagttcccggtttcgaggcagacgacgtattagcgactctcgcaaagaaagccgaacgtgagggctatgaagtccagatcttgacagcagatcgcgatcttttccagcttttatctccgcgcatctcggtgttacacccggaagggcatcgtatcaccccggaatggctctgggagaaatatggtttgcgtcccgaacaatgggtggattttcgcgccttagcaggcgatccgagcgacaatattccgggagttaaaggtatcggcgagaagacggcgctcaagctccttaaagaatgggggtcgttggagaacttgcttaagaatttagatcaggtcaaaccagagtcagtgcgtgagaagattcttgcacacctcgaagacctcaaattaagccgcgaattgtcccgtgtacgcaccgatttgccgctcgaagttgatttccgtcgccgccgcgaacctgactgggagggtcttaaagcgtttttagagcgtcttgaatttggttcgctcttgcatgaattcggccttttagaaagcccgttaccagccgaagaagcaccttggccaccgcccgaaggcgcgtttttaggttaccgtttgagtcgcccggaaccgatgtgggccagtttattggctcttgcagcgtctgcccagggacgtgtgtatcgcgcggaagaccctcatggtgcgctccgcggcctcttcgaagtccgtggactccttgccaaagacttagctgttgttgcattgcgcgaaggtcttgatttacctccgactgatgatccaatgcttcttgcgtacctcttggacccgtcaaacacgacgcccgaaggcgtagcccgtcgttacggcggcgagtggaccgaagatgcagcgaaacgcgcgttattggccgaacgtttgcacgccaatttattaggacgtttgcaaggcgaggaacgtctcctctggctttacgaagaagtggagaaaccattgagtcgcgtgctcgcgcatatggaagctaccggtgtcaaattagacgtggcgtatttggaggctctcagccttgaagttgctgccgaaatgcgccgcttggaggaagaagtattccgtttagcaggccattcctttcgccttaattctcgcgatcagttagaacgtgtgttgttcgatgaacttggtctccctcctatcggcaagacagagaagaccggtaaacgtagcacttcagcggcggttttagaagctcttcgcgaagtccatcccattgtggacaagatcttgcagtaccgcgaactcgcgaaattgaaaggcacctatattgaccctcttccggcattagtccacccgaaaacgggacgcctccatacccgcttcaaccaaacagccacggcgaccggtcgtttgtcctcctctgatccaaaccttcagaatattccagtacgtaccccattgggccagaagatccgccgcgcgtttgtagctgaggagggttggcgtttagtggccctcgattatagccaaattgaattacgtgtccttgcccatctttctggcgatgagaacctcatccgcgtgtttcaggaaggcaaagacattcacactcaaacggcaagctggatgtttggattatcagctgaagcgatcgatcctttgatgcgtcgtgcagcgaagaccatcaatttcggtgttctctacggtatgagtgcctttcgtttgtcgcaggaattaggcattccctatgaagaagctgcggcgttcattcagaaatactttcaaagctatcccaaagttaaagcatggatcgagaagactctcgaagaaggccgcacacgtggttacgtagagaccttatttggacgtcgccgctatgttcccgatttaaacgctcgcgtgaaatctgtccgtgaagccgccgaacgcatggcgttcaacatgcctgtacagggcacggcagctgacctcatgaaacttgcaatggtgcgcctttttccacaattgcgtgaagttggtgcccgcatgctcttgcaggtccacgatgaactcttgttagaagcgccaaaagagcgtgcggaagaggtggcagccctcgcgaaagaggttatggaaggcgtgtggcccttagcggtgcctcttgaagtcgaagttggtattggcgaggattggctggctgccaaaggataatga

SEQ ID NO: 2912 - protein, 841 aa, synthetic construct; identical to SEQ ID NO: 2356
  REGION 1..841: note = Variant of DNA polymerase I from Thermus sp. strain 2.9

SEQ ID NO: 2913 - DNA, 2529 bp, synthetic construct
  misc_feature 1..2529: note = Variant of DNA polymerase I from Thermus sp. strain 2.9
  source 1..2529: mol_type = other DNA
atgcaccatcatcatcatcatggcggtagcggcgtgttaccggtgttcgagcctaaaggtcgcgtgcttctggttgatggccatcatctcgcgtatcgtaacttctttgccctgaaaggattaaccaccagccgtggcgagccggtacagggtgtctacggctttgcaaagtcgctcctgaaagctctgaaagaagacggtgatgtggtgattgttgtctttgatgcgaaagcgccaagttttcgccacgaagcgtacgaagcttacaaagccgggcgtgctccaacgccggaagactttcctcgccaattggcgcttatgaaggaattagtggatttgcttggcctcgaacgcttggaagttcccggtttcgaggcagacgacgtattagcgactctcgcaaagaaagccgaacgtgagggctatgaagtccagatcttgacagcagatcgcgatcttttccagcttttatctccgcgcatctcggtgttacacccggaagggcatcgtatcaccccggaatggctctgggagaaatatggtttgcgtcccgaacaatgggtggattttcgcgccttagcaggcgatccgagcgacaatattccgggagttaaaggtatcggcgagaagacggcgctcaagctccttaaagaatgggggtcgttggagaacttgcttaagaatttagatcaggtcaaaccagagtcagtgcgtgagaagattcttgcacacctcgaagacctcaaattaagccgcgaattgtcccgtgtacgcaccgatttgccgctcgaagttgatttccgtcgccgccgcgaacctgactgggagggtcttaaagcgtttttagagcgtcttgaatttggttcgctcttgcatgaattcggccttttagaaagcccgttaccagccgaagaagcaccttggccaccgcccgaaggcgcgtttttaggttaccgtttgagtcgcccggaaccgatgtgggccgaattattggctcttgcagcgtctgcccagggacgtgtgtatcgcgcggaagaccctcatggtgcgctccgcggcctcttcgaagtccgtggactccttgccaaagacttagctgttgttgcattgcgcgaaggtcttgatttacctccgactgatgatccaatgcttcttgcgtacctcttggacccgtcaaacacgacgcccgaaggcgtagcccgtcgttacggcggcgagtggaccgaagatgcagcgaaacgcgcgttattggccgaacgtttgcacgccaatttattaggacgtttgcaaggcgaggaacgtctcctctggctttacgaagaagtggagaaaccattgagtcgcgtgctcgcgcatatggaagctaccggtgtcaaattagacgtggcgtatttggaggctctcagccttgaagttgctgccgaaatgcgccgcttggaggaagaagtattccgtttagcaggccattcctttcgccttaattctcgcgatcagttagaacgtgtgttgttcgatgaacttggtctccctcctatcggcaagacagagaagaccggtaaacgtagcacttcagcggcggttttagaagctcttcgcgaagtccatcccattgtggacaagatcttgcagtaccgcgaactcgcgaaattgaaaggcacctatattgaccctcttccggcattagtccacccgaaaacgggacgcctccatacccgcttcaaccaaacagccacggcgaccggtcgtttgtcctcctctgatccaaaccttcagaatattccagtacgtaccccattgggccagaagatccgccgcgcgtttgtagctgaggagggttggcgtttagtggccctcgattatagccaaattgaattacgtgtccttgcccatctttctggcgatgagaacctcatccgcgtgtttcaggaaggcaaagacattcacactcaaacggcaagctggatgtttggattatcagctgaagcgatcgatcctgagatgcgtcgtgcagcgaagaccatcaatttcggtgttctctacggtatgagtgcctttcgtttgtcgcaggaattaggcattccctatgaagaagctgcggcgttcattcagaaatactttcaaagctatcccaaagttaaagcatggatcgagaagactctcgaagaaggccgcacacgtggttacgtagagaccttatttggacgtcgccgctatgttcccgatttaaacgctcgcgtgaaatctgtccgtgaagccgccgaacgcatggcgttcaacatgcctgtacagggcacggcagctgacctcatgaaacttgcaatggtgcgcctttttccacaattgcgtgaagttggtgcccgcatgctcttgcaggtccacgatgaactcttgttagaagcgccaaaagagcgtgcggaagaggtggcagccctcgcgaaagaggttatggaaggcgtgtggcccttagcggtgcctcttgaagtcgaagttggtattggcgaggattggctggctgccaaaggataatga

SEQ ID NO: 2914 - protein, 841 aa, synthetic construct
  REGION 1..841: note = Variant of DNA polymerase I from Thermus sp. strain 2.9
MHHHHHHGGSGVLPVFEPKGRVLLVDGHHLAYRNFFALKGLTTSRGEPVQGVYGFAKSLLKALKEDGDVVIVVFDAKAPSFRHEAYEAYKAGRAPTPEDFPRQLALMKELVDLLGLERLEVPGFEADDVLATLAKKAEREGYEVQILTADRDLFQLLSPRISVLHPEGHRITPEWLWEKYGLRPEQWVDFRALAGDPSDNIPGVKGIGEKTALKLLKEWGSLENLLKNLDQVKPESVREKILAHLEDLKLSRELSRVRTDLPLEVDFRRRREPDWEGLKAFLERLEFGSLLHEFGLLESPLPAEEAPWPPPEGAFLGYRLSRPEPMWAELLALAASAQGRVYRAEDPHGALRGLFEVRGLLAKDLAVVALREGLDLPPTDDPMLLAYLLDPSNTTPEGVARRYGGEWTEDAAKRALLAERLHANLLGRLQGEERLLWLYEEVEKPLSRVLAHMEATGVKLDVAYLEALSLEVAAEMRRLEEEVFRLAGHSFRLNSRDQLERVLFDELGLPPIGKTEKTGKRSTSAAVLEALREVHPIVDKILQYRELAKLKGTYIDPLPALVHPKTGRLHTRFNQTATATGRLSSSDPNLQNIPVRTPLGQKIRRAFVAEEGWRLVALDYSQIELRVLAHLSGDENLIRVFQEGKDIHTQTASWMFGLSAEAIDPEMRRAAKTINFGVLYGMSAFRLSQELGIPYEEAAAFIQKYFQSYPKVKAWIEKTLEEGRTRGYVETLFGRRRYVPDLNARVKSVREAAERMAFNMPVQGTAADLMKLAMVRLFPQLREVGARMLLQVHDELLLEAPKERAEEVAALAKEVMEGVWPLAVPLEVEVGIGEDWLAAKG

SEQ ID NO: 2915 - DNA, 2529 bp, synthetic construct
  misc_feature 1..2529: note = Variant of DNA polymerase I from Thermus sp. strain 2.9
  source 1..2529: mol_type = other DNA
atgcaccatcatcatcatcatggcggtagcggcgtgttaccggtgttcgagcctaaaggtcgcgtgcttctggttgatggccatcatctcgcgtatcgtaacttctttgccctgaaaggattaaccaccagccgtggcgagccggtacagggtgtctacggctttgcaaagtcgctcctgaaagctctgaaagaagacggtgatgtggtgattgttgtctttgatgcgaaagcgccaagttttcgccacgaagcgtacgaagcttacaaagccgggcgtgctccaacgccggaagactttcctcgccaattggcgcttatgaaggaattagtggatttgcttggcctcgaacgcttggaagttcccggtttcgaggcagacgacgtattagcgactctcgcaaagaaagccgaacgtgagggctatgaagtccagatcttgacagcagatcgcgatcttttccagcttttatctccgcgcatctcggtgttacacccggaagggcatcgtatcaccccggaatggctctgggagaaatatggtttgcgtcccgaacaatgggtggattttcgcgccttagcaggcgatccgagcgacaatattccgggagttaaaggtatcggcgagaagacggcgctcaagctccttaaagaatgggggtcgttggagaacttgcttaagaatttagatcaggtcaaaccagagtcagtgcgtgagaagattcttgcacacctcgaagacctcaaattaagccgcgaattgtcccgtgtacgcaccgatttgccgctcgaagttgatttccgtcgccgccgcgaacctgactgggagggtcttaaagcgtttttagagcgtcttgaatttggttcgctcttgcatgaattcggccttttagaaagcccgttaccagccgaagaagcaccttggccaccgcccgaaggcgcgtttttaggttaccgtttgagtcgcccggaaccgatgtgggccgaattattggctcttgcagcgtctgcccagggacgtgtgtatcgcgcggaagaccctcatggtgcgctccgcggcctcttcgaagtccgtggactccttgccaaagacttagctgttgttgcattgcgcgaaggtcttgatttacctccgactgatgatccaatgcttcttgcgtacctcttggacccgtcaaacacgacgcccgaaggcgtagcccgtcgttacggcggcgagtggaccgaagatgcagcgaaacgcgcgttattggccgaacgtttgcacgagaatttattaggacgtttgcaaggcgaggaacgtctcctctggctttacgaagaagtggagaaaccattgagtcgcgtgctcgcgcatatggaagctaccggtgtcaaattagacgtggcgtatttggaggctctcagccttgaagttgctgccgaaatgcgccgcttggaggaagaagtattccgtttagcaggccattcctttcgccttaattctcgcgatcagttagaacgtgtgttgttcgatgaacttggtctccctcctatcggcaagacagagaagaccggtaaacgtagcacttcagcggcggttttagaagctcttcgcgaagtccatcccattgtggacaagatcttgcagtaccgcgaactcgcgaaattgaaaggcacctatattgaccctcttccggcattagtccacccgaaaacgggacgcctccatacccgcttcaaccaaacagccacggcgaccggtcgtttgtcctcctctgatccaaaccttcagaatattccagtacgtaccccattgggccagaagatccgccgcgcgtttgtagctgaggagggttggcgtttagtggccctcgattatagccaaattgaattacgtgtccttgcccatctttctggcgatgagaacctcatccgcgtgtttcaggaaggcaaagacattcacactcaaacggcaagctggatgtttggattatcagctgaagcgatcgatcctttgatgcgtcgtgcagcgaagaccatcaatttcggtgttctctacggtatgagtgcctttcgtttgtcgcaggaattaggcattccctatgaagaagctgcggcgttcattcagaaatactttcaaagctatcccaaagttaaagcatggatcgagaagactctcgaagaaggccgcacacgtggttacgtagagaccttatttggacgtcgccgctatgttcccgatttaaacgctcgcgtgaaatctgtccgtgaagccgccgaacgcatggcgttcaacatgcctgtacagggcacggcagctgacctcatgaaacttgcaatggtgcgcctttttccacaattgcgtgaagttggtgcccgcatgctcttgcaggtccacgatgaactcttgttagaagcgccaaaagagcgtgcggaagaggtggcagccctcgcgaaagaggttatggaaggcgtgtggcccttagcggtgcctcttgaagtcgaagttggtattggcgaggattggctggctgccaaaggataatga

SEQ ID NO: 2916 - protein, 841 aa, synthetic construct; identical to SEQ ID NO: 2684
  REGION 1..841: note = Variant of DNA polymerase I from Thermus sp. strain 2.9

SEQ ID NO: 2917 - DNA, 2529 bp, synthetic construct
  misc_feature 1..2529: note = Variant of DNA polymerase I from Thermus sp. strain 2.9
  source 1..2529: mol_type = other DNA
atgcaccatcatcatcatcatggcggtagcggcgtgttaccggtgttcgagcctaaaggtcgcgtgcttctggttgatggccatcatctcgcgtatcgtaacttctttgccctgaaaggattaaccaccagccgtggcgagccggtacagggtgtctacggctttgcaaagtcgctcctgaaagctctgaaagaagacggtgatgtggtgattgttgtctttgatgcgaaagcgccaagttttcgccacgaagcgtacgaagcttacaaagccgggcgtgctccaacgccggaagactttcctcgccaattggcgcttatgaaggaattagtggatttgcttggcctcgaacgcttggatgttcccggtttcgaggcagacgacgtattagcgactctcgcaaagaaagccgaacgtgagggctatgaagtccagatcttgacagcagatcgcgatcttttccagcttttatctccgcgcatctcggtgttacacccggaagggcatcgtatcaccccggaatggctctgggagaaatatggtttgcgtcccgaacaatgggtggattttcgcgccttagcaggcgatccgagcgacaatattccgggagttaaaggtatcggcgagaagacggcgctcaagctccttaaagaatgggggtcgttggagaacttgcttaagaatttagatcaggtcaaaccagagtcagtgcgtgagaagattcttgcacacctcgaagacctcaaattaagccgcgaattgtcccgtgtacgcaccgatttgccgctcgaagttgatttccgtcgccgccgcgaacctgactgggagggtcttaaagcgtttttagagcgtcttgaatttggttcgctcttgcatgaattcggccttttagaaagcccgttaccagccgaagaagcaccttggccaccgcccgaaggcgcgtttttaggttaccgtttgagtcgcccggaaccgatgtgggccgaattattggctcttgcagcgtctgcccagggacgtgtgtatcgcgcggaagaccctcatggtgcgctccgcggcctcttcgaagtccgtggactccttgccaaagacttagctgttgttgcattgcgcgaaggtcttgatttacctccgactgatgatccaatgcttcttgcgtacctcttggacccgtcaaacacgacgcccgaaggcgtagcccgtcgttacggcggcgagtggaccgaagatgcagcgaaacgcgcgttattggccgaacgtttgcacgccaatttattaggacgtttgcaaggcgaggaacgtctcctctggctttacgaagaagtggagaaaccattgagtcgcgtgctcgcgcatatggaagctaccggtgtcaaattagacgtggcgtatttggaggctctcagccttgaagttgctgccgaaatgcgccgcttggaggaagaagtattccgtttagcaggccattcctttcgccttaattctcgcgatcagttagaacgtgtgttgttcgatgaacttggtctccctcctatcggcaagacagagaagaccggtaaacgtagcacttcagcggcggttttagaagctcttcgcgaagtccatcccattgtggacaagatcttgcagtaccgcgaactcgcgaaattgaaaggcacctatattgaccctcttccggcattagtccacccgaaaacgggacgcctccatacccgcttcaaccaaacagccacggcgaccggtcgtttgtcctcctctgatccaaaccttcagaatattccagtacgtaccccattgggccagaagatccgccgcgcgtttgtagctgaggagggttggcgtttagtggccctcgattatagccaaattgaattacgtgtccttgcccatctttctggcgatgagaacctcatccgcgtgtttcaggaaggcaaagacattcacactcaaacggcaagctggatgtttggattatcagctgaagcgatcgatcctttgatgcgtcgtgcagcgaagaccatcaatttcggtgttctctacggtatgagtgcctttcgtttgtcgcaggaattaggcattccctatgaagaagctgcggcgttcattcagaaatactttcaaagctatcccaaagttaaagcatggatcgagaagactctcgaagaaggccgcacacgtggttacgtagagaccttatttggacgtcgccgctatgttcccgatttaaacgctcgcgtgaaatctgtccgtgaagccgccgaacgcatggcgttcaacatgcctgtacagggcacggcagctgacctcatgaaacttgcaatggtgcgcctttttccacaattgcgtgaagttggtgcccgcatgctcttgcaggtccacgatgaactcttgttagaagcgccaaaagagcgtgcggaagaggtggcagccctcgcgaaagaggttatggaaggcgtgtggcccttagcggtgcctcttgaagtcgaagttggtattggcgaggattggctggctgccaaaggataatga

SEQ ID NO: 2918 - protein, 841 aa, synthetic construct
  REGION 1..841: note = Variant of DNA polymerase I from Thermus sp. strain 2.9
MHHHHHHGGSGVLPVFEPKGRVLLVDGHHLAYRNFFALKGLTTSRGEPVQGVYGFAKSLLKALKEDGDVVIVVFDAKAPSFRHEAYEAYKAGRAPTPEDFPRQLALMKELVDLLGLERLDVPGFEADDVLATLAKKAEREGYEVQILTADRDLFQLLSPRISVLHPEGHRITPEWLWEKYGLRPEQWVDFRALAGDPSDNIPGVKGIGEKTALKLLKEWGSLENLLKNLDQVKPESVREKILAHLEDLKLSRELSRVRTDLPLEVDFRRRREPDWEGLKAFLERLEFGSLLHEFGLLESPLPAEEAPWPPPEGAFLGYRLSRPEPMWAELLALAASAQGRVYRAEDPHGALRGLFEVRGLLAKDLAVVALREGLDLPPTDDPMLLAYLLDPSNTTPEGVARRYGGEWTEDAAKRALLAERLHANLLGRLQGEERLLWLYEEVEKPLSRVLAHMEATGVKLDVAYLEALSLEVAAEMRRLEEEVFRLAGHSFRLNSRDQLERVLFDELGLPPIGKTEKTGKRSTSAAVLEALREVHPIVDKILQYRELAKLKGTYIDPLPALVHPKTGRLHTRFNQTATATGRLSSSDPNLQNIPVRTPLGQKIRRAFVAEEGWRLVALDYSQIELRVLAHLSGDENLIRVFQEGKDIHTQTASWMFGLSAEAIDPLMRRAAKTINFGVLYGMSAFRLSQELGIPYEEAAAFIQKYFQSYPKVKAWIEKTLEEGRTRGYVETLFGRRRYVPDLNARVKSVREAAERMAFNMPVQGTAADLMKLAMVRLFPQLREVGARMLLQVHDELLLEAPKERAEEVAALAKEVMEGVWPLAVPLEVEVGIGEDWLAAKG

SEQ ID NO: 2919 - DNA, 2529 bp, synthetic construct
  misc_feature 1..2529: note = Variant of DNA polymerase I from Thermus sp. strain 2.9
  source 1..2529: mol_type = other DNA
atgcaccatcatcatcatcatggcggtagcggcgtgttaccggtgttcgagcctaaaggtcgcgtgcttctggttgatggccatcatctcgcgtatcgtaacttctttgccctgaaaggattaaccaccagccgtggcgagccggtacagggtgtctacggctttgcaaagtcgctcctgaaagctctgaaagaagacggtgatgtggtgattgttgtctttgatgcgaaagcgccaagttttcgccacgaagcgtacgaagcttacaaagccgggcgtgctccaacgccggaagactttcctcgccaattggcgcttatgaaggaattagtggatttgcttggcctcgaacgcttggaagttcccggtttcgaggcagacgacgtattagcgactctcgcaaagaaagccgaacgtgagggctatgaagtccagatcttgacagcagatcgcgatcttttccagcttttatctccgcgcatctcggtgttacacccggaagggcatcgtatcaccccggaatggctctgggagaaatatggtttgcgtcccgaacaatgggtggattttcgcgccttagcaggcgatccgagcgacaatattccgggagttaaaggtatcggcgagaagacggcgctcaagctccttaaagaatgggggtcgttggagaacttgcttaagaatttagatcaggtcaaaccagagtcagtgcgtgagaagattcttgcacacctcgaagacctcaaattaagccgcgaattgtcccgtgtattgaccgatttgccgctcgaagttgatttccgtcgccgccgcgaacctgactgggagggtcttaaagcgtttttagagcgtcttgaatttggttcgctcttgcatgaattcggccttttagaaagcccgttaccagccgaagaagcaccttggccaccgcccgaaggcgcgtttttaggttaccgtttgagtcgcccggaaccgatgtgggccgaattattggctcttgcagcgtctgcccagggacgtgtgtatcgcgcggaagaccctcatggtgcgctccgcggcctcttcgaagtccgtggactccttgccaaagacttagctgttgttgcattgcgcgaaggtcttgatttacctccgactgatgatccaatgcttcttgcgtacctcttggacccgtcaaacacgacgcccgaaggcgtagcccgtcgttacggcggcgagtggaccgaagatgcagcgaaacgcgcgttattggccgaacgtttgcacgccaatttattaggacgtttgcaaggcgaggaacgtctcctctggctttacgaagaagtggagaaaccattgagtcgcgtgctcgcgcatatggaagctaccggtgtcaaattagacgtggcgtatttggaggctctcagccttgaagttgctgccgaaatgcgccgcttggaggaagaagtattccgtttagcaggccattcctttcgccttaattctcgcgatcagttagaacgtgtgttgttcgatgaacttggtctccctcctatcggcaagacagagaagaccggtaaacgtagcacttcagcggcggttttagaagctcttcgcgaagtccatcccattgtggacaagatcttgcagtaccgcgaactcgcgaaattgaaaggcacctatattgaccctcttccggcattagtccacccgaaaacgggacgcctccatacccgcttcaaccaaacagccacggcgaccggtcgtttgtcctcctctgatccaaaccttcagaatattccagtacgtaccccattgggccagaagatccgccgcgcgtttgtagctgaggagggttggcgtttagtggccctcgattatagccaaattgaattacgtgtccttgcccatctttctggcgatgagaacctcatccgcgtgtttcaggaaggcaaagacattcacactcaaacggcaagctggatgtttggattatcagctgaagcgatcgatcctttgatgcgtcgtgcagcgaagaccatcaatttcggtgttctctacggtatgagtgcctttcgtttgtcgcaggaattaggcattccctatgaagaagctgcggcgttcattcagaaatactttcaaagctatcccaaagttaaagcatggatcgagaagactctcgaagaaggccgcacacgtggttacgtagagaccttatttggacgtcgccgctatgttcccgatttaaacgctcgcgtgaaatctgtccgtgaagccgccgaacgcatggcgttcaacatgcctgtacagggcacggcagctgacctcatgaaacttgcaatggtgcgcctttttccacaattgcgtgaagttggtgcccgcatgctcttgcaggtccacgatgaactcttgttagaagcgccaaaagagcgtgcggaagaggtggcagccctcgcgaaagaggttatggaaggcgtgtggcccttagcggtgcctcttgaagtcgaagttggtattggcgaggattggctggctgccaaaggataatga

SEQ ID NO: 2920 - protein, 841 aa, synthetic construct
  REGION 1..841: note = Variant of DNA polymerase I from Thermus sp. strain 2.9
MHHHHHHGGSGVLPVFEPKGRVLLVDGHHLAYRNFFALKGLTTSRGEPVQGVYGFAKSLLKALKEDGDVVIVVFDAKAPSFRHEAYEAYKAGRAPTPEDFPRQLALMKELVDLLGLERLEVPGFEADDVLATLAKKAEREGYEVQILTADRDLFQLLSPRISVLHPEGHRITPEWLWEKYGLRPEQWVDFRALAGDPSDNIPGVKGIGEKTALKLLKEWGSLENLLKNLDQVKPESVREKILAHLEDLKLSRELSRVLTDLPLEVDFRRRREPDWEGLKAFLERLEFGSLLHEFGLLESPLPAEEAPWPPPEGAFLGYRLSRPEPMWAELLALAASAQGRVYRAEDPHGALRGLFEVRGLLAKDLAVVALREGLDLPPTDDPMLLAYLLDPSNTTPEGVARRYGGEWTEDAAKRALLAERLHANLLGRLQGEERLLWLYEEVEKPLSRVLAHMEATGVKLDVAYLEALSLEVAAEMRRLEEEVFRLAGHSFRLNSRDQLERVLFDELGLPPIGKTEKTGKRSTSAAVLEALREVHPIVDKILQYRELAKLKGTYIDPLPALVHPKTGRLHTRFNQTATATGRLSSSDPNLQNIPVRTPLGQKIRRAFVAEEGWRLVALDYSQIELRVLAHLSGDENLIRVFQEGKDIHTQTASWMFGLSAEAIDPLMRRAAKTINFGVLYGMSAFRLSQELGIPYEEAAAFIQKYFQSYPKVKAWIEKTLEEGRTRGYVETLFGRRRYVPDLNARVKSVREAAERMAFNMPVQGTAADLMKLAMVRLFPQLREVGARMLLQVHDELLLEAPKERAEEVAALAKEVMEGVWPLAVPLEVEVGIGEDWLAAKG

SEQ ID NO: 2921 - DNA, 2529 bp, synthetic construct; identical to SEQ ID NO: 2803
  misc_feature 1..2529: note = Variant of DNA polymerase I from Thermus sp. strain 2.9
  source 1..2529: mol_type = other DNA

SEQ ID NO: 2922 - protein, 841 aa, synthetic construct; identical to SEQ ID NO: 2804
  REGION 1..841: note = Variant of DNA polymerase I from Thermus sp. strain 2.9

SEQ ID NO: 2923 - DNA, 2529 bp, synthetic construct
  misc_feature 1..2529: note = Variant of DNA polymerase I from Thermus sp. strain 2.9
  source 1..2529: mol_type = other DNA
atgcaccatcatcatcatcatggcggtagcggcgtgttaccggtgttcgagcctaaaggtcgcgtgcttctggttgatggccatcatctcgcgtatcgtaacttctttgccctgaaaggattaaccaccagccgtggcgagccggtacagggtgtctacggctttgcaaagtcgctcctgaaagctctgaaagaagacggtgatgtggtgattgttgtctttgatgcgaaagcgccaagttttcgccacgaagcgtacgaagcttacaaagccgggcgtgctccaacgccggaagactttcctcgccaattggcgcttatgaaggaattagtggatttgcttggcctcgaacgcttggaagttcccggtttcgaggcagacgacgtattagcgactctcgcaaagaaagccgaacgtgagggctatgaagtccagatcttgacagcagatcgcgatcttttccagcttttatctccgcgcatctcggtgttacacccggaagggcatcgtatcaccccggaatggctctgggagaaatatggtttgcgtcccgaacaatgggtggattttcgcgccttagcaggcgatccgagcgacaatattccgggagttaaaggtatcggcgagaagacggcgctcaagctccttaaagaatgggggtcgttggagaacttgcttaagaatttagatcaggtcaaaccagagtcagtgcgtgagaagattcttgcacacctcgaagacctcaaattaagccgcgaattgtcccgtgtacgcaccgatttgccgctcgaagttgatttccgtcgccgccgcgaacctgactgggagggtcttaaagcgtttttagagcgtcttgaatttggttcgctcttgcatgaattcggccttttagaaagcccgttaccagccgaagaagcaccttggccaccgcccgaaggcgcgtttttaggttaccgtttgagtcgcccggaaccgatgtgggccgaattattggctcttgcagcgtctgcccagggacgtgtgtatcgcgcggaagaccctcatggtgcgctccgcggcctcttcgaagtccgtggactccttgccaaagacttagctgttgttgcattgcgcgaaggtcttgatttacctccgactgatgatccaatgcttcttgcgtacctcttggacccgtcaaacacgacgcccgaaggcgtagcccgtcgttacggcggcgagtggaccgaagatgcagcgaaacgcgcgttattggccgaacgtttgcacgccaatttattaggacgtttgcaaggcgaggaacgtctcctctggctttacgaagaagtggagaaaccattgagtcgcgtgctcgcgcatatggaagctaccggtgtcaaattagacgtggcgtatttggaggctctcagccttgaagttgctgccgaagtgcgccgcttggaggaagaagtattccgtttagcaggccattcctttcgccttaattctcgcgatcagttagaacgtgtgttgttcgatgaacttggtctccctcctatcggcaagacagagaagaccggtaaacgtagcacttcagcggcggttttagaagctcttcgcgaagtccatcccattgtggacaagatcttgcagtaccgcgaactcgcgaaattgaaaggcacctatattgaccctcttccggcattagtccacccgaaaacgggacgcctccatacccgcttcaaccaaacagccacggcgaccggtcgtttgtcctcctctgatccaaaccttcagaatattccagtacgtaccccattgggccagaagatccgccgcgcgtttgtagctgaggagggttggcgtttagtggccctcgattatagccaaattgaattacgtgtccttgcccatctttctggcgatgagaacctcatccgcgtgtttcaggaaggcaaagacattcacactcaaacggcaagctggatgtttggattatcagctgaagcgatcgatcctttgatgcgtcgtgcagcgaagaccatcaatttcggtgttctctacggtatgagtgcctttcgtttgtcgcaggaattaggcattccctatgaagaagctgcggcgttcattcagaaatactttcaaagctatcccaaagttaaagcatggatcgagaagactctcgaagaaggccgcacacgtggttacgtagagaccttatttggacgtcgccgctatgttcccgatttaaacgctcgcgtgaaatctgtccgtgaagccgccgaacgcatggcgttcaacatgcctgtacagggcacggcagctgacctcatgaaacttgcaatggtgcgcctttttccacaattgcgtgaagttggtgcccgcatgctcttgcaggtccacgatgaactcttgttagaagcgccaaaagagcgtgcggaagaggtggcagccctcgcgaaagaggttatggaaggcgtgtggcccttagcggtgcctcttgaagtcgaagttggtattggcgaggattggctggctgccaaaggataatga

SEQ ID NO: 2924 - protein, 841 aa, synthetic construct
  REGION 1..841: note = Variant of DNA polymerase I from Thermus sp. strain 2.9
MHHHHHHGGSGVLPVFEPKGRVLLVDGHHLAYRNFFALKGLTTSRGEPVQGVYGFAKSLLKALKEDGDVVIVVFDAKAPSFRHEAYEAYKAGRAPTPEDFPRQLALMKELVDLLGLERLEVPGFEADDVLATLAKKAEREGYEVQILTADRDLFQLLSPRISVLHPEGHRITPEWLWEKYGLRPEQWVDFRALAGDPSDNIPGVKGIGEKTALKLLKEWGSLENLLKNLDQVKPESVREKILAHLEDLKLSRELSRVRTDLPLEVDFRRRREPDWEGLKAFLERLEFGSLLHEFGLLESPLPAEEAPWPPPEGAFLGYRLSRPEPMWAELLALAASAQGRVYRAEDPHGALRGLFEVRGLLAKDLAVVALREGLDLPPTDDPMLLAYLLDPSNTTPEGVARRYGGEWTEDAAKRALLAERLHANLLGRLQGEERLLWLYEEVEKPLSRVLAHMEATGVKLDVAYLEALSLEVAAEVRRLEEEVFRLAGHSFRLNSRDQLERVLFDELGLPPIGKTEKTGKRSTSAAVLEALREVHPIVDKILQYRELAKLKGTYIDPLPALVHPKTGRLHTRFNQTATATGRLSSSDPNLQNIPVRTPLGQKIRRAFVAEEGWRLVALDYSQIELRVLAHLSGDENLIRVFQEGKDIHTQTASWMFGLSAEAIDPLMRRAAKTINFGVLYGMSAFRLSQELGIPYEEAAAFIQKYFQSYPKVKAWIEKTLEEGRTRGYVETLFGRRRYVPDLNARVKSVREAAERMAFNMPVQGTAADLMKLAMVRLFPQLREVGARMLLQVHDELLLEAPKERAEEVAALAKEVMEGVWPLAVPLEVEVGIGEDWLAAKG

SEQ ID NO: 2925 - DNA, 2529 bp, synthetic construct
  misc_feature 1..2529: note = Variant of DNA polymerase I from Thermus sp. strain 2.9
  source 1..2529: mol_type = other DNA
atgcaccatcatcatcatcatggcggtagcggcgtgttaccggtgttcgagcctaaaggtcgcgtgcttctggttgatggccatcatctcgcgtatcgtaacttctttgccctgaaaggattaaccaccagccgtggcgagccggtacagggtgtctacggctttgcaaagtcgctcctgaaagctctgaaagaagacggtgatgtggtgattgttgtctttgatgcgaaagcgccaagttttcgccacgaagcgtacgaagcttacaaagccgggcgtgctccaacgccggaagactttcctcgccaattggcgcttatgaaggaattagtggatttgcttggcctcgaacgcttggaagttcccggtttcgaggcagacgacgtattagcgactctcgcaaagaaagccgaacgtgagggctatgaagtccagatcttgacagcagatcgcgatcttttccagcttttatctccgcgcatctcggtgttacacccggaagggcatcgtatcaccccggaatggctctgggagaaatatggtttgcgtcccgaacaatgggtggattttcgcgccttagcaggcgatccgagcgacaatattccgggagttaaaggtatcggcgagaagacggcgctcaagctccttaaagaatgggggtcgttggagaacttgcttaagaatttagatcaggtcaaaccagagtcagtgcgtgagaagattcttgcacacctcgaagacctcaaattaagccgcgaattgtcccgtgtacgcaccgatttgccgctcgaagttgatttccgtcgccgccgcgaacctgactgggagggtcttaaagcgtttttagagcgtcttgaatttggttcgctcttgcatgaattcggccttttagaaagcccgttaccagccgaagaagcaccttggccaccgcccgaaggcgcgtttttaggttaccgtttgagtcgcccggaaccgatgtgggccgaattattggctcttgcagcgtctgcccagggacgtgtgtatcgcgcggaagaccctcatggtgcgctccgcggcctcttcgaagtccgtggactccttgccaaagacttagctgttgttgcattgcgcgaaggtcttgatttacctccgactgatgatccaatgcttcttgcgtacctcttggacccgtcaaacacgacgcccgaaggcgtagcccgtcgttacggcggcgagtggaccgaagatgcagcgaaacgcgcgttattggccgaacgtttgcacgccaatttattaggacgtttgcaaggcgaggaacgtctcctctggctttacgaagaagtggagaaaccattgagtcgcgtgctcgcgcatatggaagctaccggtgtcaaattagacgtggcgtatttggaggctctcagccttgaagttgctgcccttatgcgccgcttggaggaagaagtattccgtttagcaggccattcctttcgccttaattctcgcgatcagttagaacgtgtgttgttcgatgaacttggtctccctcctatcggcaagacagagaagaccggtaaacgtagcacttcagcggcggttttagaagctcttcgcgaagtccatcccattgtggacaagatcttgcagtaccgcgaactcgcgaaattgaaaggcacctatattgaccctcttccggcattagtccacccgaaaacgggacgcctccatacccgcttcaaccaaacagccacggcgaccggtcgtttgtcctcctctgatccaaaccttcagaatattccagtacgtaccccattgggccagaagatccgccgcgcgtttgtagctgaggagggttggcgtttagtggccctcgattatagccaaattgaattacgtgtccttgcccatctttctggcgatgagaacctcatccgcgtgtttcaggaaggcaaagacattcacactcaaacggcaagctggatgtttggattatcagctgaagcgatcgatcctttgatgcgtcgtgcagcgaagaccatcaatttcggtgttctctacggtatgagtgcctttcgtttgtcgcaggaattaggcattccctatgaagaagctgcggcgttcattcagaaatactttcaaagctatcccaaagttaaagcatggatcgagaagactctcgaagaaggccgcacacgtggttacgtagagaccttatttggacgtcgccgctatgttcccgatttaaacgctcgcgtgaaatctgtccgtgaagccgccgaacgcatggcgttcaacatgcctgtacagggcacggcagctgacctcatgaaacttgcaatggtgcgcctttttccacaattgcgtgaagttggtgcccgcatgctcttgcaggtccacgatgaactcttgttagaagcgccaaaagagcgtgcggaagaggtggcagccctcgcgaaagaggttatggaaggcgtgtggcccttagcggtgcctcttgaagtcgaagttggtattggcgaggattggctggctgccaaaggataatga

SEQ ID NO: 2926 - protein, 841 aa, synthetic construct
  REGION 1..841: note = Variant of DNA polymerase I from Thermus sp. strain 2.9
MHHHHHHGGSGVLPVFEPKGRVLLVDGHHLAYRNFFALKGLTTSRGEPVQGVYGFAKSLLKALKEDGDVVIVVFDAKAPSFRHEAYEAYKAGRAPTPEDFPRQLALMKELVDLLGLERLEVPGFEADDVLATLAKKAEREGYEVQILTADRDLFQLLSPRISVLHPEGHRITPEWLWEKYGLRPEQWVDFRALAGDPSDNIPGVKGIGEKTALKLLKEWGSLENLLKNLDQVKPESVREKILAHLEDLKLSRELSRVRTDLPLEVDFRRRREPDWEGLKAFLERLEFGSLLHEFGLLESPLPAEEAPWPPPEGAFLGYRLSRPEPMWAELLALAASAQGRVYRAEDPHGALRGLFEVRGLLAKDLAVVALREGLDLPPTDDPMLLAYLLDPSNTTPEGVARRYGGEWTEDAAKRALLAERLHANLLGRLQGEERLLWLYEEVEKPLSRVLAHMEATGVKLDVAYLEALSLEVAALMRRLEEEVFRLAGHSFRLNSRDQLERVLFDELGLPPIGKTEKTGKRSTSAAVLEALREVHPIVDKILQYRELAKLKGTYIDPLPALVHPKTGRLHTRFNQTATATGRLSSSDPNLQNIPVRTPLGQKIRRAFVAEEGWRLVALDYSQIELRVLAHLSGDENLIRVFQEGKDIHTQTASWMFGLSAEAIDPLMRRAAKTINFGVLYGMSAFRLSQELGIPYEEAAAFIQKYFQSYPKVKAWIEKTLEEGRTRGYVETLFGRRRYVPDLNARVKSVREAAERMAFNMPVQGTAADLMKLAMVRLFPQLREVGARMLLQVHDELLLEAPKERAEEVAALAKEVMEGVWPLAVPLEVEVGIGEDWLAAKG

SEQ ID NO: 2927 - DNA, 2529 bp, synthetic construct
  misc_feature 1..2529: note = Variant of DNA polymerase I from Thermus sp. strain 2.9
  source 1..2529: mol_type = other DNA
atgcaccatcatcatcatcatggcggtagcggcgtgttaccggtgttcgagcctaaaggtcgcgtgcttctggttgatggccatcatctcgcgtatcgtaacttctttgccctgaaaggattaaccaccagccgtggcgagccggtacagggtgtctacggctttgcaaagtcgctcctgaaagctctgaaagaagacggtgatgtggtgattgttgtctttgatgcgaaagcgccaagttttcgccacgaagcgtacgaagcttacaaagccgggcgtgctccaacgccggaagactttcctcgccaattggcgcttatgaaggaattagtggatttgcttggcctcgaacgcttggaagttcccggtttcgaggcagacgacgtattagcgactctcgcaaagaaagccgaacgtgagggctatgaagtccagatcttgacagcagatcgcgatcttttccagcttttatccccgcgcatctcggtgttacacccggaagggcatcgtatcaccccggaatggctctgggagaaatatggtttgcgtcccgaacaatgggtggattttcgcgccttagcaggcgatccgagcgacaatattccgggagttaaaggtatcggcgagaagacggcgctcaagctccttaaagaatgggggtcgttggagaacttgcttaagaatttagatcaggtcaaaccagagtcagtgcgtgagaagattcttgcacacctcgaagacctcaaattaagccgcgaattgtcccgtgtacgcaccgatttgccgctcgaagttgatttccgtcgccgccgcgaacctgactgggagggtcttaaagcgtttttagagcgtcttgaatttggttcgctcttgcatgaattcggccttttagatagcccgttaccagccgaagaagcaccttggccaccgcccgaaggcgcgtttttaggttaccgtttgagtcgcccggaaccgatgtgggccgaattattggctcttgcagcgtctgcccagggacgtgtgtatcgcgcggaagaccctcatggtgcgctccgcggcctcttcgaagtccgtggactccttgccaaagacttagctgttgttgcattgcgcgaaggtcttgatttacctccgactgatgatccaatgcttcttgcgtacctcttggacccgtcaaacacgacgcccgaaggcgtagcccgtcgttacggcggcgagtggaccgaagatgcagcgaaacgcgcgttattggccgaacgtttgcacgccaatttattaggacgtttgcaaggcgaggaacgtctcctctggctttacgaagaagtggagaaaccattgagtcgcgtgctcgcgcatatggaagctaccggtgtcaaattagacgtggcgtatttggaggctctcagccttgaagttgctgccgaaatgcgccgcttggaggaagaagtattccgtttagcaggccattcctttcgccttaattctcgcgatcagttagaacgtgtgttgttcgatgaacttggtctccctcctatcggcaagacagagaagaccggtaaacgtagcacttcagcggcggttttagaagctcttcgcgaagtccatcccattgtggacaagatcttgcagtaccgcgaactcgcgaaattgaaaggcacctatattgaccctcttccggcattagtccacccgaaaacgggacgcctccatacccgcttcaaccaaacagccacggcgaccggtcgtttgtcctcctctgatccaaaccttcagaatattccagtacgtaccccattgggccagaagatccgccgcgcgtttgtagctgaggagggttggcgtttagtggccctcgattatagccaaattgaattacgtgtccttgcccatctttctggcgatgagaacctcatccgcgtgtttcaggaaggcaaagacattcacactcaaacggcaagctggatgtttggattatcagctgaagcgatcgatcctttgatgcgtcgtgcagcgaagaccatcaatttcggtgttctctacggtatgagtgcctttcgtttgtcgcaggaattaggcattccctatgaagaagctgcggcgttcattcagaaatactttcaaagctatcccaaagttaaagcatggatcgagaagactctcgaagaaggccgcacacgtggttacgtagagaccttatttggacgtcgccgctatgttcccgatttaaacgctcgcgtgaaatctgtccgtgaagccgccgaacgcatggcgttcaacatgcctgtacagggcacggcagctgacctcatgaaacttgcaatggtgcgcctttttccacaattgcgtgaagttggtgcccgcatgctcttgcaggtccacgatgaactcttgttagaagcgccaaaagagcgtgcggaagaggtggcagccctcgcgaaagaggttatggaaggcgtgtggcccttagcggtgcctcttgaagtcgaagttggtattggcgaggattggctggctgccaaaggataatga

SEQ ID NO: 2928 - protein, 841 aa, synthetic construct
  REGION 1..841: note = Variant of DNA polymerase I from Thermus sp. strain 2.9
MHHHHHHGGSGVLPVFEPKGRVLLVDGHHLAYRNFFALKGLTTSRGEPVQGVYGFAKSLLKALKEDGDVVIVVFDAKAPSFRHEAYEAYKAGRAPTPEDFPRQLALMKELVDLLGLERLEVPGFEADDVLATLAKKAEREGYEVQILTADRDLFQLLSPRISVLHPEGHRITPEWLWEKYGLRPEQWVDFRALAGDPSDNIPGVKGIGEKTALKLLKEWGSLENLLKNLDQVKPESVREKILAHLEDLKLSRELSRVRTDLPLEVDFRRRREPDWEGLKAFLERLEFGSLLHEFGLLDSPLPAEEAPWPPPEGAFLGYRLSRPEPMWAELLALAASAQGRVYRAEDPHGALRGLFEVRGLLAKDLAVVALREGLDLPPTDDPMLLAYLLDPSNTTPEGVARRYGGEWTEDAAKRALLAERLHANLLGRLQGEERLLWLYEEVEKPLSRVLAHMEATGVKLDVAYLEALSLEVAAEMRRLEEEVFRLAGHSFRLNSRDQLERVLFDELGLPPIGKTEKTGKRSTSAAVLEALREVHPIVDKILQYRELAKLKGTYIDPLPALVHPKTGRLHTRFNQTATATGRLSSSDPNLQNIPVRTPLGQKIRRAFVAEEGWRLVALDYSQIELRVLAHLSGDENLIRVFQEGKDIHTQTASWMFGLSAEAIDPLMRRAAKTINFGVLYGMSAFRLSQELGIPYEEAAAFIQKYFQSYPKVKAWIEKTLEEGRTRGYVETLFGRRRYVPDLNARVKSVREAAERMAFNMPVQGTAADLMKLAMVRLFPQLREVGARMLLQVHDELLLEAPKERAEEVAALAKEVMEGVWPLAVPLEVEVGIGEDWLAAKG

SEQ ID NO: 2929 - DNA, 2529 bp, synthetic construct
  misc_feature 1..2529: note = Variant of DNA polymerase I from Thermus sp. strain 2.9
  source 1..2529: mol_type = other DNA
atgcaccatcatcatcatcatggcggtagcggcgtgttaccggtgttcgagcctaaaggtcgcgtgcttctggttgatggccatcatctcgcgtatcgtaacttctttgccctgaaaggattaaccaccagccgtggcgagccggtacagggtgtctacggctttgcaaagtcgctcctgaaagctctgaaagaagacggtgatgtggtgattgttgtctttgatgcgaaagcgccaagttttcgccacgaagcgtacgaagcttacaaagccgggcgtgctccaacgccggaagactttcctcgccaattggcgcttatgaaggaattagtggatttgcttggcctcgaacgcttggaagttcccggtttcgaggcagacgacgtattagcgactctcgcaaagaaagccgaacgtgagggctatgaagtccagatcttgacagcagatggtgatcttttccagcttttatctccgcgcatctcggtgttacacccggaagggcatcgtatcaccccggaatggctctgggagaaatatggtttgcgtcccgaacaatgggtggattttcgcgccttagcaggcgatccgagcgacaatattccgggagttaaaggtatcggcgagaagacggcgctcaagctccttaaagaatgggggtcgttggagaacttgcttaagaatttagatcaggtcaaaccagagtcagtgcgtgagaagattcttgcacacctcgaagacctcaaattaagccgcgaattgtcccgtgtacgcaccgatttgccgctcgaagttgatttccgtcgccgccgcgaacctgactgggagggtcttaaagcgtttttagagcgtcttgaatttggttcgctcttgcatgaattcggccttttagaaagcccgttaccagccgaagaagcaccttggccaccgcccgaaggcgcgtttttaggttaccgtttgagtcgcccggaaccgatgtgggccgaattattggctcttgcagcgtctgcccagggacgtgtgtatcgcgcggaagaccctcatggtgcgctccgcggcctcttcgaagtccgtggactccttgccaaagacttagctgttgttgcattgcgcgaaggtcttgatttacctccgactgatgatccaatgcttcttgcgtacctcttggacccgtcaaacacgacgcccgaaggcgtagcccgtcgttacggcggcgagtggaccgaagatgcagcgaaacgcgcgttattggccgaacgtttgcacgccaatttattaggacgtttgcaaggcgaggaacgtctcctctggctttacgaagaagtggagaaaccattgagtcgcgtgctcgcgcatatggaagctaccggtgtcaaattagacgtggcgtatttggaggctctcagccttgaagttgctgccgaaatgcgccgcttggaggaagaagtattccgtttagcaggccattcctttcgccttaattctcgcgatcagttagaacgtgtgttgttcgatgaacttggtctccctcctatcggcaagacagagaagaccggtaaacgtagcacttcagcggcggttttagaagctcttcgcgaagtccatcccattgtggacaagatcttgcagtaccgcgaactcgcgaaattgaaaggcacctatattgaccctcttccggcattagtccacccgaaaacgggacgcctccatacccgcttcaaccaaacagccacggcgaccggtcgtttgtcctcctctgatccaaaccttcagaatattccagtacgtaccccattgggccagaagatccgccgcgcgtttgtagctgaggagggttggcgtttagtggccctcgattatagccaaattgaattacgtgtccttgcccatctttctggcgatgagaacctcatccgcgtgtttcaggaaggcaaagacattcacactcaaacggcaagctggatgtttggattatcagctgaagcgatcgatcctttgatgcgtcgtgcagcgaagaccatcaatttcggtgttctctacggtatgagtgcctttcgtttgtcgcaggaattaggcattccctatgaagaagctgcggcgttcattcagaaatactttcaaagctatcccaaagttaaagcatggatcgagaagactctcgaagaaggccgcacacgtggttacgtagagaccttatttggacgtcgccgctatgttcccgatttaaacgctcgcgtgaaatctgtccgtgaagccgccgaacgcatggcgttcaacatgcctgtacagggcacggcagctgacctcatgaaacttgcaatggtgcgcctttttccacaattgcgtgaagttggtgcccgcatgctcttgcaggtccacgatgaactcttgttagaagcgccaaaagagcgtgcggaagaggtggcagccctcgcgaaagaggttatggaaggcgtgtggcccttagcggtgcctcttgaagtcgaagttggtattggcgaggattggctggctgccaaaggataatga

SEQ ID NO: 2930 - protein, 841 aa, synthetic construct
  REGION 1..841: note = Variant of DNA polymerase I from Thermus sp. strain 2.9
MHHHHHHGGSGVLPVFEPKGRVLLVDGHHLAYRNFFALKGLTTSRGEPVQGVYGFAKSLLKALKEDGDVVIVVFDAKAPSFRHEAYEAYKAGRAPTPEDFPRQLALMKELVDLLGLERLEVPGFEADDVLATLAKKAEREGYEVQILTADGDLFQLLSPRISVLHPEGHRITPEWLWEKYGLRPEQWVDFRALAGDPSDNIPGVKGIGEKTALKLLKEWGSLENLLKNLDQVKPESVREKILAHLEDLKLSRELSRVRTDLPLEVDFRRRREPDWEGLKAFLERLEFGSLLHEFGLLESPLPAEEAPWPPPEGAFLGYRLSRPEPMWAELLALAASAQGRVYRAEDPHGALRGLFEVRGLLAKDLAVVALREGLDLPPTDDPMLLAYLLDPSNTTPEGVARRYGGEWTEDAAKRALLAERLHANLLGRLQGEERLLWLYEEVEKPLSRVLAHMEATGVKLDVAYLEALSLEVAAEMRRLEEEVFRLAGHSFRLNSRDQLERVLFDELGLPPIGKTEKTGKRSTSAAVLEALREVHPIVDKILQYRELAKLKGTYIDPLPALVHPKTGRLHTRFNQTATATGRLSSSDPNLQNIPVRTPLGQKIRRAFVAEEGWRLVALDYSQIELRVLAHLSGDENLIRVFQEGKDIHTQTASWMFGLSAEAIDPLMRRAAKTINFGVLYGMSAFRLSQELGIPYEEAAAFIQKYFQSYPKVKAWIEKTLEEGRTRGYVETLFGRRRYVPDLNARVKSVREAAERMAFNMPVQGTAADLMKLAMVRLFPQLREVGARMLLQVHDELLLEAPKERAEEVAALAKEVMEGVWPLAVPLEVEVGIGEDWLAAKG

SEQ ID NO: 2931 - DNA, 2529 bp, synthetic construct
  misc_feature 1..2529: note = Variant of DNA polymerase I from Thermus sp. strain 2.9
  source 1..2529: mol_type = other DNA
atgcaccatcatcatcatcatggcggtagcggcgtgttaccggtgttcgagcctaaaggtcgcgtgcttctggttgatggccatcatctcgcgtatcgtaacttctttgccctgaaaggattaaccaccagccgtggcgagccggtacagggtgtctacggctttgcaaagtcgctcctgaaagctctgaaagaagacggtgatgtggtgattgttgtctttgatgcgaaagcgccaagttttcgccacgaagcgtacgaagcttacaaagccgggcgtgctccaacgccggaagactttcctcgccaattggcgcttatgaaggaattagtggatttgcttggcctcgaacgcttggaagttcccggtttcgaggcagacgacgtattagcgactctcgcaaagaaagccgaacgtgagggctatgaagtccagatcttgacagcagatcgcgatcttttccagcttttatctccgcgcatctcggtgttacacccggaagggcatcgtatcaccccggaatggctctgggagaaatatggtttgcgtcccgaacaatgggtggattttcgcgccttagcaggcgatccgagcgacaatattccgggagttaaaggtatcggcgagaagacggcgctcaagctccttaaagaatgggggtcgttggagaacttgcttaagaatttagatcaggtcaaaccagagtcagtgcgtgagaagattcttgcacacctcgaagacctcaaattaagccgcgaattgtcccgtgtacgcaccgatttgccgctcgaagttgatttccgtcgccgccgcgaacctgactgggagggtcttaaagcgtttttagaggggcttgaatttggttcgctcttgcatgaattcggccttttagaaagcccgttaccagccgaagaagcaccttggccaccgcccgaaggcgcgtttttaggttaccgtttgagtcgcccggaaccgatgtgggccgaattattggctcttgcagcgtctgcccagggacgtgtgtatcgcgcggaagaccctcatggtgcgctccgcggcctcttcgaagtccgtggactccttgccaaagacttagctgttgttgcattgcgcgaaggtcttgatttacctccgactgatgatccaatgcttcttgcgtacctcttggacccgtcaaacacgacgcccgaaggcgtagcccgtcgttacggcggcgagtggaccgaagatgcagcgaaacgcgcgttattggccgaacgtttgcacgccaatttattaggacgtttgcaaggcgaggaacgtctcctctggctttacgaagaagtggagaaaccattgagtcgcgtgctcgcgcatatggaagctaccggtgtcaaattagacgtggcgtatttggaggctctcagccttgaagttgctgccgaaatgcgccgcttggaggaagaagtattccgtttagcaggccattcctttcgccttaattctcgcgatcagttagaacgtgtgttgttcgatgaacttggtctccctcctatcggcaagacagagaagaccggtaaacgtagcacttcagcggcggttttagaagctcttcgcgaagtccatcccattgtggacaagatcttgcagtaccgcgaactcgcgaaattgaaaggcacctatattgaccctcttccggcattagtccacccgaaaacgggacgcctccatacccgcttcaaccaaacagccacggcgaccggtcgtttgtcctcctctgatccaaaccttcagaatattccagtacgtaccccattgggccagaagatccgccgcgcgtttgtagctgaggagggttggcgtttagtggccctcgattatagccaaattgaattacgtgtccttgcccatctttctggcgatgagaacctcatccgcgtgtttcaggaaggcaaagacattcacactcaaacggcaagctggatgtttggattatcagctgaagcgatcgatcctttgatgcgtcgtgcagcgaagaccatcaatttcggtgttctctacggtatgagtgcctttcgtttgtcgcaggaattaggcattccctatgaagaagctgcggcgttcattcagaaatactttcaaagctatcccaaagttaaagcatggatcgagaagactctcgaagaaggccgcacacgtggttacgtagagaccttatttggacgtcgccgctatgttcccgatttaaacgctcgcgtgaaatctgtccgtgaagccgccgaacgcatggcgttcaacatgcctgtacagggcacggcagctgacctcatgaaacttgcaatggtgcgcctttttccacaattgcgtgaagttggtgcccgcatgctcttgcaggtccacgatgaactcttgttagaagcgccaaaagagcgtgcggaagaggtggcagccctcgcgaaagaggttatggaaggcgtgtggcccttagcggtgcctcttgaagtcgaagttggtattggcgaggattggctggctgccaaaggataatga

SEQ ID NO: 2932 - protein, 841 aa, synthetic construct; identical to SEQ ID NO: 2574
  REGION 1..841: note = Variant of DNA polymerase I from Thermus sp. strain 2.9

SEQ ID NO: 2933 - DNA, 2529 bp, synthetic construct
  misc_feature 1..2529: note = Variant of DNA polymerase I from Thermus sp. strain 2.9
  source 1..2529: mol_type = other DNA
atgcaccatcatcatcatcatggcggtagcggcgtgttaccggtgttcgagcctaaaggtcgcgtgcttctggttgatggccatcatctcgcgtatcgtaacttctttgccctgaaaggattaaccaccagccgtggcgagccggtacagggtgtctacggctttgcaaagtcgctcctgaaagctctgaaagaagacggtgatgtggtgattgttgtctttgatgcgaaagcgccaagttttcgccacgaagcgtacgaagcttacaaagccgggcgtgctccaacgccggaagactttcctcgccaattggcgcttatgaaggaattagtggatttgcttggcctcgaacgcttggaagttcccggtttcgaggcagacgacgtattagcgactctcgcaaagaaagccgaacgtgagggctatgaagtccagatcttgacagcagatcgcgatcttttccagcttttatctccgcgcatctcggtgttacacccggaagggcatcgtatcaccccggaatggctctgggagaaatatggtttgcgtcccgaacaatgggtggattttcgcgccttagcaggcgatccgagcgacaatattccgggagttaaaggtatcggcgagaagacggcgctcaagctccttaaagaatgggggtcgttggagaacttgcttaagaatttagatcaggtcaaaccagagtcagtgcgtgagaagattcttgcacacctcgaagacctcaaattaagccgcgaattgtcccgtgtacgcaccgatttgccgctcgaagttgatttccgtcgccgccgcgaacctgactgggagggtcttaaagcgtttttagagcgtcttgaatttggttcgctcttgcatgaattcggccttttagaaagcccgttaccagccgaagaagcaccttggccaccgcccgaaggcgcgtttttaggttaccgtttgagtcgcccggaaccgatgtgggccgaattattggctcttgcagcgtctgcccagggacgtgtgtatcgcgcggaagaccctcatggttatctccgcggcctcttcgaagtccgtggactccttgccaaagacttagctgttgttgcattgcgcgaaggtcttgatttacctccgactgatgatccaatgcttcttgcgtacctcttggacccgtcaaacacgacgcccgaaggcgtagcccgtcgttacggcggcgagtggaccgaagatgcagcgaaacgcgcgttattggccgaacgtttgcacgccaatttattaggacgtttgcaaggcgaggaacgtctcctctggctttacgaagaagtggagaaaccattgagtcgcgtgctcgcgcatatggaagctaccggtgtcaaattagacgtggcgtatttggaggctctcagccttgaagttgctgccgaaatgcgccgcttggaggaagaagtattccgtttagcaggccattcctttcgccttaattctcgcgatcagttagaacgtgtgttgttcgatgaacttggtctccctcctatcggcaagacagagaagaccggtaaacgtagcacttcagcggcggttttagaagctcttcgcgaagtccatcccattgtggacaagatcttgcagtaccgcgaactcgcgaaattgaaaggcacctatattgaccctcttccggcattagtccacccgaaaacgggacgcctccatacccgcttcaaccaaacagccacggcgaccggtcgtttgtcctcctctgatccaaaccttcagaatattccagtacgtaccccattgggccagaagatccgccgcgcgtttgtagctgaggagggttggcgtttagtggccctcgattatagccaaattgaattacgtgtccttgcccatctttctggcgatgagaacctcatccgcgtgtttcaggaaggcaaagacattcacactcaaacggcaagctggatgtttggattatcagctgaagcgatcgatcctttgatgcgtcgtgcagcgaagaccatcaatttcggtgttctctacggtatgagtgcctttcgtttgtcgcaggaattaggcattccctatgaagaagctgcggcgttcattcagaaatactttcaaagctatcccaaagttaaagcatggatcgagaagactctcgaagaaggccgcacacgtggttacgtagagaccttatttggacgtcgccgctatgttcccgatttaaacgctcgcgtgaaatctgtccgtgaagccgccgaacgcatggcgttcaacatgcctgtacagggcacggcagctgacctcatgaaacttgcaatggtgcgcctttttccacaattgcgtgaagttggtgcccgcatgctcttgcaggtccacgatgaactcttgttagaagcgccaaaagagcgtgcggaagaggtggcagccctcgcgaaagaggttatggaaggcgtgtggcccttagcggtgcctcttgaagtcgaagttggtattggcgaggattggctggctgccaaaggataatga

SEQ ID NO: 2934 - protein, 841 aa, synthetic construct
  REGION 1..841: note = Variant of DNA polymerase I from Thermus sp. strain 2.9
MHHHHHHGGSGVLPVFEPKGRVLLVDGHHLAYRNFFALKGLTTSRGEPVQGVYGFAKSLLKALKEDGDVVIVVFDAKAPSFRHEAYEAYKAGRAPTPEDFPRQLALMKELVDLLGLERLEVPGFEADDVLATLAKKAEREGYEVQILTADRDLFQLLSPRISVLHPEGHRITPEWLWEKYGLRPEQWVDFRALAGDPSDNIPGVKGIGEKTALKLLKEWGSLENLLKNLDQVKPESVREKILAHLEDLKLSRELSRVRTDLPLEVDFRRRREPDWEGLKAFLERLEFGSLLHEFGLLESPLPAEEAPWPPPEGAFLGYRLSRPEPMWAELLALAASAQGRVYRAEDPHGYLRGLFEVRGLLAKDLAVVALREGLDLPPTDDPMLLAYLLDPSNTTPEGVARRYGGEWTEDAAKRALLAERLHANLLGRLQGEERLLWLYEEVEKPLSRVLAHMEATGVKLDVAYLEALSLEVAAEMRRLEEEVFRLAGHSFRLNSRDQLERVLFDELGLPPIGKTEKTGKRSTSAAVLEALREVHPIVDKILQYRELAKLKGTYIDPLPALVHPKTGRLHTRFNQTATATGRLSSSDPNLQNIPVRTPLGQKIRRAFVAEEGWRLVALDYSQIELRVLAHLSGDENLIRVFQEGKDIHTQTASWMFGLSAEAIDPLMRRAAKTINFGVLYGMSAFRLSQELGIPYEEAAAFIQKYFQSYPKVKAWIEKTLEEGRTRGYVETLFGRRRYVPDLNARVKSVREAAERMAFNMPVQGTAADLMKLAMVRLFPQLREVGARMLLQVHDELLLEAPKERAEEVAALAKEVMEGVWPLAVPLEVEVGIGEDWLAAKG

SEQ ID NO: 2935 - DNA, 2529 bp, synthetic construct
  misc_feature 1..2529: note = Variant of DNA polymerase I from Thermus sp. strain 2.9
  source 1..2529: mol_type = other DNA
atgcaccatcatcatcatcatggcggtagcggcgtgttaccggtgttcgagcctaaaggtcgcgtgcttctggttgatggccatcatctcgcgtatcgtaacttctttgccctgaaaggattaaccaccagccgtggcgagccggtacagggtgtctacggctttgcaaagtcgctcctgaaagctctgaaagaagacggtgatgtggtgattgttgtctttgatgcgaaagcgccaagttttcgccacgaagcgtacgaagcttacaaagccgggcgtgctccaacgccggaagactttcctcgccaattggcgcttatgaaggaattagtggatttgcttggcctcgaacgcttggaagttcccggtttcgaggcagacgacgtattagcgactctcgcaaagaaagccgaacgtgagggctatgaagtccagatcttgacagcagatcgcgatcttttccagcttttatctccgcgcatctcggtgttacacccggaagggcatcgtatcaccccggaatggctctgggagaaatatggtttgcgtcccgaacaatgggtggattttcgcgccttagcaggcgatccgagcgacaatattccgggagttaaaggtatcggcgagaagacggcgctcaagctccttaaagaatgggggtcgttggagaacttgcttaagaatttagatcaggtcaaaccagagtcagtgcgtgagaagattcttgcacacactgaagacctcaaattaagccgcgaattgtcccgtgtacgcaccgatttgccgctcgaagttgatttccgtcgccgccgcgaacctgactgggagggtcttaaagcgtttttagagcgtcttgaatttggttcgctcttgcatgaattcggccttttagaaagcccgttaccagccgaagaagcaccttggccaccgcccgaaggcgcgtttttaggttaccgtttgagtcgcccggaaccgatgtgggccgaattattggctcttgcagcgtctgcccagggacgtgtgtatcgcgcggaagaccctcatggtgcgctccgcggcctcttcgaagtccgtggactccttgccaaagacttagctgttgttgcattgcgcgaaggtcttgatttacctccgactgatgatccaatgcttcttgcgtacctcttggacccgtcaaacacgacgcccgaaggcgtagcccgtcgttacggcggcgagtggaccgaagatgcagcgaaacgcgcgttattggccgaacgtttgcacgccaatttattaggacgtttgcaaggcgaggaacgtctcctctggctttacgaagaagtggagaaaccattgagtcgcgtgctcgcgcatatggaagctaccggtgtcaaattagacgtggcgtatttggaggctctcagccttgaagttgctgccgaaatgcgccgcttggaggaagaagtattccgtttagcaggccattcctttcgccttaattctcgcgatcagttagaacgtgtgttgttcgatgaacttggtctccctcctatcggcaagacagagaagaccggtaaacgtagcacttcagcggcggttttagaagctcttcgcgaagtccatcccattgtggacaagatcttgcagtaccgcgaactcgcgaaattgaaaggcacctatattgaccctcttccggcattagtccacccgaaaacgggacgcctccatacccgcttcaaccaaacagccacggcgaccggtcgtttgtcctcctctgatccaaaccttcagaatattccagtacgtaccccattgggccagaagatccgccgcgcgtttgtagctgaggagggttggcgtttagtggccctcgattatagccaaattgaattacgtgtccttgcccatctttctggcgatgagaacctcatccgcgtgtttcaggaaggcaaagacattcacactcaaacggcaagctggatgtttggattatcagctgaagcgatcgatcctttgatgcgtcgtgcagcgaagaccatcaatttcggtgttctctacggtatgagtgcctttcgtttgtcgcaggaattaggcattccctatgaagaagctgcggcgttcattcagaaatactttcaaagctatcccaaagttaaagcatggatcgagaagactctcgaagaaggccgcacacgtggttacgtagagaccttatttggacgtcgccgctatgttcccgatttaaacgctcgcgtgaaatctgtccgtgaagccgccgaacgcatggcgttcaacatgcctgtacagggcacggcagctgacctcatgaaacttgcaatggtgcgcctttttccacaattgcgtgaagttggtgcccgcatgctcttgcaggtccacgatgaactcttgttagaagcgccaaaagagcgtgcggaagaggtggcagccctcgcgaaagaggttatggaaggcgtgtggcccttagcggtgcctcttgaagtcgaagttggtattggcgaggattggctggctgccaaaggataatga

SEQ ID NO: 2936 - protein, 841 aa, synthetic construct
  REGION 1..841: note = Variant of DNA polymerase I from Thermus sp. strain 2.9
MHHHHHHGGSGVLPVFEPKGRVLLVDGHHLAYRNFFALKGLTTSRGEPVQGVYGFAKSLLKALKEDGDVVIVVFDAKAPSFRHEAYEAYKAGRAPTPEDFPRQLALMKELVDLLGLERLEVPGFEADDVLATLAKKAEREGYEVQILTADRDLFQLLSPRISVLHPEGHRITPEWLWEKYGLRPEQWVDFRALAGDPSDNIPGVKGIGEKTALKLLKEWGSLENLLKNLDQVKPESVREKILAHTEDLKLSRELSRVRTDLPLEVDFRRRREPDWEGLKAFLERLEFGSLLHEFGLLESPLPAEEAPWPPPEGAFLGYRLSRPEPMWAELLALAASAQGRVYRAEDPHGALRGLFEVRGLLAKDLAVVALREGLDLPPTDDPMLLAYLLDPSNTTPEGVARRYGGEWTEDAAKRALLAERLHANLLGRLQGEERLLWLYEEVEKPLSRVLAHMEATGVKLDVAYLEALSLEVAAEMRRLEEEVFRLAGHSFRLNSRDQLERVLFDELGLPPIGKTEKTGKRSTSAAVLEALREVHPIVDKILQYRELAKLKGTYIDPLPALVHPKTGRLHTRFNQTATATGRLSSSDPNLQNIPVRTPLGQKIRRAFVAEEGWRLVALDYSQIELRVLAHLSGDENLIRVFQEGKDIHTQTASWMFGLSAEAIDPLMRRAAKTINFGVLYGMSAFRLSQELGIPYEEAAAFIQKYFQSYPKVKAWIEKTLEEGRTRGYVETLFGRRRYVPDLNARVKSVREAAERMAFNMPVQGTAADLMKLAMVRLFPQLREVGARMLLQVHDELLLEAPKERAEEVAALAKEVMEGVWPLAVPLEVEVGIGEDWLAAKG

SEQ ID NO: 2937 - DNA, 2529 bp, synthetic construct
  misc_feature 1..2529: note = Variant of DNA polymerase I from Thermus sp. strain 2.9
  source 1..2529: mol_type = other DNA
atgcaccatcatcatcatcatggcggtagcggcgtgttaccggtgttcgagcctaaaggtcgcgtgcttctggttgatggccatcatctcgcgtatcgtaacttctttgccctgaaaggattaaccaccagccgtggcgagccggtacagggtgtctacggctttgcaaagtcgctcctgaaagctctgaaagaagacggtgatgtggtgattgttgtctttgatgcgaaagcgccaagttttcgccacgaagcgtacgaagcttacaaagccgggcgtgctccaacgccggaagactttcctcgccaattggcgcttatgaaggaattagtggatttgcttggcctcgaacgcttggaagttcccggtttcgaggcagacgacgtattagcgactctcgcaaagaaagccgaacgtgagggctatgaagtccagatcttgacagcagatcgcgatcttttccagcttttatctccgcgcatctcggtgttacacccggaagggcatcgtatcaccccggaatggctctgggagaaatatggtttgcgtcccgaacaatgggtggattttcgcgccttagcaggcgatccgagcgacaatattccgggagttaaaggtatcggcgagaagacggcgctcaagctccttaaagaatgggggtcgttggagaacttgcttaagaatttagatcaggtcaaaccagagtcagtgcgtgagaagattcttgcacacctcgaagacctcaaattaagccgcgaattgtcccgtgtacgcaccgatttgccgctcgaagttgatttccgtcgccgccgcgaacctgactgggagggtcttaaagcgtttttagagcgtcttgaatttggttcgctcttgcatgaattcggccttttagaaagcccgttaccagccgaagaagcaccttggccaccgcccgaaggcgcgtttttaggttaccgtttgagtcgcccggaaccgatgtgggccgaattattggctcttgcagcgtctgcccagggacgtgtgtatcgcgcggaagaccctcatggtgcgctccgcggcctcttcgaagtccgtggactccttgccaaagacttagctgttgttgcattgcgcgaaggtcttgatttacctccgactgatgatccaatgcttcttgcgtacctcttggacccgtcaaacacgacgcccgaaggcgtagcccgtcgttacggcggcgagtggaccgaagatgcagcgaaacgcgcgttattggccgaacgtttgcacgccaatttattaggacgtttgcaaggcgaggaacgtctcctctggctttacgaagaagtggagaaaccattgagtcgcgtgctcgcgcatatggaagctaccggtgtcaaattagacgtggcgtatttggaggctctcagccttgaagttgctgccgaaatgcgccgcttggaggaagaagtattccgtttagcaggccattcctttcgccttaattctcgcgatcagttagaacgtgtgttgttcgatgaacttggtctccctcctatcggcaagacagagaagaccggtaaacgtagcacttcagcggcggttttagaagctcttcgcgaagtccatcccattgtggacaagatcttgcagtaccgcgaactcgcgaaattgaaaggcacctatattgaccctcttccggcattagtccacccgaaaacgggacgcctccatacccgcttcaaccaaacagccacggcgaccggtcgtttgtcctcctctgatccaaaccttcagaatattccagtacgtaccccattgggccagaagatccgccgcgcgtttgtagctgaggagggttggcgtttagtggccctcgattatagccaaattgaattacgtgtccttgcccatctttctggcgatgagaacctcatccgcgtgtttcaggaaggcaaagacattcacactcaaacggcaagctggatgtttggattatcagctgaagcgatcgatcctttgatgcgtcgtgcagcgaagaccatcaatttcggtgttctctacggtatgagtgcctttcgtttgtcgcaggaattaggcattccctatgaagaagctgcggcgttcattcagaaatactttcaaagctatcccaaagttaaagcatggatcgagaagactctcgaagaaggccgcacacgtggttacgtagagaccttatttggacgtcgccgctatgttcccgatttaaacgctcgcgtgaaatctgtccgtgaagccgccgaacgcatggcgttcaacatgcctgtacagggcacggcagctgacctcatgaaacttgcaatggtgcgcctttttccacaattgcgtgaagttggtgcccgcatgctcttgcaggtccacgatgaactcttgttagaagcgccaaaagagcgtgcggaagaggtggcagccctcgcgaaaacggttatggaaggcgtgtggcccttagcggtgcctcttgaagtcgaagttggtattggcgaggattggctggctgccaaaggataatga

SEQ ID NO: 2938 - protein, 841 aa, synthetic construct
  REGION 1..841: note = Variant of DNA polymerase I from Thermus sp. strain 2.9
MHHHHHHGGSGVLPVFEPKGRVLLVDGHHLAYRNFFALKGLTTSRGEPVQGVYGFAKSLLKALKEDGDVVIVVFDAKAPSFRHEAYEAYKAGRAPTPEDFPRQLALMKELVDLLGLERLEVPGFEADDVLATLAKKAEREGYEVQILTADRDLFQLLSPRISVLHPEGHRITPEWLWEKYGLRPEQWVDFRALAGDPSDNIPGVKGIGEKTALKLLKEWGSLENLLKNLDQVKPESVREKILAHLEDLKLSRELSRVRTDLPLEVDFRRRREPDWEGLKAFLERLEFGSLLHEFGLLESPLPAEEAPWPPPEGAFLGYRLSRPEPMWAELLALAASAQGRVYRAEDPHGALRGLFEVRGLLAKDLAVVALREGLDLPPTDDPMLLAYLLDPSNTTPEGVARRYGGEWTEDAAKRALLAERLHANLLGRLQGEERLLWLYEEVEKPLSRVLAHMEATGVKLDVAYLEALSLEVAAEMRRLEEEVFRLAGHSFRLNSRDQLERVLFDELGLPPIGKTEKTGKRSTSAAVLEALREVHPIVDKILQYRELAKLKGTYIDPLPALVHPKTGRLHTRFNQTATATGRLSSSDPNLQNIPVRTPLGQKIRRAFVAEEGWRLVALDYSQIELRVLAHLSGDENLIRVFQEGKDIHTQTASWMFGLSAEAIDPLMRRAAKTINFGVLYGMSAFRLSQELGIPYEEAAAFIQKYFQSYPKVKAWIEKTLEEGRTRGYVETLFGRRRYVPDLNARVKSVREAAERMAFNMPVQGTAADLMKLAMVRLFPQLREVGARMLLQVHDELLLEAPKERAEEVAALAKTVMEGVWPLAVPLEVEVGIGEDWLAAKG

SEQ ID NO: 2939 - DNA, 2529 bp, synthetic construct
  misc_feature 1..2529: note = Variant of DNA polymerase I from Thermus sp. strain 2.9
  source 1..2529: mol_type = other DNA
atgcaccatcatcatcatcatggcggtagcggcgtgttaccggtgttcgagcctaaaggtcgcgtgcttctggttgatggccatcatctcgcgtatcgtaacttctttgccctgaaaggattaaccaccagccgtggcgagccggtacagggtgtctacggctttgcaaagtcgctcctgaaagctctgaaagaagacggtgatgtggtgattgttgtctttgatgcgaaagcgccaagttttcgccacgaagcgtacgaagcttacaaagccgggcgtgctccaacgccggaagactttcctcgccaattggcgcttatgaaggaattagtggatttgcttggcctcgaacgcttggaagttcccggtttcgaggcagacgacgtattagcgactctcgcaaagaaagccgaacgtgagggctatgaagtccagatcttgacagcagatcgcgatcttttccagcttttatctccgcgcatctcggtgttacacccggaagggcatcgtatcaccccggaatggctctgggagaaatatggtttgcgtcccgaacaatgggtggattttcgcgccttagcaggcgatccgagcgacaatattccgggagttaaaggtatcggcgagaagacggcgctcaagctccttaaagaatgggggtcgttggagaacttgcttaagaatttagatcaggtcaaaccagagtcagtgcgtgagaagattcttgcacacctcgaagacctcaaattaagccgcgaattgtcccgtgtacgcaccgatttgccgctcgaagttgatttccgtcgccgccgcgaacctgactgggagggtcttaaagcgtttttagagcgtcttgaatttggttcgctcttgcatgaattcggccttttagaaagcccgttaccagccgaagaagcaccttggccaccgcccgaaggcgcgtttttaggttaccgtttgagtcgcccggaaccgatgtgggccgaattattggctcttgcagcgtctgcccagggacgtgtgtatcgcgcggaagaccctcatggtgcgctccgcggcctcttcgaagtccgtggactccttgccaaagacttagctgttgttgcattgcgcgaaggtcttgatttacctccgactgatgatccaatgcttcttgcgtacctcttggacccgtcaaacacgacgcccgaaggcgtagcccgtcgttacggcggcgagtggaccgaagatgcagcgaaacgcgcgttattggccgaacgtttgcacgccaatttattaggacgtttgcaaggcgaggaacgtctcctctggctttacgaagaagtggagaaaccattgagtcgcgtgctcgcgcatatggaagctaccggtgtcaaattagacgtggcgtatttggaggctctcagccttgaagttgctgccgaaatgcgccgcttggaggaagaagtattccgtttagcaggccattcctttcgccttaattctcgcgatcagttagaacgtgtgttgttcgatgaacttggtctccctcctatcggcaagacagagaagaccggtaaacgtagcacttcagcggcggttttagaagctcttcgcgaagtccatcccattgtggacaagatcttgcagtaccgcgaactcgcgaaattgaaaggcacctatattgaccctcttccggcattagtccacccgaaaacgggacgcctccatacccgcttcaaccaaacagccacggcgaccggtcgtttgtcctcctctgatccaaaccttcagaatattccagtacgtaccccattgggccagaagatccgccgcgcgtttgtagctgaggagggttggcgtttagtggccctcgattatagccaaattgaattacgtgtccttgcccatctttctggcgatgagaacctcatccgcgtgtttcaggaaggcaaagacattcacactcaaacggcaagctggatgtttggattatcagctgaagcgatcgatcctttgatgcgtcgtgcagcgaagaccatcaatttcggtgttctctacggtatgagtgcctttcgtttgtcgcaggaattaggcattccctatcaggaagctgcggcgttcattcagaaatactttcaaagctatcccaaagttaaagcatggatcgagaagactctcgaagaaggccgcacacgtggttacgtagagaccttatttggacgtcgccgctatgttcccgatttaaacgctcgcgtgaaatctgtccgtgaagccgccgaacgcatggcgttcaacatgcctgtacagggcacggcagctgacctcatgaaacttgcaatggtgcgcctttttccacaattgcgtgaagttggtgcccgcatgctcttgcaggtccacgatgaactcttgttagaagcgccaaaagagcgtgcggaagaggtggcagccctcgcgaaagaggttatggaaggcgtgtggcccttagcggtgcctcttgaagtcgaagttggtattggcgaggattggctggctgccaaaggataatga

SEQ ID NO: 2940 - protein, 841 aa, synthetic construct; identical to SEQ ID NO: 2272
  REGION 1..841: note = Variant of DNA polymerase I from Thermus sp. strain 2.9

SEQ ID NO: 2941 - DNA, 2529 bp, synthetic construct; identical to SEQ ID NO: 2343
  misc_feature 1..2529: note = Variant of DNA polymerase I from Thermus sp. strain 2.9
  source 1..2529: mol_type = other DNA

SEQ ID NO: 2942 - protein, 841 aa, synthetic construct; identical to SEQ ID NO: 2344
  REGION 1..841: note = Variant of DNA polymerase I from Thermus sp. strain 2.9

SEQ ID NO: 2943 - DNA, 2529 bp, synthetic construct; identical to SEQ ID NO: 2277
  misc_feature 1..2529: note = Variant of DNA polymerase I from Thermus sp. strain 2.9
  source 1..2529: mol_type = other DNA

SEQ ID NO: 2944 - protein, 841 aa, synthetic construct; identical to SEQ ID NO: 2278
  REGION 1..841: note = Variant of DNA polymerase I from Thermus sp. strain 2.9

SEQ ID NO: 2945 - DNA, 2529 bp, synthetic construct; identical to SEQ ID NO: 2233
  misc_feature 1..2529: note = Variant of DNA polymerase I from Thermus sp. strain 2.9
  source 1..2529: mol_type = other DNA

SEQ ID NO: 2946 - protein, 841 aa, synthetic construct; identical to SEQ ID NO: 2234
  REGION 1..841: note = Variant of DNA polymerase I from Thermus sp. strain 2.9

SEQ ID NO: 2947 - DNA, 2529 bp, synthetic construct; identical to SEQ ID NO: 2753
  misc_feature 1..2529: note = Variant of DNA polymerase I from Thermus sp. strain 2.9
  source 1..2529: mol_type = other DNA

SEQ ID NO: 2948 - protein, 841 aa, synthetic construct; identical to SEQ ID NO: 2754
  REGION 1..841: note = Variant of DNA polymerase I from Thermus sp. strain 2.9

SEQ ID NO: 2949 - DNA, 2529 bp, synthetic construct
  misc_feature 1..2529: note = Variant of DNA polymerase I from Thermus sp. strain 2.9
  source 1..2529: mol_type = other DNA
atgcaccatcatcatcatcatggcggtagcggcgtgttaccggtgttcgagcctaaaggtcgcgtgcttctggttgatggccatcatctcgcgtatcgtaacttctttgccctgaaaggattaaccaccagccgtggcgagccggtacagggtgtctacggctttgcaaagtcgctcctgaaagctctgaaagaagacggtgatgtggtgattgttgtctttgatgcgaaagcgccaagttttcgccacgaagcgtacgaagcttacaaagccgggcgtgctccaacgccggaagactttcctcgccaattggcgcttatgaaggaattagtggatttgcttggcctcgaacgcttggaagttcccggtttcgaggcagacgacgtattagcgactctcgcaaagaaagccgaacgtgagggctatgaagtccagatcttgacagcagatcgcgatcttttccagcttttatctccgcgcatctcggtgttacacccggaagggcatcgtatcaccccggaatggctctgggagaaatatggtttgcgtcccgaacaatgggtggattttcgcgccttagcaggcgatccgagcgacaatattccgggagttaaaggtatcggcgagaagacggcgctcaagctccttaaagaatgggggtcgttggagaacttgcttaagaatttagatcaggtcaaaccagagtcagtgcgtgagaagattcttgcacacctcgaagacctcaaattaagccgcgaattgtcccgtgtacgcaccgatttgccgctcgaagttgatttccgtcgccgccgcgaacctgactgggagggtcttaaagcgtttttagagcgtcttgaatttggttcgctcttgcatgaattcggccttttagaaagcccgttaccagccgaagaagcaccttggccaccgcccgaaggcgcgtttttaggttaccgtttgagtcgcccggaaccgatgtgggccgaattattggctcttgcagcgtctgcccagggacgtgtgtatcgcgcggaagaccctcatggtgcgctccgcggcctcttcgaagtccgtggactccttgccaaagacttagctgttgttgcattgcgcgaaggtcttgatttacctccgactgatgatccaatgcttcttgcgtacctcttggacccgtcaaacacgacgcccgaaggcgtagcccgtcgttacggcggcgagtggaccgaagatgcagcgaaacgcgcgttattggccgaacgtttgcacgccaatttattaggacgtttgcaaggcgaggaacgtctcctctggctttacgaagaagtggagaaaccattgagtcgcgtgctcgcgcatatggaagctaccggtgtcaaattagacgtggcgtatttggaggctctcagccttgaagttgctgccgaaatgcgccgcttggaggaagaagtattccgtttagcaggccactcctttcgcctttcttctcgcgatcagttagaacgtgtgttgttcgatgaacttggtctccctcctatcggcaagacagagaagaccggtaaacgtagcacttcagcggcggttttagaagctcttcgcgaagtccatcccattgtggacaagatcttgcagtaccgcgaactcgcgaaattgaaaggcacctatattgaccctcttccggcattagtccacccgaaaacgggacgcctccatacccgcttcaaccaaacagccacggcgaccggtcgtttgtcctcctctgatccaaaccttcagaatattccagtacgtaccccattgggccagaagatccgccgcgcgtttgtagctgaggagggttggcgtttagtggccctcgattatagccaaattgaattacgtgtccttgcccatctttctggcgatgagaacctcatccgcgtgtttcaggaaggcaaagacattcacactcaaacggcaagctggatgtttggattatcagctgaagcgatcgatcctttgatgcgtcgtgcagcgaagaccatcaatttcggtgttctctacggtatgagtgcctttcgtttgtcgcaggaattaggcattccctatgaagaagctgcggcgttcattcagaaatactttcaaagctatcccaaagttaaagcatggatcgagaagactctcgaagaaggccgcacacgtggttacgtagagaccttatttggacgtcgccgctatgttcccgatttaaacgctcgcgtgaaatctgtccgtgaagccgccgaacgcatggcgttcaacatgcctgtacagggcacggcagctgacctcatgaaacttgcaatggtgcgcctttttccacaattgcgtgaagttggtgcccgcatgctcttgcaggtccacgatgaactcttgttagaagcgccaaaagagcgtgcggaagaggtggcagccctcgcgaaagaggttatggaaggcgtgtggcccttagcggtgcctcttgaagtcgaagttggtattggcgaggattggctggctgccaaaggataatga

SEQ ID NO: 2950 - protein, 841 aa, synthetic construct
  REGION 1..841: note = Variant of DNA polymerase I from Thermus sp. strain 2.9
MHHHHHHGGSGVLPVFEPKGRVLLVDGHHLAYRNFFALKGLTTSRGEPVQGVYGFAKSLLKALKEDGDVVIVVFDAKAPSFRHEAYEAYKAGRAPTPEDFPRQLALMKELVDLLGLERLEVPGFEADDVLATLAKKAEREGYEVQILTADRDLFQLLSPRISVLHPEGHRITPEWLWEKYGLRPEQWVDFRALAGDPSDNIPGVKGIGEKTALKLLKEWGSLENLLKNLDQVKPESVREKILAHLEDLKLSRELSRVRTDLPLEVDFRRRREPDWEGLKAFLERLEFGSLLHEFGLLESPLPAEEAPWPPPEGAFLGYRLSRPEPMWAELLALAASAQGRVYRAEDPHGALRGLFEVRGLLAKDLAVVALREGLDLPPTDDPMLLAYLLDPSNTTPEGVARRYGGEWTEDAAKRALLAERLHANLLGRLQGEERLLWLYEEVEKPLSRVLAHMEATGVKLDVAYLEALSLEVAAEMRRLEEEVFRLAGHSFRLSSRDQLERVLFDELGLPPIGKTEKTGKRSTSAAVLEALREVHPIVDKILQYRELAKLKGTYIDPLPALVHPKTGRLHTRFNQTATATGRLSSSDPNLQNIPVRTPLGQKIRRAFVAEEGWRLVALDYSQIELRVLAHLSGDENLIRVFQEGKDIHTQTASWMFGLSAEAIDPLMRRAAKTINFGVLYGMSAFRLSQELGIPYEEAAAFIQKYFQSYPKVKAWIEKTLEEGRTRGYVETLFGRRRYVPDLNARVKSVREAAERMAFNMPVQGTAADLMKLAMVRLFPQLREVGARMLLQVHDELLLEAPKERAEEVAALAKEVMEGVWPLAVPLEVEVGIGEDWLAAKG

SEQ ID NO: 2951 - DNA, 2529 bp, synthetic construct
  misc_feature 1..2529: note = Variant of DNA polymerase I from Thermus sp. strain 2.9
  source 1..2529: mol_type = other DNA
atgcaccatcatcatcatcatggcggtagcggcgtgttaccggtgttcgagcctaaaggtcgcgtgcttctggttgatggccatcatctcgcgtatcgtaacttctttgccctgaaaggattaaccaccagcagcggcgagccggtacagggtgtctacggctttgcaaagtcgctcctgaaagctctgaaagaagacggtgatgtggtgattgttgtctttgatgcgaaagcgccaagttttcgccacgaagcgtacgaagcttacaaagccgggcgtgctccaacgccggaagactttcctcgccaattggcgcttatgaaggaattagtggatttgcttggcctcgaacgcttggaagttcccggtttcgaggcagacgacgtattagcgactctcgcaaagaaagccgaacgtgagggctatgaagtccagatcttgacagcagatcgcgatcttttccagcttttatctccgcgcatctcggtgttacacccggaagggcatcgtatcaccccggaatggctctgggagaaatatggtttgcgtcccgaacaatgggtggattttcgcgccttagcaggcgatccgagcgacaatattccgggagttaaaggtatcggcgagaagacggcgctcaagctccttaaagaatgggggtcgttggagaacttgcttaagaatttagatcaggtcaaaccagagtcagtgcgtgagaagattcttgctcacctcgaagacctcaaattaagccgcgaattgtcccgtgtacgcaccgatttgccgctcgaagttgatttccgtcgccgccgcgaacctgactgggagggtcttaaagcgtttttagagcgtcttgaatttggttcgctcttgcatgaattcggccttttagaaagcccgttaccagccgaagaagcaccttggccaccgcccgagggcgcgtttttaggttaccgtttgagtcgcccggaaccgatgtgggccgaattactggctcttgcagcgtctgcccagggacgtgtgtatcgcgcggaagaccctcatggtgcgctccgcggcctcttcgaagtccgtggactccttgccaaagacttagctgttgttgcattgcgcgaaggtcttgatttacctccgactgatgatccaatgcttcttgcgtacctcttggacccgtcaaacacgacgcccgaaggcgtagcccgtcgttacggcggcgagtggaccgaagatgcagcgaaacgcgcgttattggccgaacgtttgcacgccaatttattaggacgtttgcaaggcgaggaacgtctcctctggctttacgaagaagtggagaaaccattgagtcgcgtgctcgcgcatatggaagctaccggtgtcaaattagacgtggcgtatttggaggctctcagccttgaagttgctgcccacatgcgccgcttggaggaagaagtattccgtttagcaggccattcctttcgccttaattctcgcgatacgttagaacgtgtgttgttcgatgaacttggtctccctcctatcggcaagacagagaagaccggtaaacgtagcacttcagcggcggttttagaagctcttcgcgaagtccatcccattgtggacaagatcttgcagtaccgcgaactcgcgaaattgaaaggcacctatattgaccgtcttccggcattagtccacccgaaaacgggacgcctccatacccgcttcaaccaaacagccacggcgaccggtcgtttgtcctcctctgatccaaaccttcagaatattccagtacgtaccccattgggccagaagatccgccgtgcgtttgtagctgaggagggttggcgtttagtggccctcgattatagccaaattgaattacgtgtccttgcccatctttctggcgatgagaacctcatccgcgtgtttcaggaaggcaaagacattcacactcaaacggcaagctggatgtttggattatcagctgaagcgatcgatcctttgatgcgtcgtgcagcgaagaccatcaatttcggtgttctctacggtatgagtgcctttcgtttgtcgcaggaattaggcattccctatgaagaagctgcggcgttcattcagaaatactttcaaagctatcccaaagttaaagcatggatcgagaagactctcgaagaaggccgcacacgtggttacgtagagaccttatttggacgtcgccgctatgttcccgatttaaacgctcgcgtgaaaggcaagcgtgaagccgccgaacgcatggcgttcaacatgcctgtacagggcacggcagctgacctcatgaaacttgcaatggtgcgcctttttccacaattgcgtgaagttggtgcccgcatgctcttgcaggtccacgatgaactcttgttagaagcgccaaaagagcgtgcggaagaggtggcagccctcgcgaaagaagttatggaaggcgtgtggcccttagcggtgcctcttgaagtcgaagttggtattggcgaggattggctggctgccaaaggataatga

SEQ ID NO: 2952 - protein, 841 aa, synthetic construct
  REGION 1..841: note = Variant of DNA polymerase I from Thermus sp. strain 2.9
MHHHHHHGGSGVLPVFEPKGRVLLVDGHHLAYRNFFALKGLTTSSGEPVQGVYGFAKSLLKALKEDGDVVIVVFDAKAPSFRHEAYEAYKAGRAPTPEDFPRQLALMKELVDLLGLERLEVPGFEADDVLATLAKKAEREGYEVQILTADRDLFQLLSPRISVLHPEGHRITPEWLWEKYGLRPEQWVDFRALAGDPSDNIPGVKGIGEKTALKLLKEWGSLENLLKNLDQVKPESVREKILAHLEDLKLSRELSRVRTDLPLEVDFRRRREPDWEGLKAFLERLEFGSLLHEFGLLESPLPAEEAPWPPPEGAFLGYRLSRPEPMWAELLALAASAQGRVYRAEDPHGALRGLFEVRGLLAKDLAVVALREGLDLPPTDDPMLLAYLLDPSNTTPEGVARRYGGEWTEDAAKRALLAERLHANLLGRLQGEERLLWLYEEVEKPLSRVLAHMEATGVKLDVAYLEALSLEVAAHMRRLEEEVFRLAGHSFRLNSRDTLERVLFDELGLPPIGKTEKTGKRSTSAAVLEALREVHPIVDKILQYRELAKLKGTYIDRLPALVHPKTGRLHTRFNQTATATGRLSSSDPNLQNIPVRTPLGQKIRRAFVAEEGWRLVALDYSQIELRVLAHLSGDENLIRVFQEGKDIHTQTASWMFGLSAEAIDPLMRRAAKTINFGVLYGMSAFRLSQELGIPYEEAAAFIQKYFQSYPKVKAWIEKTLEEGRTRGYVETLFGRRRYVPDLNARVKGKREAAERMAFNMPVQGTAADLMKLAMVRLFPQLREVGARMLLQVHDELLLEAPKERAEEVAALAKEVMEGVWPLAVPLEVEVGIGEDWLAAKG

SEQ ID NO: 2953 - DNA, 2529 bp, synthetic construct
  misc_feature 1..2529: note = Variant of DNA polymerase I from Thermus sp. strain 2.9
  source 1..2529: mol_type = other DNA
atgcaccatcatcatcatcatggcggtagcggcgtgttaccggtgttcgagcctaaaggtcgcgtgcttctggttgatggccatcatctcgcgtatcgtaacttctttgccctgaaaggattaaccaccagcagcggcgagccggtacagggtgtctacggctttgcaaagtcgctcctgaaagctctgaaagaagacggtgatgtggtgattgttgtctttgatgcgaaagcgccaagttttcgccacgaagcgtacgaagcttacaaagccgggcgtgctccaacgccggaagactttcctcgccaattggcgcttatgaaggaattagtggatttgcttggcctcgaacgcttggaagttcccggtttcgaggcagacgacgtattagcgactctcgcaaagaaagccgaacgtgagggctatgaagtccagatcttgacagcagatcgcgatcttttccagcttttatctccgcgcatctcggtgttacacccggaagggcatcgtatcaccccggaatggctctgggagaaatatggtttgcgtcccgaacaatgggtggattttcgcgccttagcaggcgatccgagcgacaatattccgggagttaaaggtatcggcgagaagacggcgctcaagctccttaaagaatgggggtcgttggagaacttgcttaagaatttagatcaggtcaaaccagagtcagtgcgtgagaagattcttgctcacctcgaagacctcaaattaagccgcgaattgtcccgtgtacgcaccgatttgccgctcgaagttgatttccgtcgccgccgcgaacctgactgggagggtcttaaagcgtttttagagcgtcttgaatttggttcgctcttgcatgaattcggccttttagaaagcccgttaccagccgaagaagcaccttggccaccgcccgagggcgcgtttttaggttaccgtttgagtcgcccggaaccgatgtgggccgaattactggctcttgcagcgtctgcccagggacgtgtgtatcgcgcggaagaccctcatggtgcgctccgcggcctcttcgaagtccgtggactccttgccaaagacttagctgttgttgcattgcgcgaaggtcttgatttacctccgactgatgatccaatgcttcttgcgtacctcttggacccgtcaaacacgacgcccgaaggcgtagcccgtcgttacggcggcgagtggaccgaagatgcagcgaaacgcgcgttattggccgaacgtttgcacgccaatttattaggacgtttgcaaggcgaggaacgtctcctctggctttacgaagaagtggagaaaccattgagtcgcgtgctcgcgcatatggaagctaccggtgtcaaattagacgtggcgtatttggaggctctcagccttgaagttgctgcccacatgcgccgcttggaggaagaagtattccgtttagcaggccattcctttcgccttgtctctcgcgatcagttagaacgtgtgttgttcgatgaacttggtctccctcctatcggcaagacagagaagaccggtaaacgtagcacttcagcggcggttttagaagctcttcgcgaagtccatcccattgtggacaagatcttgcagtaccgcgaactcgcgaaattgaaaggcacctatattgaccgtcttccggcattagtccacccgaaaacgggacgcctccatacccgcttcaaccaaacagccacggcgaccggtcgtttgtcctcctctgatccaaaccttcagaatattccagtacgtaccccattgggccagaagatccgcaaagcgtttgtagctgaggagggttggcgtttagtggccctcgattatagccaaattgaattacgtgtccttgcccatctttctggcgatgagaacctcatccgcgtgtttcaggaaggcaaagacattcacactcaaacggcaagctggatgtttggattaagtgctgaagcgatcgatcctttgatgcgtcgtgcagcgaagaccatcaatttcggtgttctctacggtatgagtgcctttcgtttgtcgcaggaattaggcattccctatgaagaagctcaggcgttcattcagaaatactttcaaagctatcccaaagttaaagcatggatcgagaagactctcgaagaaggccgcacacgtggttacgtagagaccttatttggacgtcgccgctatgttcccgatttaaacgctcgcgtgaaaggcaagcgtgaagccgccgaacgcatggcgttcaacatgcctgtacagggcacggcagctgacctcatgaaacttgcaatggtgcgcctttttccacaattgcgtgaagttggtgcccgcatgctcttgcaggtccacgatgaactcttgttagaagcgccaaaagagcgtgcggaagaggtggcagccctcgcgaaagaagttatggaaggcgtgtggcccttagcggtgcctcttgaagtcgaagttggtattggcgaggattggctggctgccaaaggataatga

SEQ ID NO: 2954 - protein, 841 aa, synthetic construct
  REGION 1..841: note = Variant of DNA polymerase I from Thermus sp. strain 2.9
MHHHHHHGGSGVLPVFEPKGRVLLVDGHHLAYRNFFALKGLTTSSGEPVQGVYGFAKSLLKALKEDGDVVIVVFDAKAPSFRHEAYEAYKAGRAPTPEDFPRQLALMKELVDLLGLERLEVPGFEADDVLATLAKKAEREGYEVQILTADRDLFQLLSPRISVLHPEGHRITPEWLWEKYGLRPEQWVDFRALAGDPSDNIPGVKGIGEKTALKLLKEWGSLENLLKNLDQVKPESVREKILAHLEDLKLSRELSRVRTDLPLEVDFRRRREPDWEGLKAFLERLEFGSLLHEFGLLESPLPAEEAPWPPPEGAFLGYRLSRPEPMWAELLALAASAQGRVYRAEDPHGALRGLFEVRGLLAKDLAVVALREGLDLPPTDDPMLLAYLLDPSNTTPEGVARRYGGEWTEDAAKRALLAERLHANLLGRLQGEERLLWLYEEVEKPLSRVLAHMEATGVKLDVAYLEALSLEVAAHMRRLEEEVFRLAGHSFRLVSRDQLERVLFDELGLPPIGKTEKTGKRSTSAAVLEALREVHPIVDKILQYRELAKLKGTYIDRLPALVHPKTGRLHTRFNQTATATGRLSSSDPNLQNIPVRTPLGQKIRKAFVAEEGWRLVALDYSQIELRVLAHLSGDENLIRVFQEGKDIHTQTASWMFGLSAEAIDPLMRRAAKTINFGVLYGMSAFRLSQELGIPYEEAQAFIQKYFQSYPKVKAWIEKTLEEGRTRGYVETLFGRRRYVPDLNARVKGKREAAERMAFNMPVQGTAADLMKLAMVRLFPQLREVGARMLLQVHDELLLEAPKERAEEVAALAKEVMEGVWPLAVPLEVEVGIGEDWLAAKG

SEQ ID NO: 2955 - DNA, 2529 bp, synthetic construct
  misc_feature 1..2529: note = Variant of DNA polymerase I from Thermus sp. strain 2.9
  source 1..2529: mol_type = other DNA
atgcaccatcatcatcatcatggcggtagcggcgtgttaccggtgttcgagcctaaaggtcgcgtgcttctggttgatggccatcatctcgcgtatcgtaacttctttgccctgaaaggattaaccaccagcagcggcgagccggtacagggtgtctacggctttgcaaagtcgctcctgaaagctctgaaagaagacggtgatgtggtgattgttgtctttgatgcgaaagcgccaagttttcgccacgaagcgtacgaagcttacaaagccgggcgtgctccaacgccggaagactttcctcgccaattggcgcttatgaaggaattagtggatttgcttggcctcgaacgcttggaagttcccggtttcgaggcagacgacgtattagcgactctcgcaaagaaagccgaacgtgagggctatgaagtccagatcttgacagcagatcgcgatcttttccagcttttatctccgcgcatctcggtgttacacccggaagggcatcgtatcaccccggaatggctctgggagaaatatggtttgcgtcccgaacaatgggtggattttcgcgccttagcaggcgatccgagcgacaatattccgggagttaaaggtatcggcgagaagacggcgctcaagctccttaaagaatgggggtcgttggagaacttgcttaagaatttagatcaggtcaaaccagagtcagtgcgtgagaagattcttgctcacctcgaagacctcaaattaagccgcgaattgtcccgtgtacgcaccgatttgccgctcgaagttgatttccgtcgccgccgcgaacctgactgggagggtcttaaagcgtttttagagcgtcttgaatttggttcgctcttgcatgaattcggccttttagaaagcccgttaccagccgaagaagcaccttggccaccgcccgagggcgcgtttttaggttaccgtttgagtcgcccggaaccgatgtgggccgaattactggctcttgcagcgtctgcccagggacgtgtgtatcgcgcggaagaccctcatggtgcgctccgcggcctcttcgaagtccgtggactccttgccaaagacttagctgttgttgcattgcgcgaaggtcttgatttacctccgactgatgatccaatgcttcttgcgtacctcttggacccgtcaaacacgacgcccgaaggcgtagcccgtcgttacggcggcgagtggaccgaagatgcagcgaaacgcgcgttattggccgaacgtttgcacgccaatttattaggacgtttgcaaggcgaggaacgtctcctctggctttacgaagaagtggagaaaccattgagtcgcgtgctcgcgcatatggaagctaccggtgtcaaattagacgtggcgtatttggaggctctcagccttgaagttgctgcccacatgcgccgcttggaggaagaagtagtgcgtttagcaggccattcctttcgccttaattctcgcgatcagttagaacgtgtgttgttcgatgaacttggtctccctcctatcggcaagacagagaagaccggtaaacgtagcacttcagcggcggttttagaagctcttcgcgaagtccatcccattgtggacaagatcttgcagtaccgcgaactcgcgaaattgaaaggcacctatattgaccgtcttccggcattagtccacccgaaaacgggacgcctccatacccgcttcaaccaaacagccacggcgaccggtcgtttgtcctcctctgatccaaaccttcagaatattccagtacgtaccccattgggccagaagatccgccgtgcgtttgtagctgaggagggttggcgtttagtggccctcgattatagccaaattgaattacgtgtccttgcccatctttctggcgatgagaacctcatccgcgtgtttcaggaaggcaaagacattcacactcaaacggcaagctggatgtttggattatcagctgaagcgatcgatcctttgatgcgtcgtgcagcgaagaccatcaatttcggtgttctctacggtatgagtgcctttcgtttgtcgcaggaattaggcattccctatgaagaagctgcggcgttcattcagaaatactttcaaagctatcccaaagttaaagcatggatcgagaagactctcgaagaaggccgcacacgtggttacgtagagaccttatttggacgtcgccgctatgttcccgatttaaacgctcgcgtgaaaggcaagcgtgaagccgccgaacgcatggcgttcaacatgcctgtacagggcacggcagctgacctcatgaaacttgcaatggtgcgcctttttccacaattgcgtgaagttggtgcccgcatgctcttgcaggtccacgatgaactcttgttagaagcgccaaaagagcgtgcggaagaggtggcagccctcgcgaaagaagttatggaaggcgtgtggcccttagcggtgcctcttgaagtcgaagttggtattggcgaggattggctggctgccaaaggataatga

SEQ ID NO: 2956 - protein, 841 aa, synthetic construct
  REGION 1..841: note = Variant of DNA polymerase I from Thermus sp. strain 2.9
MHHHHHHGGSGVLPVFEPKGRVLLVDGHHLAYRNFFALKGLTTSSGEPVQGVYGFAKSLLKALKEDGDVVIVVFDAKAPSFRHEAYEAYKAGRAPTPEDFPRQLALMKELVDLLGLERLEVPGFEADDVLATLAKKAEREGYEVQILTADRDLFQLLSPRISVLHPEGHRITPEWLWEKYGLRPEQWVDFRALAGDPSDNIPGVKGIGEKTALKLLKEWGSLENLLKNLDQVKPESVREKILAHLEDLKLSRELSRVRTDLPLEVDFRRRREPDWEGLKAFLERLEFGSLLHEFGLLESPLPAEEAPWPPPEGAFLGYRLSRPEPMWAELLALAASAQGRVYRAEDPHGALRGLFEVRGLLAKDLAVVALREGLDLPPTDDPMLLAYLLDPSNTTPEGVARRYGGEWTEDAAKRALLAERLHANLLGRLQGEERLLWLYEEVEKPLSRVLAHMEATGVKLDVAYLEALSLEVAAHMRRLEEEVVRLAGHSFRLNSRDQLERVLFDELGLPPIGKTEKTGKRSTSAAVLEALREVHPIVDKILQYRELAKLKGTYIDRLPALVHPKTGRLHTRFNQTATATGRLSSSDPNLQNIPVRTPLGQKIRRAFVAEEGWRLVALDYSQIELRVLAHLSGDENLIRVFQEGKDIHTQTASWMFGLSAEAIDPLMRRAAKTINFGVLYGMSAFRLSQELGIPYEEAAAFIQKYFQSYPKVKAWIEKTLEEGRTRGYVETLFGRRRYVPDLNARVKGKREAAERMAFNMPVQGTAADLMKLAMVRLFPQLREVGARMLLQVHDELLLEAPKERAEEVAALAKEVMEGVWPLAVPLEVEVGIGEDWLAAKG

SEQ ID NO: 2957 - DNA, 2529 bp, synthetic construct
  misc_feature 1..2529: note = Variant of DNA polymerase I from Thermus sp. strain 2.9
  source 1..2529: mol_type = other DNA
atgcaccatcatcatcatcatggcggtagcggcgtgttaccggtgttcgagcctaaaggtcgcgtgcttctggttgatggccatcatctcgcgtatcgtaacttctttgccctgaaaggattaaccaccagcagcggcgagccggtacagggtgtctacggctttgcaaagtcgctcctgaaagctctgaaaaaagacggtgatgtggtgattgttgtctttgatgcgaaagcgccaagttttcgccacgaagcgtacgaagcttacaaagccgggcgtgctccaacgccggaagactttcctcgccaattggcgcttatgaaggaattagtggatttgcttggcctcgaacgcttggaagttcccggtttcgaggcagacgacgtattagcgactctcgcaaagaaagccgaacgtgagggctatgaagtccagatcttgacagcagatcgcgatcttttccagcttttatctccgcgcatctcggtgttacacccggaagggcatcgtatcaccccggaatggctctgggagaaatatggtttgcgtcccgaacaatgggtggattttcgcgccttagcaggcgatccgagcgacaatattccgggagttaaaggtatcggcgagaagacggcgctcaagctccttaaagaatgggggtcgttggagaacttgcttaagaatttagatcaggtcaaaccagagtcagtgcgtgagaagattcttgctcacctcgaagacctcaaattaagccgcgaattgtcccgtgtacgcaccgatttgccgctcgaagttgatttccgtcgccgccgcgaacctgactgggagggtcttaaagcgtttttagagcgtcttgaatttggttcgctcttgcatgaattcggccttttagaaagcccgttaccagccgaagaagcaccttggccaccgcccgagggcgcgtttttaggttaccgtttgagtcgcccggaaccgatgtgggccgaattactggctcttgcagcgtctgcccagggacgtgtgtatcgcgcggaagaccctcatggtgcgctccgcggcctcttcgaagtccgtggactccttgccaaagacttagctgttgttgcattgcgcgaaggtcttgatttacctccgactgatgatccaatgcttcttgcgtacctcttggacccgtcaaacacgacgcccgaaggcgtagcccgtcgttacggcggcgagtggaccgaagatgcagcgaaacgcgcgttattggccgaacgtttgcacgccaatttattaggacgtttgcaaggcgaggaacgtctcctctggctttacgaagaagtggagaaaccattgagtcgcgtgctcgcgcatatggaagctaccggtgtcaaattagacgtggcgtatttggaggctctcagccttgaagttgctgcccacatgcgccgcttggaggaagaagtattccgtttagcaggccattcctttcgccttaattctcgcgatcagttagaacgtgtgttgttcgatgaacttggtctccctcctatcggcaagacagagaagaccggtaaacgtagcacttcagcggcggttttagaagctcttcgcgaagtccatcccattgtggacaagatcttgcagtaccgcgaactcgcgaaattgaaaggcacctatattgaccgtcttccggcattagtccacccgaaaacgggacgcctccatacccgcttcaaccaaacagccacggcgaccggtcgtttgtcctcctctgatccaaaccttcagaatattccagtacgtaccccattgggccagaagatccgccgtgcgtttgtagctgaggagggttggcgtttagtggccctcgattatagccaaattgaattacgtgtccttgcccatctttctggcgatgagaacctcatccgcgtgtttcaggaaggcaaagacattcacactcaaacggcaagctggatgtttggattatcagctgaagcgatcgatcctttgatgcgtcgtgcagcgaagaccatcaatttcggtgttctctacggtatgagtgcccgtcgtttgtcgcaggaattaggcattccctatgaagaagctgcggcgttcattcagaaatactttcaaagctatcccaaagttaaagcatggatcgagaagactctcgaagaaggccgcacacgtggttacgtagagaccttatttggacgtcgccgctatgttcccgatttaaacgctcgcgtgaaaggcaagcgtgaagccgccgaacgcatggcgttcaacatgcctgtacagggcacggcagctgacctcatgaaacttgcaatggtgcgcctttttccacaattgcgtgaagttggtgcccgcatgctcttgcaggtccacgatgaactcttgttagaagcgccaaaagagcgtgcggaagaggtggcagccctcgcgaaagaagttatggaaggcgtgtggcccttagcggtgcctcttgaagtcgaagttggtattggcgaggattggctggctgccaaaggataatga

SEQ ID NO: 2958 - protein, 841 aa, synthetic construct
  REGION 1..841: note = Variant of DNA polymerase I from Thermus sp. strain 2.9
MHHHHHHGGSGVLPVFEPKGRVLLVDGHHLAYRNFFALKGLTTSSGEPVQGVYGFAKSLLKALKKDGDVVIVVFDAKAPSFRHEAYEAYKAGRAPTPEDFPRQLALMKELVDLLGLERLEVPGFEADDVLATLAKKAEREGYEVQILTADRDLFQLLSPRISVLHPEGHRITPEWLWEKYGLRPEQWVDFRALAGDPSDNIPGVKGIGEKTALKLLKEWGSLENLLKNLDQVKPESVREKILAHLEDLKLSRELSRVRTDLPLEVDFRRRREPDWEGLKAFLERLEFGSLLHEFGLLESPLPAEEAPWPPPEGAFLGYRLSRPEPMWAELLALAASAQGRVYRAEDPHGALRGLFEVRGLLAKDLAVVALREGLDLPPTDDPMLLAYLLDPSNTTPEGVARRYGGEWTEDAAKRALLAERLHANLLGRLQGEERLLWLYEEVEKPLSRVLAHMEATGVKLDVAYLEALSLEVAAHMRRLEEEVFRLAGHSFRLNSRDQLERVLFDELGLPPIGKTEKTGKRSTSAAVLEALREVHPIVDKILQYRELAKLKGTYIDRLPALVHPKTGRLHTRFNQTATATGRLSSSDPNLQNIPVRTPLGQKIRRAFVAEEGWRLVALDYSQIELRVLAHLSGDENLIRVFQEGKDIHTQTASWMFGLSAEAIDPLMRRAAKTINFGVLYGMSARRLSQELGIPYEEAAAFIQKYFQSYPKVKAWIEKTLEEGRTRGYVETLFGRRRYVPDLNARVKGKREAAERMAFNMPVQGTAADLMKLAMVRLFPQLREVGARMLLQVHDELLLEAPKERAEEVAALAKEVMEGVWPLAVPLEVEVGIGEDWLAAKG

SEQ ID NO: 2959 - DNA, 2529 bp, synthetic construct
  misc_feature 1..2529: note = Variant of DNA polymerase I from Thermus sp. strain 2.9
  source 1..2529: mol_type = other DNA
atgcaccatcatcatcatcatggcggtagcggcgtgttaccggtgttcgagcctaaaggtcgcgtgcttctggttgatggccatcatctcgcgtatcgtaacttctttgccctgaaaggattaaccaccagcagcggcgagccggtacagggtgtctacggctttgcaaagtcgctcctgaaagctctgaaagaagacggtgatgtggtgattgttgtctttgatgcgaaagcgccaagttttcgccacgaagcgtacgaagcttacaaagccgggcgtgctccaacgccggaagactttcctcgccaattggcgcttatgaaggaattagtggatttgcttggcctcgaacgcttggaagttcccggtttcgaggcagacgacgtattagcgactctcgcaaagaaagccgaacgtgagggctatgaagtccagatcttgacagcagatcgcgatcttttccagcttttatctccgcgcatctcggtgttacacccggaagggcatcgtatcaccccggaatggctctgggagaaatatggtttgcgtcccgaacaatgggtggattttcgcgccttagcaggcgatccgagcgacaatattccgggagttaaaggtatcggcgagaagacggcgctcaagctccttaaagaatgggggtcgttggagaacttgcttaagaatttagatcaggtcaaaccagagtcagtgcgtgagaagattcttgctcacctcgaagacctcaaattaagccgcgaattgtcccgtgtacgcaccgatttgccgctcgaagttgatttccgtcgccgccgcgaacctgactgggagggtcttaaagcgtttttagagcgtcttgaatttggttcgctcttgcatgaattcggccttttagaaagcccgttaccagccgaagaagcaccttggccaccgcccgagggcgcgtttttaggttaccgtttgagtcgcccggaaccgatgtgggccgaattactggctcttgcagcgtctgcccagggacgtgtgtatcgcgcggaagaccctcatggtgcgctccgcggcctcttcgaagtccgtggactccttgccaaagacttagctgttgttgcattgcgcgaaggtcttgatttacctccgactgatgatccaatgcttcttgcgtacctcttggacccgtcaaacacgacgcccgaaggcgtagcccgtcgttacggcggcgagtggaccgaagatgcagcgaaacgcgcgttattggccgaacgtttgcacgccaatttattaggacgtttgcaaggcgaggaacgtctcctctggctttacgaagaagtggagaaaccattgagtcgcgtgctcgcgcatatggaagctaccggtgtcaaattagacgtggcgtatttggaggctctcagccttgaagttgctgcccacatgcgccgcttggaggaagaagtattccgtttagcaggccattcctttcgccttaattctcgcgatcagttagaacgtgtgttgttcgatgaacttggtctccctcctatcggcaagacagagaagaccggtaaacgtagcactgatgcggcggttttagaagctcttcgcgaagtccatcccattgtggacaagatcttgcagtaccgcgaactcgcgaaattgaaaggcacctatattgaccgtcttccggcattagtccacccgaaaacgggacgcctccatacccgcttcaaccaaacagccacggcgaccggtcgtttgtcctcctctgatccaaaccttcagaatattccagtacgtaccccattgggccagaagatccgccgtgcgtttgtagctgaggagggttggcgtttagtggccctcgattatagccaaattgaattacgtgtccttgcccatctttctggcgatgagaacctcatccgcgtgtttcaggaaggcaaagacattcacactcaaacggcaagctggatgtttggattatcagctgaagcgatcgatcctttgatgcgtcgtgcagcgaagaccatcaatttcggtgttctctacggtatgagtgcctttcgtttgtcgcaggaattaggcattccctatgaagaagctgcggcgttcattcagaaatactttcaaagctatcccaaagttaaagcatggatcgagaagactctcgaagaaggccgcacacgtggttacgtagagaccttatttggacgtcgccgctatgttcccgatttaaacgctcgcgtgaaaggcaagcgtgaagccgccgaacgcatggcgttcaacatgcctgtacagggcacggcagctgacctcatgaaacttgcaatggtgcgcctttttccacaattgcgtgaagttggtgcccgcatgctcttgcaggtccacgatgaactcttgttagaagcgccaaaagagcgtgcggaagaggtggcagccctcgcgaaagaagttatggaaggcgtgtggcccttagcggtgcctcttgaagtcgaagttggtattggcgaggattggctggctgccaaaggataatga

SEQ ID NO: 2960 - protein, 841 aa, synthetic construct
  REGION 1..841: note = Variant of DNA polymerase I from Thermus sp. strain 2.9
MHHHHHHGGSGVLPVFEPKGRVLLVDGHHLAYRNFFALKGLTTSSGEPVQGVYGFAKSLLKALKEDGDVVIVVFDAKAPSFRHEAYEAYKAGRAPTPEDFPRQLALMKELVDLLGLERLEVPGFEADDVLATLAKKAEREGYEVQILTADRDLFQLLSPRISVLHPEGHRITPEWLWEKYGLRPEQWVDFRALAGDPSDNIPGVKGIGEKTALKLLKEWGSLENLLKNLDQVKPESVREKILAHLEDLKLSRELSRVRTDLPLEVDFRRRREPDWEGLKAFLERLEFGSLLHEFGLLESPLPAEEAPWPPPEGAFLGYRLSRPEPMWAELLALAASAQGRVYRAEDPHGALRGLFEVRGLLAKDLAVVALREGLDLPPTDDPMLLAYLLDPSNTTPEGVARRYGGEWTEDAAKRALLAERLHANLLGRLQGEERLLWLYEEVEKPLSRVLAHMEATGVKLDVAYLEALSLEVAAHMRRLEEEVFRLAGHSFRLNSRDQLERVLFDELGLPPIGKTEKTGKRSTDAAVLEALREVHPIVDKILQYRELAKLKGTYIDRLPALVHPKTGRLHTRFNQTATATGRLSSSDPNLQNIPVRTPLGQKIRRAFVAEEGWRLVALDYSQIELRVLAHLSGDENLIRVFQEGKDIHTQTASWMFGLSAEAIDPLMRRAAKTINFGVLYGMSAFRLSQELGIPYEEAAAFIQKYFQSYPKVKAWIEKTLEEGRTRGYVETLFGRRRYVPDLNARVKGKREAAERMAFNMPVQGTAADLMKLAMVRLFPQLREVGARMLLQVHDELLLEAPKERAEEVAALAKEVMEGVWPLAVPLEVEVGIGEDWLAAKG

SEQ ID NO: 2961 - DNA, 2529 bp, synthetic construct
  misc_feature 1..2529: note = Variant of DNA polymerase I from Thermus sp. strain 2.9
  source 1..2529: mol_type = other DNA
atgcaccatcatcatcatcatggcggtagcggcgtgttaccggtgttcgagcctaaaggtcgcgtgcttctggttgatggccatcatctcgcgtatcgtaacttctttgccctgaaaggattaaccaccagcagcggcgagccggtacagggtgtctacggctttgcaaagtcgctcctgaaagctctgaaagaagacggtgatgtggtgattgttgtctttgatgcgaaagcgccaagttttcgccacgaagcgtacgaagcttacaaagccgggcgtgctccaacgccggaagactttcctcgccaattggcgcttatgaaggaattagtggatttgcttggcctcgaacgcttggaagttcccggtttcgaggcagacgacgtattagcgactctcgcaaagaaagccgaacgtgagggctatgaagtccagatcttgacagcagatcgcgatcttttccagcttttatctccgcgcatctcggtgttacacccggaagggcatcgtatcaccccggaatggctctgggagaaatatggtttgcgtcccgaacaatgggtggattttcgcgccttagcaggcgatccgagcgacaatattccgggagttaaaggtatcggcgagaagacggcgctcaagctccttaaagaatgggggtcgttggagaacttgcttaagaatttagatcaggtcaaaccagagtcagtgcgtgagaagattcttgctcacctcgaagacctcaaattaagccgcgaattgtcccgtgtacgcaccgatttgccgctcgaagttgatttccgtcgccgccgcgaacctgactgggagggtcttaaagcgtttttagagcgtcttgaatttggttcgctcttgcatgaattcggccttttagaaagcccgttaccagccgaagaagcaccttggccaccgcccgagggcgcgtttttaggttaccgtttgagtcgcccggaaccgatgtgggccgaattactggctcttgcagcgtctgcccagggacgtgtgtatcgcgcggaagaccctcatggtgcgctccgcggcctcttcgaagtccgtggactccttgccaaagacttagctgttgttgcattgcgcgaaggtcttgatttacctccgactgatgatccaatgcttcttgcgtacctcttggacccgtcaaacacgacgcccgaaggcgtagcccgtcgttacggcggcgagtggaccgaagatgcagcgaaacgcgcgttattggccgaacgtttgcacgccaatttattaggacgtttgcaaggcgaggaacgtctcctctggctttacgaagaagtggagaaaccattgagtcgcgtgctcgcgcatatggaagctaccggtgtcaaattagacgtggcgtatttggaggctctcagccttgaagttgctgcccacatgcgccgcttggaggaagaagtattccgtttagcaggccattcctttcgccttaattctcgcgatcagttagaacgtgtgttgttcgatgaacttggtctccctcctatcggcaagacagagaagaccggtaaacgtagcacttcagcggcggttttagaagctcttcgcgaagtccatcccattgtggacaagatcttgcagtaccgcgaactcgcgaaattgaaaggcacctatattgaccgtcttccggcattagtccacccgaaaacgggacgcctccatacccgcttcaaccaaacagccacggcgaccggtcgtttgtcctcctctgatccaaaccttcagaatattccagtacgtaccccattgggccagaagatccgccgtgcgtttgtagctgaggagggttggcgtttagtggccctcgattatagccaaattgaattacgtgtccttgcccatctttctggcgatgagaacctcatccgcgtgtttcaggaaggcaaagacattcacactcaaacggcaagctggatgtttggattatcagctgaagcgatcgatcctttgatgcgtcgtgcagcgaagaccatcaatttcggtgttctctacggtatgagtgccaagcgtttgtcgcaggaattaggcattccctatgaagaagctgcggcgttcattcagaaatactttcaaagctatcccaaagttaaaacatggatcgagaagactctcgaagaaggccgcacacgtggttacgtagagaccttatttggacgtcgccgctatgttcccgatttaaacgctcgcgtgaaaggcaagcgtgaagccgccgaacgcatggcgttcaacatgcctgtacagggcacggcagctgacctcatgaaacttgcaatggtgcgcctttttccacaattgcgtgaagttggtgcccgcatgctcttgcaggtccacgatgaactcttgttagaagcgccaaaagagcgtgcggaagaggtggcagccctcgcgaaagaagttatggaaggcgtgtggcccttagcggtgcctcttgaagtcgaagttggtattggcgaggattggctggctgccaaaggataatga

SEQ ID NO: 2962 - protein, 841 aa, synthetic construct
  REGION 1..841: note = Variant of DNA polymerase I from Thermus sp. strain 2.9
MHHHHHHGGSGVLPVFEPKGRVLLVDGHHLAYRNFFALKGLTTSSGEPVQGVYGFAKSLLKALKEDGDVVIVVFDAKAPSFRHEAYEAYKAGRAPTPEDFPRQLALMKELVDLLGLERLEVPGFEADDVLATLAKKAEREGYEVQILTADRDLFQLLSPRISVLHPEGHRITPEWLWEKYGLRPEQWVDFRALAGDPSDNIPGVKGIGEKTALKLLKEWGSLENLLKNLDQVKPESVREKILAHLEDLKLSRELSRVRTDLPLEVDFRRRREPDWEGLKAFLERLEFGSLLHEFGLLESPLPAEEAPWPPPEGAFLGYRLSRPEPMWAELLALAASAQGRVYRAEDPHGALRGLFEVRGLLAKDLAVVALREGLDLPPTDDPMLLAYLLDPSNTTPEGVARRYGGEWTEDAAKRALLAERLHANLLGRLQGEERLLWLYEEVEKPLSRVLAHMEATGVKLDVAYLEALSLEVAAHMRRLEEEVFRLAGHSFRLNSRDQLERVLFDELGLPPIGKTEKTGKRSTSAAVLEALREVHPIVDKILQYRELAKLKGTYIDRLPALVHPKTGRLHTRFNQTATATGRLSSSDPNLQNIPVRTPLGQKIRRAFVAEEGWRLVALDYSQIELRVLAHLSGDENLIRVFQEGKDIHTQTASWMFGLSAEAIDPLMRRAAKTINFGVLYGMSAKRLSQELGIPYEEAAAFIQKYFQSYPKVKTWIEKTLEEGRTRGYVETLFGRRRYVPDLNARVKGKREAAERMAFNMPVQGTAADLMKLAMVRLFPQLREVGARMLLQVHDELLLEAPKERAEEVAALAKEVMEGVWPLAVPLEVEVGIGEDWLAAKG

SEQ ID NO: 2963 - DNA, 2529 bp, synthetic construct
  misc_feature 1..2529: note = Variant of DNA polymerase I from Thermus sp. strain 2.9
  source 1..2529: mol_type = other DNA
atgcaccatcatcatcatcatggcggtagcggcgtgttaccggtgttcgagcctaaaggtcgcgtgcttctggttgatggccatcatctcgcgtatcgtaacttctttgccctgaaaggattaaccaccagcagcggcgagccggtacagggtgtctacggctttgcaaagtcgctcctgaaagctctgaaagaagacggtgatgtggtgattgttgtctttgatgcgaaagcgccaagttttcgccacgaagcgtacgaagcttacaaagccgggcgtgctccaacgccggaagactttcctcgccaattggcgcttatgaaggaattagtggatttgcttggcctcgaacgcttggaagttcccggtttcgaggcagacgacgtattagcgactctcgcaaagaaagccgaacgtgagggctatgaagtccagatcttgacagcagatcgcgatcttttccagcttttatctccgcgcatctcggtgttacacccggaagggcatcgtatcaccccggaatggctctgggagaaatatggtttgcgtcccgaacaatgggtggattttcgcgccttagcaggcgatccgagcgacaatattccgggagttaaaggtatcggcgagaagacggcgctcaagctccttaaagaatgggggtcgttggagaacttgcttaagaatttagatcaggtcaaaccagagtcagtgcgtgagaagattcttgctcacctcgaagacctcaaattaagccgcgaattgtcccgtgtacgcaccgatttgccgctcgaagttgatttcggtcgccgccgcgaacctgactgggagggtcttaaagcgtttttagagcgtcttgaatttggttcgctcttgcatgaattcggccttttagaaagcccgttaccagccgaagaagcaccttggccaccgcccgagggcgcgtttttaggttaccgtttgagtcgcccggaaccgatgtgggccgaattactggctcttgcagcgtctgcccagggacgtgtgtatcgcgcggaagaccctcatggtgcgctccgcggcctcttcgaagtccgtggactccttgccaaagacttagctgttgttgcattgcgcgaaggtcttgatttacctccgactgatgatccaatgcttcttgcgtacctcttggacccgtcaaacacgacgcccgaaggcgtagcccgtcgttacggcggcgagtggaccgaagatgcagcgaaacgcgcgttattggccgaacgtttgcacgagaatttattaggacgtttgcaaggcgaggaacgtctcctctggctttacgaagaagtggagaaaccattgagtcgcgtgctcgcgcatatggaagctaccggtgtcaaattagacgtggcgtatttggaggctctcagccttgaagttgctgcccacatgcgccacttggaggaagaagtattccgtttagcaggccgttcctttcgccttaactctcgcgatcagttagaacgtgtgttgttcgatgaacttggtctccctcctatcggcaagacagagaagaccggtaaacgtagcacttcacgtgcggttttagaagctcttcgcgaagtccatcccattgtggacaagatcttgcagtaccgcgaactcgcgaaattgaaaggcacctatattgaccgtcttccggcattagtccacccgaaaacgggacgcctccatacccgcttcaaccaaacagccacggcgaccggtcgtttgtcctcctctgatccaaaccttcagaatattccagtacgtaccccattgggccagaagatccgcaaagcgtttgtagctgaggagggttggcgtttagtggccctcgattatagccaaattgaattacgtgtccttgcccatctttctggcgatgagaacctcatccgcgtgtttcaggaaggcaaagacattcacactcaaacggcaagctggatgtttggattaagtgctgaagcgatcgatcctttgatgcgtcgtgcagcgaagaccatcaatttcggtgttctctacggtatgagtgcctttcgtttgtcgcaggaattaggcattccctatgaagaagctcaggcgttcattcagaaatactttcaaagctatcccaaagttaaagcatggatcgagaagactctcgaagaaggccgcacacgtggttacgtagagaccttatttggacgtcgccgctatgttcccgatttaaacgctcgcgtgaaaggcaagcgtgaagccgccgaacgcatggcgttcaacatgcctgtacagggcacggcagctgacctcatgaaacttgcaatggtgcgcctttttccacaattgcgtgaagttggtgcccgcatgctcttgcaggtccacgatgaactcttgttagaagcgccaaaagagcgtgcggaagaggtggcagccctcgcgaaagaagttatggaaggcgtgtggcccttagcggtgcctcttgaagtcgaagttggtattggcgaggattggctggctgccaaaggataatga

SEQ ID NO: 2964 - protein, 841 aa, synthetic construct
  REGION 1..841: note = Variant of DNA polymerase I from Thermus sp. strain 2.9
MHHHHHHGGSGVLPVFEPKGRVLLVDGHHLAYRNFFALKGLTTSSGEPVQGVYGFAKSLLKALKEDGDVVIVVFDAKAPSFRHEAYEAYKAGRAPTPEDFPRQLALMKELVDLLGLERLEVPGFEADDVLATLAKKAEREGYEVQILTADRDLFQLLSPRISVLHPEGHRITPEWLWEKYGLRPEQWVDFRALAGDPSDNIPGVKGIGEKTALKLLKEWGSLENLLKNLDQVKPESVREKILAHLEDLKLSRELSRVRTDLPLEVDFGRRREPDWEGLKAFLERLEFGSLLHEFGLLESPLPAEEAPWPPPEGAFLGYRLSRPEPMWAELLALAASAQGRVYRAEDPHGALRGLFEVRGLLAKDLAVVALREGLDLPPTDDPMLLAYLLDPSNTTPEGVARRYGGEWTEDAAKRALLAERLHENLLGRLQGEERLLWLYEEVEKPLSRVLAHMEATGVKLDVAYLEALSLEVAAHMRHLEEEVFRLAGRSFRLNSRDQLERVLFDELGLPPIGKTEKTGKRSTSRAVLEALREVHPIVDKILQYRELAKLKGTYIDRLPALVHPKTGRLHTRFNQTATATGRLSSSDPNLQNIPVRTPLGQKIRKAFVAEEGWRLVALDYSQIELRVLAHLSGDENLIRVFQEGKDIHTQTASWMFGLSAEAIDPLMRRAAKTINFGVLYGMSAFRLSQELGIPYEEAQAFIQKYFQSYPKVKAWIEKTLEEGRTRGYVETLFGRRRYVPDLNARVKGKREAAERMAFNMPVQGTAADLMKLAMVRLFPQLREVGARMLLQVHDELLLEAPKERAEEVAALAKEVMEGVWPLAVPLEVEVGIGEDWLAAKG

SEQ ID NO: 2965 - DNA, 2529 bp, synthetic construct
  misc_feature 1..2529: note = Variant of DNA polymerase I from Thermus sp. strain 2.9
  source 1..2529: mol_type = other DNA
atgcaccatcatcatcatcatggcggtagcggcgtgttaccggtgttcgagcctaaaggtcgcgtgcttctggttgatggccatcatctcgcgtatcgtaacttctttgccctgaaaggattaaccaccagcagcggcgagccggtacagggtgtctacggctttgcaaagtcgctcctgaaagctctgaaagaagacggtgatgtggtgattgttgtctttgatgcgaaagcgccaagttttcgccacgaagcgtacgaagcttacaaagccgggcgtgctccaacgccggaagactttcctcgccaattggcgcttatgaaggaattagtggatttgcttggcctcgaacgcttggaagttcccggtttcgaggcagacgacgtattagcgactctcgcaaagaaagccgaacgtgagggctatgaagtccagatcttgacagcagatcgcgatcttttccagcttttatctccgcgcatctcggtgttacacccggaagggcatcgtatcaccccggaatggctctgggagaaatatggtttgcgtcccgaacaatgggtggattttcgcgccttagcaggcgatccgagcgacaatattccgggagttaaaggtatcggcgagaagacggcgctcaagctccttaaagaatgggggtcgttggagaacttgcttaagaatttagatcaggtcaaaccagagtcagtgcgtgagaagattcttgctcacctcgaagacctcaaattaagccgcgaattgtcccgtgtacgcaccgatttgccgctcgaagttgatttccgccgccgccgcgaacctgactgggagggtcttaaagcgtttttagagcgtcttgaatttggttcgctcttgcatgaattcggccttttagaaagcccgttaccagccgaagaagcaccttggccaccgcccgagggcgcgtttttaggttaccgtttgagtcgcccggaaccgatgtgggccgaattactggctcttgcagcgtctgcccagggacgtgtgtatcgcgcggaagaccctcatggtgcgctccgcggcctcttcgaagtcaacggactccttgccaaagacttagctgttgttgcattgcgcgaaggtcttgatttacctccgactgatgatccaatgcttcttgcgtacctcttggacccgtcaaacacgacgcccgaaggcgtagcccgtcgttacggcggcgagtggaccgaagatgcagcgaaacgcgcgttattggccgaacgtttgcacgccaatttattaggacgtttgcaaggcgaggaacgtctcctctggctttacgaagaagtggagaaaccattgagtcgcgtgctcgcgcatatggaagctaccggtgtcaaattagacgtggcgtatttggagaatctcagccttgaagttgctgcccacatgcgccgcttggaggaagaagtattccgtttagcaggccgttcctttcgccttaattctcgcgatcagttagaacgtgtgttgttcgatgaacttggtctccctcctatcggcaagacagagaagaccggtaaacgtagcacttcagcggcggttttagaagctcttcgcgaagtccatcccattgtggacaagatcttgcagtaccgcgaactcgcgaaattgaaaggcacctatattgaccgtcttccggcattagtccacccgaaaacgggacgcctccatacccgcttcaaccaaacagccacggcgaccggtcgtttgtcctcctctgatccaaaccttcagaatattccagtacgtaccccattgggccagaagatccgccgtgcgtttgtagctgaggagggttggcgtttagtggccctcgattatagccaaattgaattacgtgtccttgcccatctttctggcgatgagaacctcatccgcgtgtttcaggaaggcaaagacattcacactcaaacggcaagctggatgtttggattatcagctgaagcgatcgatcctttgatgcgtcgtgcagcgaagaccatcaatttcggtgttctctacggtatgagtgcctttcgtttgtcgcaggaattaggcattccctatgaagaagctcaggcgttcattcagaaatactttcaaagctatcccaaagttaaagcatggatcgagaagactctcgaagaaggccgcacacgtggttacgtagagaccttatttggacgtcgccgctatgttcccgatttaaacgctcgcgtgaaaggcaagcgtgaagccgccgaacgcatggcgttcaacatgcctgtacagggcacggcagctgacctcatgaaacttgcaatggtgcgcctttttccacaattgcgtgaagttggtgcccgcatgctcttgcaggtccacgatgaactcttgttagaagcgccaaaagagcgtgcggaagaggtggcagccctcgcgaaagaagttatggaaggcgtgtggcccttagcggtgcctcttgaagtcgaagttggtattggcgaggattggctggctgccaaaggataatga

SEQ ID NO: 2966 - protein, 841 aa, synthetic construct
  REGION 1..841: note = Variant of DNA polymerase I from Thermus sp. strain 2.9
MHHHHHHGGSGVLPVFEPKGRVLLVDGHHLAYRNFFALKGLTTSSGEPVQGVYGFAKSLLKALKEDGDVVIVVFDAKAPSFRHEAYEAYKAGRAPTPEDFPRQLALMKELVDLLGLERLEVPGFEADDVLATLAKKAEREGYEVQILTADRDLFQLLSPRISVLHPEGHRITPEWLWEKYGLRPEQWVDFRALAGDPSDNIPGVKGIGEKTALKLLKEWGSLENLLKNLDQVKPESVREKILAHLEDLKLSRELSRVRTDLPLEVDFRRRREPDWEGLKAFLERLEFGSLLHEFGLLESPLPAEEAPWPPPEGAFLGYRLSRPEPMWAELLALAASAQGRVYRAEDPHGALRGLFEVNGLLAKDLAVVALREGLDLPPTDDPMLLAYLLDPSNTTPEGVARRYGGEWTEDAAKRALLAERLHANLLGRLQGEERLLWLYEEVEKPLSRVLAHMEATGVKLDVAYLENLSLEVAAHMRRLEEEVFRLAGRSFRLNSRDQLERVLFDELGLPPIGKTEKTGKRSTSAAVLEALREVHPIVDKILQYRELAKLKGTYIDRLPALVHPKTGRLHTRFNQTATATGRLSSSDPNLQNIPVRTPLGQKIRRAFVAEEGWRLVALDYSQIELRVLAHLSGDENLIRVFQEGKDIHTQTASWMFGLSAEAIDPLMRRAAKTINFGVLYGMSAFRLSQELGIPYEEAQAFIQKYFQSYPKVKAWIEKTLEEGRTRGYVETLFGRRRYVPDLNARVKGKREAAERMAFNMPVQGTAADLMKLAMVRLFPQLREVGARMLLQVHDELLLEAPKERAEEVAALAKEVMEGVWPLAVPLEVEVGIGEDWLAAKG

SEQ ID NO: 2967 - DNA, 2529 bp, synthetic construct
  misc_feature 1..2529: note = Variant of DNA polymerase I from Thermus sp. strain 2.9
  source 1..2529: mol_type = other DNA
atgcaccatcatcatcatcatggcggtagcggcgtgttaccggtgttcgagcctaaaggtcgcgtgcttctggttgatggccatcatctcgcgtatcgtaacttctttgccctgaaaggattaaccaccagcagcggcgagccggtacagggtgtctacggctttgcaaagtcgctcctgaaagctctgaaagaagacggtgatgtggtgattgttgtctttgatgcgaaagcgccaagttttcgccacgaagcgtacgaagcttacaaagccgggcgtgctccaacgccggaagactttcctcgccaattggcgcttatgaaggaattagtggatttgcttggcctcgaacgcttggaagttcccggtttcgaggcagacgacgtattagcgactctcgcaaagaaagccgaacgtgagggctatgaagtccagatcttgacagcagatcgcgatcttttccagcttttatctccgcgcatctcggtgttacacccggaagggcatcgtatcaccccggaatggctctgggagaaatatggtttgcgtcccgaacaatgggtggattttcgcgccttagcaggcgatccgagcgacaatattccgggagttaaaggtatcggcgagaagacggcgctcaagctccttaaagaatgggggtcgttggagaacttgcttaagaatttagatcaggtcaaaccagagtcagtgcgtgagaagattcttgctcacctcgaagacctcaaattaagccgcgaattgtcccgtgtacgcaccgatttgccgctcgaagttgatttccgccgccgccgcgaacctgactgggagggtcttaaagcgtttttagagcgtcttgaatttggttcgctcttgcatgaattcggccttttagaaagcccgttaccagccgaagaagcaccttggccaccgcccgagggcgcgtttttaggttaccgtttgagtcgcccggaaccgatgtgggccgaattactggctcttgcagcgtctgcccagggacgtgtgtatcgcgcggaagaccctcatggtgcgctccgcggcctcttcgaagtccgtggactccttgccaaagacttagctgttgttgcattgcgcgaaggtcttgatttacctccgactgatgatccaatgcttcttgcgtacctcttggacccgtcaaacacgacgcccgaaggcgtagcccgtcgttacggcggcgagtggaccgaagatgcagcgaaacgcgcgttattggccgaacgtttgcacgccaatttattaggacgtttgcaaggcgaggaacgtctcctctggctttacgaagaagtggagaaaccattgagtcgcgtgctcgcgcatatggaagctaccggtgtcaaattagacgtggcgtatttggagaatctcagccttgaagttgctgcccacatgcgccgcttggaggaagaagtattccgtttagcaggccattcctttcgccttaattctcgcgatcagttagaacgtgtgttgttcgatgaacttggtctccgtcctatcggcaagacagagaagaccggtaaacgtagcacttcagcggcggttttagaagctcttcgcgaagtccatcccattgtggacaagatcttgcaataccgcgaactcgcgaaattgaaaggcacctatattgaccgtcttccggcattagtccacccgaaaacgggacgcctccatacccgcttcaaccaaacagccacggcgaccggtcgtttgtcctcctctgatccaaaccttcagaatattccagtacgtaccccattgggccagaagatccgccgtgcgtttgtagctgaggagggttggcgtttagtggccctcgattatagccaaattgaattacgtgtccttgcccatctttctggcgatgagaacctcatccgcgtgtttcaggaaggcaaagacattcacactcaaacggcaagctggatgtttggattatcagctgaagcgatcgatcctttgatgcgtcgtgcagcgaagaccatcaatttcggtgttctctacggtatgagtgcctttcgtttgtcgcaggaattaggcattccctatgaagaagctcaggcgttcattcagaaatactttcaaagctatcccaaagttaaagcatggatcgagaagactctcgaagaaggccgcacacgtggttacgtagagaccttatttggacgtcgccgctatgttcccgatttaaacgctcgcgtgaaaggcaagcgtgaagccgccgaacgcatggcgttcaacatgcctgtacagggcacggcagctgacctcatgaaacttgcaatggtgcgcctttttccacaattgcgtgaagttggtgcccgcatgctcttgcaggtccacgatgaactcttgttagaagcgccaaaagagcgtgcggaagaggtggcagccctcgcgaaaaccgttatggaaggcgtgtggcccttagcggtgcctcttgaagtcgaagttggtattggcgaggattggctggctgccaaaggataatga

SEQ ID NO: 2968 - protein, 841 aa, synthetic construct
  REGION 1..841: note = Variant of DNA polymerase I from Thermus sp. strain 2.9
MHHHHHHGGSGVLPVFEPKGRVLLVDGHHLAYRNFFALKGLTTSSGEPVQGVYGFAKSLLKALKEDGDVVIVVFDAKAPSFRHEAYEAYKAGRAPTPEDFPRQLALMKELVDLLGLERLEVPGFEADDVLATLAKKAEREGYEVQILTADRDLFQLLSPRISVLHPEGHRITPEWLWEKYGLRPEQWVDFRALAGDPSDNIPGVKGIGEKTALKLLKEWGSLENLLKNLDQVKPESVREKILAHLEDLKLSRELSRVRTDLPLEVDFRRRREPDWEGLKAFLERLEFGSLLHEFGLLESPLPAEEAPWPPPEGAFLGYRLSRPEPMWAELLALAASAQGRVYRAEDPHGALRGLFEVRGLLAKDLAVVALREGLDLPPTDDPMLLAYLLDPSNTTPEGVARRYGGEWTEDAAKRALLAERLHANLLGRLQGEERLLWLYEEVEKPLSRVLAHMEATGVKLDVAYLENLSLEVAAHMRRLEEEVFRLAGHSFRLNSRDQLERVLFDELGLRPIGKTEKTGKRSTSAAVLEALREVHPIVDKILQYRELAKLKGTYIDRLPALVHPKTGRLHTRFNQTATATGRLSSSDPNLQNIPVRTPLGQKIRRAFVAEEGWRLVALDYSQIELRVLAHLSGDENLIRVFQEGKDIHTQTASWMFGLSAEAIDPLMRRAAKTINFGVLYGMSAFRLSQELGIPYEEAQAFIQKYFQSYPKVKAWIEKTLEEGRTRGYVETLFGRRRYVPDLNARVKGKREAAERMAFNMPVQGTAADLMKLAMVRLFPQLREVGARMLLQVHDELLLEAPKERAEEVAALAKTVMEGVWPLAVPLEVEVGIGEDWLAAKG

SEQ ID NO: 2969 - DNA, 2529 bp, synthetic construct
  misc_feature 1..2529: note = Variant of DNA polymerase I from Thermus sp. strain 2.9
  source 1..2529: mol_type = other DNA
atgcaccatcatcatcatcatggcggtagcggcgtgttaccggtgttcgagcctaaaggtcgcgtgcttctggttgatggccatcatctcgcgtatcgtaacttctttgccctgaaaggattaaccaccagcagcggcgagccggtacagggtgtctacggctttgcaaagtcgctcctgaaagctctgaaagaagacggtgatgtggtgattgttgtctttgatgcgaaagcgccaagttttcgccacgaagcgtacgaagcttacaaagccgggcgtgctccaacgccggaagactttcctcgccaattggcgcttatgaaggaattagtggatttgcttggcctcgaacgcttggaagttcccggtttcgaggcagacgacgtattagcgactctcgcaaagaaagccgaacgtgagggctatgaagtccagatcttgacagcagatcgcgatcttttccagcttttatctccgcgcatctcggtgttacacccggaagggcatcgtatcaccccggaatggctctgggagaaatatggtttgcgtcccgaacaatgggtggattttcgcgccttagcaggcgatccgagcgacaatattccgggagttaaaggtatcggcgagaagacggcgctcaagctccttaaagaatgggggtcgttggagaacttgcttaagaatttagatcaggtcaaaccagagtcagtgcgtgagaagattcttgctcacctcgaagacctcaaattaagccgcgaattgtcccgtgtacgcaccgatttgccgctcgaagttgatttccgccgccgccgcgaacctgactgggagggtcttaaagcgtttttagagcgtcttgaatttggttcgctcttgcatgaattcggccttttagaaagcccgttaccagccgaagaagcaccttggccaccgcccgagggcgcgtttttaggttaccgtttgagtcgcccggaaccgatgtgggccgaattactggctcttgcagcgtctgcccagggacgtgtgtatcgcgcggaagaccctcatggtgcgctccgcggcctcttcgaagtccgtggactccttgccaaagacttagctgttgttgcattgcgcgaaggtcttgatttacctccgactgatgatccaatgcttcttgcgtacctcttggacccgtcaaacacgacgcccgaaggcgtagcccgtcgttacggcggcgagtggaccgaagatgcagcgaaacgcgcgttattggccgaacgtttgcacgccaatttattaggacgtttgcaaggcgaggaacgtctcctctggctttacgaagaagtggagaaaccattgagtcgcgtgctcgcgcatatggaagctaccggtgtcaaattagacgtggcgtatttggaggcactcagccttgaagttgctgcccacatgcgccgcttggaggaagaagtattccgtttagcaggccattcctttcgccttaattctcgcgatcagttagaacgtgtgttgttcgatgaacttggtctccgtcctatcggcaagacagagaagaccggtaaacgtagcacttcagcggcggttttagaagctcttcgcgaagtccatcccattgtggacaagatcttgcagtaccgcgaactcgcgaaattgaaaggcacctatattgaccgtcttccggcattagtccacccgaaaacgggacgcctccatacccgcttcaaccaaacagccacggcgaccggtcgtttgtcctcctctgatccaaaccttcagaatattccagtacgtaccccattgggccagaagatccgccgtgcgtttgtagctgaggagggttggcgtttagtggccctcgattatagccaaattgaattacgtgtccttgcccatctttctggcgatgagaacctcatccgcgtgtttcaggaaggcaaagacattcacactcaaacggcaagctggatgtttggattatcagctgaagcgatcgatcctttgatgcgtcgtgcagcgaagaccatcaatttcggtgttctctacggtatgagtgcctttcgtttgtcgcaggaattaggcattccctatgaagaagctcaggcgttcattcagaaatactttcaaagctatcccaaagttaaagcatggatcgagaagactctcgaagaaggccgcacacgtggttacgtagagaccttatttggacgtcgccgctatgttcccgatttaaacgctcgcgtgaaaggcaagcgtgaagccgccgaacgcatggcgttcaacatgcctgtacagggcacggcagctgacctcatgaaacttgcaatggtgcgcctttttccacaattgcgtgaagttggtgcccgcatgctcttgcaggtccacgatgaactcttgttagaagcgccaaaagagcgtgcggaagaggtggcagccctcgcgaaaaccgttatggaaggcgtgtggcccttagcggtgcctcttgaagtcgaagttggtattggcgaggattggctggctgccaaaggataatga

SEQ ID NO: 2970 - protein, 841 aa, synthetic construct
  REGION 1..841: note = Variant of DNA polymerase I from Thermus sp. strain 2.9
MHHHHHHGGSGVLPVFEPKGRVLLVDGHHLAYRNFFALKGLTTSSGEPVQGVYGFAKSLLKALKEDGDVVIVVFDAKAPSFRHEAYEAYKAGRAPTPEDFPRQLALMKELVDLLGLERLEVPGFEADDVLATLAKKAEREGYEVQILTADRDLFQLLSPRISVLHPEGHRITPEWLWEKYGLRPEQWVDFRALAGDPSDNIPGVKGIGEKTALKLLKEWGSLENLLKNLDQVKPESVREKILAHLEDLKLSRELSRVRTDLPLEVDFRRRREPDWEGLKAFLERLEFGSLLHEFGLLESPLPAEEAPWPPPEGAFLGYRLSRPEPMWAELLALAASAQGRVYRAEDPHGALRGLFEVRGLLAKDLAVVALREGLDLPPTDDPMLLAYLLDPSNTTPEGVARRYGGEWTEDAAKRALLAERLHANLLGRLQGEERLLWLYEEVEKPLSRVLAHMEATGVKLDVAYLEALSLEVAAHMRRLEEEVFRLAGHSFRLNSRDQLERVLFDELGLRPIGKTEKTGKRSTSAAVLEALREVHPIVDKILQYRELAKLKGTYIDRLPALVHPKTGRLHTRFNQTATATGRLSSSDPNLQNIPVRTPLGQKIRRAFVAEEGWRLVALDYSQIELRVLAHLSGDENLIRVFQEGKDIHTQTASWMFGLSAEAIDPLMRRAAKTINFGVLYGMSAFRLSQELGIPYEEAQAFIQKYFQSYPKVKAWIEKTLEEGRTRGYVETLFGRRRYVPDLNARVKGKREAAERMAFNMPVQGTAADLMKLAMVRLFPQLREVGARMLLQVHDELLLEAPKERAEEVAALAKTVMEGVWPLAVPLEVEVGIGEDWLAAKG

SEQ ID NO: 2971 - DNA, 2529 bp, synthetic construct
  misc_feature 1..2529: note = Variant of DNA polymerase I from Thermus sp. strain 2.9
  source 1..2529: mol_type = other DNA
atgcaccatcatcatcatcatggcggtagcggcgtgttaccggtgttcgagcctaaaggtcgcgtgcttctggttgatggccatcatctcgcgtatcgtaacttctttgccctgaaaggattaaccaccagcagcggcgagccggtacagggtgtctacggctttgcaaagtcgctcctgaaagctctgaaagaagacggtgatgtggtgattgttgtctttgatgcgaaagcgccaagttttcgccacgaagcgtacgaagcttacaaagccgggcgtgctccaacgccggaagactttcctcgccaattggcgcttatgaaggaattagtggatttgcttggcctcgaacgcttggaagttcccggtttcgaggcagacgacgtattagcgactctcgcaaagaaagccgaacgtgagggctatgaagtccagatcttgacagcagatcgcgatcttttccagcttttatctccgcgcatctcggtgttacacccggaagggcatcgtatcaccccggaatggctctgggagaaatatggtttgcgtcccgaacaatgggtggattttcgcgccttagcaggcgatccgagcgacaatattccgggagttaaaggtatcggcgagaagacggcgctcaagctccttaaagaatgggggtcgttggagaacttgcttaagaatttagatcaggtcaaaccagagtcagtgcgtgagaagattcttgctcacctcgaagacctcaaattaagccgcgaattgtcccgtgtacgcaccgatttgccgctcgaagttgatttccaacgccgccgcgaacctgactgggagggtcttaaagcgtttttagagcgtcttgaatttggttcgctcttgcatgaattcggccttttagaaagcccgttaccagccgaagaagcaccttggccaccgcccgagggcgcgtttttaggttaccgtttgagtcgcccggaaccgatgtgggccgaattactggctcttgcagcgtctgcccagggacgtgtgtatcgcgcggaagaccctcatggtgcgctccgcggcctcttcgaagtccgtggactccttgccaaagacttagctgttgttgcattgcgcgaaggtcttgatttacctccgactgatgatccaatgcttcttgcgtacctcttggacccgtcaaacacgacgcccgaaggcgtagcccgtcgttacggcggcgagtggaccgaagatgcagcgaaacgcgcgttattggccgaacgtttgcacgccaatttattaggacgtttgcaaggcgaggaacgtctcctctggctttacgaagaagtggagaaaccattgagtcgcgtgctcgcgcatatggaagctaccggtgtcaaattagacgtggcgtatttggaggcactcagccttgaagttgctgcccacatgcgccgcttggaggaagaagtattccgtttagcaggccgttcctttcgccttaattctcgcgatcagttagaacgtgtgttgttcgatgaacttggtctccctcctatcggcaagacagagaagaccggtaaacgtagcacttcagcggcggttttagaagctcttcgcgaagtccatcccattgtggacaagatcttgcaataccgcgaactcgcgaaattgaaaggcacctatattgaccgtcttccggcattagtccacccgaaaacgggacgcctccatacccgcttcaaccaaacagccacggcgaccggtcgtttgtcctcctctgatccaaaccttcagaatattccagtacgtaccccattgggccagaagatccgccgtgcgtttgtagctgaggagggttggcgtttagtggccctcgattatagccaaattgaattacgtgtccttgcccatctttctggcgatgagaacctcatccgcgtgtttcaggaaggcaaagacattcacactcaaacggcaagctggatgtttggattatcagctgaagcgatcgatcctttgatgcgtcgtgcagcgaagaccatcaatttcggtgttctctacggtatgagtgcctttcgtttgtcgcaggaattaggcattccctatgaagaagctcaggcgttcattcagaaatactttcaaagctatcccaaagttaaagcatggatcgagaagactctcgaagaaggccgcacacgtggttacgtagagaccttatttggacgtcgccgctatgttcccgatttaaacgctcgcgtgaaaggcaagcgtgaagccgccgaacgcatggcgttcaacatgcctgtacagggcacggcagctgacctcatgaaacttgcaatggtgcgcctttttccacaattgcgtgaagttggtgcccgcatgctcttgcaggtccacgatgaactcttgttagaagcgccaaaagagcgtgcggaagaggtggcagccctcgcgaaagaagttatggaaggcgtgtggcccttagcggtgcctcttgaagtcgaagttggtattggcgaggattggctggctgccaaaggataatga

SEQ ID NO: 2972 - protein, 841 aa, synthetic construct
  REGION 1..841: note = Variant of DNA polymerase I from Thermus sp. strain 2.9
MHHHHHHGGSGVLPVFEPKGRVLLVDGHHLAYRNFFALKGLTTSSGEPVQGVYGFAKSLLKALKEDGDVVIVVFDAKAPSFRHEAYEAYKAGRAPTPEDFPRQLALMKELVDLLGLERLEVPGFEADDVLATLAKKAEREGYEVQILTADRDLFQLLSPRISVLHPEGHRITPEWLWEKYGLRPEQWVDFRALAGDPSDNIPGVKGIGEKTALKLLKEWGSLENLLKNLDQVKPESVREKILAHLEDLKLSRELSRVRTDLPLEVDFQRRREPDWEGLKAFLERLEFGSLLHEFGLLESPLPAEEAPWPPPEGAFLGYRLSRPEPMWAELLALAASAQGRVYRAEDPHGALRGLFEVRGLLAKDLAVVALREGLDLPPTDDPMLLAYLLDPSNTTPEGVARRYGGEWTEDAAKRALLAERLHANLLGRLQGEERLLWLYEEVEKPLSRVLAHMEATGVKLDVAYLEALSLEVAAHMRRLEEEVFRLAGRSFRLNSRDQLERVLFDELGLPPIGKTEKTGKRSTSAAVLEALREVHPIVDKILQYRELAKLKGTYIDRLPALVHPKTGRLHTRFNQTATATGRLSSSDPNLQNIPVRTPLGQKIRRAFVAEEGWRLVALDYSQIELRVLAHLSGDENLIRVFQEGKDIHTQTASWMFGLSAEAIDPLMRRAAKTINFGVLYGMSAFRLSQELGIPYEEAQAFIQKYFQSYPKVKAWIEKTLEEGRTRGYVETLFGRRRYVPDLNARVKGKREAAERMAFNMPVQGTAADLMKLAMVRLFPQLREVGARMLLQVHDELLLEAPKERAEEVAALAKEVMEGVWPLAVPLEVEVGIGEDWLAAKG

SEQ ID NO: 2973 - DNA, 2529 bp, synthetic construct
  misc_feature 1..2529: note = Variant of DNA polymerase I from Thermus sp. strain 2.9
  source 1..2529: mol_type = other DNA
atgcaccatcatcatcatcatggcggtagcggcgtgttaccggtgttcgagcctaaaggtcgcgtgcttctggttgatggccatcatctcgcgtatcgtaacttctttgccctgaaaggattaaccaccagcagcggcgagccggtacagggtgtctacggctttgcaaagtcgctcctgaaagctctgaaagaagacggtgatgtggtgattgttgtctttgatgcgaaagcgccaagttttcgccacgaagcgtacgaagcttacaaagccgggcgtgctccaacgccggaagactttcctcgccaattggcgcttatgaaggaattagtggatttgcttggcctcgaacgcttggaagttcccggtttcgaggcagacgacgtattagcgactctcgcaaagaaagccgaacgtgagggctatgaagtccagatcttgacagcagatcgcgatcttttccagcttttatctccgcgcatctcggtgttacacccggaagggcatcgtatcaccccggaatggctctgggagaaatatggtttgcgtcccgaacaatgggtggattttcgcgccttagcaggcgatccgagcgacaatattccgggagttaaaggtatcggcgagaagacggcgctcaagctccttaaagaatgggggtcgttggagaacttgcttaagaatttagatcaggtcaaaccagagtcagtgcgtgagaagattcttgctcacctcgaagacctcaaattaagccgcgaattgtcccgtgtacgcaccgatttgccgctcgaagttgatttccgccgccgccgcgaacctgactgggagggtcttaaagcgtttttagagcgtcttgaatttggttcgctcttgcatgaattcggccttttagaaagcccgttaccagccgaagaagcaccttggccaccgcccgagggcgcgtttttaggttaccgtttgagtcgcccggaaccgatgtgggccgaattactggctcttgcagcgtctgcccagggacgtgtgtatcgcgcggaagaccctcatggtgcgctccgcggcctcttcgaagtccgtggactccttgccaaagacttagctgttgttgcattgcgcgaaggtcttgatttacctccgactgatgatccaatgcttcttgcgtacctcttggacccgtcaaacacgacgcccgaaggcgtagcccgtcgttacggcggcgagtggaccgaagatgcagcgaaacgcgcgttattggccgaacgtttgcacgccaatttattaggacgtttgcaaggcgaggaacgtctcctctggctttacgaagaagtggagaaaccattgagtcgcgtgctcgcgcatatggaagctaccggtgtcaaattagacgtggcgtatttggagaatctcagccttgaagttgctgcccacatgcgccgcttggaggaagaagtattccgtttagcaggccattcctttcgccttaattctcgcgatcagttagaacgtgtgttgttcgatgaacttggtctccgtcctatcggcaagacagagaagaccggtaaacgtagcacttcagcggcggttttagaagctcttcgcgaagtccatcccattgtggacaagatcttgcagtaccgcgaactcgcgaaattgaaaggcacctatattgaccgtcttccggcattagtccacccgaaaacgggacgcctccatacccgcttcaaccaaacagccacggcgaccggtcgtttgtcctcctctgatccaaaccttcagaatattccagtacgtaccccattgggccagaagatccgccgtgcgtttgtagctgaggagggttggcgtttagtggccctcgattatagccaaattgaattacgtgtccttgcccatctttctggcgatgagaacctcatccgcgtgtttcaggaaggcaaagacattcacactcaaacggcaagctggatgtttggattatcagctgaagcgatcgatcctttgatgcgtcgtgcagcgaagaccatcaatttcggtgttctctacggtatgagtgcctttcgtttgtcgcaggaattaggcattccctatgaagaagcttcggcgttcattcagaaatactttcaaagctatcccaaagttaaagcatggatcgagaagactctcgaagaaggccgcacacgtggttacgtagagaccttatttggacgtcgccgctatgttcccgatttaaacgctcgcgtgaaaggcaagcgtgaagccgccgaacgcatggcgttcaacatgcctgtacagggcacggcagctgacctcatgaaacttgcaatggtgcgcctttttccacaattgcgtgaagttggtgcccgcatgctcttgcaggtccacgatgaactcttgttagaagcgccaaaagagcgtgcggaagaggtggcagccctcgcgaaaaccgttatggaaggcgtgtggcccttagcggtgcctcttgaagtcgaagttggtattggcgaggattggctggctgccaaaggataatga

SEQ ID NO: 2974 - protein, 841 aa, synthetic construct
  REGION 1..841: note = Variant of DNA polymerase I from Thermus sp. strain 2.9
MHHHHHHGGSGVLPVFEPKGRVLLVDGHHLAYRNFFALKGLTTSSGEPVQGVYGFAKSLLKALKEDGDVVIVVFDAKAPSFRHEAYEAYKAGRAPTPEDFPRQLALMKELVDLLGLERLEVPGFEADDVLATLAKKAEREGYEVQILTADRDLFQLLSPRISVLHPEGHRITPEWLWEKYGLRPEQWVDFRALAGDPSDNIPGVKGIGEKTALKLLKEWGSLENLLKNLDQVKPESVREKILAHLEDLKLSRELSRVRTDLPLEVDFRRRREPDWEGLKAFLERLEFGSLLHEFGLLESPLPAEEAPWPPPEGAFLGYRLSRPEPMWAELLALAASAQGRVYRAEDPHGALRGLFEVRGLLAKDLAVVALREGLDLPPTDDPMLLAYLLDPSNTTPEGVARRYGGEWTEDAAKRALLAERLHANLLGRLQGEERLLWLYEEVEKPLSRVLAHMEATGVKLDVAYLENLSLEVAAHMRRLEEEVFRLAGHSFRLNSRDQLERVLFDELGLRPIGKTEKTGKRSTSAAVLEALREVHPIVDKILQYRELAKLKGTYIDRLPALVHPKTGRLHTRFNQTATATGRLSSSDPNLQNIPVRTPLGQKIRRAFVAEEGWRLVALDYSQIELRVLAHLSGDENLIRVFQEGKDIHTQTASWMFGLSAEAIDPLMRRAAKTINFGVLYGMSAFRLSQELGIPYEEASAFIQKYFQSYPKVKAWIEKTLEEGRTRGYVETLFGRRRYVPDLNARVKGKREAAERMAFNMPVQGTAADLMKLAMVRLFPQLREVGARMLLQVHDELLLEAPKERAEEVAALAKTVMEGVWPLAVPLEVEVGIGEDWLAAKG

SEQ ID NO: 2975 - DNA, 2529 bp, synthetic construct
  misc_feature 1..2529: note = Variant of DNA polymerase I from Thermus sp. strain 2.9
  source 1..2529: mol_type = other DNA
atgcaccatcatcatcatcatggcggtagcggcgtgttaccggtgttcgagcctaaaggtcgcgtgcttctggttgatggccatcatctcgcgtatcgtaacttctttgccctgaaaggattaaccaccagcagcggcgagccggtacagggtgtctacggctttgcaaagtcgctcctgaaagctctgaaagaagacggtgatgtggtgattgttgtctttgatgcgaaagcgccaagttttcgccacgaagcgtacgaagcttacaaagccgggcgtgctccaacgccggaagactttcctcgccaattggcgcttatgaaggaattagtggatttgcttggcctcgaacgcttggaagttcccggtttcgaggcagacgacgtattagcgactctcgcaaagaaagccgaacgtgagggctatgaagtccagatcttgacagcagatcgcgatcttttccagcttttatctccgcgcatctcggtgttacacccggaagggcatcgtatcaccccggaatggctctgggagaaatatggtttgcgtcccgaacaatgggtggattttcgcgccttagcaggcgatccgagcgacaatattccgggagttaaaggtatcggcgagaagacggcgctcaagctccttaaagaatgggggtcgttggagaacttgcttaagaatttagatcaggtcaaaccagagtcagtgcgtgagaagattcttgctcacctcgaagacctcaaattaagccgcgaattgtcccgtgtacgcaccgatttgccgctcgaagttgatttccaacgccgccgcgaacctgactgggagggtcttaaagcgtttttagagcgtcttgaatttggttcgctcttgcatgaattcggccttttagaaagcccgttaccagccgaagaagcaccttggccaccgcccgagggcgcgtttttaggttaccgtttgagtcgcccggaaccgatgtgggccgaattactggctcttgcagcgtctgcccagggacgtgtgtatcgcgcggaagaccctcatggtgcgctccgcggcctcttcgaagtccgtggactccttgccaaagacttagctgttgttgcattgcgcgaaggtcttgatttacctccgactgatgatccaatgcttcttgcgtacctcttggacccgtcaaacacgacgcccgaaggcgtagcccgtcgttacggcggcgagtggaccgaagatgcagcgaaacgcgcgttattggccgaacgtttgcacgccaatttattaggacgtttgcaaggcgaggaacgtctcctctggctttacgaagaagtggagaaaccattgagtcgcgtgctcgcgcatatggaagctaccggtgtcaaattagacgtggcgtatttggaggcactcagccttgaagttgctgcccacatgcgccgcttggaggaagaagtattccgtttagcaggccattcctttcgccttaattctcgcgatcagttagaacgtgtgttgttcgatgaacttggtctccgtcctatcggcaagacagagaagaccggtaaacgtagcacttcagcggcggttttagaagctcttcgcgaagtccatcccattgtggacaagatcttgcaataccgcgaactcgcgaaattgaaaggcacctatattgaccgtcttccggcattagtccacccgaaaacgggacgcctccatacccgcttcaaccaaacagccacggcgaccggtcgtttgtcctcctctgatccaaaccttcagaatattccagtacgtaccccattgggccagaagatccgccgtgcgtttgtagctgaggagggttggcgtttagtggccctcgattatagccaaattgaattacgtgtccttgcccatctttctggcgatgagaacctcatccgcgtgtttcaggaaggcaaagacattcacactcaaacggcaagctggatgtttggattatcagctgaagcgatcgatcctttgatgcgtcgtgcagcgaagaccatcaatttcggtgttctctacggtatgagtgcctttcgtttgtcgcaggaattaggcattccctatgaagaagctcaggcgttcattcagaaatactttcaaagctatcccaaagttaaagcatggatcgagaagactctcgaagaaggccgcacacgtggttacgtagagaccttatttggacgtcgccgctatgttcccgatttaaacgctcgcgtgaaaggcaagcgtgaagccgccgaacgcatggcgttcaacatgcctgtacagggcacggcagctgacctcatgaaacttgcaatggtgcgcctttttccacaattgcgtgaagttggtgcccgcatgctcttgcaggtccacgatgaactcttgttagaagcgccaaaagagcgtgcggaagaggtggcagccctcgcgaaaaccgttatggaaggcgtgtggcccttagcggtgcctcttgaagtcgaagttggtattggcgaggattggctggctgccaaaggataatga

SEQ ID NO: 2976 - protein, 841 aa, synthetic construct
  REGION 1..841: note = Variant of DNA polymerase I from Thermus sp. strain 2.9
MHHHHHHGGSGVLPVFEPKGRVLLVDGHHLAYRNFFALKGLTTSSGEPVQGVYGFAKSLLKALKEDGDVVIVVFDAKAPSFRHEAYEAYKAGRAPTPEDFPRQLALMKELVDLLGLERLEVPGFEADDVLATLAKKAEREGYEVQILTADRDLFQLLSPRISVLHPEGHRITPEWLWEKYGLRPEQWVDFRALAGDPSDNIPGVKGIGEKTALKLLKEWGSLENLLKNLDQVKPESVREKILAHLEDLKLSRELSRVRTDLPLEVDFQRRREPDWEGLKAFLERLEFGSLLHEFGLLESPLPAEEAPWPPPEGAFLGYRLSRPEPMWAELLALAASAQGRVYRAEDPHGALRGLFEVRGLLAKDLAVVALREGLDLPPTDDPMLLAYLLDPSNTTPEGVARRYGGEWTEDAAKRALLAERLHANLLGRLQGEERLLWLYEEVEKPLSRVLAHMEATGVKLDVAYLEALSLEVAAHMRRLEEEVFRLAGHSFRLNSRDQLERVLFDELGLRPIGKTEKTGKRSTSAAVLEALREVHPIVDKILQYRELAKLKGTYIDRLPALVHPKTGRLHTRFNQTATATGRLSSSDPNLQNIPVRTPLGQKIRRAFVAEEGWRLVALDYSQIELRVLAHLSGDENLIRVFQEGKDIHTQTASWMFGLSAEAIDPLMRRAAKTINFGVLYGMSAFRLSQELGIPYEEAQAFIQKYFQSYPKVKAWIEKTLEEGRTRGYVETLFGRRRYVPDLNARVKGKREAAERMAFNMPVQGTAADLMKLAMVRLFPQLREVGARMLLQVHDELLLEAPKERAEEVAALAKTVMEGVWPLAVPLEVEVGIGEDWLAAKG

SEQ ID NO: 2977 - DNA, 2529 bp, synthetic construct
  misc_feature 1..2529: note = Variant of DNA polymerase I from Thermus sp. strain 2.9
  source 1..2529: mol_type = other DNA
atgcaccatcatcatcatcatggcggtagcggcgtgttaccggtgttcgagcctaaaggtcgcgtgcttctggttgatggccatcatctcgcgtatcgtaacttctttgccctgaaaggattaaccaccagcagcggcgagccggtacagggtgtctacggctttgcaaagtcgctcctgaaagctctgaaagaagacggtgatgtggtgattgttgtctttgatgcgaaagcgccaagttttcgccacgaagcgtacgaagcttacaaagccgggcgtgctccaacgccggaagactttcctcgccaattggcgcttatgaaggaattagtggatttgcttggcctcgaacgcttggaagttcccggtttcgaggcagacgacgtattagcgactctcgcaaagaaagccgaacgtgagggctatgaagtccagatcttgacagcagatcgcgatcttttccagcttttatctccgcgcatctcggtgttacacccggaagggcatcgtatcaccccggaatggctctgggagaaatatggtttgcgtcccgaacaatgggtggattttcgcgccttagcaggcgatccgagcgacaatattccgggagttaaaggtatcggcgagaagacggcgctcaagctccttaaagaatgggggtcgttggagaacttgcttaagaatttagatcaggtcaaaccagagtcagtgcgtgagaagattcttgctcacctcgaagacctcaaattaagccgcgaattgtcccgtgtacgcaccgatttgccgctcgaagttgatttccgtcgccgccgcgaacctgactgggagggtcttaaagcgtttttagagcgtcttgaatttggttcgctcttgcatgaattcggccttttagaaagcccgttaccagccgaagaagcaccttggccaccgcccgagggcgcgtttttaggttaccgtttgagtcgcccggaaccgatgtgggccgaattactggctcttgcagcgtctgcccagggacgtgtgtatcgcgcggaagaccctcatggtgcgctccgcggcctcttcgaagtccgtggactccttgccaaagacttagctgttgttgcattgcgcgaaggtcttgatttacctccgactgatgatccaatgcttcttgcgtacctcttggacccgtcaaacacgacgcccgaaggcgtagcccgtcgttacggcggcgagtggaccgaagatgcagcgaaacgcgcgttattggccgaacgtttgcacgccaatttattaggacgtttgcaaggcgaggaacgtctcctctggctttacgaagaagtggagaaaccattgagtcgcgtgctcgcgcatatggaagctaccggtgtcaaattagacgtggcgtatttggaggctctcagccttgaagttgctgcccacatgcgccgcttggaggaagaagtattccgtttagcaggccattcctttcgccttaattctcgcgatcagttagaacgtgtgttgttcgatgaacttggtctccctcctatcggcaagacagagaagaccggtaaacgtagcacttcagcgcaggttttagaagctcttcgcgaagtccatcccattgtggacaagatcttgcagtaccgcgaactcgcgaaattgaaaggcacctatattgaccgtcttccggcattagtccacccgaaaacgggacgcctccatacccgcttcaaccaaacagccacggcgaccggtcgtttgtcctcctctgatccaaaccttcagaatattccagtacgtaccccattgggccagaagatccgccgtgcgtttgtagctgaggagggttggcgtttagtggccctcgattatagccaaattgaattacgtgtccttgcccatctttctggcgatgagaacctcatccgcgtgtttcaggaaggcaaagacattcacactcaaacggcaagctggatgtttggattatcagctgaagcgatcgatcctttgatgcgtcgtgcagcgaagaccatcaatttcggtgttctctacggtatgagtgcctttcgtttgtcgcaggaattaggcattccctatgaagaagctgcggcgttcattcagaaatactttcaaagctatcccaaagttaaagcatggatcgagaagactctcgaagaaggccgcacacgtggttacgtagagaccttatttggacgtcgccgctatgttcccgatttaaacgctcgcgtgaaaggcaagcgtgaagccgccgaacgcatggcgttcaacatgcctgtacagggcacggcagctgacctcatgaaacttgcaatggtgcgcctttttccacaattgcgtgaagttggtgcccgcatgctcttgcaggtccacgatgaactcttgttagaagcgccaaaagagcgtgcggaagaggtggcagccctcgcgaaagaagttatggaaggcgtgtggcccttagcggtgcctcttgaagtcgaagttggtattggcgaggattggctggctgccaaaggataatga

SEQ ID NO: 2978 - protein, 841 aa, synthetic construct
  REGION 1..841: note = Variant of DNA polymerase I from Thermus sp. strain 2.9
MHHHHHHGGSGVLPVFEPKGRVLLVDGHHLAYRNFFALKGLTTSSGEPVQGVYGFAKSLLKALKEDGDVVIVVFDAKAPSFRHEAYEAYKAGRAPTPEDFPRQLALMKELVDLLGLERLEVPGFEADDVLATLAKKAEREGYEVQILTADRDLFQLLSPRISVLHPEGHRITPEWLWEKYGLRPEQWVDFRALAGDPSDNIPGVKGIGEKTALKLLKEWGSLENLLKNLDQVKPESVREKILAHLEDLKLSRELSRVRTDLPLEVDFRRRREPDWEGLKAFLERLEFGSLLHEFGLLESPLPAEEAPWPPPEGAFLGYRLSRPEPMWAELLALAASAQGRVYRAEDPHGALRGLFEVRGLLAKDLAVVALREGLDLPPTDDPMLLAYLLDPSNTTPEGVARRYGGEWTEDAAKRALLAERLHANLLGRLQGEERLLWLYEEVEKPLSRVLAHMEATGVKLDVAYLEALSLEVAAHMRRLEEEVFRLAGHSFRLNSRDQLERVLFDELGLPPIGKTEKTGKRSTSAQVLEALREVHPIVDKILQYRELAKLKGTYIDRLPALVHPKTGRLHTRFNQTATATGRLSSSDPNLQNIPVRTPLGQKIRRAFVAEEGWRLVALDYSQIELRVLAHLSGDENLIRVFQEGKDIHTQTASWMFGLSAEAIDPLMRRAAKTINFGVLYGMSAFRLSQELGIPYEEAAAFIQKYFQSYPKVKAWIEKTLEEGRTRGYVETLFGRRRYVPDLNARVKGKREAAERMAFNMPVQGTAADLMKLAMVRLFPQLREVGARMLLQVHDELLLEAPKERAEEVAALAKEVMEGVWPLAVPLEVEVGIGEDWLAAKG

SEQ ID NO: 2979 - DNA, 2529 bp, synthetic construct
  misc_feature 1..2529: note = Variant of DNA polymerase I from Thermus sp. strain 2.9
  source 1..2529: mol_type = other DNA
atgcaccatcatcatcatcatggcggtagcggcgtgttaccggtgttcgagcctaaaggtcgcgtgcttctggttgatggccatcatctcgcgtatcgtaacttctttgccctgaaaggattaaccaccagcagcggcgagccggtacagggtgtctacggctttgcaaagtcgctcctgaaagctctgaaagaagacggtgatgtggtgattgttgtctttgatgcgaaagcgccaagttttcgccacgaagcgtacgaagcttacaaagccgggcgtgctccaacgccggaagactttcctcgccaattggcgcttatgaaggaattagtggatttgcttggcctcgaacgcttggaagttcccggtttcgaggcagacgacgtattagcgactctcgcaaagaaagccgaacgtgagggctatgaagtccagatcttgacagcagatcgcgatcttttccagcttttatctccgcgcatctcggtgttacacccggaagggcatcgtatcaccccggaatggctctgggagaaatatggtttgcgtcccgaacaatgggtggattttcgcgccttagcaggcgatccgagcgacaatattccgggagttaaaggtatcggcgagaagacggcgctcaagctccttaaagaatgggggtcgttggagaacttgcttaagaatttagatcaggtcaaaccagagtcagtgcgtgagaagattcttgctcacctcgaagacctcaaattaagccgcgaattgtcccgtgtacgcaccgatttgccgctcgaagttgatttccgtcgccgccgcgaacctgactgggagggtcttaaagcgtttttagagcgtcttgaatttggttcgctcttgcatgaattcggccttttagaaagcccgttaccagccgaagaagcaccttggccaccgcccgagggcgcgtttttaggttaccgtttgagtcgcccggaaccgatgtgggccgaattactggctcttgcagcgtctgcccagggacgtgtgtatcgcgcggaagaccctcatggtgcgctccgcggcctcttcgaagtccgtggactccttgccaaagacttagctgttgttgcattgcgcgaaggtcttgatttacctccgactgatgatccaatgcttcttgcgtacctcttggacccgtcaaacacgacgcccgaaggcgtagcccgtcgttacggcggcgagtggaccgaagatgcagcgaaacgcgcgttattggccgaacgtttgcacgccaatttattaggacgtttgcaaggcgaggaacgtctcctctggctttacgaagaagtggagaaaccattgagtcgcgtgctcgcgcatatggaagctaccggtgtcaaattagacgtggcgtatttggaggctctcagccttgaagttgctgcccacatgcgccgcttggaggaagaagtattccgtttagcaggccattcctttcgccttaattctcgcgatcagttagaacgtgtgttgttcgatgaacttggtctccctcctatcggcaagacagagaagaccggtaaacgtagcacttcagcggcggttttagaagctcttcgcgaagtccatcccattgtggacaagatcttgcagtaccgcgaactcgcgaaattgaaaggcacctatattgaccgtcttccggcattagtccacccgaaaacgggacgcctccatacccgcttcaaccaaacagccacggcgaccggtcgtttgtcctcctctgatccaaaccttcagaatattccagtacgtaccccattgggccagaagatccgccgtgcgtttgtagctgaggagggttggcgtttagtggccctcgattatagccaaattgaattacgtgtccttgcccatctttctggcgatgagaacctcatccgcgtgtttcaggaaggcaaagacattcacactcaaacggcaagctggatgtttggattaggtgctgaagcgatcgatcctttgatgcgtcgtgcagcgaagaccatcaatttcggtgttctctacggtatgagtgcctttcgtttgtcgcaggaattaggcattccctatgaagaagctcaggcgttcattcagaaatactttcaaagctatcccaaagttaaagcatggatcgagaagactctcgaagaaggccgcacacgtggttacgtagagaccttatttggacgtcgccgctatgttcccgatttaaacgctcgcgtgaaaggcaagcgtgaagccgccgaacgcatggcgttcaacatgcctgtacagggcacggcagctgacctcatgaaacttgcaatggtgcgcctttttccacaattgcgtgaagttggtgcccgcatgctcttgcaggtccacgatgaactcttgttagaagcgccaaaagagcgtgcggaagaggtggcagccctcgcgaaagaagttatggaaggcgtgtggcccttagcggtgcctcttgaagtcgaagttggtattggcgaggattggctggctgccaaaggataatga

SEQ ID NO: 2980 - protein, 841 aa, synthetic construct
  REGION 1..841: note = Variant of DNA polymerase I from Thermus sp. strain 2.9
MHHHHHHGGSGVLPVFEPKGRVLLVDGHHLAYRNFFALKGLTTSSGEPVQGVYGFAKSLLKALKEDGDVVIVVFDAKAPSFRHEAYEAYKAGRAPTPEDFPRQLALMKELVDLLGLERLEVPGFEADDVLATLAKKAEREGYEVQILTADRDLFQLLSPRISVLHPEGHRITPEWLWEKYGLRPEQWVDFRALAGDPSDNIPGVKGIGEKTALKLLKEWGSLENLLKNLDQVKPESVREKILAHLEDLKLSRELSRVRTDLPLEVDFRRRREPDWEGLKAFLERLEFGSLLHEFGLLESPLPAEEAPWPPPEGAFLGYRLSRPEPMWAELLALAASAQGRVYRAEDPHGALRGLFEVRGLLAKDLAVVALREGLDLPPTDDPMLLAYLLDPSNTTPEGVARRYGGEWTEDAAKRALLAERLHANLLGRLQGEERLLWLYEEVEKPLSRVLAHMEATGVKLDVAYLEALSLEVAAHMRRLEEEVFRLAGHSFRLNSRDQLERVLFDELGLPPIGKTEKTGKRSTSAAVLEALREVHPIVDKILQYRELAKLKGTYIDRLPALVHPKTGRLHTRFNQTATATGRLSSSDPNLQNIPVRTPLGQKIRRAFVAEEGWRLVALDYSQIELRVLAHLSGDENLIRVFQEGKDIHTQTASWMFGLGAEAIDPLMRRAAKTINFGVLYGMSAFRLSQELGIPYEEAQAFIQKYFQSYPKVKAWIEKTLEEGRTRGYVETLFGRRRYVPDLNARVKGKREAAERMAFNMPVQGTAADLMKLAMVRLFPQLREVGARMLLQVHDELLLEAPKERAEEVAALAKEVMEGVWPLAVPLEVEVGIGEDWLAAKG

SEQ ID NO: 2981 - DNA, 2529 bp, synthetic construct
  misc_feature 1..2529: note = Variant of DNA polymerase I from Thermus sp. strain 2.9
  source 1..2529: mol_type = other DNA
atgcaccatcatcatcatcatggcggtagcggcgtgttaccggtgttcgagcctaaaggtcgcgtgcttctggttgatggccatcatctcgcgtatcgtaacttctttgccctgaaaggattaaccaccagcagcggcgagccggtacagggtgtctacggctttgcaaagtcgctcctgaaagctctgaaagaagacggtgatgtggtgattgttgtctttgatgcgaaagcgccaagttttcgccacgaagcgtacgaagcttacaaagccgggcgtgctccaacgccggaagactttcctcgccaattggcgcttatgaaggaattagtggatttgcttggcctcgaacgcttggaagttcccggtttcgaggcagacgacgtattagcgactctcgcaaagaaagccgaacgtgagggctatgaagtccagatcttgacagcagatcgcgatcttttccagcttttatctccgcgcatctcggtgttacacccggaagggcatcgtatcaccccggaatggctctgggagaaatatggtttgcgtcccgaacaatgggtggattttcgcgccttagcaggcgatccgagcgacaatattccgggagttaaaggtatcggcgagaagacggcgctcaagctccttaaagaatgggggtcgttggagaacttgcttaagaatttagatcaggtcaaaccagagtcagtgcgtgagaagattcttgctcacctcgaagacctcaaattaagccgcgaattgtcccgtgtacgcaccgatttgccgctcgaagttgatttccgccgccgccgcgaacctgactgggagggtcttaaagcgtttttagagcgtcttgaatttggttcgctcttgcatgaattcggccttttagaaagcccgttaccagccgaagaagcaccttggccaccgcccgagggcgcgtttttaggttaccgtttgagtcgcccggaaccgatgtgggccgaattactggctcttgcagcgtctgcccagggacgtgtgtatcgcgcggaagaccctcatggtgcgctccgcggcctcttcgaagtccgtggactccttgccaaagacttagctgttgttgcattgcgcgaaggtcttgatttacctccgactgatgatccaatgcttcttgcgtacctcttggacccgtcaaacacgacgcccgaaggcgtagcccgtcgttacggcggcgagtggaccgaagatgcagcgaaacgcgcgttattggccgaacgtttgcacgccaatttattaggacgtttgcaaggcgaggaacgtctcctctggctttacgaagaagtggagaaaccattgagtcgcgtgctcgcgcatatggaagctaccggtgtcaaattagacgtggcgtatttggagaatctcagccttgaagttgctgcccacatgcgccgcttggaggaagaagtattccgtttagcaggccgttcctttcgccttaattctcgcgatcagttagaacgtgtgttgttcgatgaacttggtctccctcctatcggcaagacagagaagaccggtaaacgtagcacttcagcggcggttttagaagctcttcgcgaagtccatcccattgtggacaagatcttgcagtaccgcgaactcgcgaaattgaaaggcacctatattgaccgtcttccggcattagtccacccgaaaacgggacgcctccatacccgcttcaaccaaacagccacggcgaccggtcgtttgtcctcctctgatccaaaccttcagaatattccagtacgtaccccattgggccagaagatccgccgtgcgtttgtagctgaggagggttggcgtttagtggccctcgattatagccaaattgaattacgtgtccttgcccatctttctggcgatgagaacctcatccgcgtgtttcaggaaggcaaagacattcacactcaaacggcaagctggatgtttggattatcagctgaagcgatcgatcctttgatgcgtcgtgcagcgaagaccatcaatttcggtgttctctacggtatgagtgcctttcgtttgtcgcaggaattaggcattccctatgaagaagctcaggcgttcattcagaaatactttcaaagctatcccaaagttaaagcatggatcgagaagactctcgaagaaggccgcacacgtggttacgtagagaccttatttggacgtcgccgctatgttcccgatttaaacgctcgcgtgaaaggcaagcgtgaagccgccgaacgcatggcgttcaacatgcctgtacagggcacggcagctgacctcatgaaacttgcaatggtgcgcctttttccacaattgcgtgaagttggtgcccgcatgctcttgcaggtccacgatgaactcttgttagaagcgccaaaagagcgtgcggaagaggtggcagccctcgcgaaagaagttatggaaggcgtgtggcccttagcggtgcctcttgaagtcgaagttggtattggcgaggattggctggctgccaaaggataatga

SEQ ID NO: 2982 - protein, 841 aa, synthetic construct
  REGION 1..841: note = Variant of DNA polymerase I from Thermus sp. strain 2.9
MHHHHHHGGSGVLPVFEPKGRVLLVDGHHLAYRNFFALKGLTTSSGEPVQGVYGFAKSLLKALKEDGDVVIVVFDAKAPSFRHEAYEAYKAGRAPTPEDFPRQLALMKELVDLLGLERLEVPGFEADDVLATLAKKAEREGYEVQILTADRDLFQLLSPRISVLHPEGHRITPEWLWEKYGLRPEQWVDFRALAGDPSDNIPGVKGIGEKTALKLLKEWGSLENLLKNLDQVKPESVREKILAHLEDLKLSRELSRVRTDLPLEVDFRRRREPDWEGLKAFLERLEFGSLLHEFGLLESPLPAEEAPWPPPEGAFLGYRLSRPEPMWAELLALAASAQGRVYRAEDPHGALRGLFEVRGLLAKDLAVVALREGLDLPPTDDPMLLAYLLDPSNTTPEGVARRYGGEWTEDAAKRALLAERLHANLLGRLQGEERLLWLYEEVEKPLSRVLAHMEATGVKLDVAYLENLSLEVAAHMRRLEEEVFRLAGRSFRLNSRDQLERVLFDELGLPPIGKTEKTGKRSTSAAVLEALREVHPIVDKILQYRELAKLKGTYIDRLPALVHPKTGRLHTRFNQTATATGRLSSSDPNLQNIPVRTPLGQKIRRAFVAEEGWRLVALDYSQIELRVLAHLSGDENLIRVFQEGKDIHTQTASWMFGLSAEAIDPLMRRAAKTINFGVLYGMSAFRLSQELGIPYEEAQAFIQKYFQSYPKVKAWIEKTLEEGRTRGYVETLFGRRRYVPDLNARVKGKREAAERMAFNMPVQGTAADLMKLAMVRLFPQLREVGARMLLQVHDELLLEAPKERAEEVAALAKEVMEGVWPLAVPLEVEVGIGEDWLAAKG

SEQ ID NO: 2983 - DNA, 2529 bp, synthetic construct
  misc_feature 1..2529: note = Variant of DNA polymerase I from Thermus sp. strain 2.9
  source 1..2529: mol_type = other DNA
atgcaccatcatcatcatcatggcggtagcggcgtgttaccggtgttcgagcctaaaggtcgcgtgcttctggttgatggccatcatctcgcgtatcgtaacttctttgccctgaaaggattaaccaccagcagcggcgagccggtacagggtgtctacggctttgcaaagtcgctcctgaaagctctgaaagaagacggtgatgtggtgattgttgtctttgatgcgaaagcgccaagttttcgccacgaagcgtacgaagcttacaaagccgggcgtgctccaacgccggaagactttcctcgccaattggcgcttatgaaggaattagtggatttgcttggcctcgaacgcttggaagttcccggtttcgaggcagacgacgtattagcgactctcgcaaagaaagccgaacgtgagggctatgaagtccagatcttgacagcagatcgcgatcttttccagcttttatctccgcgcatctcggtgttacacccggaagggcatcgtatcaccccggaatggctctgggagaaatatggtttgcgtcccgaacaatgggtggattttcgcgccttagcaggcgatccgagcgacaatattccgggagttaaaggtatcggcgagaagacggcgctcaagctccttaaagaatgggggtcgttggagaacttgcttaagaatttagatcaggtcaaaccagagtcagtgcgtgagaagattcttgctcacctcgaagacctcaaattaagccgcgaattgtcccgtgtacgcaccgatttgccgctcgaagttgatttccgtcgccgccgcgaacctgactgggagggtcttaaagcgtttttagagcgtcttgaatttggttcgctcttgcatgaattcggccttttagaaagcccgttaccagccgaagaagcaccttggccaccgcccgagggcgcgtttttaggttaccgtttgagtcgcccggaaccgatgtgggccgaattactggctcttgcagcgtctgcccagggacgtgtgtatcgcgcggaagaccctcatggtgcgctccgcggcctcttcgaagtccgtggactccttgccaaagacttagctgttgttgcattgcgcgaaggtcttgatttacctccgactgatgatccaatgcttcttgcgtacctcttggacccgtcaaacacgacgcccgaaggcgtagcccgtcgttacggcggcgagtggaccgaagatgcagcgaaacgcgcgttattggccgaacgtttgcacgccaatttattaggacgtttgcaaggcgaggaacgtctcctctggctttacgaagaagtggagaaaccattgagtcgcgtgctcgcgcatatggaagctaccggtgtcaaattagacgtggcgtatttggagaatctcagccttgaagttgctgcccacatgcgccgcttggaggaagaagtattccgtttagcaggccgttcctttcgccttaattctcgcgatcagttagaacgtgtgttgttcgatgaacttggtctccctcctatcggcaagacagagaagaccggtaaacgtagcacttcagcggcggttttagaagctcttcgcgaagtccatcccattgtggacaagatcttgcagtaccgcgaactcgcgaaattgaaaggcacctatattgaccgtcttccggcattagtccacccgaaaacgggacgcctccatacccgcttcaaccaaacagccacggcgaccggtcgtttgtcctcctctgatccaaaccttcagaatattccagtacgtaccccattgggccagaagatccgccgtgcgtttgtagctgaggagggttggcgtttagtggccctcgattatagccaaattgaattacgtgtccttgcccatctttctggcgatgagaacctcatccgcgtgtttcaggaaggcaaagacattcacactcaaacggcaagctggatgtttggattatcagctgaagcgatcgatcctttgatgcgtcgtgcagcgaagaccatcaatttcggtgttctctacggtatgagtgcctttcgtttgtcgcaggaattaggcattccctatgaagaagctgcggcgttcattcagaaatactttcaaagctatcccaaagttaaagcatggatcgagaagactctcgaagaaggccgcacacgtggttacgtagagaccttatttggacgtcgccgctatgttcccgatttaaacgctcgcgtgaaaggcaagcgtgaagccgccgaacgcatggcgttcaacatgcctgtacagggcacggcagctgacctcatgaaacttgcaatggtgcgcctttttccacaattgcgtgaagttggtgcccgcatgctcttgcaggtccacgatgaactcttgttagaagcgccaaaagagcgtgcggaagaggtggcagccctcgcgaaaaccgttatggaaggcgtgtggcccttagcggtgcctcttgaagtcgaagttggtattggcgaggattggctggctgccaaaggataatga

SEQ ID NO: 2984 - protein, 841 aa, synthetic construct
  REGION 1..841: note = Variant of DNA polymerase I from Thermus sp. strain 2.9
MHHHHHHGGSGVLPVFEPKGRVLLVDGHHLAYRNFFALKGLTTSSGEPVQGVYGFAKSLLKALKEDGDVVIVVFDAKAPSFRHEAYEAYKAGRAPTPEDFPRQLALMKELVDLLGLERLEVPGFEADDVLATLAKKAEREGYEVQILTADRDLFQLLSPRISVLHPEGHRITPEWLWEKYGLRPEQWVDFRALAGDPSDNIPGVKGIGEKTALKLLKEWGSLENLLKNLDQVKPESVREKILAHLEDLKLSRELSRVRTDLPLEVDFRRRREPDWEGLKAFLERLEFGSLLHEFGLLESPLPAEEAPWPPPEGAFLGYRLSRPEPMWAELLALAASAQGRVYRAEDPHGALRGLFEVRGLLAKDLAVVALREGLDLPPTDDPMLLAYLLDPSNTTPEGVARRYGGEWTEDAAKRALLAERLHANLLGRLQGEERLLWLYEEVEKPLSRVLAHMEATGVKLDVAYLENLSLEVAAHMRRLEEEVFRLAGRSFRLNSRDQLERVLFDELGLPPIGKTEKTGKRSTSAAVLEALREVHPIVDKILQYRELAKLKGTYIDRLPALVHPKTGRLHTRFNQTATATGRLSSSDPNLQNIPVRTPLGQKIRRAFVAEEGWRLVALDYSQIELRVLAHLSGDENLIRVFQEGKDIHTQTASWMFGLSAEAIDPLMRRAAKTINFGVLYGMSAFRLSQELGIPYEEAAAFIQKYFQSYPKVKAWIEKTLEEGRTRGYVETLFGRRRYVPDLNARVKGKREAAERMAFNMPVQGTAADLMKLAMVRLFPQLREVGARMLLQVHDELLLEAPKERAEEVAALAKTVMEGVWPLAVPLEVEVGIGEDWLAAKG

SEQ ID NO: 2985 - DNA, 2529 bp, synthetic construct
  misc_feature 1..2529: note = Variant of DNA polymerase I from Thermus sp. strain 2.9
  source 1..2529: mol_type = other DNA
atgcaccatcatcatcatcatggcggtagcggcgtgttaccggtgttcgagcctaaaggtcgcgtgcttctggttgatggccatcatctcgcgtatcgtaacttctttgccctgaaaggattaaccaccagcagcggcgagccggtacagggtgtctacggctttgcaaagtcgctcctgaaagctctgaaagaagacggtgatgtggtgattgttgtctttgatgcgaaagcgccaagttttcgccacgaagcgtacgaagcttacaaagccgggcgtgctccaacgccggaagactttcctcgccaattggcgcttatgaaggaattagtggatttgcttggcctcgaacgcttggaagttcccggtttcgaggcagacgacgtattagcgactctcgcaaagaaagccgaacgtgagggctatgaagtccagatcttgacagcagatcgcgatcttttccagcttttatctccgcgcatctcggtgttacacccggaagggcatcgtatcaccccggaatggctctgggagaaatatggtttgcgtcccgaacaatgggtggattttcgcgccttagcaggcgatccgagcgacaatattccgggagttaaaggtatcggcgagaagacggcgctcaagctccttaaagaatgggggtcgttggagaacttgcttaagaatttagatcaggtcaaaccagagtcagtgcgtgagaagattcttgctcacctcgaagacctcaaattaagccgcgaattgtcccgtgtacgcaccgatttgccgctcgaagttgatttccgccgccgccgcgaacctgactgggagggtcttaaagcgtttttagagcgtcttgaatttggttcgctcttgcatgaattcggccttttagaaagcccgttaccagccgaagaagcaccttggccaccgcccgagggcgcgtttttaggttaccgtttgagtcgcccggaaccgatgtgggccgaattactggctcttgcagcgtctgcccagggacgtgtgtatcgcgcggaagaccctcatggtgcgctccgcggcctcttcgaagtccgtggactccttgccaaagacttagctgttgttgcattgcgcgaaggtcttgatttacctccgactgatgatccaatgcttcttgcgtacctcttggacccgtcaaacacgacgcccgaaggcgtagcccgtcgttacggcggcgagtggaccgaagatgcagcgaaacgcgcgttattggccgaacgtttgcacgccaatttattaggacgtttgcaaggcgaggaacgtctcctctggctttacgaagaagtggagaaaccattgagtcgcgtgctcgcgcatatggaagctaccggtgtcaaattagacgtggcgtatttggaggctctcagccttgaagttgctgcccacatgcgccgcttggaggaagaagtattccgtttagcaggccgttcctttcgccttaattctcgcgatcagttagaacgtgtgttgttcgatgaacttggtctccctcctatcggcaagacagagaagaccggtaaacgtagcacttcagcggcggttttagaagctcttcgcgaagtccatcccattgtggacaagatcttgcagtaccgcgaactcgcgaaattgaaaggcacctatattgaccgtcttccggcattagtccacccgaaaacgggacgcctccatacccgcttcaaccaaacagccacggcgaccggtcgtttgtcctcctctgatccaaaccttcagaatattccagtacgtaccccattgggccagaagatccgccgtgcgtttgtagctgaggagggttggcgtttagtggccctcgattatagccaaattgaattacgtgtccttgcccatctttctggcgatgagaacctcatccgcgtgtttcaggaaggcaaagacattcacactcaaacggcaagctggatgtttggattatcagctgaagcgatcgatcctttgatgcgtcgtgcagcgaagaccatcaatttcggtgttctctacggtatgagtgcctttcgtttgtcgcaggaattaggcattccctatgaagaagctcaggcgttcattcagaaatactttcaaagctatcccaaagttaaagcatggatcgagaagactctcgaagaaggccgcacacgtggttacgtagagaccttatttggacgtcgccgctatgttcccgatttaaacgctcgcgtgaaaggcaagcgtgaagccgccgaacgcatggcgttcaacatgcctgtacagggcacggcagctgacctcatgaaacttgcaatggtgcgcctttttccacaattgcgtgaagttggtgcccgcatgctcttgcaggtccacgatgaactcttgttagaagcgccaaaagagcgtgcggaagaggtggcagccctcgcgaaagaagttatggaaggcgtgtggcccttagcggtgcctcttgaagtcgaagttggtattggcgaggattggctggctgccaaaggataatga

SEQ ID NO: 2986 - protein, 841 aa, synthetic construct
  REGION 1..841: note = Variant of DNA polymerase I from Thermus sp. strain 2.9
MHHHHHHGGSGVLPVFEPKGRVLLVDGHHLAYRNFFALKGLTTSSGEPVQGVYGFAKSLLKALKEDGDVVIVVFDAKAPSFRHEAYEAYKAGRAPTPEDFPRQLALMKELVDLLGLERLEVPGFEADDVLATLAKKAEREGYEVQILTADRDLFQLLSPRISVLHPEGHRITPEWLWEKYGLRPEQWVDFRALAGDPSDNIPGVKGIGEKTALKLLKEWGSLENLLKNLDQVKPESVREKILAHLEDLKLSRELSRVRTDLPLEVDFRRRREPDWEGLKAFLERLEFGSLLHEFGLLESPLPAEEAPWPPPEGAFLGYRLSRPEPMWAELLALAASAQGRVYRAEDPHGALRGLFEVRGLLAKDLAVVALREGLDLPPTDDPMLLAYLLDPSNTTPEGVARRYGGEWTEDAAKRALLAERLHANLLGRLQGEERLLWLYEEVEKPLSRVLAHMEATGVKLDVAYLEALSLEVAAHMRRLEEEVFRLAGRSFRLNSRDQLERVLFDELGLPPIGKTEKTGKRSTSAAVLEALREVHPIVDKILQYRELAKLKGTYIDRLPALVHPKTGRLHTRFNQTATATGRLSSSDPNLQNIPVRTPLGQKIRRAFVAEEGWRLVALDYSQIELRVLAHLSGDENLIRVFQEGKDIHTQTASWMFGLSAEAIDPLMRRAAKTINFGVLYGMSAFRLSQELGIPYEEAQAFIQKYFQSYPKVKAWIEKTLEEGRTRGYVETLFGRRRYVPDLNARVKGKREAAERMAFNMPVQGTAADLMKLAMVRLFPQLREVGARMLLQVHDELLLEAPKERAEEVAALAKEVMEGVWPLAVPLEVEVGIGEDWLAAKG

SEQ ID NO: 2987 - DNA, 2529 bp, synthetic construct
  misc_feature 1..2529: note = Variant of DNA polymerase I from Thermus sp. strain 2.9
  source 1..2529: mol_type = other DNA
atgcaccatcatcatcatcatggcggtagcggcgtgttaccggtgttcgagcctaaaggtcgcgtgcttctggttgatggccatcatctcgcgtatcgtaacttctttgccctgaaaggattaaccaccagcagcggcgagccggtacagggtgtctacggctttgcaaagtcgctcctgaaagctctgaaagaagacggtgatgtggtgattgttgtctttgatgcgaaagcgccaagttttcgccacgaagcgtacgaagcttacaaagccgggcgtgctccaacgccggaagactttcctcgccaattggcgcttatgaaggaattagtggatttgcttggcctcgaacgcttggaagttcccggtttcgaggcagacgacgtattagcgactctcgcaaagaaagccgaacgtgagggctatgaagtccagatcttgacagcagatcgcgatcttttccagcttttatctccgcgcatctcggtgttacacccggaagggcatcgtatcaccccggaatggctctgggagaaatatggtttgcgtcccgaacaatgggtggattttcgcgccttagcaggcgatccgagcgacaatattccgggagttaaaggtatcggcgagaagacggcgctcaagctccttaaagaatgggggtcgttggagaacttgcttaagaatttagatcaggtcaaaccagagtcagtgcgtgagaagattcttgctcacctcgaagacctcaaattaagccgcgaattgtcccgtgtacgcaccgatttgccgctcgaagttgatttccaacgccgccgcgaacctgactgggagggtcttaaagcgtttttagagcgtcttgaatttggttcgctcttgcatgaattcggccttttagaaagcccgttaccagccgaagaagcaccttggccaccgcccgagggcgcgtttttaggttaccgtttgagtcgcccggaaccgatgtgggccgaattactggctcttgcagcgtctgcccagggacgtgtgtatcgcgcggaagaccctcatggtgcgctccgcggcctcttcgaagtccgtggactccttgccaaagacttagctgttgttgcattgcgcgaaggtcttgatttacctccgactgatgatccaatgcttcttgcgtacctcttggacccgtcaaacacgacgcccgaaggcgtagcccgtcgttacggcggcgagtggaccgaagatgcagcgaaacgcgcgttattggccgaacgtttgcacgccaatttattaggacgtttgcaaggcgaggaacgtctcctctggctttacgaagaagtggagaaaccattgagtcgcgtgctcgcgcatatggaagctaccggtgtcaaattagacgtggcgtatttggaggcactcagccttgaagttgctgcccacatgcgccgcttggaggaagaagtattccgtttagcaggccattcctttcgccttaattctcgcgatcagttagaacgtgtgttgttcgatgaacttggtctccctcctatcggcaagacagagaagaccggtaaacgtagcacttcagcggcggttttagaagctcttcgcgaagtccatcccattgtggacaagatcttggtttaccgcgaactcgcgaaattgaaaggcacctatattgaccgtcttccggcattagtccacccgaaaacgggacgcctccatacccgcttcaaccaaacagccacggcgaccggtcgtttgtcctcctctgatccaaaccttcagaatattccagtacgtaccccattgggccagaagatccgccgtgcgtttgtagctgaggagggttggcgtttagtggccctcgattatagccaaattgaattacgtgtccttgcccatctttctggcgatgagaacctcatccgcgtgtttcaggaaggcaaagacattcacactcaaacggcaagctggatgtttggattatcagctgaagcgatcgatcctttgatgcgtcgtgcagcgaagaccatcaatttcggtgttctctacggtatgagtgcctttcgtttgtcgcaggaattaggcattccctatgaagaagctcaggcgttcattcagaaatactttcaaagctatcccaaagttaaagcatggatcgagaagactctcgaagaaggccgcacacgtggttacgtagagaccttatttggacgtcgccgctatgttcccgatttaaacgctcgcgtgaaaggcaagcgtgaagccgccgaacgcatggcgttcaacatgcctgtacagggcacggcagctgacctcatgaaacttgcaatggtgcgcctttttccacaattgcgtgaagttggtgcccgcatgctcttgcaggtccacgatgaactcttgttagaagcgccaaaagagcgtgcggaagaggtggcagccctcgcgaaagaagttatggaaggcgtgtggcccttagcggtgcctcttgaagtcgaagttggtattggcgaggattggctggctgccaaaggataatga

SEQ ID NO: 2988 - protein, 841 aa, synthetic construct
  REGION 1..841: note = Variant of DNA polymerase I from Thermus sp. strain 2.9
MHHHHHHGGSGVLPVFEPKGRVLLVDGHHLAYRNFFALKGLTTSSGEPVQGVYGFAKSLLKALKEDGDVVIVVFDAKAPSFRHEAYEAYKAGRAPTPEDFPRQLALMKELVDLLGLERLEVPGFEADDVLATLAKKAEREGYEVQILTADRDLFQLLSPRISVLHPEGHRITPEWLWEKYGLRPEQWVDFRALAGDPSDNIPGVKGIGEKTALKLLKEWGSLENLLKNLDQVKPESVREKILAHLEDLKLSRELSRVRTDLPLEVDFQRRREPDWEGLKAFLERLEFGSLLHEFGLLESPLPAEEAPWPPPEGAFLGYRLSRPEPMWAELLALAASAQGRVYRAEDPHGALRGLFEVRGLLAKDLAVVALREGLDLPPTDDPMLLAYLLDPSNTTPEGVARRYGGEWTEDAAKRALLAERLHANLLGRLQGEERLLWLYEEVEKPLSRVLAHMEATGVKLDVAYLEALSLEVAAHMRRLEEEVFRLAGHSFRLNSRDQLERVLFDELGLPPIGKTEKTGKRSTSAAVLEALREVHPIVDKILVYRELAKLKGTYIDRLPALVHPKTGRLHTRFNQTATATGRLSSSDPNLQNIPVRTPLGQKIRRAFVAEEGWRLVALDYSQIELRVLAHLSGDENLIRVFQEGKDIHTQTASWMFGLSAEAIDPLMRRAAKTINFGVLYGMSAFRLSQELGIPYEEAQAFIQKYFQSYPKVKAWIEKTLEEGRTRGYVETLFGRRRYVPDLNARVKGKREAAERMAFNMPVQGTAADLMKLAMVRLFPQLREVGARMLLQVHDELLLEAPKERAEEVAALAKEVMEGVWPLAVPLEVEVGIGEDWLAAKG

SEQ ID NO: 2989 - DNA, 2529 bp, synthetic construct
  misc_feature 1..2529: note = Variant of DNA polymerase I from Thermus sp. strain 2.9
  source 1..2529: mol_type = other DNA
atgcaccatcatcatcatcatggcggtagcggcgtgttaccggtgttcgagcctaaaggtcgcgtgcttctggttgatggccatcatctcgcgtatcgtaacttctttgccctgaaaggattaaccaccagcagcggcgagccggtacagggtgtctacggctttgcaaagtcgctcctgaaagctctgaaagaagacggtgatgtggtgattgttgtctttgatgcgaaagcgccaagttttcgccacgaagcgtacgaagcttacaaagccgggcgtgctccaacgccggaagactttcctcgccaattggcgcttatgaaggaattagtggatttgcttggcctcgaacgcttggaagttcccggtttcgaggcagacgacgtattagcgactctcgcaaagaaagccgaacgtgagggctatgaagtccagatcttgacagcagatcgcgatcttttccagcttttatctccgcgcatctcggtgttacacccggaagggcatcgtatcaccccggaatggctctgggagaaatatggtttgcgtcccgaacaatgggtggattttcgcgccttagcaggcgatccgagcgacaatattccgggagttaaaggtatcggcgagaagacggcgctcaagctccttaaagaatgggggtcgttggagaacttgcttaagaatttagatcaggtcaaaccagagtcagtgcgtgagaagattcttgctcacctcgaagacctcaaattaagccgcgaattgtcccgtgtacgcaccgatttgccgctcgaagttgatttccgtcgccgccgcgaacctgactgggagggtcttaaagcgtttttagagcgtcttgaatttggttcgctcttgcatgaattcggccttttagaaagcccgttaccagccgaagaagcaccttggccaccgcccgagggcgcgtttttaggttaccgtttgagtcgcccggaaccgatgtgggccgaattactggctcttgcagcgtctgcccagggacgtgtgtatcgcgcggaagaccctcatggtgcgctccgcggcctcttcgaagtccgtggactccttgccaaagacttagctgttgttgcattgcgcgaaggtcttgatttacctccgactgatgatccaatgcttcttgcgtacctcttggacccgtcaaacacgacgcccgaaggcgtagcccgtcgttacggcggcgagtggaccgaagatgcagcgaaacgcgcgttattggccgaacgtttgcacgccaatttattaggacgtttgcaaggcgaggaacgtctcctctggctttacgaagaagtggagaaaccattgagtcgcgtgctcgcgcatatggaagctaccggtgtcaaattagacgtggcgtatttggagaatctcagccttgaagttgctgcccacatgcgccgcttggaggaagaagtattccgtttagcaggccattcctttcgccttaattctcgcgatcagttagaacgtgtgttgttcgatgaacttggtctccctcctatcggcaagacagagaagaccggtaaacgtagcacttcagcggcggttttagaagctcttcgcgaagtccatcccattgtggacaagatcttgcagtaccgcgaactcgcgaaattgaaaggcacctatattgaccgtcttccggcattagtccacccgaaaacgggacgcctccatacccgcttcaaccaaacagccacggcgaccggtcgtttgtcctcctctgatccaaaccttcagaatattccagtacgtaccccattgggccagaagatccgccgtgcgtttgtagctgaggagggttggcgtttagtggccctcgattatagccaaattgaattacgtgtccttgcccatctttctggcgatgagaacctcatccgcgtgtttcaggaaggcaaagacattcacactcaaacggcaagctggatgtttggattatcagctgaagcgatcgatcctttgatgcgtcgtgcagcgaagaccatcaatttcggtgttctctacggtatgagtgcctttcgtttgtcgcaggaattaggcattccctatgaagaagcttcggcgttcattcagaaatactttcaaagctatcccaaagttaaagcatggatcgagaagactctcgaagaaggccgcacacgtggttacgtagagaccttatttggacgtcgccgctatgttcccgatttaaacgctcgcgtgaaaggcaagcgtgaagccgccgaacgcatggcgttcaacatgcctgtacagggcacggcagctgacctcatgaaacttgcaatggtgcgcctttttccacaattgcgtgaagttggtgcccgcatgctcttgcaggtccacgatgaactcttgttagaagcgccaaaagagcgtgcggaagaggtggcagccctcgcgaaagaagttatggaaggcgtgtggcccttagcggtgcctcttgaagtcgaagttggtattggcgaggattggctggctgccaaaggataatga

SEQ ID NO: 2990 - protein, 841 aa, synthetic construct
  REGION 1..841: note = Variant of DNA polymerase I from Thermus sp. strain 2.9
MHHHHHHGGSGVLPVFEPKGRVLLVDGHHLAYRNFFALKGLTTSSGEPVQGVYGFAKSLLKALKEDGDVVIVVFDAKAPSFRHEAYEAYKAGRAPTPEDFPRQLALMKELVDLLGLERLEVPGFEADDVLATLAKKAEREGYEVQILTADRDLFQLLSPRISVLHPEGHRITPEWLWEKYGLRPEQWVDFRALAGDPSDNIPGVKGIGEKTALKLLKEWGSLENLLKNLDQVKPESVREKILAHLEDLKLSRELSRVRTDLPLEVDFRRRREPDWEGLKAFLERLEFGSLLHEFGLLESPLPAEEAPWPPPEGAFLGYRLSRPEPMWAELLALAASAQGRVYRAEDPHGALRGLFEVRGLLAKDLAVVALREGLDLPPTDDPMLLAYLLDPSNTTPEGVARRYGGEWTEDAAKRALLAERLHANLLGRLQGEERLLWLYEEVEKPLSRVLAHMEATGVKLDVAYLENLSLEVAAHMRRLEEEVFRLAGHSFRLNSRDQLERVLFDELGLPPIGKTEKTGKRSTSAAVLEALREVHPIVDKILQYRELAKLKGTYIDRLPALVHPKTGRLHTRFNQTATATGRLSSSDPNLQNIPVRTPLGQKIRRAFVAEEGWRLVALDYSQIELRVLAHLSGDENLIRVFQEGKDIHTQTASWMFGLSAEAIDPLMRRAAKTINFGVLYGMSAFRLSQELGIPYEEASAFIQKYFQSYPKVKAWIEKTLEEGRTRGYVETLFGRRRYVPDLNARVKGKREAAERMAFNMPVQGTAADLMKLAMVRLFPQLREVGARMLLQVHDELLLEAPKERAEEVAALAKEVMEGVWPLAVPLEVEVGIGEDWLAAKG

SEQ ID NO: 2991 - DNA, 2529 bp, synthetic construct
  misc_feature 1..2529: note = Variant of DNA polymerase I from Thermus sp. strain 2.9
  source 1..2529: mol_type = other DNA
atgcaccatcatcatcatcatggcggtagcggcgtgttaccggtgttcgagcctaaaggtcgcgtgcttctggttgatggccatcatctcgcgtatcgtaacttctttgccctgaaaggattaaccaccagcagcggcgagccggtacagggtgtctacggctttgcaaagtcgctcctgaaagctctgaaagaagacggtgatgtggtgattgttgtctttgatgcgaaagcgccaagttttcgccacgaagcgtacgaagcttacaaagccgggcgtgctccaacgccggaagactttcctcgccaattggcgcttatgaaggaattagtggatttgcttggcctcgaacgcttggaagttcccggtttcgaggcagacgacgtattagcgactctcgcaaagaaagccgaacgtgagggctatgaagtccagatcttgacagcagatcgcgatcttttccagcttttatctccgcgcatctcggtgttacacccggaagggcatcgtatcaccccggaatggctctgggagaaatatggtttgcgtcccgaacaatgggtggattttcgcgccttagcaggcgatccgagcgacaatattccgggagttaaaggtatcggcgagaagacggcgctcaagctccttaaagaatgggggtcgttggagaacttgcttaagaatttagatcaggtcaaaccagagtcagtgcgtgagaagattcttgctcacctcgaagacctcaaattaagccgcgaattgtcccgtgtacgcaccgatttgccgctcgaagttgatttccgccgccgccgcgaacctgactgggagggtcttaaagcgtttttagagcgtcttgaatttggttcgctcttgcatgaattcggccttttagaaagcccgttaccagccgaagaagcaccttggccaccgcccgagggcgcgtttttaggttaccgtttgagtcgcccggaaccgatgtgggccgaattactggctcttgcagcgtctgcccagggacgtgtgtatcgcgcggaagaccctcatggtgcgctccgcggcctcttcgaagtccgtggactccttgccaaagacttagctgttgttgcattgcgcgaaggtcttgatttacctccgactgatgatccaatgcttcttgcgtacctcttggacccgtcaaacacgacgcccgaaggcgtagcccgtcgttacggcggcgagtggaccgaagatgcagcgaaacgcgcgttattggccgaacgtttgcacgccaatttattaggacgtttgcaaggcgaggaacgtctcctctggctttacgaagaagtggagaaaccattgagtcgcgtgctcgcgcatatggaagctaccggtgtcaaattagacgtggcgtatttggagaatctcagccttgaagttgctgcccacatgcgccgcttggaggaagaagtattccgtttagcaggccattcctttcgccttaattctcgcgatcagttagaacgtgtgttgttcgatgaacttggtctccgtcctatcggcaagacagagaagaccggtaaacgtagcacttcagcggcggttttagaagctcttcgcgaagtccatcccattgtggacaagatcttgcaataccgcgaactcgcgaaattgaaaggcacctatattgaccgtcttccggcattagtccacccgaaaacgggacgcctccatacccgcttcaaccaaacagccacggcgaccggtcgtttgtcctcctctgatccaaaccttcagaatattccagtacgtaccccattgggccagaagatccgccgtgcgtttgtagctgaggagggttggcgtttagtggccctcgattatagccaaattgaattacgtgtccttgcccatctttctggcgatgagaacctcatccgcgtgtttcaggaaggcaaagacattcacactcaaacggcaagctggatgtttggattatcagctgaagcgatcgatcctttgatgcgtcgtgcagcgaagaccatcaatttcggtgttctctacggtatgagtgcctttcgtttgtcgcaggaattaggcattccctatgaagaagctcaggcgttcattcagaaatactttcaaagctatcccaaagttaaagcatggatcgagaagactctcgaagaaggccgcacacgtggttacgtagagaccttatttggacgtcgccgctatgttcccgatttaaacgctcgcgtgaaaggcaagcgtgaagccgccgaacgcatggcgttcaacatgcctgtacagggcacggcagctgacctcatgaaacttgcaatggtgcgcctttttccacaattgcgtgaagttggtgcccgcatgctcttgcaggtccacgatgaactcttgttagaagcgccaaaagagcgtgcggaagaggtggcagccctcgcgaaagaagttatggaaggcgtgtggcccttagcggtgcctcttgaagtcgaagttggtattggcgaggattggctggctgccaaaggataatga

SEQ ID NO: 2992 - protein, 841 aa, synthetic construct
  REGION 1..841: note = Variant of DNA polymerase I from Thermus sp. strain 2.9
MHHHHHHGGSGVLPVFEPKGRVLLVDGHHLAYRNFFALKGLTTSSGEPVQGVYGFAKSLLKALKEDGDVVIVVFDAKAPSFRHEAYEAYKAGRAPTPEDFPRQLALMKELVDLLGLERLEVPGFEADDVLATLAKKAEREGYEVQILTADRDLFQLLSPRISVLHPEGHRITPEWLWEKYGLRPEQWVDFRALAGDPSDNIPGVKGIGEKTALKLLKEWGSLENLLKNLDQVKPESVREKILAHLEDLKLSRELSRVRTDLPLEVDFRRRREPDWEGLKAFLERLEFGSLLHEFGLLESPLPAEEAPWPPPEGAFLGYRLSRPEPMWAELLALAASAQGRVYRAEDPHGALRGLFEVRGLLAKDLAVVALREGLDLPPTDDPMLLAYLLDPSNTTPEGVARRYGGEWTEDAAKRALLAERLHANLLGRLQGEERLLWLYEEVEKPLSRVLAHMEATGVKLDVAYLENLSLEVAAHMRRLEEEVFRLAGHSFRLNSRDQLERVLFDELGLRPIGKTEKTGKRSTSAAVLEALREVHPIVDKILQYRELAKLKGTYIDRLPALVHPKTGRLHTRFNQTATATGRLSSSDPNLQNIPVRTPLGQKIRRAFVAEEGWRLVALDYSQIELRVLAHLSGDENLIRVFQEGKDIHTQTASWMFGLSAEAIDPLMRRAAKTINFGVLYGMSAFRLSQELGIPYEEAQAFIQKYFQSYPKVKAWIEKTLEEGRTRGYVETLFGRRRYVPDLNARVKGKREAAERMAFNMPVQGTAADLMKLAMVRLFPQLREVGARMLLQVHDELLLEAPKERAEEVAALAKEVMEGVWPLAVPLEVEVGIGEDWLAAKG

SEQ ID NO: 2993 - DNA, 2529 bp, synthetic construct
  misc_feature 1..2529: note = Variant of DNA polymerase I from Thermus sp. strain 2.9
  source 1..2529: mol_type = other DNA
atgcaccatcatcatcatcatggcggtagcggcgtgttaccggtgttcgagcctaaaggtcgcgtgcttctggttgatggccatcatctcgcgtatcgtaacttctttgccctgaaaggattaaccaccagcagcggcgagccggtacagggtgtctacggctttgcaaagtcgctcctgaaagctctgaaagaagacggtgatgtggtgattgttgtctttgatgcgaaagcgccaagttttcgccacgaagcgtacgaagcttacaaagccgggcgtgctccaacgccggaagactttcctcgccaattggcgcttatgaaggaattagtggatttgcttggcctcgaacgcttggaagttcccggtttcgaggcagacgacgtattagcgactctcgcaaagaaagccgaacgtgagggctatgaagtccagatcttgacagcagatcgcgatcttttccagcttttatctccgcgcatctcggtgttacacccggaagggcatcgtatcaccccggaatggctctgggagaaatatggtttgcgtcccgaacaatgggtggattttcgcgccttagcaggcgatccgagcgacaatattccgggagttaaaggtatcggcgagaagacggcgctcaagctccttaaagaatgggggtcgttggagaacttgcttaagaatttagatcaggtcaaaccagagtcagtgcgtgagaagattcttgctcacctcgaagacctcaaattaagccgcgaattgtcccgtgtacgcaccgatttgccgctcgaagttgatttccaacgccgccgcgaacctgactgggagggtcttaaagcgtttttagagcgtcttgaatttggttcgctcttgcatgaattcggccttttagaaagcccgttaccagccgaagaagcaccttggccaccgcccgagggcgcgtttttaggttaccgtttgagtcgcccggaaccgatgtgggccgaattactggctcttgcagcgtctgcccagggacgtgtgtatcgcgcggaagaccctcatggtgcgctccgcggcctcttcgaagtccgtggactccttgccaaagacttagctgttgttgcattgcgcgaaggtcttgatttacctccgactgatgatccaatgcttcttgcgtacctcttggacccgtcaaacacgacgcccgaaggcgtagcccgtcgttacggcggcgagtggaccgaagatgcagcgaaacgcgcgttattggccgaacgtttgcacgccaatttattaggacgtttgcaaggcgaggaacgtctcctctggctttacgaagaagtggagaaaccattgagtcgcgtgctcgcgcatatggaagctaccggtgtcaaattagacgtggcgtatttggagaatctcagccttgaagttgctgcccacatgcgccgcttggaggaagaagtattccgtttagcaggccgttcctttcgccttaattctcgcgatcagttagaacgtgtgttgttcgatgaacttggtctccctcctatcggcaagacagagaagaccggtaaacgtagcacttcagcggcggttttagaagctcttcgcgaagtccatcccattgtggacaagatcttgcaataccgcgaactcgcgaaattgaaaggcacctatattgaccgtcttccggcattagtccacccgaaaacgggacgcctccatacccgcttcaaccaaacagccacggcgaccggtcgtttgtcctcctctgatccaaaccttcagaatattccagtacgtaccccattgggccagaagatccgccgtgcgtttgtagctgaggagggttggcgtttagtggccctcgattatagccaaattgaattacgtgtccttgcccatctttctggcgatgagaacctcatccgcgtgtttcaggaaggcaaagacattcacactcaaacggcaagctggatgtttggattatcagctgaagcgatcgatcctttgatgcgtcgtgcagcgaagaccatcaatttcggtgttctctacggtatgagtgcctttcgtttgtcgcaggaattaggcattccctatgaagaagctcaggcgttcattcagaaatactttcaaagctatcccaaagttaaagcatggatcgagaagactctcgaagaaggccgcacacgtggttacgtagagaccttatttggacgtcgccgctatgttcccgatttaaacgctcgcgtgaaaggcaagcgtgaagccgccgaacgcatggcgttcaacatgcctgtacagggcacggcagctgacctcatgaaacttgcaatggtgcgcctttttccacaattgcgtgaagttggtgcccgcatgctcttgcaggtccacgatgaactcttgttagaagcgccaaaagagcgtgcggaagaggtggcagccctcgcgaaagaagttatggaaggcgtgtggcccttagcggtgcctcttgaagtcgaagttggtattggcgaggattggctggctgccaaaggataatga

SEQ ID NO: 2994 - protein, 841 aa, synthetic construct
  REGION 1..841: note = Variant of DNA polymerase I from Thermus sp. strain 2.9
MHHHHHHGGSGVLPVFEPKGRVLLVDGHHLAYRNFFALKGLTTSSGEPVQGVYGFAKSLLKALKEDGDVVIVVFDAKAPSFRHEAYEAYKAGRAPTPEDFPRQLALMKELVDLLGLERLEVPGFEADDVLATLAKKAEREGYEVQILTADRDLFQLLSPRISVLHPEGHRITPEWLWEKYGLRPEQWVDFRALAGDPSDNIPGVKGIGEKTALKLLKEWGSLENLLKNLDQVKPESVREKILAHLEDLKLSRELSRVRTDLPLEVDFQRRREPDWEGLKAFLERLEFGSLLHEFGLLESPLPAEEAPWPPPEGAFLGYRLSRPEPMWAELLALAASAQGRVYRAEDPHGALRGLFEVRGLLAKDLAVVALREGLDLPPTDDPMLLAYLLDPSNTTPEGVARRYGGEWTEDAAKRALLAERLHANLLGRLQGEERLLWLYEEVEKPLSRVLAHMEATGVKLDVAYLENLSLEVAAHMRRLEEEVFRLAGRSFRLNSRDQLERVLFDELGLPPIGKTEKTGKRSTSAAVLEALREVHPIVDKILQYRELAKLKGTYIDRLPALVHPKTGRLHTRFNQTATATGRLSSSDPNLQNIPVRTPLGQKIRRAFVAEEGWRLVALDYSQIELRVLAHLSGDENLIRVFQEGKDIHTQTASWMFGLSAEAIDPLMRRAAKTINFGVLYGMSAFRLSQELGIPYEEAQAFIQKYFQSYPKVKAWIEKTLEEGRTRGYVETLFGRRRYVPDLNARVKGKREAAERMAFNMPVQGTAADLMKLAMVRLFPQLREVGARMLLQVHDELLLEAPKERAEEVAALAKEVMEGVWPLAVPLEVEVGIGEDWLAAKG

SEQ ID NO: 2995 - DNA, 2529 bp, synthetic construct
  misc_feature 1..2529: note = Variant of DNA polymerase I from Thermus sp. strain 2.9
  source 1..2529: mol_type = other DNA
atgcaccatcatcatcatcatggcggtagcggcgtgttaccggtgttcgagcctaaaggtcgcgtgcttctggttgatggccatcatctcgcgtatcgtaacttctttgccctgaaaggattaaccaccagcagcggcgagccggtacagggtgtctacggctttgcaaagtcgctcctgaaagctctgaaagaagacggtgatgtggtgattgttgtctttgatgcgaaagcgccaagttttcgccacgaagcgtacgaagcttacaaagccgggcgtgctccaacgccggaagactttcctcgccaattggcgcttatgaaggaattagtggatttgcttggcctcgaacgcttggaagttcccggtttcgaggcagacgacgtattagcgactctcgcaaagaaagccgaacgtgagggctatgaagtccagatcttgacagcagatcgcgatcttttccagcttttatctccgcgcatctcggtgttacacccggaagggcatcgtatcaccccggaatggctctgggagaaatatggtttgcgtcccgaacaatgggtggattttcgcgccttagcaggcgatccgagcgacaatattccgggagttaaaggtatcggcgagaagacggcgctcaagctccttaaagaatgggggtcgttggagaacttgcttaagaatttagatcaggtcaaaccagagtcagtgcgtgagaagattcttgctcacctcgaagacctcaaattaagccgcgaattgtcccgtgtacgcaccgatttgccgctcgaagttgatttccgtcgccgccgcgaacctgactgggagggtcttaaagcgtttttagagcgtcttgaatttggttcgctcttgcatgaattcggccttttagaaagcccgttaccagccgaagaagcaccttggccaccgcccgagggcgcgtttttaggttaccgtttgagtcgcccggaaccgatgtgggccgaattactggctcttgcagcgtctgcccagggacgtgtgtatcgcgcggaagaccctcatggtgcgctccgcggcctcttcgaagtccgtggactccttgccaaagacttagctgttgttgcattgcgcgaaggtcttgatttacctccgactgatgatccaatgcttcttgcgtacctcttggacccgtcaaacacgacgcccgaaggcgtagcccgtcgttacggcggcgagtggaccgaagatgcagcgaaacgcgcgttattggccgaacgtttgcacgccaatttattaggacgtttgcaaggcgaggaacgtctcctctggctttacgaagaagtggagaaaccattgagtcgcgtgctcgcgcatatggaagctaccggtgtcaaattagacgtggcgtatttggaggcactcagccttgaagttgctgcccacatgcgccgcttggaggaagaagtattccgtttagcaggccattcctttcgccttaattctcgcgatcagttagaacgtgtgttgttcgatgaacttggtctccctcctatcggcaagacagagaagaccggtaaacgtagcacttcagcggcggttttagaagctcttcgcgaagtccatcccattgtggacaagatcttggtttaccgcgaactcgcgaaattgaaaggcacctatattgaccgtcttccggcattagtccacccgaaaacgggacgcctccatacccgcttcaaccaaacagccacggcgaccggtcgtttgtcctcctctgatccaaaccttcagaatattccagtacgtaccccattgggccagaagatccgccgtgcgtttgtagctgaggagggttggcgtttagtggccctcgattatagccaaattgaattacgtgtccttgcccatctttctggcgatgagaacctcatccgcgtgtttcaggaaggcaaagacattcacactcaaacggcaagctggatgtttggattatcagctgaagcgatcgatcctttgatgcgtcgtgcagcgaagaccatcaatttcggtgttctctacggtatgagtgcctttcgtttgtcgcaggaattaggcattccctatgaagaagctcaggcgttcattcagaaatactttcaaagctatcccaaagttaaagcatggatcgagaagactctcgaagaaggccgcacacgtggttacgtagagaccttatttggacgtcgccgctatgttcccgatttaaacgctcgcgtgaaaggcaagcgtgaagccgccgaacgcatggcgttcaacatgcctgtacagggcacggcagctgacctcatgaaacttgcaatggtgcgcctttttccacaattgcgtgaagttggtgcccgcatgctcttgcaggtccacgatgaactcttgttagaagcgccaaaagagcgtgcggaagaggtggcagccctcgcgaaaaccgttatggaaggcgtgtggcccttagcggtgcctcttgaagtcgaagttggtattggcgaggattggctggctgccaaaggataatga

SEQ ID NO: 2996 - protein, 841 aa, synthetic construct
  REGION 1..841: note = Variant of DNA polymerase I from Thermus sp. strain 2.9
MHHHHHHGGSGVLPVFEPKGRVLLVDGHHLAYRNFFALKGLTTSSGEPVQGVYGFAKSLLKALKEDGDVVIVVFDAKAPSFRHEAYEAYKAGRAPTPEDFPRQLALMKELVDLLGLERLEVPGFEADDVLATLAKKAEREGYEVQILTADRDLFQLLSPRISVLHPEGHRITPEWLWEKYGLRPEQWVDFRALAGDPSDNIPGVKGIGEKTALKLLKEWGSLENLLKNLDQVKPESVREKILAHLEDLKLSRELSRVRTDLPLEVDFRRRREPDWEGLKAFLERLEFGSLLHEFGLLESPLPAEEAPWPPPEGAFLGYRLSRPEPMWAELLALAASAQGRVYRAEDPHGALRGLFEVRGLLAKDLAVVALREGLDLPPTDDPMLLAYLLDPSNTTPEGVARRYGGEWTEDAAKRALLAERLHANLLGRLQGEERLLWLYEEVEKPLSRVLAHMEATGVKLDVAYLEALSLEVAAHMRRLEEEVFRLAGHSFRLNSRDQLERVLFDELGLPPIGKTEKTGKRSTSAAVLEALREVHPIVDKILVYRELAKLKGTYIDRLPALVHPKTGRLHTRFNQTATATGRLSSSDPNLQNIPVRTPLGQKIRRAFVAEEGWRLVALDYSQIELRVLAHLSGDENLIRVFQEGKDIHTQTASWMFGLSAEAIDPLMRRAAKTINFGVLYGMSAFRLSQELGIPYEEAQAFIQKYFQSYPKVKAWIEKTLEEGRTRGYVETLFGRRRYVPDLNARVKGKREAAERMAFNMPVQGTAADLMKLAMVRLFPQLREVGARMLLQVHDELLLEAPKERAEEVAALAKTVMEGVWPLAVPLEVEVGIGEDWLAAKG

SEQ ID NO: 2997 - DNA, 2529 bp, synthetic construct
  misc_feature 1..2529: note = Variant of DNA polymerase I from Thermus sp. strain 2.9
  source 1..2529: mol_type = other DNA
atgcaccatcatcatcatcatggcggtagcggcgtgttaccggtgttcgagcctaaaggtcgcgtgcttctggttgatggccatcatctcgcgtatcgtaacttctttgccctgaaaggattaaccaccagcagcggcgagccggtacagggtgtctacggctttgcaaagtcgctcctgaaagctctgaaagaagacggtgatgtggtgattgttgtctttgatgcgaaagcgccaagttttcgccacgaagcgtacgaagcttacaaagccgggcgtgctccaacgccggaagactttcctcgccaattggcgcttatgaaggaattagtggatttgcttggcctcgaacgcttggaagttcccggtttcgaggcagacgacgtattagcgactctcgcaaagaaagccgaacgtgagggctatgaagtccagatcttgacagcagatcgcgatcttttccagcttttatctccgcgcatctcggtgttacacccggaagggcatcgtatcaccccggaatggctctgggagaaatatggtttgcgtcccgaacaatgggtggattttcgcgccttagcaggcgatccgagcgacaatattccgggagttaaaggtatcggcgagaagacggcgctcaagctccttaaagaatgggggtcgttggagaacttgcttaagaatttagatcaggtcaaaccagagtcagtgcgtgagaagattcttgctcacctcgaagacctcaaattaagccgcgaattgtcccgtgtacgcaccgatttgccgctcgaagttgatttccaacgccgccgcgaacctgactgggagggtcttaaagcgtttttagagcgtcttgaatttggttcgctcttgcatgaattcggccttttagaaagcccgttaccagccgaagaagcaccttggccaccgcccgagggcgcgtttttaggttaccgtttgagtcgcccggaaccgatgtgggccgaattactggctcttgcagcgtctgcccagggacgtgtgtatcgcgcggaagaccctcatggtgcgctccgcggcctcttcgaagtccgtggactccttgccaaagacttagctgttgttgcattgcgcgaaggtcttgatttacctccgactgatgatccaatgcttcttgcgtacctcttggacccgtcaaacacgacgcccgaaggcgtagcccgtcgttacggcggcgagtggaccgaagatgcagcgaaacgcgcgttattggccgaacgtttgcacgccaatttattaggacgtttgcaaggcgaggaacgtctcctctggctttacgaagaagtggagaaaccattgagtcgcgtgctcgcgcatatggaagctaccggtgtcaaattagacgtggcgtatttggagaatctcagccttgaagttgctgcccacatgcgccgcttggaggaagaagtattccgtttagcaggccattcctttcgccttaattctcgcgatcagttagaacgtgtgttgttcgatgaacttggtctccctcctatcggcaagacagagaagaccggtaaacgtagcacttcagcggcggttttagaagctcttcgcgaagtccatcccattgtggacaagatcttgcagtaccgcgaactcgcgaaattgaaaggcacctatattgaccgtcttccggcattagtccacccgaaaacgggacgcctccatacccgcttcaaccaaacagccacggcgaccggtcgtttgtcctcctctgatccaaaccttcagaatattccagtacgtaccccattgggccagaagatccgccgtgcgtttgtagctgaggagggttggcgtttagtggccctcgattatagccaaattgaattacgtgtccttgcccatctttctggcgatgagaacctcatccgcgtgtttcaggaaggcaaagacattcacactcaaacggcaagctggatgtttggattatcagctgaagcgatcgatcctttgatgcgtcgtgcagcgaagaccatcaatttcggtgttctctacggtatgagtgcctttcgtttgtcgcaggaattaggcattccctatgaagaagctgcggcgttcattcagaaatactttcaaagctatcccaaagttaaagcatggatcgagaagactctcgaagaaggccgcacacgtggttacgtagagaccttatttggacgtcgccgctatgttcccgatttaaacgctcgcgtgaaaggcaagcgtgaagccgccgaacgcatggcgttcaacatgcctgtacagggcacggcagctgacctcatgaaacttgcaatggtgcgcctttttccacaattgcgtgaagttggtgcccgcatgctcttgcaggtccacgatgaactcttgttagaagcgccaaaagagcgtgcggaagaggtggcagccctcgcgaaagaagttatggaaggcgtgtggcccttagcggtgcctcttgaagtcgaagttggtattggcgaggattggctggctgccaaaggataatga

SEQ ID NO: 2998 - protein, 841 aa, synthetic construct
  REGION 1..841: note = Variant of DNA polymerase I from Thermus sp. strain 2.9
MHHHHHHGGSGVLPVFEPKGRVLLVDGHHLAYRNFFALKGLTTSSGEPVQGVYGFAKSLLKALKEDGDVVIVVFDAKAPSFRHEAYEAYKAGRAPTPEDFPRQLALMKELVDLLGLERLEVPGFEADDVLATLAKKAEREGYEVQILTADRDLFQLLSPRISVLHPEGHRITPEWLWEKYGLRPEQWVDFRALAGDPSDNIPGVKGIGEKTALKLLKEWGSLENLLKNLDQVKPESVREKILAHLEDLKLSRELSRVRTDLPLEVDFQRRREPDWEGLKAFLERLEFGSLLHEFGLLESPLPAEEAPWPPPEGAFLGYRLSRPEPMWAELLALAASAQGRVYRAEDPHGALRGLFEVRGLLAKDLAVVALREGLDLPPTDDPMLLAYLLDPSNTTPEGVARRYGGEWTEDAAKRALLAERLHANLLGRLQGEERLLWLYEEVEKPLSRVLAHMEATGVKLDVAYLENLSLEVAAHMRRLEEEVFRLAGHSFRLNSRDQLERVLFDELGLPPIGKTEKTGKRSTSAAVLEALREVHPIVDKILQYRELAKLKGTYIDRLPALVHPKTGRLHTRFNQTATATGRLSSSDPNLQNIPVRTPLGQKIRRAFVAEEGWRLVALDYSQIELRVLAHLSGDENLIRVFQEGKDIHTQTASWMFGLSAEAIDPLMRRAAKTINFGVLYGMSAFRLSQELGIPYEEAAAFIQKYFQSYPKVKAWIEKTLEEGRTRGYVETLFGRRRYVPDLNARVKGKREAAERMAFNMPVQGTAADLMKLAMVRLFPQLREVGARMLLQVHDELLLEAPKERAEEVAALAKEVMEGVWPLAVPLEVEVGIGEDWLAAKG

SEQ ID NO: 2999 - DNA, 2529 bp, synthetic construct
  misc_feature 1..2529: note = Variant of DNA polymerase I from Thermus sp. strain 2.9
  source 1..2529: mol_type = other DNA
atgcaccatcatcatcatcatggcggtagcggcgtgttaccggtgttcgagcctaaaggtcgcgtgcttctggttgatggccatcatctcgcgtatcgtaacttctttgccctgaaaggattaaccaccagcagcggcgagccggtacagggtgtctacggctttgcaaagtcgctcctgaaagctctgaaagaagacggtgatgtggtgattgttgtctttgatgcgaaagcgccaagttttcgccacgaagcgtacgaagcttacaaagccgggcgtgctccaacgccggaagactttcctcgccaattggcgcttatgaaggaattagtggatttgcttggcctcgaacgcttggaagttcccggtttcgaggcagacgacgtattagcgactctcgcaaagaaagccgaacgtgagggctatgaagtccagatcttgacagcagatcgcgatcttttccagcttttatctccgcgcatctcggtgttacacccggaagggcatcgtatcaccccggaatggctctgggagaaatatggtttgcgtcccgaacaatgggtggattttcgcgccttagcaggcgatccgagcgacaatattccgggagttaaaggtatcggcgagaagacggcgctcaagctccttaaagaatgggggtcgttggagaacttgcttaagaatttagatcaggtcaaaccagagtcagtgcgtgagaagattcttgctcacctcgaagacctcaaattaagccgcgaattgtcccgtgtacgcaccgatttgccgctcgaagttgatttccgtcgccgccgcgaacctgactgggagggtcttaaagcgtttttagagcgtcttgaatttggttcgctcttgcatgaattcggccttttagaaagcccgttaccggccgaagaagcaccttggccaccgccccagggcgcgtttttaggttaccgtttgagtcgcccggaaccgatgtgggccgaattactggctcttgcagcgtctgcccagggacgtgtgtatcgcgcggaagaccctcatggtgcgctccgcggcctcttcgaagtccgtggactccttgccaaagacttagctgttgttgcattgcgcgaaggtcttgatttacctccgactgatgatccaatgcttcttgcgtacctcttggacccgtcaaacacgacgcccgaaggcgtagcccgtcgttacggcggcgagtggaccgaagatgcagcgaaacgcgcgttattggccgaacgtttgcacgcgaatttattaggacgtttgcaaggcgaggaacgtctcctctggctttacgaagaagtggagaaaccattgagtcgcgtgctcgcgcatatggaagctaccggtgtcaaattagacgtggcgtatttggaggctctcagccttgaagttgctgcccacatgcgccgcttggaggaagaagtattccgtttagcaggccattcctttcgccttaattctcgcgatcagttagaacgtgtgttgttcgatgaacttggtctccgtcctatcggcaagacagagaagaccggtaaacgtagcacttcagcggcggttttagaagctcttcgcgaagtccatcccattgtggacaagatcttgcagtaccgcgaactcgcgaaattgaaaggcacctatattgaccgtcttccggcattagtccacccgaaaacgggacgcctccatacccgcttcaaccaaacagccacggcgaccggtcgtttgtcctcctctgatccaaaccttcagaatattccagtacgtaccccattgggccagaagatccgcaaagcgtttgtagctgaggagggttggcgtttagtggccctcgattatagccaaattgaattacgtgtccttgcccatctttctggcgatgagaacctcatccgcgtgtttcaggaaggcaaagacattcacactcaaacggcaagctggatgtttggattaagtgctgaagcgatcgatcctttgatgcgtcgtgcagcgaagaccatcaatttcggtgttctctacggtatgagtgcctttcgtttgtcgcaggaattaggcattccctatgaagaagctgcggcgttcattcagaaatactttcaaagctatcccaaagttaaagcatggatcgagaagactctcgaagaaggccgcacacgtggttacgtagagaccttatttggacgtcgccgctatgttcccgatttaaacgctcgcgtgaaaggcaagcgtgaagccgccgaacgcatggcgttcaacatgcctgtacagggcacggcagctgacctcatgaaacttgcaatggtgcgcctttttccacaattgcgtgaagttggtgcccgcatgctcttgcaggtccacgatgaactcttgttagaagcgccaaaagagcgtgcggaagaggtggcagccctcgcgaaagaagttatggaaggcgtgtggcccttagcggtgcctcttgaagtcgaagttggtattggcgaggattggctggctgccaaaggataatga

SEQ ID NO: 3000 - protein, 841 aa, synthetic construct
  REGION 1..841: note = Variant of DNA polymerase I from Thermus sp. strain 2.9
MHHHHHHGGSGVLPVFEPKGRVLLVDGHHLAYRNFFALKGLTTSSGEPVQGVYGFAKSLLKALKEDGDVVIVVFDAKAPSFRHEAYEAYKAGRAPTPEDFPRQLALMKELVDLLGLERLEVPGFEADDVLATLAKKAEREGYEVQILTADRDLFQLLSPRISVLHPEGHRITPEWLWEKYGLRPEQWVDFRALAGDPSDNIPGVKGIGEKTALKLLKEWGSLENLLKNLDQVKPESVREKILAHLEDLKLSRELSRVRTDLPLEVDFRRRREPDWEGLKAFLERLEFGSLLHEFGLLESPLPAEEAPWPPPQGAFLGYRLSRPEPMWAELLALAASAQGRVYRAEDPHGALRGLFEVRGLLAKDLAVVALREGLDLPPTDDPMLLAYLLDPSNTTPEGVARRYGGEWTEDAAKRALLAERLHANLLGRLQGEERLLWLYEEVEKPLSRVLAHMEATGVKLDVAYLEALSLEVAAHMRRLEEEVFRLAGHSFRLNSRDQLERVLFDELGLRPIGKTEKTGKRSTSAAVLEALREVHPIVDKILQYRELAKLKGTYIDRLPALVHPKTGRLHTRFNQTATATGRLSSSDPNLQNIPVRTPLGQKIRKAFVAEEGWRLVALDYSQIELRVLAHLSGDENLIRVFQEGKDIHTQTASWMFGLSAEAIDPLMRRAAKTINFGVLYGMSAFRLSQELGIPYEEAAAFIQKYFQSYPKVKAWIEKTLEEGRTRGYVETLFGRRRYVPDLNARVKGKREAAERMAFNMPVQGTAADLMKLAMVRLFPQLREVGARMLLQVHDELLLEAPKERAEEVAALAKEVMEGVWPLAVPLEVEVGIGEDWLAAKG

SEQ ID NO: 3001 - DNA, 2529 bp, synthetic construct
  misc_feature 1..2529: note = Variant of DNA polymerase I from Thermus sp. strain 2.9
  source 1..2529: mol_type = other DNA
atgcaccatcatcatcatcatggcggtagcggcgtgttaccggtgttcgagcctaaaggtcgcgtgcttctggttgatggccatcatctcgcgtatcgtaacttctttgccctgaaaggattaaccaccagcagcggcgagccggtacagggtgtctacggctttgcaaagtcgctcctgaaagctctgaaagaagacggtgatgtggtgattgttgtctttgatgcgaaagcgccaagttttcgccacgaagcgtacgaagcttacaaagccgggcgtgctccaacgccggaagactttcctcgccaattggcgcttatgaaggaattagtggatttgcttggcctcgaacgcttggaagttcccggtttcgaggcagacgacgtattagcgactctcgcaaagaaagccgaacgtgagggctatgaagtccagatcttgacagcagatcgcgatcttttccagcttttatctccgcgcatctcggtgttacacccggaagggcatcgtatcaccccggaatggctctgggagaaatatggtttgcgtcccgaacaatgggtggattttcgcgccttagcaggcgatccgagcgacaatattccgggagttaaaggtatcggcgagaagacggcgctcaagctccttaaagaatgggggtcgttggagaacttgcttaagaatttagatcaggtcaaaccagagtcagtgcgtgagaagattcttgctcacctcgaagacctcaaattaagccgcgaattgtcccgtgtacgcaccgatttgccgctcgaagttgatttccgccgccgccgcgaacctgactgggagggtcttaaagcgtttttagagcgtcttgaatttggttcgctcttgcatgaattcggccttttagaaagcccgttaccagccgaagaagcaccttggccaccgcccgagggcgcgtttttaggttaccgtttgagtcgcccggaaccgatgtgggccgaattactggctcttgcagcgtctgcccagggacgtgtgtatcgcgcggaagaccctcatggtgcgctccgcggcctcttcgaagtccgtggactccttgccaaagacttagctgttgttgcattgcgcgaaggtcttgatttacctccgactgatgatccaatgcttcttgcgtacctcttggacccgtcaaacacgacgcccgaaggcgtagcccgtcgttacggcggcgagtggaccgaagatgcagcgaaacgcgcgttattggccgaacgtttgcacgccaatttattaggacgtttgcaaggcgaggaacgtctcctctggctttacgaagaagtggagaaaccattgagtcgcgtgctcgcgcatatggaagctaccggtgtcaaattagacgtggcgtatttggaggcactcagccttgaagttgctgcccacatgcgccgcttggaggaagaagtattccgtttagcaggccattcctttcgccttaattctcgcgatcagttagaacgtgtgttgttcgatgaacttggtctccctcctatcggcaagacagagaagaccggtaaacgtagcacttcagcggcggttttagaagctcttcgcgaagtccatcccattgtggacaagatcttgcagtaccgcgaactcgcgaaattgaaaggcacctatattgaccgtcttccggcattagtccacccgaaaacgggacgcctccatacccgcttcaaccaaacagccacggcgaccggtcgtttgtcctcctctgatccaaaccttcagaatattccagtacgtaccccattgggccagaagatccgccgtgcgtttgtagctgaggagggttggcgtttagtggccctcgattatagccaaattgaattacgtgtccttgcccatctttctggcgatgagaacctcatccgcgtgtttcaggaaggcaaagacattcacactcaaacggcaagctggatgtttggattatcagctgaagcgatcgatcctttgatgcgtcgtgcagcgaagaccatcaatttcggtgttctctacggtatgagtgcctttcgtttgtcgcaggaattaggcattccctatgaagaagctcaggcgttcattcagaaatactttcaaagctatcccaaagttaaagcatggatcgagaagactctcgaagaaggccgcacacgtggttacgtagagaccttatttggacgtcgccgctatgttcccgatttaaacgctcgcgtgaaaggcaagcgtgaagccgccgaacgcatggcgttcaacatgcctgtacagggcacggcagctgacctcatgaaacttgcaatggtgcgcctttttccacaattgcgtgaagttggtgcccgcatgctcttgcaggtccacgatgaactcttgttagaagcgccaaaagagcgtgcggaagaggtggcagccctcgcgaaaaccgttatggaaggcgtgtggcccttagcggtgcctcttgaagtcgaagttggtattggcgaggattggctggctgccaaaggataatga

SEQ ID NO: 3002 - protein, 841 aa, synthetic construct
  REGION 1..841: note = Variant of DNA polymerase I from Thermus sp. strain 2.9
MHHHHHHGGSGVLPVFEPKGRVLLVDGHHLAYRNFFALKGLTTSSGEPVQGVYGFAKSLLKALKEDGDVVIVVFDAKAPSFRHEAYEAYKAGRAPTPEDFPRQLALMKELVDLLGLERLEVPGFEADDVLATLAKKAEREGYEVQILTADRDLFQLLSPRISVLHPEGHRITPEWLWEKYGLRPEQWVDFRALAGDPSDNIPGVKGIGEKTALKLLKEWGSLENLLKNLDQVKPESVREKILAHLEDLKLSRELSRVRTDLPLEVDFRRRREPDWEGLKAFLERLEFGSLLHEFGLLESPLPAEEAPWPPPEGAFLGYRLSRPEPMWAELLALAASAQGRVYRAEDPHGALRGLFEVRGLLAKDLAVVALREGLDLPPTDDPMLLAYLLDPSNTTPEGVARRYGGEWTEDAAKRALLAERLHANLLGRLQGEERLLWLYEEVEKPLSRVLAHMEATGVKLDVAYLEALSLEVAAHMRRLEEEVFRLAGHSFRLNSRDQLERVLFDELGLPPIGKTEKTGKRSTSAAVLEALREVHPIVDKILQYRELAKLKGTYIDRLPALVHPKTGRLHTRFNQTATATGRLSSSDPNLQNIPVRTPLGQKIRRAFVAEEGWRLVALDYSQIELRVLAHLSGDENLIRVFQEGKDIHTQTASWMFGLSAEAIDPLMRRAAKTINFGVLYGMSAFRLSQELGIPYEEAQAFIQKYFQSYPKVKAWIEKTLEEGRTRGYVETLFGRRRYVPDLNARVKGKREAAERMAFNMPVQGTAADLMKLAMVRLFPQLREVGARMLLQVHDELLLEAPKERAEEVAALAKTVMEGVWPLAVPLEVEVGIGEDWLAAKG

SEQ ID NO: 3003 - DNA, 2529 bp, synthetic construct
  misc_feature 1..2529: note = Variant of DNA polymerase I from Thermus sp. strain 2.9
  source 1..2529: mol_type = other DNA
atgcaccatcatcatcatcatggcggtagcggcgtgttaccggtgttcgagcctaaaggtcgcgtgcttctggttgatggccatcatctcgcgtatcgtaacttctttgccctgaaaggattaaccaccagcagcggcgagccggtacagggtgtctacggctttgcaaagtcgctcctgaaagctctgaaagaagacggtgatgtggtgattgttgtctttgatgcgaaagcgccaagttttcgccacgaagcgtacgaagcttacaaagccgggcgtgctccaacgccggaagactttcctcgccaattggcgcttatgaaggaattagtggatttgcttggcctcgaacgcttggaagttcccggtttcgaggcagacgacgtattagcgactctcgcaaagaaagccgaacgtgagggctatgaagtccagatcttgacagcagatcgcgatcttttccagcttttatctccgcgcatctcggtgttacacccggaagggcatcgtatcaccccggaatggctctgggagaaatatggtttgcgtcccgaacaatgggtggattttcgcgccttagcaggcgatccgagcgacaatattccgggagttaaaggtatcggcgagaagacggcgctcaagctccttaaagaatgggggtcgttggagaacttgcttaagaatttagatcaggtcaaaccagagtcagtgcgtgagaagattcttgctcacctcgaagacctcaaattaagccgcgaattgtcccgtgtacgcaccgatttgccgctcgaagttgatttccaacgccgccgcgaacctgactgggagggtcttaaagcgtttttagagcgtcttgaatttggttcgctcttgcatgaattcggccttttagaaagcccgttaccagccgaagaagcaccttggccaccgcccgagggcgcgtttttaggttaccgtttgagtcgcccggaaccgatgtgggccgaattactggctcttgcagcgtctgcccagggacgtgtgtatcgcgcggaagaccctcatggtgcgctccgcggcctcttcgaagtccgtggactccttgccaaagacttagctgttgttgcattgcgcgaaggtcttgatttacctccgactgatgatccaatgcttcttgcgtacctcttggacccgtcaaacacgacgcccgaaggcgtagcccgtcgttacggcggcgagtggaccgaagatgcagcgaaacgcgcgttattggccgaacgtttgcacgccaatttattaggacgtttgcaaggcgaggaacgtctcctctggctttacgaagaagtggagaaaccattgagtcgcgtgctcgcgcatatggaagctaccggtgtcaaattagacgtggcgtatttggaggcactcagccttgaagttgctgcccacatgcgccgcttggaggaagaagtattccgtttagcaggccattcctttcgccttaattctcgcgatcagttagaacgtgtgttgttcgatgaacttggtctccctcctatcggcaagacagagaagaccggtaaacgtagcacttcagcggcggttttagaagctcttcgcgaagtccatcccattgtggacaagatcttgcagtaccgcgaactcgcgaaattgaaaggcacctatattgaccgtcttccggcattagtccacccgaaaacgggacgcctccatacccgcttcaaccaaacagccacggcgaccggtcgtttgtcctcctctgatccaaaccttcagaatattccagtacgtaccccattgggccagaagatccgccgtgcgtttgtagctgaggagggttggcgtttagtggccctcgattatagccaaattgaattacgtgtccttgcccatctttctggcgatgagaacctcatccgcgtgtttcaggaaggcaaagacattcacactcaaacggcaagctggatgtttggattatcagctgaagcgatcgatcctttgatgcgtcgtgcagcgaagaccatcaatttcggtgttctctacggtatgagtgcctttcgtttgtcgcaggaattaggcattccctatgaagaagctcaggcgttcattcagaaatactttcaaagctatcccaaagttaaagcatggatcgagaagactctcgaagaaggccgcacacgtggttacgtagagaccttatttggacgtcgccgctatgttcccgatttaaacgctcgcgtgaaaggcaagcgtgaagccgccgaacgcatggcgttcaacatgcctgtacagggcacggcagctgacctcatgaaacttgcaatggtgcgcctttttccacaattgcgtgaagttggtgcccgcatgctcttgcaggtccacgatgaactcttgttagaagcgccaaaagagcgtgcggaagaggtggcagccctcgcgaaagaagttatggaaggcgtgtggcccttagcggtgcctcttgaagtcgaagttggtattggcgaggattggctggctgccaaaggataatga

SEQ ID NO: 3004 - protein, 841 aa, synthetic construct
  REGION 1..841: note = Variant of DNA polymerase I from Thermus sp. strain 2.9
MHHHHHHGGSGVLPVFEPKGRVLLVDGHHLAYRNFFALKGLTTSSGEPVQGVYGFAKSLLKALKEDGDVVIVVFDAKAPSFRHEAYEAYKAGRAPTPEDFPRQLALMKELVDLLGLERLEVPGFEADDVLATLAKKAEREGYEVQILTADRDLFQLLSPRISVLHPEGHRITPEWLWEKYGLRPEQWVDFRALAGDPSDNIPGVKGIGEKTALKLLKEWGSLENLLKNLDQVKPESVREKILAHLEDLKLSRELSRVRTDLPLEVDFQRRREPDWEGLKAFLERLEFGSLLHEFGLLESPLPAEEAPWPPPEGAFLGYRLSRPEPMWAELLALAASAQGRVYRAEDPHGALRGLFEVRGLLAKDLAVVALREGLDLPPTDDPMLLAYLLDPSNTTPEGVARRYGGEWTEDAAKRALLAERLHANLLGRLQGEERLLWLYEEVEKPLSRVLAHMEATGVKLDVAYLEALSLEVAAHMRRLEEEVFRLAGHSFRLNSRDQLERVLFDELGLPPIGKTEKTGKRSTSAAVLEALREVHPIVDKILQYRELAKLKGTYIDRLPALVHPKTGRLHTRFNQTATATGRLSSSDPNLQNIPVRTPLGQKIRRAFVAEEGWRLVALDYSQIELRVLAHLSGDENLIRVFQEGKDIHTQTASWMFGLSAEAIDPLMRRAAKTINFGVLYGMSAFRLSQELGIPYEEAQAFIQKYFQSYPKVKAWIEKTLEEGRTRGYVETLFGRRRYVPDLNARVKGKREAAERMAFNMPVQGTAADLMKLAMVRLFPQLREVGARMLLQVHDELLLEAPKERAEEVAALAKEVMEGVWPLAVPLEVEVGIGEDWLAAKG

SEQ ID NO: 3005 - DNA, 2529 bp, synthetic construct
  misc_feature 1..2529: note = Variant of DNA polymerase I from Thermus sp. strain 2.9
  source 1..2529: mol_type = other DNA
atgcaccatcatcatcatcatggcggtagcggcgtgttaccggtgttcgagcctaaaggtcgcgtgcttctggttgatggccatcatctcgcgtatcgtaacttctttgccctgaaaggattaaccaccagcagcggcgagccggtacagggtgtctacggctttgcaaagtcgctcctgaaagctctgaaagaagacggtgatgtggtgattgttgtctttgatgcgaaagcgccaagttttcgccacgaagcgtacgaagcttacaaagccgggcgtgctccaacgccggaagactttcctcgccaattggcgcttatgaaggaattagtggatttgcttggcctcgaacgcttggaagttcccggtttcgaggcagacgacgtattagcgactctcgcaaagaaagccgaacgtgagggctatgaagtccagatcttgacagcagatcgcgatcttttccagcttttatctccgcgcatctcggtgttacacccggaagggcatcgtatcaccccggaatggctctgggagaaatatggtttgcgtcccgaacaatgggtggattttcgcgccttagcaggcgatccgagcgacaatattccgggagttaaaggtatcggcgagaagacggcgctcaagctccttaaagaatgggggtcgttggagaacttgcttaagaatttagatcaggtcaaaccagagtcagtgcgtgagaagattcttgctcacctcgaagacctcaaattaagccgcgaattgtcccgtgtacgcaccgatttgccgctcgaagttgatttccgtcgccgccgcgaacctgactgggagggtcttaaagcgtttttagagcgtcttgaatttggttcgctcttgcatgaattcggccttttagaaagcccgttaccagccgaagaagcaccttggccaccgcccgagggcgcgtttttaggttaccgtttgagtcgcccggaaccgatgtgggccgaattactggctcttgcagcgtctgcccagggacgtgtgtatcgcgcggaagaccctcatggtgcgctccgcggcctcttcgaagtccgtggactccttgccaaagacttagctgttgttgcattgcgcgaaggtcttgatttacctccgactgatgatccaatgcttcttgcgtacctcttggacccgtcaaacacgacgcccgaaggcgtagcccgtcgttacggcggcgagtggaccgaagatgcagcgaaacgcgcgttattggccgaacgtttgcacgccaatttattaggacgtttgcaaggcgaggaacgtctcctctggctttacgaagaagtggagaaaccattgagtcgcgtgctcgcgcatatggaagctaccggtgtcaaattagacgtggcgtatttggaggctctcagccttgaagttgctgcccacatgcgccgcttggaggaagaagtattccgtttagcaggccattcctttcgccttaattctcgcgatatgttagaacgtgtgttgttcgatgaacttggtctccctcctatcggcaagacagagaagaccggtaaacgtagcacttcagcggcggttttagaagctcttcgcgaagtccatcccattgtggacaagatcttgcagtaccgcgaactcgcgaaattgaaaggcacctatattgaccgtcttccggcattagtccacccgaaaacgggacgcctccatacccgcttcaaccaaacagccacggcgaccggtcgtttgtcctcctctgatccaaaccttcagaatattccagtacgtaccccattgggccagaagatccgccgtgcgtttgtagctgaggagggttggcgtttagtggccctcgattatagccaaattgaattacgtgtccttgcccatctttctggcgatgagaacctcatccgcgtgtttcaggaaggcaaagacattcacactcaaacggcaagctggatgtttggattatcagctgaagcgatcgatcctttgatgcgtcgtgcagcgaagaccatcaatttcggtgttctctacggtatgagtgcctttcgtttgtcgcaggaattaggcattccctatgaagaagctgcggcgttcattcagaaatactttcaaagctatcccaaagttaaagcatggatcgagaagactctcgaagaaggccgcacacgtggttacgtagagaccttatttggacgtcgccgctatgttcccgatttaaacgctcgcgtgaaaggcaagcgtgaagccgccgaacgcatggcgttcaacatgcctgtacagggcacggcagctgacctcatgaaacttgcaatggtgcgcctttttccacaattgcgtgaagttggtgcccgcatgctcttgcaggtccacgatgaactcttgttagaagcgccaaaagagcgtgcggaagaggtggcagccctcgcgaaagaagttatggaaggcgtgtggcccttagcggtgcctcttgaagtcgaagttggtattggcgaggattggctggctgccaaaggataatga

SEQ ID NO: 3006 - protein, 841 aa, synthetic construct
  REGION 1..841: note = Variant of DNA polymerase I from Thermus sp. strain 2.9
MHHHHHHGGSGVLPVFEPKGRVLLVDGHHLAYRNFFALKGLTTSSGEPVQGVYGFAKSLLKALKEDGDVVIVVFDAKAPSFRHEAYEAYKAGRAPTPEDFPRQLALMKELVDLLGLERLEVPGFEADDVLATLAKKAEREGYEVQILTADRDLFQLLSPRISVLHPEGHRITPEWLWEKYGLRPEQWVDFRALAGDPSDNIPGVKGIGEKTALKLLKEWGSLENLLKNLDQVKPESVREKILAHLEDLKLSRELSRVRTDLPLEVDFRRRREPDWEGLKAFLERLEFGSLLHEFGLLESPLPAEEAPWPPPEGAFLGYRLSRPEPMWAELLALAASAQGRVYRAEDPHGALRGLFEVRGLLAKDLAVVALREGLDLPPTDDPMLLAYLLDPSNTTPEGVARRYGGEWTEDAAKRALLAERLHANLLGRLQGEERLLWLYEEVEKPLSRVLAHMEATGVKLDVAYLEALSLEVAAHMRRLEEEVFRLAGHSFRLNSRDMLERVLFDELGLPPIGKTEKTGKRSTSAAVLEALREVHPIVDKILQYRELAKLKGTYIDRLPALVHPKTGRLHTRFNQTATATGRLSSSDPNLQNIPVRTPLGQKIRRAFVAEEGWRLVALDYSQIELRVLAHLSGDENLIRVFQEGKDIHTQTASWMFGLSAEAIDPLMRRAAKTINFGVLYGMSAFRLSQELGIPYEEAAAFIQKYFQSYPKVKAWIEKTLEEGRTRGYVETLFGRRRYVPDLNARVKGKREAAERMAFNMPVQGTAADLMKLAMVRLFPQLREVGARMLLQVHDELLLEAPKERAEEVAALAKEVMEGVWPLAVPLEVEVGIGEDWLAAKG

SEQ ID NO: 3007 - DNA, 2529 bp, synthetic construct
  misc_feature 1..2529: note = Variant of DNA polymerase I from Thermus sp. strain 2.9
  source 1..2529: mol_type = other DNA
atgcaccatcatcatcatcatggcggtagcggcgtgttaccggtgttcgagcctaaaggtcgcgtgcttctggttgatggccatcatctcgcgtatcgtaacttctttgccctgaaaggattaaccaccagcagcggcgagccggtacagggtgtctacggctttgcaaagtcgctcctgaaagctctgaaagaagacggtgatgtggtgattgttgtctttgatgcgaaagcgccaagttttcgccacgaagcgtacgaagcttacaaagccgggcgtgctccaacgccggaagactttcctcgccaattggcgcttatgaaggaattagtggatttgcttggcctcgaacgcttggaagttcccggtttcgaggcagacgacgtattagcgactctcgcaaagaaagccgaacgtgagggctatgaagtccagatcttgacagcagatcgcgatcttttccagcttttatctccgcgcatctcggtgttacacccggaagggcatcgtatcaccccggaatggctctgggagaaatatggtttgcgtcccgaacaatgggtggattttcgcgccttagcaggcgatccgagcgacaatattccgggagttaaaggtatcggcgagaagacggcgctcaagctccttaaagaatgggggtcgttggagaacttgcttaagaatttagatcaggtcaaaccagagtcagtgcgtgagaagattcttgctcacctcgaagacctcaaattaagccgcgaattgtcccgtgtacgcaccgatttgccgctcgaagttgatttccgccgccgccgcgaacctgactgggagggtcttaaagcgtttttagagcgtcttgaatttggttcgctcttgcatgaattcggccttttagaaagcccgttaccagccgaagaagcaccttggccaccgcccgagggcgcgtttttaggttaccgtttgagtcgcccggaaccgatgtgggccgaattactggctcttgcagcgtctgcccagggacgtgtgtatcgcgcggaagaccctcatggtgcgctccgcggcctcttcgaagtccgtggactccttgccaaagacttagctgttgttgcattgcgcgaaggtcttgatttacctccgactgatgatccaatgcttcttgcgtacctcttggacccgtcaaacacgacgcccgaaggcgtagcccgtcgttacggcggcgagtggaccgaagatgcagcgaaacgcgcgttattggccgaacgtttgcacgccaatttattaggacgtttgcaaggcgaggaacgtctcctctggctttacgaagaagtggagaaaccattgagtcgcgtgctcgcgcatatggaagctaccggtgtcaaattagacgtggcgtatttggaggctctcagccttgaagttgctgcccacatgcgccgcttggaggaagaagtattccgtttagcaggccattcctttcgccttaattctcgcgatcagttagaacgtgtgttgttcgatgaacttggtctccgtcctatcggcaagacagagaagaccggtaaacgtagcacttcagcggcggttttagaagctcttcgcgaagtccatcccattgtggacaagatcttgcagtaccgcgaactcgcgaaattgaaaggcacctatattgaccgtcttccggcattagtccacccgaaaacgggacgcctccatacccgcttcaaccaaacagccacggcgaccggtcgtttgtcctcctctgatccaaaccttcagaatattccagtacgtaccccattgggccagaagatccgccgtgcgtttgtagctgaggagggttggcgtttagtggccctcgattatagccaaattgaattacgtgtccttgcccatctttctggcgatgagaacctcatccgcgtgtttcaggaaggcaaagacattcacactcaaacggcaagctggatgtttggattatcagctgaagcgatcgatcctttgatgcgtcgtgcagcgaagaccatcaatttcggtgttctctacggtatgagtgcctttcgtttgtcgcaggaattaggcattccctatgaagaagctgcggcgttcattcagaaatactttcaaagctatcccaaagttaaagcatggatcgagaagactctcgaagaaggccgcacacgtggttacgtagagaccttatttggacgtcgccgctatgttcccgatttaaacgctcgcgtgaaaggcaagcgtgaagccgccgaacgcatggcgttcaacatgcctgtacagggcacggcagctgacctcatgaaacttgcaatggtgcgcctttttccacaattgcgtgaagttggtgcccgcatgctcttgcaggtccacgatgaactcttgttagaagcgccaaaagagcgtgcggaagaggtggcagccctcgcgaaagaagttatggaaggcgtgtggcccttagcggtgcctcttgaagtcgaagttggtattggcgaggattggctggctgccaaaggataatga

SEQ ID NO: 3008 - protein, 841 aa, synthetic construct
  REGION 1..841: note = Variant of DNA polymerase I from Thermus sp. strain 2.9
MHHHHHHGGSGVLPVFEPKGRVLLVDGHHLAYRNFFALKGLTTSSGEPVQGVYGFAKSLLKALKEDGDVVIVVFDAKAPSFRHEAYEAYKAGRAPTPEDFPRQLALMKELVDLLGLERLEVPGFEADDVLATLAKKAEREGYEVQILTADRDLFQLLSPRISVLHPEGHRITPEWLWEKYGLRPEQWVDFRALAGDPSDNIPGVKGIGEKTALKLLKEWGSLENLLKNLDQVKPESVREKILAHLEDLKLSRELSRVRTDLPLEVDFRRRREPDWEGLKAFLERLEFGSLLHEFGLLESPLPAEEAPWPPPEGAFLGYRLSRPEPMWAELLALAASAQGRVYRAEDPHGALRGLFEVRGLLAKDLAVVALREGLDLPPTDDPMLLAYLLDPSNTTPEGVARRYGGEWTEDAAKRALLAERLHANLLGRLQGEERLLWLYEEVEKPLSRVLAHMEATGVKLDVAYLEALSLEVAAHMRRLEEEVFRLAGHSFRLNSRDQLERVLFDELGLRPIGKTEKTGKRSTSAAVLEALREVHPIVDKILQYRELAKLKGTYIDRLPALVHPKTGRLHTRFNQTATATGRLSSSDPNLQNIPVRTPLGQKIRRAFVAEEGWRLVALDYSQIELRVLAHLSGDENLIRVFQEGKDIHTQTASWMFGLSAEAIDPLMRRAAKTINFGVLYGMSAFRLSQELGIPYEEAAAFIQKYFQSYPKVKAWIEKTLEEGRTRGYVETLFGRRRYVPDLNARVKGKREAAERMAFNMPVQGTAADLMKLAMVRLFPQLREVGARMLLQVHDELLLEAPKERAEEVAALAKEVMEGVWPLAVPLEVEVGIGEDWLAAKG

SEQ ID NO: 3009 - DNA, 2529 bp, synthetic construct
  misc_feature 1..2529: note = Variant of DNA polymerase I from Thermus sp. strain 2.9
  source 1..2529: mol_type = other DNA
atgcaccatcatcatcatcatggcggtagcggcgtgttaccggtgttcgagcctaaaggtcgcgtgcttctggttgatggccatcatctcgcgtatcgtaacttctttgccctgaaaggattaaccaccagcagcggcgagccggtacagggtgtctacggctttgcaaagtcgctcctgaaagctctgaaagaagacggtgatgtggtgattgttgtctttgatgcgaaagcgccaagttttcgccacgaagcgtacgaagcttacaaagccgggcgtgctccaacgccggaagactttcctcgccaattggcgcttatgaaggaattagtggatttgcttggcctcgaacgcttggaagttcccggtttcgaggcagacgacgtattagcgactctcgcaaagaaagccgaacgtgagggctatgaagtccagatcttgacagcagatcgcgatcttttccagcttttatctccgcgcatctcggtgttacacccggaagggcatcgtatcaccccggaatggctctgggagaaatatggtttgcgtcccgaacaatgggtggattttcgcgccttagcaggcgatccgagcgacaatattccgggagttaaaggtatcggcgagaagacggcgctcaagctccttaaagaatgggggtcgttggagaacttgcttaagaatttagatcaggtcaaaccagagtcagtgcgtgagaagattcttgctcacctcgaagacctcaaattaagccgcgaattgtcccgtgtacgcaccgatttgccgctcgaagttgatttccgtcgccgccgcgaacctgactgggagggtcttaaagcgtttttagagcgtcttgaatttggttcgctcttgcatgaattcggccttttagaaagcccgttaccagccgaagaagcaccttggccaccgcccgagggcgcgtttttaggttaccgtttgagtcgcccggaaccgatgtgggccgaattactggctcttgcagcgtctgcccagggacgtgtgtatcgcgcggaagaccctcatggtgcgctccgcggcctcttcgaagtccgtggactccttgccaaagacttagctgttgttgcattgcgcgaaggtcttgatttacctccgactgatgatccaatgcttcttgcgtacctcttggacccgtcaaacacgacgcccgaaggcgtagcccgtcgttacggcggcgagtggaccgaagatgcagcgaaacgcgcgttattggccgaacgtttgcacgccaatttattaggacgtttgcaaggcgaggaacgtctcctctggctttacgaagaagtggagaaaccattgagtcgcgtgctcgcgcatatggaagctaccggtgtcaaattagacgtggcgtatttggagaatctcagccttgaagttgctgcccacatgcgccgcttggaggaagaagtattccgtttagcaggccattcctttcgccttaattctcgcgatcagttagaacgtgtgttgttcgatgaacttggtctccgtcctatcggcaagacagagaagaccggtaaacgtagcacttcagcggcggttttagaagctcttcgcgaagtccatcccattgtggacaagatcttgcaataccgcgaactcgcgaaattgaaaggcacctatattgaccgtcttccggcattagtccacccgaaaacgggacgcctccatacccgcttcaaccaaacagccacggcgaccggtcgtttgtcctcctctgatccaaaccttcagaatattccagtacgtaccccattgggccagaagatccgccgtgcgtttgtagctgaggagggttggcgtttagtggccctcgattatagccaaattgaattacgtgtccttgcccatctttctggcgatgagaacctcatccgcgtgtttcaggaaggcaaagacattcacactcaaacggcaagctggatgtttggattatcagctgaagcgatcgatcctttgatgcgtcgtgcagcgaagaccatcaatttcggtgttctctacggtatgagtgcctttcgtttgtcgcaggaattaggcattccctatgaagaagctgcggcgttcattcagaaatactttcaaagctatcccaaagttaaagcatggatcgagaagactctcgaagaaggccgcacacgtggttacgtagagaccttatttggacgtcgccgctatgttcccgatttaaacgctcgcgtgaaaggcaagcgtgaagccgccgaacgcatggcgttcaacatgcctgtacagggcacggcagctgacctcatgaaacttgcaatggtgcgcctttttccacaattgcgtgaagttggtgcccgcatgctcttgcaggtccacgatgaactcttgttagaagcgccaaaagagcgtgcggaagaggtggcagccctcgcgaaaaccgttatggaaggcgtgtggcccttagcggtgcctcttgaagtcgaagttggtattggcgaggattggctggctgccaaaggataatga

SEQ ID NO: 3010 - protein, 841 aa, synthetic construct
  REGION 1..841: note = Variant of DNA polymerase I from Thermus sp. strain 2.9
MHHHHHHGGSGVLPVFEPKGRVLLVDGHHLAYRNFFALKGLTTSSGEPVQGVYGFAKSLLKALKEDGDVVIVVFDAKAPSFRHEAYEAYKAGRAPTPEDFPRQLALMKELVDLLGLERLEVPGFEADDVLATLAKKAEREGYEVQILTADRDLFQLLSPRISVLHPEGHRITPEWLWEKYGLRPEQWVDFRALAGDPSDNIPGVKGIGEKTALKLLKEWGSLENLLKNLDQVKPESVREKILAHLEDLKLSRELSRVRTDLPLEVDFRRRREPDWEGLKAFLERLEFGSLLHEFGLLESPLPAEEAPWPPPEGAFLGYRLSRPEPMWAELLALAASAQGRVYRAEDPHGALRGLFEVRGLLAKDLAVVALREGLDLPPTDDPMLLAYLLDPSNTTPEGVARRYGGEWTEDAAKRALLAERLHANLLGRLQGEERLLWLYEEVEKPLSRVLAHMEATGVKLDVAYLENLSLEVAAHMRRLEEEVFRLAGHSFRLNSRDQLERVLFDELGLRPIGKTEKTGKRSTSAAVLEALREVHPIVDKILQYRELAKLKGTYIDRLPALVHPKTGRLHTRFNQTATATGRLSSSDPNLQNIPVRTPLGQKIRRAFVAEEGWRLVALDYSQIELRVLAHLSGDENLIRVFQEGKDIHTQTASWMFGLSAEAIDPLMRRAAKTINFGVLYGMSAFRLSQELGIPYEEAAAFIQKYFQSYPKVKAWIEKTLEEGRTRGYVETLFGRRRYVPDLNARVKGKREAAERMAFNMPVQGTAADLMKLAMVRLFPQLREVGARMLLQVHDELLLEAPKERAEEVAALAKTVMEGVWPLAVPLEVEVGIGEDWLAAKG

SEQ ID NO: 3011 - DNA, 2529 bp, synthetic construct
  misc_feature 1..2529: note = Variant of DNA polymerase I from Thermus sp. strain 2.9
  source 1..2529: mol_type = other DNA
atgcaccatcatcatcatcatggcggtagcggcgtgttaccggtgttcgagcctaaaggtcgcgtgcttctggttgatggccatcatctcgcgtatcgtaacttctttgccctgaaaggattaaccaccagcagcggcgagccggtacagggtgtctacggctttgcaaagtcgctcctgaaagctctgaaagaagacggtgatgtggtgattgttgtctttgatgcgaaagcgccaagttttcgccacgaagcgtacgaagcttacaaagccgggcgtgctccaacgccggaagactttcctcgccaattggcgcttatgaaggaattagtggatttgcttggcctcgaacgcttggaagttcccggtttcgaggcagacgacgtattagcgactctcgcaaagaaagccgaacgtgagggctatgaagtccagatcttgacagcagatcgcgatcttttccagcttttatctccgcgcatctcggtgttacacccggaagggcatcgtatcaccccggaatggctctgggagaaatatggtttgcgtcccgaacaatgggtggattttcgcgccttagcaggcgatccgagcgacaatattccgggagttaaaggtatcggcgagaagacggcgctcaagctccttaaagaatgggggtcgttggagaacttgcttaagaatttagatcaggtcaaaccagagtcagtgcgtgagaagattcttgctcacctcgaagacctcaaattaagccgcgaattgtcccgtgtacgcaccgatttgccgctcgaagttgatttccaacgccgccgcgaacctgactgggagggtcttaaagcgtttttagagcgtcttgaatttggttcgctcttgcatgaattcggccttttagaaagcccgttaccagccgaagaagcaccttggccaccgcccgagggcgcgtttttaggttaccgtttgagtcgcccggaaccgatgtgggccgaattactggctcttgcagcgtctgcccagggacgtgtgtatcgcgcggaagaccctcatggtgcgctccgcggcctcttcgaagtccgtggactccttgccaaagacttagctgttgttgcattgcgcgaaggtcttgatttacctccgactgatgatccaatgcttcttgcgtacctcttggacccgtcaaacacgacgcccgaaggcgtagcccgtcgttacggcggcgagtggaccgaagatgcagcgaaacgcgcgttattggccgaacgtttgcacgccaatttattaggacgtttgcaaggcgaggaacgtctcctctggctttacgaagaagtggagaaaccattgagtcgcgtgctcgcgcatatggaagctaccggtgtcaaattagacgtggcgtatttggaggcactcagccttgaagttgctgcccacatgcgccgcttggaggaagaagtattccgtttagcaggccattcctttcgccttaattctcgcgatcagttagaacgtgtgttgttcgatgaacttggtctccgtcctatcggcaagacagagaagaccggtaaacgtagcacttcagcggcggttttagaagctcttcgcgaagtccatcccattgtggacaagatcttgcagtaccgcgaactcgcgaaattgaaaggcacctatattgaccgtcttccggcattagtccacccgaaaacgggacgcctccatacccgcttcaaccaaacagccacggcgaccggtcgtttgtcctcctctgatccaaaccttcagaatattccagtacgtaccccattgggccagaagatccgccgtgcgtttgtagctgaggagggttggcgtttagtggccctcgattatagccaaattgaattacgtgtccttgcccatctttctggcgatgagaacctcatccgcgtgtttcaggaaggcaaagacattcacactcaaacggcaagctggatgtttggattatcagctgaagcgatcgatcctttgatgcgtcgtgcagcgaagaccatcaatttcggtgttctctacggtatgagtgcctttcgtttgtcgcaggaattaggcattccctatgaagaagctgcggcgttcattcagaaatactttcaaagctatcccaaagttaaagcatggatcgagaagactctcgaagaaggccgcacacgtggttacgtagagaccttatttggacgtcgccgctatgttcccgatttaaacgctcgcgtgaaaggcaagcgtgaagccgccgaacgcatggcgttcaacatgcctgtacagggcacggcagctgacctcatgaaacttgcaatggtgcgcctttttccacaattgcgtgaagttggtgcccgcatgctcttgcaggtccacgatgaactcttgttagaagcgccaaaagagcgtgcggaagaggtggcagccctcgcgaaagaagttatggaaggcgtgtggcccttagcggtgcctcttgaagtcgaagttggtattggcgaggattggctggctgccaaaggataatga

SEQ ID NO: 3012 - protein, 841 aa, synthetic construct
  REGION 1..841: note = Variant of DNA polymerase I from Thermus sp. strain 2.9
MHHHHHHGGSGVLPVFEPKGRVLLVDGHHLAYRNFFALKGLTTSSGEPVQGVYGFAKSLLKALKEDGDVVIVVFDAKAPSFRHEAYEAYKAGRAPTPEDFPRQLALMKELVDLLGLERLEVPGFEADDVLATLAKKAEREGYEVQILTADRDLFQLLSPRISVLHPEGHRITPEWLWEKYGLRPEQWVDFRALAGDPSDNIPGVKGIGEKTALKLLKEWGSLENLLKNLDQVKPESVREKILAHLEDLKLSRELSRVRTDLPLEVDFQRRREPDWEGLKAFLERLEFGSLLHEFGLLESPLPAEEAPWPPPEGAFLGYRLSRPEPMWAELLALAASAQGRVYRAEDPHGALRGLFEVRGLLAKDLAVVALREGLDLPPTDDPMLLAYLLDPSNTTPEGVARRYGGEWTEDAAKRALLAERLHANLLGRLQGEERLLWLYEEVEKPLSRVLAHMEATGVKLDVAYLEALSLEVAAHMRRLEEEVFRLAGHSFRLNSRDQLERVLFDELGLRPIGKTEKTGKRSTSAAVLEALREVHPIVDKILQYRELAKLKGTYIDRLPALVHPKTGRLHTRFNQTATATGRLSSSDPNLQNIPVRTPLGQKIRRAFVAEEGWRLVALDYSQIELRVLAHLSGDENLIRVFQEGKDIHTQTASWMFGLSAEAIDPLMRRAAKTINFGVLYGMSAFRLSQELGIPYEEAAAFIQKYFQSYPKVKAWIEKTLEEGRTRGYVETLFGRRRYVPDLNARVKGKREAAERMAFNMPVQGTAADLMKLAMVRLFPQLREVGARMLLQVHDELLLEAPKERAEEVAALAKEVMEGVWPLAVPLEVEVGIGEDWLAAKG

SEQ ID NO: 3013 - DNA, 2529 bp, synthetic construct
  misc_feature 1..2529: note = Variant of DNA polymerase I from Thermus sp. strain 2.9
  source 1..2529: mol_type = other DNA
atgcaccatcatcatcatcatggcggtagcggcgtgttaccggtgttcgagcctaaaggtcgcgtgcttctggttgatggccatcatctcgcgtatcgtaacttctttgccctgaaaggattaaccaccagcagcggcgagccggtacagggtgtctacggctttgcaaagtcgctcctgaaagctctgaaagaagacggtgatgtggtgattgttgtctttgatgcgaaagcgccaagttttcgccacgaagcgtacgaagcttacaaagccgggcgtgctccaacgccggaagactttcctcgccaattggcgcttatgaaggaattagtggatttgcttggcctcgaacgcttggaagttcccggtttcgaggcagacgacgtattagcgactctcgcaaagaaagccgaacgtgagggctatgaagtccagatcttgacagcagatcgcgatcttttccagcttttatctccgcgcatctcggtgttacacccggaagggcatcgtatcaccccggaatggctctgggagaaatatggtttgcgtcccgaacaatgggtggattttcgcgccttagcaggcgatccgagcgacaatattccgggagttaaaggtatcggcgagaagacggcgctcaagctccttaaagaatgggggtcgttggagaacttgcttaagaatttagatcaggtcaaaccagagtcagtgcgtgagaagattcttgctcacctcgaagacctcaaattaagccgcgaattgtcccgtgtacgcaccgatttgccgctcgaagttgatttccgtcgccgccgcgaacctgactgggagggtcttaaagcgtttttagagcgtcttgaatttggttcgctcttgcatgaattcggccttttagaaagcccgttaccagccgaagaagcaccttggccaccgcccgagggcgcgtttttaggttaccgtttgagtcgcccggaaccgatgtgggccgaattactggctcttgcagcgtctgcccagggacgtgtgtatcgcgcggaagaccctcatggtgcgctccgcggcctcttcgaagtccgtggactccttgccaaagacttagctgttgttgcattgcgcgaaggtcttgatttacctccgactgatgatccaatgcttcttgcgtacctcttggacccgtcaaacacgacgcccgaaggcgtagcccgtcgttacggcggcgagtggaccgaagatgcagcgaaacgcgcgttattggccgaacgtttgcacgccaatttattaggacgtttgcaaggcgaggaacgtctcctctggctttacgaagaagtggagaaaccattgagtcgcgtgctcgcgcatatggaagctaccggtgtcaaattagacgtggcgtatttggaggctctcagccttgaagttgctgcccacatgcgccgcttggaggaagaagtattccgtttagcaggccgttcctttcgccttaactctcgcgatcagttagaacgtgtgttgttcgatgaacttggtctccgtcctatcggcaagacagagaagaccggtaaacgtagcacttcacgtgcggttttagaagctcttcgcgaagtccatcccattgtggacaagatcttgcagtaccgcgaactcgcgaaattgaaaggcacctatattgaccgtcttccggcattagtccacccgaaaacgggacgcctccatacccgcttcaaccaaacagccacggcgaccggtcgtttgtcctcctctgatccaaaccttcagaatattccagtacgtaccccattgggccagaagatccgcaaagcgtttgtagctgaggagggttggcgtttagtggccctcgattatagccaaattgaattacgtgtccttgcccatctttctggcgatgagaacctcatccgcgtgtttcaggaaggcaaagacattcacactcaaacggcaagctggatgtttggattaagtgctgaagcgatcgatcctttgatgcgtcgtgcagcgaagaccatcaatttcggtgttctctacggtatgagtgcctttcgtttgtcgcaggaattaggcattccctatgaagaagctcaggcgttcattcagaaatactttcaaagctatcccaaagttaaagcatggatcgagaagactctcgaagaaggccgcacacgtggttacgtagagaccttatttggacgtcgccgctatgttcccgatttaaacgctcgcgtgaaaggcaagcgtgaagccgccgaacgcatggcgttcaacatgcctgtacagggcacggcagctgacctcatgaaacttgcaatggtgcgcctttttccacaattgcgtgaagttggtgcccgcatgctcttgcaggtccacgatgaactcttgttagaagcgccaaaagagcgtgcggaagaggtggcagccctcgcgaaagaagttatggaaggcgtgtggcccttagcggtgcctcttgaagtcgaagttggtattggcgaggattggctggctgccaaaggataatga

SEQ ID NO: 3014 - protein, 841 aa, synthetic construct
  REGION 1..841: note = Variant of DNA polymerase I from Thermus sp. strain 2.9
MHHHHHHGGSGVLPVFEPKGRVLLVDGHHLAYRNFFALKGLTTSSGEPVQGVYGFAKSLLKALKEDGDVVIVVFDAKAPSFRHEAYEAYKAGRAPTPEDFPRQLALMKELVDLLGLERLEVPGFEADDVLATLAKKAEREGYEVQILTADRDLFQLLSPRISVLHPEGHRITPEWLWEKYGLRPEQWVDFRALAGDPSDNIPGVKGIGEKTALKLLKEWGSLENLLKNLDQVKPESVREKILAHLEDLKLSRELSRVRTDLPLEVDFRRRREPDWEGLKAFLERLEFGSLLHEFGLLESPLPAEEAPWPPPEGAFLGYRLSRPEPMWAELLALAASAQGRVYRAEDPHGALRGLFEVRGLLAKDLAVVALREGLDLPPTDDPMLLAYLLDPSNTTPEGVARRYGGEWTEDAAKRALLAERLHANLLGRLQGEERLLWLYEEVEKPLSRVLAHMEATGVKLDVAYLEALSLEVAAHMRRLEEEVFRLAGRSFRLNSRDQLERVLFDELGLRPIGKTEKTGKRSTSRAVLEALREVHPIVDKILQYRELAKLKGTYIDRLPALVHPKTGRLHTRFNQTATATGRLSSSDPNLQNIPVRTPLGQKIRKAFVAEEGWRLVALDYSQIELRVLAHLSGDENLIRVFQEGKDIHTQTASWMFGLSAEAIDPLMRRAAKTINFGVLYGMSAFRLSQELGIPYEEAQAFIQKYFQSYPKVKAWIEKTLEEGRTRGYVETLFGRRRYVPDLNARVKGKREAAERMAFNMPVQGTAADLMKLAMVRLFPQLREVGARMLLQVHDELLLEAPKERAEEVAALAKEVMEGVWPLAVPLEVEVGIGEDWLAAKG

SEQ ID NO: 3015 - DNA, 2529 bp, synthetic construct
  misc_feature 1..2529: note = Variant of DNA polymerase I from Thermus sp. strain 2.9
  source 1..2529: mol_type = other DNA
atgcaccatcatcatcatcatggcggtagcggcgtgttaccggtgttcgagcctaaaggtcgcgtgcttctggttgatggccatcatctcgcgtatcgtaacttctttgccctgaaaggattaaccaccagcagcggcgagccggtacagggtgtctacggctttgcaaagtcgctcctgaaagctctgaaagaagacggtgatgtggtgattgttgtctttgatgcgaaagcgccaagttttcgccacgaagcgtacgaagcttacaaagccgggcgtgctccaacgccggaagactttcctcgccaattggcgcttatgaaggaattagtggatttgcttggcctcgaacgcttggaagttcccggtttcgaggcagacgacgtattagcgactctcgcaaagaaagccgaacgtgagggctatgaagtccagatcttgacagcagatcgcgatcttttccagcttttatctccgcgcatctcggtgttacacccggaagggcatcgtatcaccccggaatggctctgggagaaatatggtttgcgtcccgaacaatgggtggattttcgcgccttagcaggcgatccgagcgacaatattccgggagttaaaggtatcggcgagaagacggcgctcaagctccttaaagaatgggggtcgttggagaacttgcttaagaatttagatcaggtcaaaccagagtcagtgcgtgagaagattcttgctcacctcgaagacctcaaattaagccgcgaattgtcccgtgtacgcaccgatttgccgctcgaagttgatttccgccgccgccgcgaacctgactgggagggtcttaaagcgtttttagagcgtcttgaatttggttcgctcttgcatgaattcggccttttagaaagcccgttaccagccgaagaagcaccttggccaccgcccgagggcgcgtttttaggttaccgtttgagtcgcccggaaccgatgtgggccgaattactggctcttgcagcgtctgcccagggacgtgtgtatcgcgcggaagaccctcatggtgcgctccgcggcctcttcgaagtccgtggactccttgccaaagacttagctgttgttgcattgcgcgaaggtcttgatttacctccgactgatgatccaatgcttcttgcgtacctcttggacccgtcaaacacgacgcccgaaggcgtagcccgtcgttacggcggcgagtggaccgaagatgcagcgaaacgcgcgttattggccgaacgtttgcacgccaatttattaggacgtttgcaaggcgaggaacgtctcctctggctttacgaagaagtggagaaaccattgagtcgcgtgctcgcgcatatggaagctaccggtgtcaaattagacgtggcgtatttggaggctctcagccttgaagttgctgcccacatgcgccgcttggaggaagaagtattccgtttagcaggccattcctttcgccttaattctcgcgatcagttagaacgtgtgttgttcgatgaacttggtctccctcctatcggcaagacagagaagaccggtaaacgtagcacttcagcggcggttttagaagctcttcgcgaagtccatcccattgtggacaagatcttgcaataccgcgaactcgcgaaattgaaaggcacctatattgaccgtcttccggcattagtccacccgaaaacgggacgcctccatacccgcttcaaccaaacagccacggcgaccggtcgtttgtcctcctctgatccaaaccttcagaatattccagtacgtaccccattgggccagaagatccgccgtgcgtttgtagctgaggagggttggcgtttagtggccctcgattatagccaaattgaattacgtgtccttgcccatctttctggcgatgagaacctcatccgcgtgtttcaggaaggcaaagacattcacactcaaacggcaagctggatgtttggattatcagctgaagcgatcgatcctttgatgcgtcgtgcagcgaagaccatcaatttcggtgttctctacggtatgagtgcctttcgtttgtcgcaggaattaggcattccctatgaagaagctcaggcgttcattcagaaatactttcaaagctatcccaaagttaaagcatggatcgagaagactctcgaagaaggccgcacacgtggttacgtagagaccttatttggacgtcgccgctatgttcccgatttaaacgctcgcgtgaaaggcaagcgtgaagccgccgaacgcatggcgttcaacatgcctgtacagggcacggcagctgacctcatgaaacttgcaatggtgcgcctttttccacaattgcgtgaagttggtgcccgcatgctcttgcaggtccacgatgaactcttgttagaagcgccaaaagagcgtgcggaagaggtggcagccctcgcgaaagaagttatggaaggcgtgtggcccttagcggtgcctcttgaagtcgaagttggtattggcgaggattggctggctgccaaaggataatga

SEQ ID NO: 3016 - protein, 841 aa, synthetic construct
  REGION 1..841: note = Variant of DNA polymerase I from Thermus sp. strain 2.9
MHHHHHHGGSGVLPVFEPKGRVLLVDGHHLAYRNFFALKGLTTSSGEPVQGVYGFAKSLLKALKEDGDVVIVVFDAKAPSFRHEAYEAYKAGRAPTPEDFPRQLALMKELVDLLGLERLEVPGFEADDVLATLAKKAEREGYEVQILTADRDLFQLLSPRISVLHPEGHRITPEWLWEKYGLRPEQWVDFRALAGDPSDNIPGVKGIGEKTALKLLKEWGSLENLLKNLDQVKPESVREKILAHLEDLKLSRELSRVRTDLPLEVDFRRRREPDWEGLKAFLERLEFGSLLHEFGLLESPLPAEEAPWPPPEGAFLGYRLSRPEPMWAELLALAASAQGRVYRAEDPHGALRGLFEVRGLLAKDLAVVALREGLDLPPTDDPMLLAYLLDPSNTTPEGVARRYGGEWTEDAAKRALLAERLHANLLGRLQGEERLLWLYEEVEKPLSRVLAHMEATGVKLDVAYLEALSLEVAAHMRRLEEEVFRLAGHSFRLNSRDQLERVLFDELGLPPIGKTEKTGKRSTSAAVLEALREVHPIVDKILQYRELAKLKGTYIDRLPALVHPKTGRLHTRFNQTATATGRLSSSDPNLQNIPVRTPLGQKIRRAFVAEEGWRLVALDYSQIELRVLAHLSGDENLIRVFQEGKDIHTQTASWMFGLSAEAIDPLMRRAAKTINFGVLYGMSAFRLSQELGIPYEEAQAFIQKYFQSYPKVKAWIEKTLEEGRTRGYVETLFGRRRYVPDLNARVKGKREAAERMAFNMPVQGTAADLMKLAMVRLFPQLREVGARMLLQVHDELLLEAPKERAEEVAALAKEVMEGVWPLAVPLEVEVGIGEDWLAAKG

SEQ ID NO: 3017 - DNA, 2529 bp, synthetic construct
  misc_feature 1..2529: note = Variant of DNA polymerase I from Thermus sp. strain 2.9
  source 1..2529: mol_type = other DNA
atgcaccatcatcatcatcatggcggtagcggcgtgttaccggtgttcgagcctaaaggtcgcgtgcttctggttgatggccatcatctcgcgtatcgtaacttctttgccctgaaaggattaaccaccagcagcggcgagccggtacagggtgtctacggctttgcaaagtcgctcctgaaagctctgaaagaagacggtgatgtggtgattgttgtctttgatgcgaaagcgccaagttttcgccacgaagcgtacgaagcttacaaagccgggcgtgctccaacgccggaagactttcctcgccaattggcgcttatgaaggaattagtggatttgcttggcctcgaacgcttggaagttcccggtttcgaggcagacgacgtattagcgactctcgcaaagaaagccgaacgtgagggctatgaagtccagatcttgacagcagatcgcgatcttttccagcttttatctccgcgcatctcggtgttacacccggaagggcatcgtatcaccccggaatggctctgggagaaatatggtttgcgtcccgaacaatgggtggattttcgcgccttagcaggcgatccgagcgacaatattccgggagttaaaggtatcggcgagaagacggcgctcaagctccttaaagaatgggggtcgttggagaacttgcttaagaatttagatcaggtcaaaccagagtcagtgcgtgagaagattcttgctcacctcgaagacctcaaattaagccgcgaattgtcccgtgtacgcaccgatttgccgctcgaagttgatttccgtcgccgccgcgaacctgactgggagggtcttaaagcgtttttagagcgtcttgaatttggttcgctcttgcatgaattcggccttttagaaagcccgttaccagccgaagaagcaccttggccaccgcccgagggcgcgtttttaggttaccgtttgagtcgcccggaaccgatgtgggccgaattactggctcttgcagcgtctgcccagggacgtgtgtatcgcgcggaagaccctcatggtgcgctccgcggcctcttcgaagtccgtggactccttgccaaagacttagctgttgttgcattgcgcgaaggtcttgatttacctccgactgatgatccaatgcttcttgcgtacctcttggacccgtcaaacacgacgcccgaaggcgtagcccgtcgttacggcggcgagtggaccgaagatgcagcgaaacgcgcgttattggccgaacgtttgcacgccaatttattaggacgtttgcaaggcgaggaacgtctcctctggctttacgaagaagtggagaaaccattgagtcgcgtgctcgcgcatatggaagctaccggtgtcaaattagacgtggcgtatttggagaatctcagccttgaagttgctgcccacatgcgccgcttggaggaagaagtattccgtttagcaggccattcctttcgccttaattctcgcgatcagttagaacgtgtgttgttcgatgaacttggtctccctcctatcggcaagacagagaagaccggtaaacgtagcacttcagcggcggttttagaagctcttcgcgaagtccatcccattgtggacaagatcttgcagtaccgcgaactcgcgaaattgaaaggcacctatattgaccgtcttccggcattagtccacccgaaaacgggacgcctccatacccgcttcaaccaaacagccacggcgaccggtcgtttgtcctcctctgatccaaaccttcagaatattccagtacgtaccccattgggccagaagatccgccgtgcgtttgtagctgaggagggttggcgtttagtggccctcgattatagccaaattgaattacgtgtccttgcccatctttctggcgatgagaacctcatccgcgtgtttcaggaaggcaaagacattcacactcaaacggcaagctggatgtttggattatcagctgaagcgatcgatcctttgatgcgtcgtgcagcgaagaccatcaatttcggtgttctctacggtatgagtgcctttcgtttgtcgcaggaattaggcattccctatgaagaagctcaggcgttcattcagaaatactttcaaagctatcccaaagttaaagcatggatcgagaagactctcgaagaaggccgcacacgtggttacgtagagaccttatttggacgtcgccgctatgttcccgatttaaacgctcgcgtgaaaggcaagcgtgaagccgccgaacgcatggcgttcaacatgcctgtacagggcacggcagctgacctcatgaaacttgcaatggtgcgcctttttccacaattgcgtgaagttggtgcccgcatgctcttgcaggtccacgatgaactcttgttagaagcgccaaaagagcgtgcggaagaggtggcagccctcgcgaaagaagttatggaaggcgtgtggcccttagcggtgcctcttgaagtcgaagttggtattggcgaggattggctggctgccaaaggataatga

SEQ ID NO: 3018 - protein, 841 aa, synthetic construct
  REGION 1..841: note = Variant of DNA polymerase I from Thermus sp. strain 2.9
MHHHHHHGGSGVLPVFEPKGRVLLVDGHHLAYRNFFALKGLTTSSGEPVQGVYGFAKSLLKALKEDGDVVIVVFDAKAPSFRHEAYEAYKAGRAPTPEDFPRQLALMKELVDLLGLERLEVPGFEADDVLATLAKKAEREGYEVQILTADRDLFQLLSPRISVLHPEGHRITPEWLWEKYGLRPEQWVDFRALAGDPSDNIPGVKGIGEKTALKLLKEWGSLENLLKNLDQVKPESVREKILAHLEDLKLSRELSRVRTDLPLEVDFRRRREPDWEGLKAFLERLEFGSLLHEFGLLESPLPAEEAPWPPPEGAFLGYRLSRPEPMWAELLALAASAQGRVYRAEDPHGALRGLFEVRGLLAKDLAVVALREGLDLPPTDDPMLLAYLLDPSNTTPEGVARRYGGEWTEDAAKRALLAERLHANLLGRLQGEERLLWLYEEVEKPLSRVLAHMEATGVKLDVAYLENLSLEVAAHMRRLEEEVFRLAGHSFRLNSRDQLERVLFDELGLPPIGKTEKTGKRSTSAAVLEALREVHPIVDKILQYRELAKLKGTYIDRLPALVHPKTGRLHTRFNQTATATGRLSSSDPNLQNIPVRTPLGQKIRRAFVAEEGWRLVALDYSQIELRVLAHLSGDENLIRVFQEGKDIHTQTASWMFGLSAEAIDPLMRRAAKTINFGVLYGMSAFRLSQELGIPYEEAQAFIQKYFQSYPKVKAWIEKTLEEGRTRGYVETLFGRRRYVPDLNARVKGKREAAERMAFNMPVQGTAADLMKLAMVRLFPQLREVGARMLLQVHDELLLEAPKERAEEVAALAKEVMEGVWPLAVPLEVEVGIGEDWLAAKG

SEQ ID NO: 3019 - DNA, 2529 bp, synthetic construct
  misc_feature 1..2529: note = Variant of DNA polymerase I from Thermus sp. strain 2.9
  source 1..2529: mol_type = other DNA
atgcaccatcatcatcatcatggcggtagcggcgtgttaccggtgttcgagcctaaaggtcgcgtgcttctggttgatggccatcatctcgcgtatcgtaacttctttgccctgaaaggattaaccaccagcagcggcgagccggtacagggtgtctacggctttgcaaagtcgctcctgaaagctctgaaagaagacggtgatgtggtgattgttgtctttgatgcgaaagcgccaagttttcgccacgaagcgtacgaagcttacaaagccgggcgtgctccaacgccggaagactttcctcgccaattggcgcttatgaaggaattagtggatttgcttggcctcgaacgcttggaagttcccggtttcgaggcagacgacgtattagcgactctcgcaaagaaagccgaacgtgagggctatgaagtccagatcttgacagcagatcgcgatcttttccagcttttatctccgcgcatctcggtgttacacccggaagggcatcgtatcaccccggaatggctctgggagaaatatggtttgcgtcccgaacaatgggtggattttcgcgccttagcaggcgatccgagcgacaatattccgggagttaaaggtatcggcgagaagacggcgctcaagctccttaaagaatgggggtcgttggagaacttgcttaagaatttagatcaggtcaaaccagagtcagtgcgtgagaagattcttgctcacctcgaagacctcaaattaagccgcgaattgtcccgtgtacgcaccgatttgccgctcgaagttgatttccgtcgccgccgcgaacctgactgggagggtcttaaagcgtttttagagcgtcttgaatttggttcgctcttgcatgaattcggccttttagaaagcccgttaccagccgaagaagcaccttggccaccgcccgaaggcgcgtttttaggttaccgtttgagtcgcccggaaccgatgtgggccgaattactggctcttgcagcgtctgcccagggacgtgtgtatcgcgcggaagaccctcatggtgcgctccgcggcctcttcgaagtccgtggactccttgccaaagacttagctgttgttgcattgcgcgaaggtcttgatttacctccgactgatgatccaatgcttcttgcgtacctcttggacccgtcaaacacgacgcccgaaggcgtagcccgtcgttacggcggcgagtggaccgaagatgcagcgaaacgcgcgttattggccgaacgtttgcacgaaaatttattaggacgtttgcaaggcgaggaacgtctcctctggctttacgaagaagtggacaaaccattgagtcgcgtgctcgggcatatggaagctaccggtgtcaaattagacgtggcgtatttggaggctctcagccttgaagttgctgcccacatgcgccgcttggaggaagaagtattccgtttagcaggccactcctttcgccttagctctcgcgatcagttagaacgtgtgttgttcgatgaacttggtctccgtcctatcggcaagacagagaagaccggtaaacgtagcacttcagcggcggttttagaagctcttcgcgaagtccatcccattgtggacaagatcttgcaataccgcgaactcgcgaaattgaaaggcacctatattgaccgtcttccggcattagtccacccgaaaacgggacgcctccatacccgcttcaaccaaacagccacggcgaccggtcgtttgtcctcctctgatccaaaccttcagaatattccagtacgtaccccattgggccagaagatccgccgtgcgtttgtagctgaggagggttggcgtttagtggccctcgattatagccaaattgaattacgtgtccttgcccatctttctggcgatgagaacctcatccgcgtgtttcaggaaggcaaagacattcacactcaaacggcaagctggatgtttggattatcagctgaagcgatcgatcctttgatgcgtcgtgcagcgaagaccatcaatttcggtgttctctacggtatgagtgcctttcgtttgtcgcaggaattaggcattccctatgaagaagctgcggcgttcattcagaaatactttcaaagctatcccaaagttaaagcatggatcgagaagactctcgaagaaggccgcacacgtggttacgtagagaccttatttggacgtcgccgctatgttcccgatttaaacgctcgcgtgaaaggcaagcgtgaagccgccgaacgcatggcgttcaacatgcctgtacagggcacggcagctgacctcatgaaacttgcaatggtgcgcctttttccacaattgcgtgaagttggtgcccgcatgctcttgcaggtccacgatgaactcttgttagaagcgccaaaagagcgtgcggaagaggtggcagccctcgcgaaagaagttatggaaggcgtgtggcccttagcggtgcctcttgaagtcgaagttggtattggcgaggattggctggctgccaaaggataatga

SEQ ID NO: 3020 - protein, 841 aa, synthetic construct
  REGION 1..841: note = Variant of DNA polymerase I from Thermus sp. strain 2.9
MHHHHHHGGSGVLPVFEPKGRVLLVDGHHLAYRNFFALKGLTTSSGEPVQGVYGFAKSLLKALKEDGDVVIVVFDAKAPSFRHEAYEAYKAGRAPTPEDFPRQLALMKELVDLLGLERLEVPGFEADDVLATLAKKAEREGYEVQILTADRDLFQLLSPRISVLHPEGHRITPEWLWEKYGLRPEQWVDFRALAGDPSDNIPGVKGIGEKTALKLLKEWGSLENLLKNLDQVKPESVREKILAHLEDLKLSRELSRVRTDLPLEVDFRRRREPDWEGLKAFLERLEFGSLLHEFGLLESPLPAEEAPWPPPEGAFLGYRLSRPEPMWAELLALAASAQGRVYRAEDPHGALRGLFEVRGLLAKDLAVVALREGLDLPPTDDPMLLAYLLDPSNTTPEGVARRYGGEWTEDAAKRALLAERLHENLLGRLQGEERLLWLYEEVDKPLSRVLGHMEATGVKLDVAYLEALSLEVAAHMRRLEEEVFRLAGHSFRLSSRDQLERVLFDELGLRPIGKTEKTGKRSTSAAVLEALREVHPIVDKILQYRELAKLKGTYIDRLPALVHPKTGRLHTRFNQTATATGRLSSSDPNLQNIPVRTPLGQKIRRAFVAEEGWRLVALDYSQIELRVLAHLSGDENLIRVFQEGKDIHTQTASWMFGLSAEAIDPLMRRAAKTINFGVLYGMSAFRLSQELGIPYEEAAAFIQKYFQSYPKVKAWIEKTLEEGRTRGYVETLFGRRRYVPDLNARVKGKREAAERMAFNMPVQGTAADLMKLAMVRLFPQLREVGARMLLQVHDELLLEAPKERAEEVAALAKEVMEGVWPLAVPLEVEVGIGEDWLAAKG
